United States Patent Application Publication US 2014/0259212 A1 - sequence listing, part 10

SEQ ID NO: 31358 - DNA, 1629 bp, Colwellia psychrerythraea
  CDS (1)..(1629): transl_table=11
atgacaactagatatatttttgtaactggcggtgtagtatcgtctcttggtaaaggcattgccgcagcctcattggcagcaattcttgaagcgcgtggtttaaaagttaccatgctgaaactagatccgtatattaacgttgatccaggtaccatgagccctatacaacatggcgaagtttttgttaccgaagatggcgcagaaaccgatcttgatttaggccattatgagcgctttatccgcaccaaaatgaccaaacgtaataacttcacttcggggcgaatttaccaagatgtgttagcccgcgagcgtaaaggtgaatttttaggcgctaccatccaagttattcctcatatcactaacgatattaaacgtcgtgttattgaaggtgctgaaggttacgatatcgccatggtagaaataggcggtacggttggtgatatggaatcacaacctttcttagaagctattcgtcaattggcattagaggtaggtcgtgatcgtgctatgtttatgcatttgaccttagtgccatatttagcagcagcaggtgaaatcaaaactaaaccaacacagcactcagtaaaagatttacgctctatcggtatttttcctgacattttagtatgtcgttcagaccgcgctattcctaacgccgaacgcgctaaaatatctctcttcactaatgttgaagagaaagcggttgtatcaatgcgtgatgtagacagtatttataagattcctgctttattaaaagctcaaggtaccgatgaaatagttgttaagcgatttggtttagatgtacctgaagccgacttaactgaatgggaagaagtgctttaccatgaagcaaatcctatcggtgaagtgactattggtatggttggtaaatacactgaattacctgatgcgtacaaatcagtaaacgaagcgttaaaacatgcaggtcttaaaaaccaagtcactgtaaatattaaatacattgactcgcaagatgtagaagtcaaaggtgttgaaatcttagctaacttggatgctattttagttcctggtggtttcggtgaacgtggtgttgaaggtaaaattttaacggcacaatatgcgcgtgaaaacaaagtaccttatttaggtatttgtttaggtatgcaagtagccttaattgaatttgctcgtaatgttgccggtttaactgatgcgcacagtactgaatttaatagcgaaactccacacccagtggttggtttaatcagtgaatggttagacgaagaaggccaagttgagtaccgaaatgagcaatcagatttaggtggtactatgcgtttaggttcacaattgtgccacttggtgaaaggtaccaaggcttgcgacgtatatggtagtgaaacaatcaatgagagacaccgtcatcgttttgaggtaaataataactaccgagaacaattaagcaaagcaggtttgattttctcgggtttatcgtcagataaaagtttagttgaggtgattgaaatagcggatcatccatggtttattgcgggtcaattccatcctgagtttaattctactccacgtgatggtcacccgttattcgaaagctttgttgcagcgagttttaaactgcaaaaaagctaa

SEQ ID NO: 31359 - protein, 542 aa, Colwellia psychrerythraea
MTTRYIFVTGGVVSSLGKGIAAASLAAILEARGLKVTMLKLDPYINVDPGTMSPIQHGEVFVTEDGAETDLDLGHYERFIRTKMTKRNNFTSGRIYQDVLARERKGEFLGATIQVIPHITNDIKRRVIEGAEGYDIAMVEIGGTVGDMESQPFLEAIRQLALEVGRDRAMFMHLTLVPYLAAAGEIKTKPTQHSVKDLRSIGIFPDILVCRSDRAIPNAERAKISLFTNVEEKAVVSMRDVDSIYKIPALLKAQGTDEIVVKRFGLDVPEADLTEWEEVLYHEANPIGEVTIGMVGKYTELPDAYKSVNEALKHAGLKNQVTVNIKYIDSQDVEVKGVEILANLDAILVPGGFGERGVEGKILTAQYARENKVPYLGICLGMQVALIEFARNVAGLTDAHSTEFNSETPHPVVGLISEWLDEEGQVEYRNEQSDLGGTMRLGSQLCHLVKGTKACDVYGSETINERHRHRFEVNNNYREQLSKAGLIFSGLSSDKSLVEVIEIADHPWFIAGQFHPEFNSTPRDGHPLFESFVAASFKLQKS

SEQ ID NO: 31360 - DNA, 1680 bp, Corynebacterium efficiens
  CDS (1)..(1680): transl_table=11
atgtccacctcgcgcaccaccacaaacaacaagcgacacaccaaacatgtgttcgtcaccgggggagtcgtctcctccctgggcaaggggctgaccgccgccagcctcggacagctgctcatcgcccgcgggctcaacgtcaccatgcagaagctggatccctacctcaatgtcgaccccggcaccatgaaccccttcgagcacggtgaggtcttcgtcaccgaggatggcgcggaaaccgacctggatctgggacactacgaacgcttcctcaaccgcaacctcaccgccaacgccaacgtgaccacgggcaaggtctattccacggtcatcgcccgggaacgccggggcgggtacctgggtcgcaccgtgcaggtcatcccgcacatcaccgatgagatcaaggcccgtatcctcgcgatgggggatccggatgaacacggggtggttcccgatgtggtgatctccgaggtcgggggcaccgtgggggatatcgaatcccagccgtttctcgaggccgcccgccaggtccgccaggagatcgggcgggagaactgtttcttcatccactgctcgctggtgccctacctggccacctcgggcgagttgaagaccaaacccacccagcactcggtcgccgagctgcgctccatcggtatccttccggatgcgctcgtgctgcgctgtgaccgtgaggtgccggaggccctcaagaccaagatcgccctgatgtgtgatgtggacaccgacggtgtggtgtcctgcccggactccgaatccatctacaccatccccgagacgctctaccacgagcatctggacaccttcctcattcgccggctggacctgccgttccgggatgtggactggacggggtggcgtgacctgttggaccgcgtccaccacccggagcgggagatcaccgtcggtatcgtcggcaagtatgtggacctgccggatgcctacctctcggtcgtcgaggccatccgcgcggcgggatacgcccaccgcacccgcacccggatcacgtggataacctccgatgactgcaccaccccggcaggcgcggccaccgcactgggcggggtggatgcccttgtcatccccggtgggttcggcgcccgtggcatcgagggcaagatcgcggcggtgacctacgcgcgggaacaccgcatcccgctgctgggactgtgcctggggctgcagtgcgtggtcatcgaggccgcccgccaggccgggttggagcaggccacctccaccgagttcgatcccggtgcggcccagccggtcatctccacgatggctgagcagcaggccgcggtgtccgggcaggcggatctgggtggtaccatgcgcctggggtcctacccggcgacactggagcaggggtcgttggtcgcgcagctgtatggcatcacggaggtctccgagcgccaccgccaccgctatgaggtcaacaatgcctaccgcacgcagatcgggcagcggtccccgttgatcttctcaggaacctcaccggatggacacctggtcgagttcgtcgaatacgaccgcgcggtccacccgttcctggtggccacccaggcacaccccgagtacaaatcccggcccacccaggcgcacccgttgttctccgggctggtggccgccgccctcgccgccgcggtcaccgatgcctga

SEQ ID NO: 31361 - protein, 559 aa, Corynebacterium efficiens
MSTSRTTTNNKRHTKHVFVTGGVVSSLGKGLTAASLGQLLIARGLNVTMQKLDPYLNVDPGTMNPFEHGEVFVTEDGAETDLDLGHYERFLNRNLTANANVTTGKVYSTVIARERRGGYLGRTVQVIPHITDEIKARILAMGDPDEHGVVPDVVISEVGGTVGDIESQPFLEAARQVRQEIGRENCFFIHCSLVPYLATSGELKTKPTQHSVAELRSIGILPDALVLRCDREVPEALKTKIALMCDVDTDGVVSCPDSESIYTIPETLYHEHLDTFLIRRLDLPFRDVDWTGWRDLLDRVHHPEREITVGIVGKYVDLPDAYLSVVEAIRAAGYAHRTRTRITWITSDDCTTPAGAATALGGVDALVIPGGFGARGIEGKIAAVTYAREHRIPLLGLCLGLQCVVIEAARQAGLEQATSTEFDPGAAQPVISTMAEQQAAVSGQADLGGTMRLGSYPATLEQGSLVAQLYGITEVSERHRHRYEVNNAYRTQIGQRSPLIFSGTSPDGHLVEFVEYDRAVHPFLVATQAHPEYKSRPTQAHPLFSGLVAAALAAAVTDA

SEQ ID NO: 31362 - DNA, 1665 bp, Corynebacterium glutamicum
  CDS (1)..(1665): transl_table=11
atgacctctagtcgaaaagtccgtcccaccaaacacattttcgtcaccggtggagttgtttcctcactcggcaaaggcctgaccgcagcaagccttggtcaattgctgattgcacggggactgtcggtgaccatgcagaagctggatccatacctcaatgttgatccgggcaccatgaatccttttgaacacggtgaagtctttgtcaccgaagacggggcagaaacagacctggatttgggccactacgagcgtttcctcgatcgcaacctggggctcaacgccaatgtcaccaccggcaaggtgtattccactgtgatcgccaaggagcgcaggggagagtacctgggtaaaactgtgcaggtcatcccacacatcactgatgagatcaaagctcgtattttgagcatgggcgaaccagatgctcatggtaacgccccagacgtggtgatctctgaggtcggtggcaccgtcggtgacattgaatcccagccattccttgaagcagctcgccaggtacgccatgaaattggtcgtgaaaactgcttcttcatccactgttctttggtgccatacttggctacctcaggtgagctgaagaccaaacccacccagcattctgtcgcagagctgcgcggcatcggtattttgccggatgctctcgtgcttcgttgcgatcgggaggtccctcaaggtctgaaagataagatcgcgatgatgtgcgatgttgattatgaaggcgttgtatcttgccctgattccagttctatttacaacattccagatgtcctctaccgcgagcacctggacaccttcattattcgtcgcctgggccttccgttccgtgatgttgactggagcacctggcacgatctgctggaacgggtgaacaacccacgccatgagctcaccgtcggcatcgtgggcaagtacattgatcttcccgatgcttatctctcagtggtggaagctgttcgcgctgcaggctacgccaattggacgcgcaccaatatcaagtggattacctcagatgattgcgaaaccccatctggcgccatgaaagcgctcagcggtttggatgccatcgtggttcccggaggtttcggtatccgaggtatcgaaggcaaaatcggtgcgattacgtttgcacgtgagcacaagatcccgcttcttggcctatgccttggcctgcagtgcaccgtcatcgaggcagcacgccaggcaggactggagcaggcatcatccactgagtttgacccagctgcaacgcagccagtgatcgccaccatggaagagcagaaagctgctgtgtcgggtgaagctgatctgggtggcaccatgcgtcttggcgcatatcctgcaaccctggaggaaggctccttagtagcggaactgtatggcacaacggaagtctccgagcgccaccgtcaccgctatgaggtcaataatgcctaccgcgcccagattgctgaaggttcagatttggtcttctccggaacctcacctgatggacatttggtggagttcgtggagtaccccaaagaggtgcatccttatctggtggcaacccaggcgcaccctgagtacaaatctcgtccaacccatgctcatccactgttttacggcctggtgaagaccgctttggagctgcgtgtccacccttag

SEQ ID NO: 31363 - protein, 554 aa, Corynebacterium glutamicum
MTSSRKVRPTKHIFVTGGVVSSLGKGLTAASLGQLLIARGLSVTMQKLDPYLNVDPGTMNPFEHGEVFVTEDGAETDLDLGHYERFLDRNLGLNANVTTGKVYSTVIAKERRGEYLGKTVQVIPHITDEIKARILSMGEPDAHGNAPDVVISEVGGTVGDIESQPFLEAARQVRHEIGRENCFFIHCSLVPYLATSGELKTKPTQHSVAELRGIGILPDALVLRCDREVPQGLKDKIAMMCDVDYEGVVSCPDSSSIYNIPDVLYREHLDTFIIRRLGLPFRDVDWSTWHDLLERVNNPRHELTVGIVGKYIDLPDAYLSVVEAVRAAGYANWTRTNIKWITSDDCETPSGAMKALSGLDAIVVPGGFGIRGIEGKIGAITFAREHKIPLLGLCLGLQCTVIEAARQAGLEQASSTEFDPAATQPVIATMEEQKAAVSGEADLGGTMRLGAYPATLEEGSLVAELYGTTEVSERHRHRYEVNNAYRAQIAEGSDLVFSGTSPDGHLVEFVEYPKEVHPYLVATQAHPEYKSRPTHAHPLFYGLVKTALELRVHP

SEQ ID NO: 31364 - DNA, 1668 bp, Coxiella burnetii
  CDS (1)..(1668): transl_table=11
atgacacgatatattttcatcaccggcggggtggtttcttccttggggaagggcatcacatccgcctcactaggggctattcttgaagcgcaagggctcacggtcacgctccttaaacttgatccatacatcaacgttgatcccggcaccatgagcccctttcagcacggtgaggtgtttgtcaccgaggatggggcggaaaccgatctggatttgggtcattatgagcgttttgtaaatgcgaccatgacccggaaaaacaatttcaccacaggtcgtgtttatgctgatgtaatccgtaaggaaaggcgcggtgattatttgggagggactatccaggtcatccctcatattaccgatgagatcaaggcgaagatccgggaaggagcggacggcgctgacgtagcgctcgttgaggtaggtggcacggtcggagacatcgaatctttaccttttctagaagcaattcgccagatgcgaattgagcttggcgatcagcagaccttgtttattcacctaaccctcgttccttatgtggctgtcgcgggcgaaattaaaacaaaacccacgcagcattccgtaaaagaattgcgttccattggtattcagccggatattttggtttgtcgttccgaacaaccgttgcccgacgctgaacgggcgaaaattgctttatttaccaacgttcctgagccgagtgtgatttccttatcggatgtgaaatccatttacgaaatcccgttaattttgcgtgaccaaggtttggggaatcgcgtctgcgaaaaattaaatattaaagcaacagcggctgatctggatgattggaaaaaggtggtccaagcccagaaaaatcctcgccatacggtgaccgttgcagtggtcgggaaatacgtggatcttgaagactcttataaatcattaagcgaagccttaattcacgccgggatacacacacagacgcgggtggtgattgaatacattgattcagaagcgattgaattacatggtacggaactattaaagaaagtcgatgcgattttagtgccgggaggatttggttctcgaggcatcgaaggaaaaattttagcagcacaatatgcccgcgaaaatggcatcccttatttcggtatttgtttgggaatgcagattgccataattgaatttgctcgggataaagcccaaatggagaatgccaacagcacggagttcgacccgaaaacccccttcccagtggttgcgctagtcagcgaatggatggcaaaagaagggatcattgaaaaacgaaaatggggagacgacttaggggggacaatgcggctaggggggcagccttgtcggctaaagattgactcgctggcaaggcgactttatggcgaagatagagtgattgaacgccatcgccaccgttacgaggttaacaacgacttgattggagagctggaaaaaaaggggcttgtgatttcaggtcgctccattgatgaccgtttggtggaaatgatcgaacttgccgatcacccctggtttgtcggttgtcaatttcatcccgaatttacatccacgccgcgaaaaggccatcctctttttatcggcttcattaaagccggattggcagcaaaagaggccaaaaaagctgttttggcagccccttcgcaggaaaaaacggactaa

SEQ ID NO: 31365 - protein, 555 aa, Coxiella burnetii
MTRYIFITGGVVSSLGKGITSASLGAILEAQGLTVTLLKLDPYINVDPGTMSPFQHGEVFVTEDGAETDLDLGHYERFVNATMTRKNNFTTGRVYADVIRKERRGDYLGGTIQVIPHITDEIKAKIREGADGADVALVEVGGTVGDIESLPFLEAIRQMRIELGDQQTLFIHLTLVPYVAVAGEIKTKPTQHSVKELRSIGIQPDILVCRSEQPLPDAERAKIALFTNVPEPSVISLSDVKSIYEIPLILRDQGLGNRVCEKLNIKATAADLDDWKKVVQAQKNPRHTVTVAVVGKYVDLEDSYKSLSEALIHAGIHTQTRVVIEYIDSEAIELHGTELLKKVDAILVPGGFGSRGIEGKILAAQYARENGIPYFGICLGMQIAIIEFARDKAQMENANSTEFDPKTPFPVVALVSEWMAKEGIIEKRKWGDDLGGTMRLGGQPCRLKIDSLARRLYGEDRVIERHRHRYEVNNDLIGELEKKGLVISGRSIDDRLVEMIELADHPWFVGCQFHPEFTSTPRKGHPLFIGFIKAGLAAKEAKKAVLAAPSQEKTD

SEQ ID NO: 31366 - DNA, 1620 bp, Cytophaga hutchinsonii
  CDS (1)..(1620): transl_table=11
atgtctgcaactaaatatattttcgtaaccggcggggttacatcatcactcggaaaaggcattgtagccgcttctctcgccaaacttcttcaagcaagaggtttttctgtcaccatccaaaaatttgatccatacctgaatattgacccgggtacattgaatccatacgaacatggcgaatgttatgtaacagacgatggtgcggaaacagatttagatctgggacattacgaacgtttcttaggtactcctacttctcagggtaacaacattactaccggaagaatctacaatacggttattacgaaagagcgtcagggtgctttcttaggaaaaacggtacaggttgttccgcacattactgatgagatcaagcgcaacattcagttgctgggcgaatccggcaagtacgatatcgtgattactgaaattgggggttgcgttggtgatattgaatcgcttccgttcttagaagctgtacgtcagttccgctgggaaatgggaccaaccgatacgttggtgattcacttaacattggtgccgtatttaaatgcagccaaagaattaaaaacaaaaccaacacaacactccgttaaattattgtctgaaacaggtatccatccggatattcttgtttgcagaaccgagcatcccctaccggcagagctgcgtaaaaaagttgccttattctgtaacgtaaacattaattctgtaatcgaatcaatcgatgcagaaacgatctatgatgtgccgttattaatgaaaaaagaaaaactggatgaacgtgtattatctaagttaaaactttcaagcaaaaacgaaccggatcttgagagctggaaagtgtttttgggtaaactgaagaatccattgtcggaagtaaacattgccctggttggtaaatatgttgaacttccggatgcctataaatctatttctgaagcattcattcatgcaggtgcaatgaacgaatgcaaagtaaagattcgctggatctcttctgagcaattgcaaaaagataacctgcagcatcacttaggctttgcagacggtattttagttgcacctggctttggcgaacgtggtctggaaggtaaaattgcagccgtagaatttgcccgcgaaaacaatattccgtttttcggaatctgcctgggtatgcaatgtgccgtaattgaatttgcacgtaacgtactgggtttaaaagatgcgaattctacagagatgaataaagacacagctaatccggtgatcaatatgatggaatctcagaagaacgtaaccatgaaaggtggaaccatgcgtttaggtgcatatccttgcgaacttacaaaaggttctaaagcacatgcgatctatggtaagtctaagatcatggaacgtcaccgtcaccgctatgaattcaacaacaaatacctgaagcaatatgaaaaagaaggtatgcttgcaacaggtatcaatccggagacaaagctcgtagagattgttgaattaagagatcatccgttctttatcggcagccagttccatccggaattaaaaagtacggtagaaaacccgcacccgatctttgttaagtttgtaaaagctgcaaatgattttgcgaaaggaaagaaataa

SEQ ID NO: 31367 - protein, 539 aa, Cytophaga hutchinsonii
MSATKYIFVTGGVTSSLGKGIVAASLAKLLQARGFSVTIQKFDPYLNIDPGTLNPYEHGECYVTDDGAETDLDLGHYERFLGTPTSQGNNITTGRIYNTVITKERQGAFLGKTVQVVPHITDEIKRNIQLLGESGKYDIVITEIGGCVGDIESLPFLEAVRQFRWEMGPTDTLVIHLTLVPYLNAAKELKTKPTQHSVKLLSETGIHPDILVCRTEHPLPAELRKKVALFCNVNINSVIESIDAETIYDVPLLMKKEKLDERVLSKLKLSSKNEPDLESWKVFLGKLKNPLSEVNIALVGKYVELPDAYKSISEAFIHAGAMNECKVKIRWISSEQLQKDNLQHHLGFADGILVAPGFGERGLEGKIAAVEFARENNIPFFGICLGMQCAVIEFARNVLGLKDANSTEMNKDTANPVINMMESQKNVTMKGGTMRLGAYPCELTKGSKAHAIYGKSKIMERHRHRYEFNNKYLKQYEKEGMLATGINPETKLVEIVELRDHPFFIGSQFHPELKSTVENPHPIFVKFVKAANDFAKGKK

SEQ ID NO: 31368 - DNA, 1641 bp, Dechloromonas aromatica
  CDS (1)..(1641): transl_table=11
atgaccaaatatgttttcgttacgggtggtgtcgtgtcctctctgggcaaaggcatcgccgccgcgtcgctcggggccattctggaatcccgcggcatcaaagtcacccacctcaagcttgacccctacatcaacgtcgaccccggtacgatgagtcctttccagcatggagaggttttcgtcaccgatgacggagccgagaccgatctggatctggggcattacgagcgctttaccagcgccaagatggccaagcgcaacaacttcacgaccggccagatttacgattcggtgctcaagaaagagcgtcgtggcgaatatctcggcaagaccgtgcaagtcatcccgcacattaccgacgagatcaaggatcgcatcaaggccggcgccgaaggtgcagacgtggccatcgttgaagtcggtggcacggttggcgacatcgagtcgctgcccttcctcgaagccattcgtcaaatgggtatcatggaggggcgtaacaacgtctgcttcatgcatctgacgctgttgccctacatcccgactgccggtgagctgaagaccaagccgactcagcattccgtcaaggaactgcgcgaaatcggtatccagccggacatcctgctgtgtcgcgccgatcgttcgattccagtcgaagagcgccgcaagatcgcactgttctgcaatgtgatgccggaagccgtcatcgagtgtcttgatgccgattcgatctacaagattccgggcatgctgcacgaacagatgctcgacgagatcgtctgccacaagctgaatatcctggccaaggcagccgacctgacggtctgggaaaatctgatcgtggcgctggagcacccgctgcaccaggtcaagatcgcttttgtcggcaagtacgttgatctgaccgagtcctacaagtccttgattgaagccatcaagcatgccggtatccatacccgcagccaggtcaacatcatttatctcgattccgaagatatcgagaagaatggcaccggcgtccttgaagacctcgatgccatcctcgttcccggcggtttcggtcgtcgcggtacggaaggcaagattgccgcgatccgctatgcccgcgagaacaaggtgccctatctcggtatctgtctcggcatgcaactggccgtcgttgaattcgctcgtgatgtggccggtatgcccggtgcgcactccaccgaattcgtgcaggacacgccatacccggtaatcggcctgattaccgagtggctggacgcttccggcaagatcgagaagcgtaccgaggattccgatatcggcggcaccatgcgtcttggcgctcaggtctgcaagctgggtgagggcacgctggctcgtagcatctatggcgcgccggaaatcaccgaacgccatcgtcaccgctacgaagtgaacaacacgctgctcgccaagctggaagaaaagggcctgatcgtcgccggtcgtgcccctggtaccgatctgtgcgaaatggtcgagttgccggccgatgtgcatccgtggttcgtcggttgtcagttccacccggaattcacctccaatccgcgtcaaggtcatccgctcttctcttcttacgtgaaggcggcgctggccaatcaaaaggccaaaggcaaatga

SEQ ID NO: 31369 - protein, 546 aa, Dechloromonas aromatica
MTKYVFVTGGVVSSLGKGIAAASLGAILESRGIKVTHLKLDPYINVDPGTMSPFQHGEVFVTDDGAETDLDLGHYERFTSAKMAKRNNFTTGQIYDSVLKKERRGEYLGKTVQVIPHITDEIKDRIKAGAEGADVAIVEVGGTVGDIESLPFLEAIRQMGIMEGRNNVCFMHLTLLPYIPTAGELKTKPTQHSVKELREIGIQPDILLCRADRSIPVEERRKIALFCNVMPEAVIECLDADSIYKIPGMLHEQMLDEIVCHKLNILAKAADLTVWENLIVALEHPLHQVKIAFVGKYVDLTESYKSLIEAIKHAGIHTRSQVNIIYLDSEDIEKNGTGVLEDLDAILVPGGFGRRGTEGKIAAIRYARENKVPYLGICLGMQLAVVEFARDVAGMPGAHSTEFVQDTPYPVIGLITEWLDASGKIEKRTEDSDIGGTMRLGAQVCKLGEGTLARSIYGAPEITERHRHRYEVNNTLLAKLEEKGLIVAGRAPGTDLCEMVELPADVHPWFVGCQFHPEFTSNPRQGHPLFSSYVKAALANQKAKGK

SEQ ID NO: 31370 - DNA, 1635 bp, Dehalococcoides ethenogenes
  CDS (1)..(1635): transl_table=11
atgtcaaaatttgtttttgtaactggcggtgtggttagttctgtaggcaagggcattaccgttgcctcactgggaaatattcttaaaagccggggactgagtgtttcggttcaaaagcttgacccctatttgaatgtagaccccggtaccatgtcaccctatcagcacggcgaggtttttgtaacccaggacggggcggaaacagaccttgatttgggcagctatgaacgctttatagatattgagcttaccgctgactccactgtcacctccggccaggtatattccgaagttataaataaagagcgccggggtgattatctgggggggactatacaggttgtaccccatgtcacccaggagataaaggccagaatacagcgtctggcagaccgttccaaagcggatgtggtaatagtggaagtgggcggtactgtcggtgatattgagggtcagccctttctggaagctatccgccagatgcgcaatgatatggggcgggataatgttatttatattcacgtaaccctgcttccttatatacagtccacccaggagcttaaaaccaagcccacccagcacagtgttaacgagctgaggcggataggtatccagccggatataatagtctgccgggcagattatcctatatccgaaggtatccgggacaaactttctttgttctgtgatgtggaacgcaaggcagttatctttatgcctactgtttccactatatatgaagtccccctgaagctggagtctgagggtgtgggtgatttgctggtcagccgccttcacctgaatgcttccccgtctgaccttagtatctggcgcgggctggtggaaaaaattaaagaacctaccccagcggtcaggattgctctggtcggcaaatacgtagagctgaaagatgcctattattcagtccgtgagtccctgtgtcatgccgccattcataacgggcgtgatatccagatagactgggtgtatgctgaagatattgagaaaaacggccctgaggaatatttaaaacacgttcagggcattattatacccggcgggttcggcatcaggggtattgagggcatgataaccgccgtaaagtatgcccgtgaaaacggcataccctatctgggtttgtgtctgggcatgcaggtcatggtgatagagtttgcccggcacgtgcttcagtctgacaaagcccactcaaccgaatttgagccggattccccttacccggttattgacctgttgccggagcaacggggggtggattccaaaggcggtactatgcgtctgggcaattatccttgtgtaattcagcccggtactatggccggacaggcttacggcaacaagctgataaatgaacgtcaccgtcaccgttttgagttcaataatgattaccgtgataccctttccaaagccggtatggtattcagcggactgtctcctgacggcaagctggtagagatttgcgaagtttcaggacacccgtttatggtcggttcgcagtttcacccggagtttctttcacggccaaaccgtccccaccccctgttccgtgaatttataaatgctgccaaaaaggttataagagatggtgagcagccttctttgccgctttcgccctga

SEQ ID NO: 31371 - protein, 544 aa, Dehalococcoides ethenogenes
MSKFVFVTGGVVSSVGKGITVASLGNILKSRGLSVSVQKLDPYLNVDPGTMSPYQHGEVFVTQDGAETDLDLGSYERFIDIELTADSTVTSGQVYSEVINKERRGDYLGGTIQVVPHVTQEIKARIQRLADRSKADVVIVEVGGTVGDIEGQPFLEAIRQMRNDMGRDNVIYIHVTLLPYIQSTQELKTKPTQHSVNELRRIGIQPDIIVCRADYPISEGIRDKLSLFCDVERKAVIFMPTVSTIYEVPLKLESEGVGDLLVSRLHLNASPSDLSIWRGLVEKIKEPTPAVRIALVGKYVELKDAYYSVRESLCHAAIHNGRDIQIDWVYAEDIEKNGPEEYLKHVQGIIIPGGFGIRGIEGMITAVKYARENGIPYLGLCLGMQVMVIEFARHVLQSDKAHSTEFEPDSPYPVIDLLPEQRGVDSKGGTMRLGNYPCVIQPGTMAGQAYGNKLINERHRHRFEFNNDYRDTLSKAGMVFSGLSPDGKLVEICEVSGHPFMVGSQFHPEFLSRPNRPHPLFREFINAAKKVIRDGEQPSLPLSP

SEQ ID NO: 31372 - DNA, 1635 bp, Dehalococcoides sp
  CDS (1)..(1635): transl_table=11
atgtcaaaatttatttttgtaactggcggtgtagttagttctgtaggcaaaggtattaccgttgcctcattgggaaatattctcaaaagccggggcttgagtgtttcggttcagaagcttgatccctatctgaacgtagaccccggtaccatgtccccctaccagcatggcgaggtttttgtaacccaagacggggctgaaaccgaccttgatctgggaagttatgaacgctttatagatatcgaacttactgctgattccaccgttacttccgggcaggtgtattccgaggttataaacaaagaacgccggggtgattatctgggaggtaccatacaggtagtgccccatgttactcaggagataaaggccagaatacagcgtctggcagaccgttccaaagctgatgtggtgatagtggaagtgggcggcacagtcggtgatattgaaggtcagcctttccttgaggctatccgccagatgcggaatgataccggccgggataatgttctgtatattcatgtcaccctgcttccttacatacagtccacccaggagcttaaaaccaagcctacccagcatagtgttaacgagcttcggcggataggtatccagcctgatattatagtctgccgggcagattaccctatatcagagggtatccgagacaagatttctttgttctgtgacgtggaacgcaaggcagttatctttatgcctaccgtttccaccatatatgaagttccccttaagctcgagtccgagggtgtgggggatttgctggtcagccgtcttcacctgaatgcttctccgtctgacctcagcgtctggcgcgggttggtggaaaagattaaagaacccaccccgacagtcaggatagcgctggttggcaagtatgtggaactcaaagatgcttattattcagtgcgcgagtctctctgtcatgccgccattcataacgggcgggatatccagatagactgggtacatgcagaagatattgaaaagaatggccctgaggaatatttgaaacatgttcagggcattattataccgggcggattcggcataagaggtattgaaggcatgataagtgccgtcaagtatgcccgtgaaaacggcataccctatctggggttatgtctgggtatgcaggttatggtgattgaatttgcccgttacgtgcttggctcagacaaagcccattctaccgaatttgaaccagattcaccttatccggttattgacctcttgccggagcagaggggagtggattccaagggcggcactatgcgtctgggcaattatccctgtgttatccagccgggtaccatggctgggcaggcatacgggaataacctgataaatgaacgtcatcgccatcgttttgagtttaacaatgattatcgtgataccctttccaaagccggtatgttatttagcgggttgtctcctgacggtaaactggtagaaatttgtgaagttaccggtcacccctttatgatgggttcacagtttcatccggaattcctctcccggcccaaccgtccccatcccttgttccgggaatttataaatgctgccaaaaaggttatacgtgatggtgaacagccttctttgccgctttcgccctaa

SEQ ID NO: 31373 - protein, 544 aa, Dehalococcoides sp
MSKFIFVTGGVVSSVGKGITVASLGNILKSRGLSVSVQKLDPYLNVDPGTMSPYQHGEVFVTQDGAETDLDLGSYERFIDIELTADSTVTSGQVYSEVINKERRGDYLGGTIQVVPHVTQEIKARIQRLADRSKADVVIVEVGGTVGDIEGQPFLEAIRQMRNDTGRDNVLYIHVTLLPYIQSTQELKTKPTQHSVNELRRIGIQPDIIVCRADYPISEGIRDKISLFCDVERKAVIFMPTVSTIYEVPLKLESEGVGDLLVSRLHLNASPSDLSVWRGLVEKIKEPTPTVRIALVGKYVELKDAYYSVRESLCHAAIHNGRDIQIDWVHAEDIEKNGPEEYLKHVQGIIIPGGFGIRGIEGMISAVKYARENGIPYLGLCLGMQVMVIEFARYVLGSDKAHSTEFEPDSPYPVIDLLPEQRGVDSKGGTMRLGNYPCVIQPGTMAGQAYGNNLINERHRHRFEFNNDYRDTLSKAGMLFSGLSPDGKLVEICEVTGHPFMMGSQFHPEFLSRPNRPHPLFREFINAAKKVIRDGEQPSLPLSP

SEQ ID NO: 31374 - DNA, 1635 bp, Deinococcus radiodurans
  CDS (1)..(1635): transl_table=11
atgaaatacatcttcgtgaccggcggcgtggtcagcagcctcggcaaaggcgtggcgagtgccagcctcggggcgctgctgcgtgcgcgcggctacaaagtcaccgccgtcaaaatcgacccctacatcaatatcgacgccggcaccatgcggccctacgagcacggcgaatgcttcgtgacggcttcgggtgccgaaaccgacctcgacatcggcaactacgagcgctttctcgacctcgacattccggcgggcagcaacatcaccaccgggcaggtctatcaggaagtcatccgtaaggagcgggcgggcgattacctgtcgcagaccgtgcaggtcattccgcacgtgaccgatgaaatcaagcggcgcatccgggcggcgggcgagtcggcgggtgccgaaatcgtgctgatcgaggtgggcggcacggtgggcgacatcgagtcgctgccctttctggaagccatccggcagttccgcttcgacgagggcgacgacaacgtgctgtacctgcacctgacgctggtgccgtacctgggcacgtccaacgagttcaagaccaagcccacgcagcactcggtggcggcgctcaggagctacggcatcagccccgacatcgtgatggtgcgctccaaggacaagctgcccgccgaaattacccgcaaaatcgcggcatttaccagcgtgcgcgaaaaccgcgtcttctcgtcgtatgacgtggaacacgtctatcaggtgccgctggcacttgaggagcagggcctgggcaaggccgtcgaggagctgctggggctcgaaggcacgcacccccggctgggcgtgtggaccgacgccgtgcggaccatcaagcatcccaagcagcaggtgaccatcgccatcgcgggcaagtacaccgccatgcccgacgcctacctctcgctgatggagtcgctgacgcacgcggggattgccaacgacgcccgcgtgaacatcaagtgggtcaacgccgagcagctcgccgaggcgggcgcgggcgaactcgaagggcagtttgccgacgtggacgggattctggtccccggtggcttcggcattcgcggcatcgagggcaaggtgaaggccgccgagtacgcccgcacgcacggggtgccgtacctggggatttgcctggggatgcagattgccgtgatcgaatacgcccggcacgttgcgggcatcgaggacgccaactccgccgagttcgacgagtacgccaagaacaaggtcatcgacctgatgcccgagcagctcgaagtcgccgggatgggcggcaccatgcgcctgggcgactggccgatggaactgcgcgccggcaccaaaatcgccgagctgtacggcgttccgcagggcggcaccgtcaaggaacgccaccgccaccgctacgaggtcaacccggcctacgtggagcagttggaggcggcgggcctgaccatttcgggtgtgacccccggcgtggaggggcgcggcgcggggctggtcgagaccgtcgaaatcgcggaccatcccttcttcgtggcgctgcaagcccaccccgagttcaagagccgcccgatgcgcccgagcccgcccttcgccggcttcgtgaaggccgcgctggagcaccagcagcagtaa

SEQ ID NO: 31375 - protein, 544 aa, Deinococcus radiodurans
MKYIFVTGGVVSSLGKGVASASLGALLRARGYKVTAVKIDPYINIDAGTMRPYEHGECFVTASGAETDLDIGNYERFLDLDIPAGSNITTGQVYQEVIRKERAGDYLSQTVQVIPHVTDEIKRRIRAAGESAGAEIVLIEVGGTVGDIESLPFLEAIRQFRFDEGDDNVLYLHLTLVPYLGTSNEFKTKPTQHSVAALRSYGISPDIVMVRSKDKLPAEITRKIAAFTSVRENRVFSSYDVEHVYQVPLALEEQGLGKAVEELLGLEGTHPRLGVWTDAVRTIKHPKQQVTIAIAGKYTAMPDAYLSLMESLTHAGIANDARVNIKWVNAEQLAEAGAGELEGQFADVDGILVPGGFGIRGIEGKVKAAEYARTHGVPYLGICLGMQIAVIEYARHVAGIEDANSAEFDEYAKNKVIDLMPEQLEVAGMGGTMRLGDWPMELRAGTKIAELYGVPQGGTVKERHRHRYEVNPAYVEQLEAAGLTISGVTPGVEGRGAGLVETVEIADHPFFVALQAHPEFKSRPMRPSPPFAGFVKAALEHQQQ

SEQ ID NO: 31376 - DNA, 1647 bp, Desulfovibrio desulfuricans
  CDS (1)..(1647): transl_table=11
atgaaaaccaagtttatctttatcaccggcggggtgctttcgtcgctgggcaaagggctggctgccgcatctgtgggggcactgctgcaggcccggggactcaaggtcaccattcagaaactcgacccctacatcaacgtcgaccccggcaccatgaacccgtttcagcacggtgaagtgtatgtgaccgacgacggcgctgaaaccgaccttgatcttggccattacgagcgctacctcggcattcccatgaaccagcgcaacaactacacgtccggttccatctaccaccgcgtgatcacaaaggaacgccgcggcgactatctggggggcaccgttcaggttattccgcatatcaccgacgaaatcaaaagcgtgatcatgaatctggccagcgacgaccttgatgtggcgctggtggaaataggcggaaccgtgggtgacatcgaaggacagccgttccttgaagccatccggcagcttcgttccgatctgggccgtgaccgctgcatgtacatccacctgacgctggtaccgtatctggccgccgccggcgaacacaaaaccaagcctacccagcacagcgtcaaagagcttcgcagcataggcattcagcccgacattattctgtgccgttgcgaaaaagccgtcaccgatgacctcaagcacaagattgctctgttctgcaacgtggaaaaagatgctgttttttctgctgttgacgtgaaaaacatctatgaagtgccgctcagcttctacgaggaaggctttgatcagaagatcgccatcatgctgcagctgccggccaaaaatcctgacctgagcaaatggcaggagctggtggacacatgcgccaacccgcagggcaaggtgaccatcggtatcgtgggcaagtatgtcgatcttaaggaagcatacaaaagcctgcacgaagcgcttattcacggcggtgtggccaacaagctggctgtggagctcaagtacgtcaattccgagctcatcaccgatgaaaatgtggcggaatctctggccggtctcgacggcattctggttcccggcggcttcggcagccgaggcgtggaaggaaaaatccgggccatccgttatgcccgtgagaacaaggtgcctttcttcggcatatgtctgggtatgcaatgtgcggtcatcgaatttgcccgcaatgtagccggactgcccgccgccaactccgaagagtttgacgaacagactcccgacaaggtgatctacctgatgacggaatggtttgatttccgcagcaagcaggtggagcggcgtgattcaggcagcgaaaaaggcggcaccatgcgtctgggatcgtacccctgcgctgtggtcaagggtaccaatgccttcactgcctatcaggctgaaaaagtggacgaacgccaccgtcaccgttttgaattcaacaacgcctatcttgacaagctcaaagaggccgggctggtattcagtggtctgtcacccgatggtgaacttgtcgaaatggttgaaatcaaggatcatccctggttcctcggctgtcagttccaccctgaattcaagtcctaccccatgaccccgcatccgcttttccgcgagtttataaaagccgccggaaaacaggctgtaaaaagcaagcggtaa

SEQ ID NO: 31377 - protein, 548 aa, Desulfovibrio desulfuricans
MKTKFIFITGGVLSSLGKGLAAASVGALLQARGLKVTIQKLDPYINVDPGTMNPFQHGEVYVTDDGAETDLDLGHYERYLGIPMNQRNNYTSGSIYHRVITKERRGDYLGGTVQVIPHITDEIKSVIMNLASDDLDVALVEIGGTVGDIEGQPFLEAIRQLRSDLGRDRCMYIHLTLVPYLAAAGEHKTKPTQHSVKELRSIGIQPDIILCRCEKAVTDDLKHKIALFCNVEKDAVFSAVDVKNIYEVPLSFYEEGFDQKIAIMLQLPAKNPDLSKWQELVDTCANPQGKVTIGIVGKYVDLKEAYKSLHEALIHGGVANKLAVELKYVNSELITDENVAESLAGLDGILVPGGFGSRGVEGKIRAIRYARENKVPFFGICLGMQCAVIEFARNVAGLPAANSEEFDEQTPDKVIYLMTEWFDFRSKQVERRDSGSEKGGTMRLGSYPCAVVKGTNAFTAYQAEKVDERHRHRFEFNNAYLDKLKEAGLVFSGLSPDGELVEMVEIKDHPWFLGCQFHPEFKSYPMTPHPLFREFIKAAGKQAVKSKR

SEQ ID NO: 31378 - DNA, 1599 bp, Desulfitobacterium hafniense
  CDS (1)..(1599): transl_table=11
atgacgaagtttatttttgtcacaggtggtgtagtatcctccttgggaaaggggatcacggcatccgctctggggtgcctgctcaaaaataggggattaagtgttgccattcaaaaatttgatccttatattaacattgacccagggaccatgagcccataccagcatggtgaagtttttgtcaccgatgatggagcggagacggatttagaccttgggcattatgagcgttttattgatgtgcctgtgtctaaaaatagcaatgtgaccacgggaaaaatctactggtccgtcctcaacaaagaaagacggggggactacttagggggaacggtacaggtcatccctcatattaccaacgaaatcaaagaacgcatctatcgggtggcccgggaaaatcacccggatattgtgatcacggagattggcggtaccgttggcgatattgaatccctgccttacttagaagcgattcgtcaaatgcgcagtgatatcggccgggagaatgtcctttatctgcatgtgacccttattccctatctgaatgcttcaggtgagctgaagacaaagcctacccagcactctgttaaagagctgcggggaatcggtattcagccgaatattctggtttgccgcaccgaacatgccatttccgaggatatgaaggaaaaactggccctcttctgcgatatcgatcgtgaagccattattcaaatggtggatgccaagagtatttatgaagttcctttaaatattttagaagaaggcatggatgatatcgtccttaagattctgggccttgaagcgcctcctgcggatatgactgactggagggctatggtcgatcggatcaataatcctcagagtgaaacggaaattgccatcgtcggcaaatatgtggagcttcccgatgcttatttgagtgtggccgaagccttgcgtcatgccggaattgaacatctggcgaaagttaagatacgctgggtcaactcggaagagattgaaggctcttcagccgcagagctgcttaagggtgtatccgggattctggttcccggcggttttggcaaccggggcatcgaaggtaagattgaagccattcgctatgcccgggaaaataaaatccccttcttagggatttgcttaggcatgcagacggcggtcattgaatttgcccggaatgtgtgcggcatgaccaatgccaacagctctgaattcgatgtggacgcgccttatccggtcattgacctcctccctgaacagaaggagattgaagataagggaggaaccatgcgcttaggaatctctcctgtcaagcttatcgagagcacgttggtcagctctatttaccaggatgaagtgatctatgagcgccatcgtcatcgctatgaagtaaataatcaattccgcgcagaattggaaaagggcggcctgaaattctcaggaacctcccccgacgggcgccttgtcgaaatcaccgaatatccggatcatccctggtttgtggcgtcacagttccatccggaattcaaatcccgtccttatcgttcccatcctcttttcagagagtttgtcaaagccacattggccaatagataa

SEQ ID NO: 31379 - protein, 532 aa, Desulfitobacterium hafniense
MTKFIFVTGGVVSSLGKGITASALGCLLKNRGLSVAIQKFDPYINIDPGTMSPYQHGEVFVTDDGAETDLDLGHYERFIDVPVSKNSNVTTGKIYWSVLNKERRGDYLGGTVQVIPHITNEIKERIYRVARENHPDIVITEIGGTVGDIESLPYLEAIRQMRSDIGRENVLYLHVTLIPYLNASGELKTKPTQHSVKELRGIGIQPNILVCRTEHAISEDMKEKLALFCDIDREAIIQMVDAKSIYEVPLNILEEGMDDIVLKILGLEAPPADMTDWRAMVDRINNPQSETEIAIVGKYVELPDAYLSVAEALRHAGIEHLAKVKIRWVNSEEIEGSSAAELLKGVSGILVPGGFGNRGIEGKIEAIRYARENKIPFLGICLGMQTAVIEFARNVCGMTNANSSEFDVDAPYPVIDLLPEQKEIEDKGGTMRLGISPVKLIESTLVSSIYQDEVIYERHRHRYEVNNQFRAELEKGGLKFSGTSPDGRLVEITEYPDHPWFVASQFHPEFKSRPYRSHPLFREFVKATLANR

SEQ ID NO: 31380 - DNA, 1656 bp, Desulfotalea psychrophila
  CDS (1)..(1656): transl_table=11
atgaaaaatacaactaatacaaaacggactaaatttatttttgttaccggtggagttctttcttccctcggtaaaggactcgcagcagcctctattggtgctcttcttgaaagccgtggattaagcataactttccagaagcttgacccctacattaacgtagatcctggtaccatgaatccctttcagcacggcgaagtatatgtcaccgatgatggcgctgaaactgatcttgatatgggacactacgagcgtttcactaacgctgtcatgggccaaaagaacaacttcacatccggtcgcatctaccacaccgttattaacaaagaacgacgtggtgaatatctcggtggcaccgtgcaggttattccgcacatcaccgacgagatcaaaaaatcggttcgccaactcgatggtagcgttgatatcgccattattgaaattggtggcaccgttggtgatatcgaaggccttccctttattgaggccattcgtcagctccgtggagatcttggccgtgattacaccctttttattcacctcactctggtgccgtacatcaagactgcaggcgaggtaaaaaccaagcctacccagcactctgttcgtgaactccgtgccgatggcatccaaccggatatccttgtctgtcgtaccgaggtgcctcttgaagagaacatcaaggccaaaatcgcccttttctgtgatgtgcagcaggatgcagttattaactgtgtagacgtagacagcatctacaaactgccaattgcccttcatgcagaaggccttgattccaagattctcgagcttcttaatatctggacagccaaccctaatattaagccatggcaggatttggttgaaaacatccagaatccgaagaacgaagtaaccatcgctattaccggaaaatatgttgatctcaccgaggcctacaagagtcttcatgaggctctcattcacggtggccttgccaatcacaccaaggtaaaacttcgctatgtcagcgccgaagatcttgaaagcggcgatcccgacagttacctgaagggatgcgatggcatcctggttcctggtggttttggcagacgcggcgttgaaggtaaaattaaggctatcacctatgcccgagaaaacagaatcccattctttggtatctgtctcggcatgcagcttgctgtggtagaatttgccagaaatatggcaggaatgagcgaagctcactccactgaacttgagcctaactcccctgaccctgttatctacctcaccaaagagtggtttgattaccgaaccaacaagatacagcgacgggacgaaaactctgatctcggcggaaccctccgtcttggtgcctacccctgtgtacttcagcaggaaagccacgcaggagatgcctatggtactcaggaagtattcgagcgccatcgtcaccgttttgagttcaacaacgattatcgtcaacagctcattgaaaaaggtcttgtcatctccggtacttctccagatggcgacctcgttgaaattgttgagatcgaggatcatccttggtttgtaggttgtcaatttcacccagaattcaaatccaagccaatgcaagcgcatcctctctttagagatttcatcagcgctgcagtcgctaacaagaaaggctaa

SEQ ID NO: 31381 - protein, 551 aa, Desulfotalea psychrophila
MKNTTNTKRTKFIFVTGGVLSSLGKGLAAASIGALLESRGLSITFQKLDPYINVDPGTMNPFQHGEVYVTDDGAETDLDMGHYERFTNAVMGQKNNFTSGRIYHTVINKERRGEYLGGTVQVIPHITDEIKKSVRQLDGSVDIAIIEIGGTVGDIEGLPFIEAIRQLRGDLGRDYTLFIHLTLVPYIKTAGEVKTKPTQHSVRELRADGIQPDILVCRTEVPLEENIKAKIALFCDVQQDAVINCVDVDSIYKLPIALHAEGLDSKILELLNIWTANPNIKPWQDLVENIQNPKNEVTIAITGKYVDLTEAYKSLHEALIHGGLANHTKVKLRYVSAEDLESGDPDSYLKGCDGILVPGGFGRRGVEGKIKAITYARENRIPFFGICLGMQLAVVEFARNMAGMSEAHSTELEPNSPDPVIYLTKEWFDYRTNKIQRRDENSDLGGTLRLGAYPCVLQQESHAGDAYGTQEVFERHRHRFEFNNDYRQQLIEKGLVISGTSPDGDLVEIVEIEDHPWFVGCQFHPEFKSKPMQAHPLFRDFISAAVANKKG

SEQ ID NO: 31382 - DNA, 1644 bp, Desulfovibrio vulgaris
  CDS (1)..(1644): transl_table=11
atgaagaccaaatttattttcatcaccggcggcgttctctcctcgctgggcaaggggcttgctgccgcgtccgtcggcgcgcttctcaaggcccgtgggctgaaggtcaccatccagaagctggacccgtacatcaacgtggaccccggcaccatgaaccccttccagcacggcgaagtctacgtcaccgatgacggtgccgagaccgacctcgacctcgggcactacgagcgctacctcgccgagcccatgtcgcagaagaacaactacacgtcgggctccatctaccatcgcgtcatcaccaaggaacgccgtggcgactatcttggcggcacggtgcaggtcatcccgcacgtcaccgacgagatcaagaacgccgtgctgagcctcgccgaggacgaccccgacgtggccctcatcgagatcggcggaaccgtgggcgacatcgagggacttcccttcctcgaggccatccgccagcttcgtggcgaccttggcaaggatcgctgcctctacatccatcttacgctcgtgccgtacctgcgcgctgccggcgaacacaagaccaagcccacccagcacagcgtcaaggagcttcgctccatcggcatccagcccgacatcatcctctgccgttgcgaagaggccatcaccgccgacctcaagcgcaagatcgccctgttctgcaacgtcgatcaggatgccgtcttctctgccgtggatgtgaagaacatctacgaagtgccgctgcgattctacgaagagggcttcgaccagaagatcgccatcatgcttcgcctgcctgccaagaatcccaacctcgagccgtgggagacgctggtcgacacctgcgcgcatccgcagggcagggtgaccataggtatcgtcggcaagtacgtggacctcaaggaggcctacaagagcctgcatgaggcgctggtgcacggtggcgtggccaacaaggtggctgtcgacctcaagtacgtgaactccgaggagatcaccgaagagaacgtggccgaggccctgaaggggctcgacggcatactggttcccggtggcttcggctatcgcggcgttgaaggcaagattctcaccatccgctatgcccgtgagaacagggtgcccttcttcggcatctgcctcgggatgcagtgcgccgtgatcgaattcgcccgcaacgtgatggggcttgaagatgccaactccgaagagttcaatgaactcagcaagaacaaggtcatctacctcatgacggaatggttcgaccatcgccgtcaggcggtcgagcgccgtgattcgtccagcgacaagggtggtaccatgcgcctcggctcgtacccctgcgtcgtggttcccgacaccaaggcccatgatgcctacggcgtgaagcatatcgacgagcgtcaccgtcatcgcttcgagttcaacaaggcatacttcgatgccatggcccagagtggcatggtcttcagtggtctttcccctgatggcgaactggtggaaatcgtcgagttgcccgaccatccgtggttcctcggctgtcagttccaccccgaattcaagtccaatcccatgcagccgcatccgctgttccgcgagttcatccgcgcagcgaagacgcaccctgccgggaagcgataa

SEQ ID NO: 31383 - protein, 547 aa, Desulfovibrio vulgaris
MKTKFIFITGGVLSSLGKGLAAASVGALLKARGLKVTIQKLDPYINVDPGTMNPFQHGEVYVTDDGAETDLDLGHYERYLAEPMSQKNNYTSGSIYHRVITKERRGDYLGGTVQVIPHVTDEIKNAVLSLAEDDPDVALIEIGGTVGDIEGLPFLEAIRQLRGDLGKDRCLYIHLTLVPYLRAAGEHKTKPTQHSVKELRSIGIQPDIILCRCEEAITADLKRKIALFCNVDQDAVFSAVDVKNIYEVPLRFYEEGFDQKIAIMLRLPAKNPNLEPWETLVDTCAHPQGRVTIGIVGKYVDLKEAYKSLHEALVHGGVANKVAVDLKYVNSEEITEENVAEALKGLDGILVPGGFGYRGVEGKILTIRYARENRVPFFGICLGMQCAVIEFARNVMGLEDANSEEFNELSKNKVIYLMTEWFDHRRQAVERRDSSSDKGGTMRLGSYPCVVVPDTKAHDAYGVKHIDERHRHRFEFNKAYFDAMAQSGMVFSGLSPDGELVEIVELPDHPWFLGCQFHPEFKSNPMQPHPLFREFIRAAKTHPAGKR

SEQ ID NO: 31384 - DNA, 1884 bp, Drosophila melanogaster
  CDS (1)..(1884)
atgaaatacatcctggtaactggtggcgtcattagtggcgtgggaaaaggagtgattgcctcctcgttcggaacgcttttgaaatcctgtggtctggatgtaacctcgatcaagattgacccctatatcaatatagatgctggaaccttttcgccttatgagcatggcgaggtttacgttttggacgatggcgccgaggtggatctggatctgggaaactatgaacggtttttggatgttaccctgcatcgggacaacaacataaccaccggaaaaatttacaagttggtcattgagaaggagcgcactggcgagtacttgggcaaaacggttcaagttgtcccacacatcactgatgccattcaggaatgggtggagcgcgtggcccagacacccgttcagggatcttcaaagccacaggtgtgcatcgtggaattgggaggaacgattggtgacatcgaaggcatgcctttcgtagaggccttccgtcagtttcagttccgcgtaaagagagagaacttctgtttggcccatgtgtcgctggttccgttgccaaaggctaccggagaacccaagaccaagcccacacaaagttcggtcagagaactgagaggatgtggcctgagtcccgatttgattgtctgccgatcggagaaacccattggactggaggtcaaggagaagatcagcaacttttgtcatgtggggccggatcaggtgatatgcatccacgatttgaactccatttatcatgttccgctgctgatggagcagaatggtgttattgaatacctaaatgagcgcctacagcttaatatcgacatgagcaagaggaccaaatgcttgcagcaatggcgagatttggcgcgtcgaacggagaccgttcgccgtgaagtttgcatcgccgtcgtgggaaagtacaccaagttcacggattcgtacgcctccgtagttaaagccctgcaacatgccgccctggcagtgaatcgcaaactggaactggtctttatcgagtcgtgcctgctggaggaggaaactttgcattctgagccgagcaagtaccacaaggagtggcagaagctatgcgatagccatggcatcctagtccccggtggattcggttcccgtggaatggagggcaagattcgtgcatgccaatgggcgcgagagaatcaaaagccattgcttggcatctgcttgggtctgcaagcggcggtcattgaattcgcacgaaataaacttggtctcaaggatgcaaacaccacagaaatcgatccgaacacagctaatgccttggtcatcgatatgccagagcatcacacgggtcaattgggcggcactatgcgcttgggcaagcgaataactgttttctctgatggtcctagtgtcattcgccagttgtatggcaatccgaaaagcgtgcaggagcgtcatcggcatcgttacgaggttaatcccaaatacgtgcatctgctggaagagcaaggcatgcgatttgtgggcaccgacgtcgacaaaactaggatggaaatcattgagctcagcggtcatccctactttgttgccacccaatatcatccagagtacttgtcgcggcctctgaagccgtcgcctcctttcctcggcctgatcctggcctcagtggatcgattgaaccaatatattcagcgcggttgccgcctgtcgccccgccagctatccgacgcatcctcggatgaggaggacagtgttgtgggcttggccggagcaacaaaatcgctgagctccttgaaaattcccattacacccacaaatggaatatcaaaaagttgcaatggtagcataagcacttccgacagcgaaggtgcctgcggaggcgttgatcctaccaatggccataagtaa

SEQ ID NO: 31385 - protein, 627 aa, Drosophila melanogaster
MKYILVTGGVISGVGKGVIASSFGTLLKSCGLDVTSIKIDPYINIDAGTFSPYEHGEVYVLDDGAEVDLDLGNYERFLDVTLHRDNNITTGKIYKLVIEKERTGEYLGKTVQVVPHITDAIQEWVERVAQTPVQGSSKPQVCIVELGGTIGDIEGMPFVEAFRQFQFRVKRENFCLAHVSLVPLPKATGEPKTKPTQSSVRELRGCGLSPDLIVCRSEKPIGLEVKEKISNFCHVGPDQVICIHDLNSIYHVPLLMEQNGVIEYLNERLQLNIDMSKRTKCLQQWRDLARRTETVRREVCIAVVGKYTKFTDSYASVVKALQHAALAVNRKLELVFIESCLLEEETLHSEPSKYHKEWQKLCDSHGILVPGGFGSRGMEGKIRACQWARENQKPLLGICLGLQAAVIEFARNKLGLKDANTTEIDPNTANALVIDMPEHHTGQLGGTMRLGKRITVFSDGPSVIRQLYGNPKSVQERHRHRYEVNPKYVHLLEEQGMRFVGTDVDKTRMEIIELSGHPYFVATQYHPEYLSRPLKPSPPFLGLILASVDRLNQYIQRGCRLSPRQLSDASSDEEDSVVGLAGATKSLSSLKIPITPTNGISKSCNGSISTSDSEGACGGVDPTNGHK

SEQ ID NO: 31386 - DNA, 1638 bp, Escherichia coli O157
  CDS (1)..(1638): transl_table=11
atgacaacgaactatatttttgtgaccggcggggtcgtatcctctctgggtaaaggcattgccgcagcctccctcgcagccattcttgaagcccgtggcctcaatgtgaccatcatgaaactggatccgtacatcaacgtcgatccaggtactatgagcccaatccaacacggggaagtgttcgttactgaagacggcgctgaaaccgacctggacctggggcactacgagcgtttcatccgtaccaaaatgagccgccgcaacaacttcaccacgggtcgtatctactctgacgttctgcgtaaagaacgccgcggtgactacctcggcgcaaccgtacaggttattccgcacatcactaacgcaatcaaagagcgcgtgctggaaggtggcgaaggtcatgacgtagtactggtcgaaatcggcggtacagtaggtgatatcgaatccctgccgttcctcgaagcgattcgccagatggctgttgaaattggccgtgagcacactctgtttatgcacctgacgctggtgccgtacatggcagcgtctggtgaagtcaaaaccaaaccgactcagcactctgtaaaagagctgctctccatcggtatccagcctgacatcctgatttgtcgttcagatcgcgccgttccggcgaacgaacgtgcgaagattgcattgttctgtaatgttccggaaaaagcggttatttctctgaaagacgtcgattccatctataaaattccgggcctgttgaaatctcaggggctggacgattatatttgtaaacgattcagcttaaactgcccggaagcaaatctgtccgaatgggaacaggttatcttcgaagaagcgaatccggtaagtgaagtcaccattggtatggtcggcaagtacattgaactgccggacgcttacaaatccgtgattgaagcactgaaacacggtgggctgaagaatcgtgtcagcgtcaacatcaaactgatcgattcacaagatgttgaaacgcgcggcgttgaaatccttaaaggtctggatgcaatcctcgtacctggcggtttcggctatcgtggcgtagaaggcatgattacgaccgcgcgttttgcgcgtgagaacaatattccttatctgggcatttgcctgggtatgcaggtggcgttaattgattacgctcgccatgttgccaacatggagaacgccaactctacggaatttgtgccagactgtaagtacccggttgtggcgctgattaccgagtggcgcgatgaaaacggcaacgttgaagttcgtagcgagaagagcgatctcggcggtaccatgcgtctcggcgcacagcagtgccagttggttgacgatagcctggttcgccagctgtacaatgcgccgacaattgttgagcgtcatcgtcaccgttacgaagtcaacaacatgctgttgaaacagattgaagatgcaggtctgcgcgttgcgggccgttccggggatgatcagttggtcgagatcatcgaagttccgaatcacccgtggttcgtggcttgccagttccatccggagtttacttctactccacgtgatggtcacccgctgtttgcaggctttgtgaaagccgccagcgagttccagaaacgtcaggcgaagtaa

SEQ ID NO: 31387 - protein, 545 aa, Escherichia coli O157
MTTNYIFVTGGVVSSLGKGIAAASLAAILEARGLNVTIMKLDPYINVDPGTMSPIQHGEVFVTEDGAETDLDLGHYERFIRTKMSRRNNFTTGRIYSDVLRKERRGDYLGATVQVIPHITNAIKERVLEGGEGHDVVLVEIGGTVGDIESLPFLEAIRQMAVEIGREHTLFMHLTLVPYMAASGEVKTKPTQHSVKELLSIGIQPDILICRSDRAVPANERAKIALFCNVPEKAVISLKDVDSIYKIPGLLKSQGLDDYICKRFSLNCPEANLSEWEQVIFEEANPVSEVTIGMVGKYIELPDAYKSVIEALKHGGLKNRVSVNIKLIDSQDVETRGVEILKGLDAILVPGGFGYRGVEGMITTARFARENNIPYLGICLGMQVALIDYARHVANMENANSTEFVPDCKYPVVALITEWRDENGNVEVRSEKSDLGGTMRLGAQQCQLVDDSLVRQLYNAPTIVERHRHRYEVNNMLLKQIEDAGLRVAGRSGDDQLVEIIEVPNHPWFVACQFHPEFTSTPRDGHPLFAGFVKAASEFQKRQAK

SEQ ID NO: 31388 - DNA, 1617 bp, Ehrlichia canis
  CDS (1)..(1617): transl_table=11
atgagtaaccaaacttcaagtagatttatttttgttaccggaggggtagtatcttctttaggcaaggggttagctgcagctagcattggagcactgttacaagctagaggatttaagatctgtttacgtaagttggacccatatcttaatatagaccctggaacaatgagtccaattcaacatggagaagtttttgtaactgacgatggagcagaaacagacctagatttagggcattatgaacgtttcacaggagtcaaaacaacaaaaaatgataacataactactggtaaagtatatcacaacttactgaaaaaagaaagaagaggagattatctaggccaaacagtacagattattccacatgttactgaccttattaactcttttattctacataacactgaaggattagattttgtcatatgcgaaataggtggaacggtaggtgatattgagagtcaaccattccttgaatctataagacaaattggatataaactaagtaaaaataacactatatttgtccatttgactttagtgccatatattgatgcagcaatggaattaaaaacaaaacctacacaacattcagtaaaagaattaagtgctgtaggtatacagccagatataatactgtaccgcagtaaaataccattatcaaaagaacaaagggataagatagcgaatttatgtaacgtttccccaacaaacattattccagcattagacgtaaaaaatatatatgagttacctatttcttatcacaattacaatttagacacacaaatattaaaacactttaatgttaattcacctgatccaaacttaagtaagtgggaaaatatattaaatatatctcacacattaacaaaaacagtaactgtagcaataataggcaaatatattaaactgcttgatgcatataagtcattaattgaagctctagaacatgcatcaattcacaatagggtaaagttatcaataagatggatagattcacgttcattagacagtaatggaatcaatgcatttgataatgttgattctatattaatacctggaggatttggtgatgacggagttaaaggtaagatcacagcaataacacatgcacgtttaaataagataccatttttaggcatttgtatgggcatgcagcttgctatagttgaatttgcaaataatgtagctcacttagaagatgctaattctacagaatttaatttatattgtaaaaaccctgtaatacaccaactaccagaattgcagcaaaactttttaggggggagcatgaaattaggatcatgtccgtgctatttagatgcaaattctaaaattttttctatatatcaacaatcagtaataaatgaaagaagaaggcacagatatacattcaatttacagtataaagatttactagaacaacatggattaacttttacaggcaaagcaaacaatactgatgatagtttaatagaagttatagagttaaacaaccacccatggtttattggagtacagtttcacccagaattcaaatcaagtccttttcattctcatccattgtttatatcatttataaaagcttcattgagctatcaagaagcaaaataa

SEQ ID NO: 31389 - protein, 538 aa, Ehrlichia canis
MSNQTSSRFIFVTGGVVSSLGKGLAAASIGALLQARGFKICLRKLDPYLNIDPGTMSPIQHGEVFVTDDGAETDLDLGHYERFTGVKTTKNDNITTGKVYHNLLKKERRGDYLGQTVQIIPHVTDLINSFILHNTEGLDFVICEIGGTVGDIESQPFLESIRQIGYKLSKNNTIFVHLTLVPYIDAAMELKTKPTQHSVKELSAVGIQPDIILYRSKIPLSKEQRDKIANLCNVSPTNIIPALDVKNIYELPISYHNYNLDTQILKHFNVNSPDPNLSKWENILNISHTLTKTVTVAIIGKYIKLLDAYKSLIEALEHASIHNRVKLSIRWIDSRSLDSNGINAFDNVDSILIPGGFGDDGVKGKITAITHARLNKIPFLGICMGMQLAIVEFANNVAHLEDANSTEFNLYCKNPVIHQLPELQQNFLGGSMKLGSCPCYLDANSKIFSIYQQSVINERRRHRYTFNLQYKDLLEQHGLTFTGKANNTDDSLIEVIELNNHPWFIGVQFHPEFKSSPFHSHPLFISFIKASLSYQEAK

SEQ ID NO: 31390 - DNA, 1599 bp, Ehrlichia chaffeensis
  CDS (1)..(1599): transl_table=11
atgaatcaagcttcaactaggtttatctttgttactggaggtgtggtatcttctctaggaaaaggattagctgcagctagtataggtgcactattacaagctagagggtttaagatttgtttaaggaagttagacccttatctcaacatagatcctggaacaatgagtccaattcaacatggtgaagtttttgttactgatgatggagcagaaacagacttagatttagggcactatgaacgttttactggagttaaaacaacgaaaaacgataacataactactggtaaggtatatcataatttgctaaagaaagaaagaagaggagattatctaggacaaacagtacagatcatccctcatgttaccgatctcattaattctttcattttacatgatactgataaattagatttcgttatatgcgaaataggtggaactgtaggggatattgaaagccagccatttcttgaatctataagacaaattggttacaaactcagtaaaaataacactatatttgttcatttaactttagttccatacattgacgcagcaatggaactaaaaacaaagcctacccaacactctgtgaaagaactaagttctgtaggcatacaaccagatataatactctatcgtagtaaaatacctttatcaaaagaacaaagagataagatcgcaaatttatgcaacgtttcatcaacaaatattattcctgcattagacgttaaaaatatatatgaactccctatctcttatcacaactacaatttagacacacagatattaaaccattttaatattgattcacctgaaccagatctacgtaagtgggaaaatatactaaatatttctcacgcagtaacaaaaacagtaaatgtagcaataataggaaagtacataaaactacttgatgcttataagtcattaattgaagctctagaacatgcatcaatccataacaaggtaaagttatcaataaaatggatagattcacgttcactagatagtaatgagataaatattttcgacaaagttgattctatattaatacctggaggatttggtgatgatgggattcaaggaaagatgacagcaataacctatgcacgtctcaataagataccatttctaggtatttgtatgggaatgcagcttgctataattgaatttgcaaataatgtggcacatttagaagatgctaattccacagaatttaacttatattgcaagaatcctgtaatacaccaattgccagaattacagcaaaatttcttaggcggaagcatgaaattaggttcatgtccatgttatttagaatcaggttctaaaatcttttccatatatcagcaatcaataatacatgagagaagaagacatagatatgcatttaatttacagtataaagatttactcgaacaacatgggttaatctttacaggcaaatcaaataataacaatgatagtttaatagaagttatagaactgaaagatcatccatggtttatcggagtacagttccatccagaatttaaatcaagtccttttcattctcatccattgtttatatcattcatcaaagcttcattagactaa

SEQ ID NO: 31391 - protein, 532 aa, Ehrlichia chaffeensis
MNQASTRFIFVTGGVVSSLGKGLAAASIGALLQARGFKICLRKLDPYLNIDPGTMSPIQHGEVFVTDDGAETDLDLGHYERFTGVKTTKNDNITTGKVYHNLLKKERRGDYLGQTVQIIPHVTDLINSFILHDTDKLDFVICEIGGTVGDIESQPFLESIRQIGYKLSKNNTIFVHLTLVPYIDAAMELKTKPTQHSVKELSSVGIQPDIILYRSKIPLSKEQRDKIANLCNVSSTNIIPALDVKNIYELPISYHNYNLDTQILNHFNIDSPEPDLRKWENILNISHAVTKTVNVAIIGKYIKLLDAYKSLIEALEHASIHNKVKLSIKWIDSRSLDSNEINIFDKVDSILIPGGFGDDGIQGKMTAITYARLNKIPFLGICMGMQLAIIEFANNVAHLEDANSTEFNLYCKNPVIHQLPELQQNFLGGSMKLGSCPCYLESGSKIFSIYQQSIIHERRRHRYAFNLQYKDLLEQHGLIFTGKSNNNNDSLIEVIELKDHPWFIGVQFHPEFKSSPFHSHPLFISFIKASLD

SEQ ID NO: 31392 - DNA, 1623 bp, Ehrlichia ruminantium
  CDS (1)..(1623): transl_table=11
atgaacaatctaacttcaactaagtttatttttgtgactgggggtgtagtgtcatctctggggaaaggactagcagcagctagtataggagcattattacaggcaagaggatttaagatttgcttaagaaaattagatccttacttgaacatagatccaggtacaatgagcccaattcagcatggtgaagtattcgtaactgatgatggagcagaaactgatttagacttaggtcactatgagcgttttactggcgttaaaacgacaaaaaatgataatataaccactggaaaagtatatcacaatttattaagcaaagaaagaaaaggagattatttaggacaaacagtacaaattattcctcatgtcacagacctgattaactcatttatattatataatactgatgcactagattttgtaatctgtgagataggtggaactgtaggtgacattgaaagccagccatttcttgagtctattagacaaattggttataagcttagtaaaaataatacagtatttgtacatctaactttagttccatatattagtgcaactatggaattaaaaactaaacctacacaacattcggtaaaagaattaagttctgtaggaatacaaccagatataatactttatcgtagtaaaatacctttatcacaagaacaacgagataaaatagctaacctatgcaatgtttctccaacaaatattatccctgcattggatgttaaaaatatatatgagctacctatctcttatcatcaatataatctagatacacaaatattaaaacattttaatattacttctcctgaaccaaatttagataaatgggaaaatatattaaatatctctcatatatcaacaaaaacaattactattgcaatcataggaaaatatatcaaattattagatgcatataaatcactaattgaagcgttagaacacgcagcaattcataataaaactaaactatctatacactggatagattcacgctcattaaataatgaaattactaatacatttgataatgtccatgctattttaataccaggaggttttggtgacgatggagtggaagggaaaataattgctattaagtatgcacgtatcaacaacataccatttctaggaatttgtatgggtatgcagcttgctataattgaatttgtacgcaatgttatacatcttgaggatgctaattctacagaatttaacttttattgtaaaaatcctgttatacatcaattaccagaattacaacaaaatcttggcggaagcatgaaattagggtctcacccgtgttatttaaaagtagattcaaaaattttttctatatataaagaacaagtaattaatgaaaggagaagacatagatatactgtcaacttacaatacaaagatttattagaaagtcatggtttaatttttactggacactcacaccataacaacaatgatagcttagcagaggtaatagagctaaaaaatcatccatggtttattggagtgcaatttcacccagagtttaaatcagatccttttcaatctcacccattatttatgtcatttgtacaagcttctctaaattatcaagaaacaaaaaaagcataa

SEQ ID NO: 31393 - protein, 540 aa, Ehrlichia ruminantium
MNNLTSTKFIFVTGGVVSSLGKGLAAASIGALLQARGFKICLRKLDPYLNIDPGTMSPIQHGEVFVTDDGAETDLDLGHYERFTGVKTTKNDNITTGKVYHNLLSKERKGDYLGQTVQIIPHVTDLINSFILYNTDALDFVICEIGGTVGDIESQPFLESIRQIGYKLSKNNTVFVHLTLVPYISATMELKTKPTQHSVKELSSVGIQPDIILYRSKIPLSQEQRDKIANLCNVSPTNIIPALDVKNIYELPISYHQYNLDTQILKHFNITSPEPNLDKWENILNISHISTKTITIAIIGKYIKLLDAYKSLIEALEHAAIHNKTKLSIHWIDSRSLNNEITNTFDNVHAILIPGGFGDDGVEGKIIAIKYARINNIPFLGICMGMQLAIIEFVRNVIHLEDANSTEFNFYCKNPVIHQLPELQQNLGGSMKLGSHPCYLKVDSKIFSIYKEQVINERRRHRYTVNLQYKDLLESHGLIFTGHSHHNNNDSLAEVIELKNHPWFIGVQFHPEFKSDPFQSHPLFMSFVQASLNYQETKKA

SEQ ID NO: 31394 - DNA, 1608 bp, Encephalitozoon cuniculi
  CDS (1)..(1608)
atgaagtacgttattgtttccggaggagttatttctggcgttggaaagggcatagtcagcagcagtatcggcgcactgctgaagtcgaggggccatgttgtgacacactttaaaattgacccatacctgaactacaatgctggaaggatgcacccatatgagcatggggaggtctatgtccttgatgatggacatgagtgtgatatggattttgggaactacgaaagattcaatgggataaagctctcgggtgccaacagtatacccggtgggaggctacttcatgatattgtaaaatgcgagcgggaggggtcttttcttgggaagacactgcagatcaacccgcacataatagatgaggtgatcaggagaatcagggctgttgcagacacccctgtcgagagcttcggcggcggccaggccgcagtgccagacgtcgtcgtcgtcgagctcgggggaaccgtcggcgagtacgagtcgtcgatatacacagaggccctggcaaagttccagtacgtcgtcggaaaggccaactgtgcatttgtgtctgtggactacatcgtggagctggagaccggggagcagaagacaaagggcatccagatggggtgtaggaacttcaggaggtttgggctcaactacgacatcgtcatatgcaggggccggagggagccgaacatggagacccgcaggaagatatcgacaagctgctgggtcaaggaggagaatgtgctggggcttccgaacctcgagtctgtgtaccttgcgccgatgtttcttgagaagcacgggattgtcgaggccctgaacaggattctggggctggacgacaagggaatggaccggaggatgctggacatattctccatggttgggaggagacaccgggacggggtgcggattgggatagttgggaagtacgcgccggagtttgacagctacacgtctcttgtgaatgcactgaagttttccggggcgcacatcggggtgaatgtggagattgtgtggattaactctgagtcgtactctgtgtgtgactttgagcggtgcgacggggttgtgatacctgggggatttggggcgcgggggatttctgggaagattgaggcgatccggcatgcgcgggagaacggggttccgcttctggggatctgcctcgggtaccagctgtctgtgattgagatgtgcaggaacattctcgggatgtctgatgcattttccgaggagttccagccctcggggaagaatcttgttgtccggtttatcagcgacgagaacggggtggtggacaagaggctgcgtgtcgggggatatggggttgagctgcgtgacgggctggtgaagaagctgtatgggggcgtggagactgtacgggagaggcaccggcaccggtttgaggtggcgcaggagaaggtgcgcgggcttttgcagcacggagtgaggtttgtggggttcagcagtggagggaagaagataaatgtttttgaggttgaatcgcacccgttttttgttggggtgcagttccaccctgagttcaatgcaaggcctgaccgcccacaccctctgataaccgggcttgtgtctgcatcgtacgaaagatcgaaataa

SEQ ID NO: 31395 - protein, 535 aa, Encephalitozoon cuniculi
MKYVIVSGGVISGVGKGIVSSSIGALLKSRGHVVTHFKIDPYLNYNAGRMHPYEHGEVYVLDDGHECDMDFGNYERFNGIKLSGANSIPGGRLLHDIVKCEREGSFLGKTLQINPHIIDEVIRRIRAVADTPVESFGGGQAAVPDVVVVELGGTVGEYESSIYTEALAKFQYVVGKANCAFVSVDYIVELETGEQKTKGIQMGCRNFRRFGLNYDIVICRGRREPNMETRRKISTSCWVKEENVLGLPNLESVYLAPMFLEKHGIVEALNRILGLDDKGMDRRMLDIFSMVGRRHRDGVRIGIVGKYAPEFDSYTSLVNALKFSGAHIGVNVEIVWINSESYSVCDFERCDGVVIPGGFGARGISGKIEAIRHARENGVPLLGICLGYQLSVIEMCRNILGMSDAFSEEFQPSGKNLVVRFISDENGVVDKRLRVGGYGVELRDGLVKKLYGGVETVRERHRHRFEVAQEKVRGLLQHGVRFVGFSSGGKKINVFEVESHPFFVGVQFHPEFNARPDRPHPLITGLVSASYERSK

SEQ ID NO: 31396 - DNA, 1611 bp, Enterococcus faecalis
  CDS (1)..(1611): transl_table=11
atgacaaaatacatctttgttacaggtggcgtggtttcttctatcggaaaagggattgtcgcagcatctttaggacgattattaaaaaatcgtggattaaaagtaacgattcaaaaattcgatccatatattaatgtggatccggggacaatgagtccttaccaacatggagaggtttttgtcacagatgatggtgccgaaacagatttggacttaggtcactatgaacgttttattgatattaacttaaataaatactcaaacgtaaccactgggaaaatttattcagaagtcttacgtaaagaacgtaaaggggaatacttaggtgcaacagtgcaagttattccacacattaccaatgaaatcaaagaaaaaattatgcgtgcagcgaaaatgacggatgccgatgtgattatcacagaagtaggtggtactgtcggcgacatcgaatcattacctttcctagaagcattgcgtcaaatgaaagctgatatgggtagtgacaacgtaatgtacatccatacaaccttgattccttacttaaaagcggctggcgaaatgaaaactaaaccaacacaacatagtgtcaaagaattaagaagtttagggattcaaccaaatattttagtggtccgtacagaattacctgtttctcaaaacactaaaaacaaattagcacaattctgtgatgttaatccagaagcggtaattgaatctcgtgatgttgaaacattgtactccattccattagcacttcaagcacaaaacatggatcaaattgtttgtgatcatttaaaattggacgcaccggctgcagacatgactgagtggcgtgcattagaagaaaaagttcttaacttgaaaaagaaaacaaaaattgcgctggttggtaaatatgttgaattaccagatgcctatatttctgttgtagaagcattaaaacatgctgggtttgattttgattcagatatcgaaattgattgggttgattcacaagaattaactgctgaaaatgtcgctgaaagaattggttcagcagatggtattttggttcctggtggttttggtgatcgtggaattgaaggaaaaattgaagcgattcgttttgctcgcgaaaatgacgtaccattccttggcatttgcttaggtatgcaaatggcctgtgtagaatttggtcgtaacgttgtgggcttagaagatgctggttctgcagaaactaatcctgacgtgacaaataacattattgatttaatggcagatcaagaaaacattgagaatttaggtggcacactacgtttaggtttatatccatgtaaattgaaaaaaggaacgaaaactgcggcagcatacggaaatgaagatgttgtccaagaacgtcaccgtcatcgttatgaatttaacaacaaatatcgtcaattatttgaagaaaatggcttagttttctctggagtttcaccagataatcgtttagttgagattgttgaaattcctgaaaaacaattttttgtggcttgtcaattccacccagaattaatttctcgtccaaatcgcccacaacgcttaatcaaaggatttgttggtgcagctttggcaaataaagaaagtaaataa

SEQ ID NO: 31397 - protein, 536 aa, Enterococcus faecalis
MTKYIFVTGGVVSSIGKGIVAASLGRLLKNRGLKVTIQKFDPYINVDPGTMSPYQHGEVFVTDDGAETDLDLGHYERFIDINLNKYSNVTTGKIYSEVLRKERKGEYLGATVQVIPHITNEIKEKIMRAAKMTDADVIITEVGGTVGDIESLPFLEALRQMKADMGSDNVMYIHTTLIPYLKAAGEMKTKPTQHSVKELRSLGIQPNILVVRTELPVSQNTKNKLAQFCDVNPEAVIESRDVETLYSIPLALQAQNMDQIVCDHLKLDAPAADMTEWRALEEKVLNLKKKTKIALVGKYVELPDAYISVVEALKHAGFDFDSDIEIDWVDSQELTAENVAERIGSADGILVPGGFGDRGIEGKIEAIRFARENDVPFLGICLGMQMACVEFGRNVVGLEDAGSAETNPDVTNNIIDLMADQENIENLGGTLRLGLYPCKLKKGTKTAAAYGNEDVVQERHRHRYEFNNKYRQLFEENGLVFSGVSPDNRLVEIVEIPEKQFFVACQFHPELISRPNRPQRLIKGFVGAALANKESK

SEQ ID NO: 31398 - DNA, 1638 bp, Erwinia carotovora subsp
  CDS (1)..(1638): transl_table=11
atgacaactaattatatttttgtgaccggcggggtcgtttcctctctgggtaaaggcattgccgcagcctctctggcggctattcttgaagcccgtggcctcaacgttaccatcatgaaactggacccgtatatcaacgtggatccgggcacgatgagcccgacgcagcacggtgaagtgtttgtcaccgaagacggtgccgaaaccgatctggacttgggtcactacgagcgtttcatccgcactaaaatgtcgcgccgcaacaacttcaccactggccgtatctactctgatgtcctgcgcaaagagcgccgtggcgactatctgggcgcgaccattcaggtgatcccacatatcaccaacgcgattaaagagcgcattattgaaggtggcgaaggccacgatgtcgttctggtagaaatcggcggtactgtcggtgatatcgaatctttgccgttccttgaagcgattcggcagatggcagtacaagtgggccgtgagcacacgctgtttatgcacctgacgctggtaccgtatctggcggcagcgggcgaagtgaaaaccaagccgacgcagcactccgttaaagaactgctttctatcggtattcagcctgacgtgctgatttgtcgttccgaccgcactgtgcccgccaacgagcgtgcaaaaattgctttattctgtaatgtgccagaaaaagcagtaatatcccttaaagacattgattcgatttataaaattccagcactattgaaatcacaaggtctggacgattatatttgtaaacgattcagcttgaactgccccgaagcaaacctgtcagaatgggaacaggttgtgtatgaagaagccaatccgggcggcgaagtgactatcggtatggtcggcaaatatgttgcgctgcccgatgcctacaaatccgttattgaagcgcttaagcatggcgggttgaagaaccgtctgacggtaaatattaagctgatcgactcacaggatgttgaaacccgtggtgtcgaagtattgaaagatttagacgctatcctgattccgggcggttttggctatcgtggcgtcgaagggaaaatcatgtcggcgaattatgcccgtgagaacaatatcccttatctgggcatttgcctggggatgcaggtcgcattaatggaatttgcccgtaacgttgccgggatggaaggggcaaactcaacggagtttgtgccagactgtaagtacccagtggttgcgttgatcacggaatggcgtgatgagaacggcgatgttgaagtccgtgatgaagcaagcgatctgggcggcaccatgcgcgttggcgggcagcaatgccatctaaccgaaggcagtctggtgcgtcagatgtacggtgaacagacgattatcgaacgtcaccgtcatcgttatgaagttaacaacatgctgttgaaacagattgaagcggcgggattacgggttgctggcctttccgccgaccgcaaactggtggagattgtcgagttacccgatcatccttggttcgttgcctgtcagttccacccggaattcacatcaacgccgcgagatggacaccccctgtttgccggctttgtcaaagccgctggcgcgtatcagaagcgtcaggtgaagtaa

SEQ ID NO: 31399 - protein, 545 aa, Erwinia carotovora subsp
MTTNYIFVTGGVVSSLGKGIAAASLAAILEARGLNVTIMKLDPYINVDPGTMSPTQHGEVFVTEDGAETDLDLGHYERFIRTKMSRRNNFTTGRIYSDVLRKERRGDYLGATIQVIPHITNAIKERIIEGGEGHDVVLVEIGGTVGDIESLPFLEAIRQMAVQVGREHTLFMHLTLVPYLAAAGEVKTKPTQHSVKELLSIGIQPDVLICRSDRTVPANERAKIALFCNVPEKAVISLKDIDSIYKIPALLKSQGLDDYICKRFSLNCPEANLSEWEQVVYEEANPGGEVTIGMVGKYVALPDAYKSVIEALKHGGLKNRLTVNIKLIDSQDVETRGVEVLKDLDAILIPGGFGYRGVEGKIMSANYARENNIPYLGICLGMQVALMEFARNVAGMEGANSTEFVPDCKYPVVALITEWRDENGDVEVRDEASDLGGTMRVGGQQCHLTEGSLVRQMYGEQTIIERHRHRYEVNNMLLKQIEAAGLRVAGLSADRKLVEIVELPDHPWFVACQFHPEFTSTPRDGHPLFAGFVKAAGAYQKRQVK

SEQ ID NO: 31400 - DNA, 1827 bp, Frankia sp
  CDS (1)..(1827): transl_table=11
gtgggtcaggcgcatatcaccaaacacatcttcgtcaccggcggggttgcgtccagtctcggcaagggactgaccgcgtcgagccttggtcgactactcaaggctcgtggacttcgtgtcacgatgcagaagctcgacccctacctcaacgtggacccgggaacgatgaacccgtttcagcacggtgaggtgttcgtgaccgacgacggggccgagaccgacctcgacatcggccactacgagcggttcctcgacgtcagcctcgacggcagcgccaacgtgacgacgggtcaggtctactcggccgtcatcgccagggaacgccgcggcggctatctgggccagaccgtccaggtcgtcccgcacatcaccgacgaaatcaaggaccggatccggcggctggccgatgactccgtcgacgtggtgatcactgaggtcggcgggaccgtcggggacatcgaatcgctgccctacctggaggcgatccgtcaggtacgccacgaggtcggtcgggacaacgccctgacggtgcacgtgagcctggtcccctacctcgccccctccggagagttgaagaccaagccgacccagcattcggtcgcggcgttgcgcagcatcggcctgcagcccgacgccgtggtctgccggtccgaccggccgctgcccgattcgctcaagaagaagatcgcgatgatgtgcgacgtcgatgacgaggccgtcgtcggggcgccggacgcgagttccatctacgacatcccccgggtgctgcaccgcgagggcctcgacgcctacgtggtgcgtcggctcgggctgtccttccgcgacgtcgactggacggagtgggacacgttgctgcggcgggtgcaccacccggccaacacggcgacgatcgcgatcgtcggcaagtacgtggatctccccgacgcctacctctcggtgaccgaggccctgcgcgccggcgccttcgccaccgacacccgggtggacctgcggtgggtcacctcggacgagtgctcttccccggatgcgacggccaccctgctcgacgggatcgacggggtcatcgttcccggtggtttcggggtgcggggcatcgagggcaagctcaccgcgctgcggcacgcccgcgagaacggcattccgaccctcggtatctgcctcggcctgcagtgcatggtcatcgaggcggcccgcagtctcgccggcctggaggcggcgaactccaccgagttcgtccccgagaccccccacccggtgatctccacgatggccgaccagcacgaggtggtggccggcacccgggacatgggcggcacgatgagactgggcctgtactcgtgcgtgctggcgcccggcacgctcgcccagcgtgaatacggcgccgccgaggtcgccgagcgccaccggcaccggtacgaggtgaacaacgactatcggcaccggctggccgccgccgggctggtcttctccgggacgtcaccggacggccgcctggtcgaggtggtcgaactgcccgccgatgtgcatccgtactacgtcggcacccaggcacatccggagttccggtcccggccgacccgggcccatccgttgttccggggtctcgtcgccgcggcggtcgcgcatgcggaccgccgccgcgggatgctgccggtggacctgccgagcgaggacgcccccaccccggagaacggcgtcccggagaacggcgccgcgcagacccgcggcgtcacggctggtcgatccggcgggagtatccgccggggcgcgagcgcgtcccggccgagcgtcagctccaacggcaccgccgcgctggtgtccccgtga

SEQ ID NO: 31401 - protein, 608 aa, Frankia sp
MGQAHITKHIFVTGGVASSLGKGLTASSLGRLLKARGLRVTMQKLDPYLNVDPGTMNPFQHGEVFVTDDGAETDLDIGHYERFLDVSLDGSANVTTGQVYSAVIARERRGGYLGQTVQVVPHITDEIKDRIRRLADDSVDVVITEVGGTVGDIESLPYLEAIRQVRHEVGRDNALTVHVSLVPYLAPSGELKTKPTQHSVAALRSIGLQPDAVVCRSDRPLPDSLKKKIAMMCDVDDEAVVGAPDASSIYDIPRVLHREGLDAYVVRRLGLSFRDVDWTEWDTLLRRVHHPANTATIAIVGKYVDLPDAYLSVTEALRAGAFATDTRVDLRWVTSDECSSPDATATLLDGIDGVIVPGGFGVRGIEGKLTALRHARENGIPTLGICLGLQCMVIEAARSLAGLEAANSTEFVPETPHPVISTMADQHEVVAGTRDMGGTMRLGLYSCVLAPGTLAQREYGAAEVAERHRHRYEVNNDYRHRLAAAGLVFSGTSPDGRLVEVVELPADVHPYYVGTQAHPEFRSRPTRAHPLFRGLVAAAVAHADRRRGMLPVDLPSEDAPTPENGVPENGAAQTRGVTAGRSGGSIRRGASASRPSVSSNGTAALVSP

SEQ ID NO: 31402 - DNA, 1596 bp, Geobacillus kaustophilus
  CDS (1)..(1596): transl_table=11
atgacgaaatacatttttgtgacgggcggcgttgtttcctcactcgggaaagggattacggcggcttcgcttggacgtttgttgaaaaaccgcgggttgaacgtgacgatccaaaagtttgacccgtacattaacgtcgacccagggacgatgagcccgtatcagcacggcgaggtgttcgtcacggacgacggtgcagagacggatttggatttagggcattatgaacggttcatcgatattaatttaaacaaatacagcaacgtgacgacaggaaaaatttattccgccgtcatccgcaaagagcgccgcggcgattacctaggcggcacggtgcaagtcattccgcacattaccaacgaaattaaagagcgcgtcttccgggccggaagagagacgaacgccgatgtcgtcattacggagatcggcggcacggtcggcgatattgaatcgcttccgtttttagaagcgatccgccaaatcaaaagcgatgttggacgagaaaacgtcatgtacatccactgcacgctcgtgccgtacatcaaggcggctggggaaatgaaaacgaagccgacgcagcacagcgtgaaagaattgcgcagcctcggcattcagccgaacgtcatcgtcgtgcgcacggaaatgccgatgccgcaggaaatgaaagagaaaatcgccctcttttgcgacatcgatccgaaagcggtcatcgaggcgcgcgatgccgacacgctgtatgcggtcccgcttatgcttcaagaacaaaaactggaccaaatcgtgtgcgaacatttgcgcctcaactgccgcgaagcggatatgaccgaatggaaggcgctcgtcgagaaagtgcgcaacttatcgaaaacgacgaaaatcgctttggttggcaaatacgtcgagcttccggacgcctatatttctgttgttgaggcgctccgtcatgcggggtatgcgtttgacaccgacattgatattcagtggatcaatgctgagcatgtgacgcgtgacaatgtagccgacctgttgaaagatgcggacggcattttggttccgggcgggttcggcgaccgcggggtcgaagggaagattgaggcgatccgctacgcccgcgagcagcgcgtgccgtttttgggcatttgcttaggaatgcagctcgcctcgattgaatttgctcgccatgttgtcgggttgtccggcgcccattcgtccgagtttgacccgaacacgccgcatccgatcatcgacttgcttccggagcagaaggatgtcgaagatttaggcggcacgctccgcctcggcttgtatccgtgcaagctgcaggaagggacgcttgcctacgccgcctacggcgatgaagtcatttacgagcgccatcgccatcggtacgaattcaacaaccaataccggccgatcatggaagagcacggcttcgtcttttccggcacgagtccggacggacggttggttgaagtgatcgaactcaaggatcatccgtggttcgtcgccgcgcaattccatccggaattcacctcgcgcccgacgcggccgcagccgctgttccgcgagtttgtcagagcgtcgctgaaagagtga

SEQ ID NO: 31403 - protein, 531 aa, Geobacillus kaustophilus
MTKYIFVTGGVVSSLGKGITAASLGRLLKNRGLNVTIQKFDPYINVDPGTMSPYQHGEVFVTDDGAETDLDLGHYERFIDINLNKYSNVTTGKIYSAVIRKERRGDYLGGTVQVIPHITNEIKERVFRAGRETNADVVITEIGGTVGDIESLPFLEAIRQIKSDVGRENVMYIHCTLVPYIKAAGEMKTKPTQHSVKELRSLGIQPNVIVVRTEMPMPQEMKEKIALFCDIDPKAVIEARDADTLYAVPLMLQEQKLDQIVCEHLRLNCREADMTEWKALVEKVRNLSKTTKIALVGKYVELPDAYISVVEALRHAGYAFDTDIDIQWINAEHVTRDNVADLLKDADGILVPGGFGDRGVEGKIEAIRYAREQRVPFLGICLGMQLASIEFARHVVGLSGAHSSEFDPNTPHPIIDLLPEQKDVEDLGGTLRLGLYPCKLQEGTLAYAAYGDEVIYERHRHRYEFNNQYRPIMEEHGFVFSGTSPDGRLVEVIELKDHPWFVAAQFHPEFTSRPTRPQPLFREFVRASLKE

SEQ ID NO: 31404 - DNA, 1617 bp, Geobacter metallireducens
  CDS (1)..(1617): transl_table=11
atgaaaaccaagtttatctttgtgaccggtggagttgtttcctccataggcaaggggcttgcctcggcatccctcggggctctcctggaggccaggggcctgcgggtttccatgcagaagctcgacccctacattaacgtcgatcccggtaccatgtcccccttccagcatggtgaggttttcgttaccgatgatggcgccgaaaccgacctggaccttggccactacgagcgctatacgtcggcacggctttccaaacggagcaacttcaccacgggccaggtctacttttcggtcatcgagaaggagcgtcgcggcgattacctgggagggaccgtccaggtaattccccacatcaccgatgagatcaaacataagattctcgagaatgccaagggtgccgatgtggctatcgttgaggtcgggggcaccgtgggggacatcgagtcgctgccgttcctcgaggcgatccgccagttcaaggccgaccgtggcgcaggcaacgttctctatctccacgtgacgctcgttccctacatcaagaccgccggcgagttgaaaaccaagccgacccaacactcggtcaaggagttgagggaaattggcatccagcccgatattctcatttgccgctgcgagaaggatctgccccacgacatgaaggcgaagatcgccctcttctgtaacgtggaggaaaagggggtcatcacctccgcagacgccgagcacatctacgcagtccccctcgcgctccacaaacaggggctcgacgaccaggtggtggacaagctcaacatctggaccaaggccccggacctggccccttgggaaagcgtagtggagaagctccgcaacccgctcaagggcgaggttcacattgccatcgtcggtaagtacgtgaacctcaccgaatcgtacaaatcccttgccgaggccctaacccacggcgggatcgccaatgactgccgcgtttacctccgctacctcgattccgagaagctggagagcgaaggcctcggcggtcttctggacgacgtcgatgccattctcgtgccaggcgggttcggagaacgggggaccgaaggaaagatcaaggccatcgagtacgcccggacccggaaagttccgtttttcggcatctgtctcggcatgcaaatggctgttgtcgagtatgcccgcaacgtctgtggccttgacaacgccttctccagcgaattccgacccgactgcgcgaatccggtcattcatcttatggaggagcagaagggggtggagcgcaagggaggaaccatgcggcttggggcctatccctgttcactctcgaaggggaccttcgcccaccgggcctatggctcccttgacgtctccgagcggcaccgccaccgctacgaattcaacaacgccttccgggagattctggtttccaaagggctcgtcatctccggcatctacaaggagggtgacctcgtcgagatcgtcgaggtggcggatcacccctggttccttggctgccagttccatccggagttcaagtccaagcccctcaatccccatccgctcttcaggacgttcattgccgctgccctggaacaccggggcaagagatcacaggcttag

SEQ ID NO: 31405 - protein, 538 aa, Geobacter metallireducens
MKTKFIFVTGGVVSSIGKGLASASLGALLEARGLRVSMQKLDPYINVDPGTMSPFQHGEVFVTDDGAETDLDLGHYERYTSARLSKRSNFTTGQVYFSVIEKERRGDYLGGTVQVIPHITDEIKHKILENAKGADVAIVEVGGTVGDIESLPFLEAIRQFKADRGAGNVLYLHVTLVPYIKTAGELKTKPTQHSVKELREIGIQPDILICRCEKDLPHDMKAKIALFCNVEEKGVITSADAEHIYAVPLALHKQGLDDQVVDKLNIWTKAPDLAPWESVVEKLRNPLKGEVHIAIVGKYVNLTESYKSLAEALTHGGIANDCRVYLRYLDSEKLESEGLGGLLDDVDAILVPGGFGERGTEGKIKAIEYARTRKVPFFGICLGMQMAVVEYARNVCGLDNAFSSEFRPDCANPVIHLMEEQKGVERKGGTMRLGAYPCSLSKGTFAHRAYGSLDVSERHRHRYEFNNAFREILVSKGLVISGIYKEGDLVEIVEVADHPWFLGCQFHPEFKSKPLNPHPLFRTFIAAALEHRGKRSQA

SEQ ID NO: 31406 - DNA, 1611 bp, Geobacter sulfurreducens
  CDS (1)..(1611): transl_table=11
atgaaaaccaagttcatcttcgtaaccggtggcgttgtgtcctccatcggcaaagggcttgcctcggcgtcgctcggggcgctgctggagtcccgcggcctgcgggtaaccatgcagaagctggacccttacatcaacgttgaccccggcaccatgtcgccgttccagcacggcgaggtttttgtcaccgacgatggcgccgagaccgacctggacctggggcactacgaacggtacacctctgcccggctctccaaacggagcaatttcaccacgggccaagtctatttttcggtcatcgagaaggaacggcgcggcgattatctgggggggaccgtgcaggttattccccatatcaccgacgagatcaagcacaagatcctggagaacgccaaaggggccgatgtggccatcgtggaggtcgggggaacggtcggcgacatcgaatcgctcccgttcctggaggcgatccggcagttcaaggcggaccggggggcggggaacgttctttacattcacgtgacgctcgtgccccacatcaagacggccggtgagttgaagaccaagccgacgcagcactccgtcaaggagttgcgcgagatcggtatccagcccgacattctcatctgccgttgcgagatggagctgccccgggacatgaaggccaagatcgccctgttctgcaacgtggaagagaaggcggtcatcacctctaccgatgcggaacatatctatgcggtacccctggcgcttcacaaggaaggtctcgacgagcaggtagtagaaaagctcaacatctggaccaaggcgcctgatctcagtccctggcacagtgttgtggaaaaacttcgctcgcccctgcggggagaggtccgcattgccatcgtcggcaagtacgttaatctcaccgagtcatacaagtccctgtccgaagcccttacccacggcgggatcgccaacgactgccgggtggttctcacctatctggactccgagcggatcgaaagcgaggggatcggcagctccttcgatgacatcgatgccatcctggtgccgggagggttcggcgagcggggaaccgagggcaagatcaaggccatcgagtacgcccgcacccaaaagattcctttcttcggcatctgtctcggcatgcagatggcggtggtggagtatgcccgcaacgtttgtgggctcgaagatgcctgttccagcgagttccgtcccgattgcgccaacccggtcatcagtctgatggaggaacaacgcgacatcgaccggctgggcggcaccatgcggctcggtgcctatccctgcagccttaccaagggaacttttgcccaaaaagcgtacgggtccctggaaatatccgaacgtcaccgtcaccgctacgagtacaataacgccttccgtgagacccttgtggccaatggcctcgtcgtgtcggggctctacaaggaaggggatctggtggagatcgtggaggtcgccgaccacccttggttcctcggctgccagttccacccggaattcaagtcaaagccgcttaacccccaccctctgttcagggcatttatcgcagccgcccttgatcggaaagacaaaaggcgatag

SEQ ID NO: 31407 - protein, 536 aa, Geobacter sulfurreducens
MKTKFIFVTGGVVSSIGKGLASASLGALLESRGLRVTMQKLDPYINVDPGTMSPFQHGEVFVTDDGAETDLDLGHYERYTSARLSKRSNFTTGQVYFSVIEKERRGDYLGGTVQVIPHITDEIKHKILENAKGADVAIVEVGGTVGDIESLPFLEAIRQFKADRGAGNVLYIHVTLVPHIKTAGELKTKPTQHSVKELREIGIQPDILICRCEMELPRDMKAKIALFCNVEEKAVITSTDAEHIYAVPLALHKEGLDEQVVEKLNIWTKAPDLSPWHSVVEKLRSPLRGEVRIAIVGKYVNLTESYKSLSEALTHGGIANDCRVVLTYLDSERIESEGIGSSFDDIDAILVPGGFGERGTEGKIKAIEYARTQKIPFFGICLGMQMAVVEYARNVCGLEDACSSEFRPDCANPVISLMEEQRDIDRLGGTMRLGAYPCSLTKGTFAQKAYGSLEISERHRHRYEYNNAFRETLVANGLVVSGLYKEGDLVEIVEVADHPWFLGCQFHPEFKSKPLNPHPLFRAFIAAALDRKDKRR

SEQ ID NO: 31408 - DNA, 1650 bp, Gloeobacter violaceus
  CDS (1)..(1650): transl_table=11
atgacaaagtatgtattcgtaacgggcggtgtcgtgtcctcgatcggcaaaggcatcgtcgccgcttccctaggccgtctgctcaaatcgcggggctactcggtgacgatcctcaagctcgatccgtacatcaacgtcgatccgggcacgatgagcccgtttcagcacggcgaggtgttcgtcaccaacgacggcgccgagaccgacctggacctgggccattacgagcgattcaccgataccgacgtctccaagctcaacaacgtcaccaccggctcgatttaccagagtgtgatcaacaaagaacgccggggcgactacatgggcggcacggtccaggtcatcccccacatcaccaacgagatcaaagagcgcatccgccgggtggcccacgacaccaacccggacgtggtgattgtcgaggtgggcggcaccgtgggcgatatcgagtcgctgccgtttctggaggcgatccgccagtttcgcaaggacgtcggccgcgagaacgtgctctatattcacgtcacctatatcctgcacatcccgaccgcgggcgagatgaagaccaagcccacccagcactcggtcaaagaattgcgctcgatcggtatccagccggatattctggtctgccgctccgaccggcctctcagcgtcgggatcaaagacaagatttctgaattttgcgatgtgccggtgcgggcggtgatcacctgccaggacgcccagaccatttacgccgtgcccctcaatctggagcgcgaagggctcgcccatcaggcgatcacgcttttgggcctcgagcagcgccagccggacctgcgcgattgggaaattctggtcgaccgcatctgcaacccgtcgcgcgcggtgaccatcgccatcgtcggcaagtacgtgcggctctcggacgcctatatctcggtggtcgaagcgctcaggcacgccgcggtcgccctcgacgccgaagtcaaagtcgaatgggtctcagccgaagcggtcgaggagcgcggagccggttattttctgaacaacgtcgatggggcggtggtgccggggggcttcggttcgcgcggcatcgacggcaaagtgagcgctatcgagttttcccgcgggcaccgattgcccttcttgggcctgtgtctcggcatgcagtgctcggtgatcgagtgggcgcgccacaccgccgggcttgccgccaacagcaccgagttcgacccgcagacccccaacccggtcatttcactgctccccgagcaggcggacgtggtggatctaggcggcacgatgcgcctggggctctggccctgccgtctgcaggaaggcaccctggcccaccgcctctacggcgagacgctggtctacgagcgtcaccgccaccgctacgagttcaacaacgcctaccgcaaggcgattatcgaagcgggcttccagatcagcggcgcctcccccgacgagcgcctcgtcgaaatcatcgaactggccgatcacccctacttcatcgccacccagtttcaccccgagttcaagtcgcggcccaacaaaccccacccgctctttttcggtctggtgcgcgccgccctcgagcgcaaggagacagaacggctacccgccagtccggcaccggtcccgctgccgtccgcggtttga

SEQ ID NO: 31409 - protein, 549 aa, Gloeobacter violaceus
MTKYVFVTGGVVSSIGKGIVAASLGRLLKSRGYSVTILKLDPYINVDPGTMSPFQHGEVFVTNDGAETDLDLGHYERFTDTDVSKLNNVTTGSIYQSVINKERRGDYMGGTVQVIPHITNEIKERIRRVAHDTNPDVVIVEVGGTVGDIESLPFLEAIRQFRKDVGRENVLYIHVTYILHIPTAGEMKTKPTQHSVKELRSIGIQPDILVCRSDRPLSVGIKDKISEFCDVPVRAVITCQDAQTIYAVPLNLEREGLAHQAITLLGLEQRQPDLRDWEILVDRICNPSRAVTIAIVGKYVRLSDAYISVVEALRHAAVALDAEVKVEWVSAEAVEERGAGYFLNNVDGAVVPGGFGSRGIDGKVSAIEFSRGHRLPFLGLCLGMQCSVIEWARHTAGLAANSTEFDPQTPNPVISLLPEQADVVDLGGTMRLGLWPCRLQEGTLAHRLYGETLVYERHRHRYEFNNAYRKAIIEAGFQISGASPDERLVEIIELADHPYFIATQFHPEFKSRPNKPHPLFFGLVRAALERKETERLPASPAPVPLPSAV

SEQ ID NO: 31410 - DNA, 1632 bp, Gluconobacter oxydans
  CDS (1)..(1632): transl_table=11
atgacgcgtttcgtattcatcaccggcggtgtggtatcttctctcggcaagggcatcgcttcagcggccctcgctgctctcctccaggcgcgcggatacaaggtccgcatgcgcaaactggacccctatctcaacgtggatccgggcaccatgagcccgtaccagcacggtgaggtgttcattaccgatgacggggcggaaaccgacctcgatctcggtcactatgaacgcttcacgggcgtccatgcgtcacgtgctgacaacaccacgacggggcggatctattcggatgtgatcgcgcgcgaacgccgcggcgactatctgggcgggaccgtgcaggtcatcccgcacattacggatgccatcaaggacgtcgtggtcacgggtactgacgactatgatttcgtcctcgtggaaatcggcggtacggtcggcgacatcgagagcctgcccttcctcgaagccatccgtcagctgcgcaatgatctcggccatgcccagaccatgtgcgtgcacctgaccctcctgccctatattccggcagccggcgagctcaagacgaagcccacgcagcattccgtcaaggagctgcagaatgtcggtatccagccgcagatgctgctgtgccgctcggaccgtcccatcccggacaacgagcgtcgcaagattgccaatttctgcaatgtccgtccggaagccgtcatcgcggcgctggatgtggacacgatctatgcctgccctatttcctatcacaatgagggaatggatcaggaagtcctgcgctattttgatctgccctatgacagcaagccggacctctcgcgctgggaaaagatcgtccatgcgattcgcgaacccgaaggcgaagtccgcgtggccatcgtcggcaagtacacggccctgctcgacagctacaagtcgctggccgaggccctgctgcatggtggcattgccaaccatgtgaaggtgaagctcgactggatcgaatcggaagagttcgaaaagaacggcaatattgccgaacgcctgaaggatgcggacgccatcctcgtgccgggcggcttcggtgaacgcggtgcggaaggcaagatccaggctgtccgctatgctcgtgagcacaacattccgttcttgggcatctgcttcggcatgcagatggccgtgatcgaatgtgcccgttcgctggcgggtctgcccaaagcctcgtccaccgagttcggtcccacggacgaaccgctggtcggcctgatgaccgaatgggcccgtggcagcgaaatgctccgtcgtcgcgaaggtggcgatctgggtggcacgatgcgtctgggtgcctatccggccaagctggttccgggctcccgcgtggcggaaatctatggtcgtacggaaatccgcgagcgccatcgtcaccgctgggaagtcaacgcccactacaaggaccgtctcgaaaagacaggcctgcgcttctccggtctgtctcctgacggcgtactgccggaagtggtcgaatacccggatcacgcgtggttcgtggccgtgcagtaccatccggaactgctctccaagcctttcgacccgcatccgctgttcgcaggtttcattgccgcggccgtcaaggaggctcaccgcaagtga

SEQ ID NO: 31411 - protein, 543 aa, Gluconobacter oxydans
MTRFVFITGGVVSSLGKGIASAALAALLQARGYKVRMRKLDPYLNVDPGTMSPYQHGEVFITDDGAETDLDLGHYERFTGVHASRADNTTTGRIYSDVIARERRGDYLGGTVQVIPHITDAIKDVVVTGTDDYDFVLVEIGGTVGDIESLPFLEAIRQLRNDLGHAQTMCVHLTLLPYIPAAGELKTKPTQHSVKELQNVGIQPQMLLCRSDRPIPDNERRKIANFCNVRPEAVIAALDVDTIYACPISYHNEGMDQEVLRYFDLPYDSKPDLSRWEKIVHAIREPEGEVRVAIVGKYTALLDSYKSLAEALLHGGIANHVKVKLDWIESEEFEKNGNIAERLKDADAILVPGGFGERGAEGKIQAVRYAREHNIPFLGICFGMQMAVIECARSLAGLPKASSTEFGPTDEPLVGLMTEWARGSEMLRRREGGDLGGTMRLGAYPAKLVPGSRVAEIYGRTEIRERHRHRWEVNAHYKDRLEKTGLRFSGLSPDGVLPEVVEYPDHAWFVAVQYHPELLSKPFDPHPLFAGFIAAAVKEAHRK

SEQ ID NO: 31412 - DNA, 1638 bp, Haemophilus ducreyi
  CDS (1)..(1638): transl_table=11
atggcaacgaattatattttcgtgacgggcggtgttgtttcatctttaggcaaaggtattgccgcggcatcactcgcatctattcttgaagctcgtggtttaaatgttaccattatgaagcttgatccttatattaatgtcgatccaggcactatgagtcctacccaacacggtgaggtttttgttactcaagatggtgcggaaactgatttagatttaggccattatgaacgttttattcgctcaaaaatgagtaaagcaaataattttactagcggtaagatttattcagaagtattacgtaaagaacggcgtggtgattatctcggtgcgacaattcaagtgattccgcatattactaatgaaattaaagcgcgtgtaattgaaggtggtaaaggtcgcgatgttgtgattgtggaagtggggggcactgttggcgatattgagtccttaccattcttagaagcattacgtcagcttgctgtagatgtaggccgtgaaaaaacattgtttatgcatttaacgttagtgccatatattccaacagcgggtgaagtcaaaactaaaccaacgcaacattccgtgaaagaattactgtcaattggtattcaaccagacgtgttaatctgtcgttcagaccgtacaattcctgcaaatgaacgtaaaaaaattgctttattctgtaatgtgccagaacgtgcagtgatttcattaaaagatgttgattcgatttaccgtattccagaattattaaaatcacaagctttagatagttttgtttgtgatcgcttccgtttggaatgcccagaagcagatttaagtgaatgggaacaagtgctttatcgtcaagcaaatccaaccggtgaagtgaccattggaatggtcggcaaatatgttgaattacccgatgcgtataaatcggtgaatgaagcattaaaacacgccggtttaaccagccgcttaagtgttaatattaaatatattgattcacaagatattgaaacaaaaggcacagaattattagatggcttagatgcgattttagtcccaggtggttttggttatcgtggcgtggaaggtaagatccgtacagcgcaatatgcaagagaaaataatattccttatttaggtatttgtttaggtatgcagattgcattaattgaatatgcgcgtaatgtagcgggcttaactgaggcaaattcatcggaatttgatcctgcgtgtagccagccagtgattggtttaattacggaatggcaagatgaatcaggcaatgttgaaacacgtacagataaatcagatttaggtggtacaatgcgtttaggtgcacagcaatgccatttaattgaaggaactaaagctcgagaaatctatggcgcagaagcgattgttgaacgtcatcgccaccgctatgaagtgaataatgtattattgccaactattgaagcggcgggattaaaggtaagcggtgtctcagcggatcgcaaattagttgaaattattgaagtgccaaaccatccttggtttatcgctgctcaatttcatccagaatttacttcgactcctcgtgatgggcatccattatttgcaggttttgttgccgcagcaaaagcatatcaagattcgcgtaaagcataa

SEQ ID NO: 31413 - protein, 545 aa, Haemophilus ducreyi
MATNYIFVTGGVVSSLGKGIAAASLASILEARGLNVTIMKLDPYINVDPGTMSPTQHGEVFVTQDGAETDLDLGHYERFIRSKMSKANNFTSGKIYSEVLRKERRGDYLGATIQVIPHITNEIKARVIEGGKGRDVVIVEVGGTVGDIESLPFLEALRQLAVDVGREKTLFMHLTLVPYIPTAGEVKTKPTQHSVKELLSIGIQPDVLICRSDRTIPANERKKIALFCNVPERAVISLKDVDSIYRIPELLKSQALDSFVCDRFRLECPEADLSEWEQVLYRQANPTGEVTIGMVGKYVELPDAYKSVNEALKHAGLTSRLSVNIKYIDSQDIETKGTELLDGLDAILVPGGFGYRGVEGKIRTAQYARENNIPYLGICLGMQIALIEYARNVAGLTEANSSEFDPACSQPVIGLITEWQDESGNVETRTDKSDLGGTMRLGAQQCHLIEGTKAREIYGAEAIVERHRHRYEVNNVLLPTIEAAGLKVSGVSADRKLVEIIEVPNHPWFIAAQFHPEFTSTPRDGHPLFAGFVAAAKAYQDSRKA

SEQ ID NO: 31414 - DNA, 1638 bp, Haemophilus influenzae
  CDS (1)..(1638): transl_table=11
atggctacaaattatattttcgtcactggcggtgtggtttcatcgttaggtaaaggcattgcggcagcatcattggcggcaattttagaagcacgtggtttaaacgtaaccattatgaagttagatccatatattaatgtggatcctggtacgatgagcccaacccaacacggggaagttttcgttactcaagatggtgcagaaacagatttagatttaggtcattatgagcgtttcatccgcacgaaaatgaccaaacgtaataacttcactacaggtaaaatttattctgaagtattacgtaaagagcgtcgtggcgattatcttggtgcaacaattcaagtgattccacatatcacgaatgaaattaaagatcgcgtcattgctggtgctcaaggtcacgacgttgtgattgttgaagtgggcggcactgttggggatattgaatcacttccattcttagaagcattacgtcaattagccgttcaagttggtcgtgaacatacgttatttatgcatttaaccttggtgccttacatcccaacggcgggtgaagtaaaaactaaaccaacccagcattcggtaaaagaattgctttctattggtattcaacctgatgtgttgatttgccgttcagatcgtatgattccaccaaatgaacgtgcgaaaattgctttattttgtaatgttgcagaacgtgcagtcatttcattaaaagatgtgaattcaatttatcaaatccccgcattattaaaatctcaaggtttagatgattttgtctgtgaacgtttccgtttaacttgccctgaagcagatcttactgaatgggagcaagtgctttacaagcaagccaatccagtgggagaagtaaccatcggtatggtaggtaaatacactgagttacccgatgcctataaatcagtaaatgaagccttaaaacacgcaggtttaacgaaccgtttaagtgtaagcattaaatatattgattcccaagatgttgaaaccaaaggtgttgaagtattaaaaggcgttgatggcattcttgttccagggggatttggttatcgtggtgtagagggtaaaattcgtaccgcacaatatgcacgagaaaacaaaattccttacttgggtatttgcttaggtatgcagatcgcattgattgaatatgcacgtaatgtagcgggtttaactaaagccaattcatctgaatttgataaagattgtgaacaacctgtggtggcattaatcacagaatggcaagatgcggagggtaatactgaagtgcgtaccgatgaatcagatcttggcggaacaatgcgtttaggcgcacaacaatgtcatttggtatcaggtagccacgctcgtgagctttatggcaaagaaaccattgaagaacgtcatcgtcatcgctatgaagtgaacaataccttgcttccacaaattgaaaaagcaggattgaaagtaactggattatctgcagataaaaaattggtagaaattatcgaagtgccaaatcatccttggtttgtcgcttgtcaattccatccagaatttacttctacgcctcgtgatggtcatccgttgtttgcaggctttgtaaaagcagcctatgaaaatcacaaaaaatctgtgaagtaa

SEQ ID NO: 31415 - protein, 545 aa, Haemophilus influenzae
MATNYIFVTGGVVSSLGKGIAAASLAAILEARGLNVTIMKLDPYINVDPGTMSPTQHGEVFVTQDGAETDLDLGHYERFIRTKMTKRNNFTTGKIYSEVLRKERRGDYLGATIQVIPHITNEIKDRVIAGAQGHDVVIVEVGGTVGDIESLPFLEALRQLAVQVGREHTLFMHLTLVPYIPTAGEVKTKPTQHSVKELLSIGIQPDVLICRSDRMIPPNERAKIALFCNVAERAVISLKDVNSIYQIPALLKSQGLDDFVCERFRLTCPEADLTEWEQVLYKQANPVGEVTIGMVGKYTELPDAYKSVNEALKHAGLTNRLSVSIKYIDSQDVETKGVEVLKGVDGILVPGGFGYRGVEGKIRTAQYARENKIPYLGICLGMQIALIEYARNVAGLTKANSSEFDKDCEQPVVALITEWQDAEGNTEVRTDESDLGGTMRLGAQQCHLVSGSHARELYGKETIEERHRHRYEVNNTLLPQIEKAGLKVTGLSADKKLVEIIEVPNHPWFVACQFHPEFTSTPRDGHPLFAGFVKAAYENHKKSVK

SEQ ID NO: 31416 - DNA, 1638 bp, Haemophilus influenzae
  CDS (1)..(1638): transl_table=11
atggctacaaattatattttcgtcactggcggtgtggtttcatcgttaggtaaaggcattgcggcagcatcattggcggcaattttagaagcacgtggtttaaacgtaaccattatgaaattagatccatatattaatgtggatcccggtacgatgagcccaacccaacacggggaagttttcgttactcaagatggcgcagaaacagatttagatttaggtcattatgagcgtttcatccgcacgaaaatgaccaaacgtaataacttcactacaggtaaaatttattctgaagtattacgtaaagagcgtcgtggcgattatcttggtgcaacaattcaagtgattccacatatcactaatgaaattaaagatcgcgtcattgctggtgctcaaggtcacgacgttgtgattgttgaagtgggcggcactgttggggatattgaatcacttccattcttagaagcattacgtcaattagccgttcaagttggtcgtgaacatacgttatttatgcatttaaccttggtgccttacattccaacggcgggagaggtaaaaactaaaccaacccagcattcggtaaaagaattgctttctattggtattcaacctgatgtgttgatttgccgttcagatcgtatgattccaccaaatgaacgtgcgaaaattgctttattttgtaatgttgcagaacgtgcagtcatttcattaaaagatgtgaattcaatttatcaaatccccgcattattaaaatctcaaggtttagatgattttgtctgtgaacgtttccgtttaacttgccctgaagcagatcttactgaatgggaacaagtgctttacaagcaagccaatccagtgggagaagtaaccatcggtatggtaggtaaatacactgagttacccgatgcctataaatcagtaaatgaagccttaaaacacgcaggtttaacgaaccgtttaagtgtaaacattaaatatattgattctcaagatgttgaaaccaaaggtgttgaagtattaaagggcattgatggcattcttgttccagggggatttggttatcgtggtgtagagggtaaaattcgtaccgcacaatatgcacgagaaaacaaaattccttacttgggtatttgcttaggtatgcagatcgcattgattgaatatgcacgtaatgtagcgggtttaactaaagccaattcatctgaatttgataaagattgtgaacaacctgtggtggcattaatcacagaatggcaagatgcggagggtaatactgaagtgcgtaccgatgaatcagatcttggcggaacaatgcgtttaggcgcacaacaatgtcatttggtatcaggtagccgcgcccgcgagctttatggcaaagaaaccattgaagagcgtcatcgtcatcgctatgaagtgaacaataccttgcttccacaaattgaaaaagcaggattgaaagtaactggattatctgcagataaaaaattggtagaaattatcgaagtgccaaatcatccttggtttgtcgcttgtcaattccatccagaatttacttctacgcctcgtgatggtcatccgttgtttgcaggctttgtaaaagcagcctatgaaaatcacaaaaaatctgtgaagtaa

SEQ ID NO: 31417 - protein, 545 aa, Haemophilus influenzae
MATNYIFVTGGVVSSLGKGIAAASLAAILEARGLNVTIMKLDPYINVDPGTMSPTQHGEVFVTQDGAETDLDLGHYERFIRTKMTKRNNFTTGKIYSEVLRKERRGDYLGATIQVIPHITNEIKDRVIAGAQGHDVVIVEVGGTVGDIESLPFLEALRQLAVQVGREHTLFMHLTLVPYIPTAGEVKTKPTQHSVKELLSIGIQPDVLICRSDRMIPPNERAKIALFCNVAERAVISLKDVNSIYQIPALLKSQGLDDFVCERFRLTCPEADLTEWEQVLYKQANPVGEVTIGMVGKYTELPDAYKSVNEALKHAGLTNRLSVNIKYIDSQDVETKGVEVLKGIDGILVPGGFGYRGVEGKIRTAQYARENKIPYLGICLGMQIALIEYARNVAGLTKANSSEFDKDCEQPVVALITEWQDAEGNTEVRTDESDLGGTMRLGAQQCHLVSGSRARELYGKETIEERHRHRYEVNNTLLPQIEKAGLKVTGLSADKKLVEIIEVPNHPWFVACQFHPEFTSTPRDGHPLFAGFVKAAYENHKKSVK

SEQ ID NO: 31418 - DNA, 1692 bp, Haemophilus somnus; identical to SEQ ID NO: 31126
  CDS (64)..(1692): transl_table=11

SEQ ID NO: 31419 - protein, 542 aa, Haemophilus somnus
MATNYIFVTGGVVSSLGKGIAAASLAAILEARGLNVTIMKLDPYINVDPGTMSPTQHGEVFVTQDGAETDLDLGHYERFIRTKMTKRNNFTAGKIYSEVLRKERRGDYLGATIQVIPHITNEIKSRVIDGAAGYDVAIVEVGGTVGDIESLPFLEALRQLAVQVGRERTIFMHLTLVPYIPTAGEVKTKPTQHSVKELLSIGIQPDVLICRSDRMIPPNERAKIALFCNVPERAVISLKDVSSIYQIPALLKSQGLDDFICQRFRLDCQEADLSEWEKVLYQEANPTGEVTIGMVGKYTELPDAYKSVNEALKHAGLTNRLTVNIKYIDSQDVETKGIDILKDLDGILIPGGFGYRGVEGKILTAQYARENNVPYLGICLGMQVAFIEYARHVAGLKGANSSEFDRTCEYPVIALITEWQDAEGNVEVRSDESDLGGTMRLGAQQCHLVAGSLAHQLYGSDIIEERHRHRYEVNNVIRPQVEKAGLKVTGLSADKKLVEIIEVPNHPWFVACQFHPEFTSTPRDGHPLFAGFVKAASENRKK

SEQ ID NO: 31420 - DNA, 1662 bp, Haloarcula marismortui
  CDS (1)..(1662): transl_table=11
atgccgaccgaacccgaaacggactacgacccggaactgggtcggaagttcatcttcgtcaccggtggcgtgatgtctggcctggggaagggcatcactgccgccagcacaggtagattactcaaaaacgccgggttcgacgttacagcggtcaagattgacccgtatctgaacgtcgacgccggtacgatgaatcccttccagcacggcgaggtgtacgtgctcaaagacggcggggaggtcgacctcgacctggggaactacgagcggttcctcgacatcgacatgaccttcgaccacaacgtcaccacggggaagacttaccagcacgtcatcgagaaggagcggtccggcgactacctcggtcgcacggtccagattatcccgcatatcaccgacgacatcaagcgccgtatccgcgaggccgccgaaggcaacgacgtctgtatcatcgaagtcggcggcacggtcggggacatcgaagggatgccgtatctcgaagcgctccggcagttcgcccacgaagaggacgaggacgatattctctttacccacgtcacgctcgtcccatactcgaaaaacggcgagcaaaagaccaagccgacccaacactccgtgaaggaactgcgctctatcggtcttcagcccgacattctggtcggccgctgctcggacaaactcgatatcgacaccaaggagaagatcgggttgttctgtgacgtgccgacggaagccgtcttctcgaaccccgatgtcgacgacatctaccatgtcccgctgatggtcgaggaggaaggactcgaccagtacgtgatggaagaactcgacatcgcctcggaggcactgcccgaagacgagcgggagaaccgctggcgcgacctcgtcacccagaacacagagggcgaggtcgaagtcgcgctcgtcggcaagtacgacctcgaagacgcctacatgtccgtccacgaggcgctgaaacacgccggccttgagaaaaacgtcgacgtgaacgtccggtgggtcaactccgagaagatgaatgaccaccacgcagaccggatgcgcgaggccgacgccatcgtcgtgccgggcggcttcggtgcccgcggcacggagggcaaaatcgaggcgatccggtacgcccgcgagaacgacattccgttcctcggcctgtgtctcggctttcagatggctgttgtcgagtacgcccgcaacgtactggaccttgacgatgcccactcggcggaactggaggaagatacgccacatcccgtcatcgacatcctccccgagcagtacgagatcgaggacatgggcgggacgatgcggctgggtgcccatgaaactgaaatcaacgcgaacacgctcgccgcgacgctgtacggcggcgagtcctgtaccgaacggcaccgccaccgatacgaggttaaccccgagtacatcgacgacctcgaagccgctgggctgaagttctccggccgcgccgggaatcgtatggagatactcgaactcggacccgaggaccacccgtacttcatcgggacgcagttccatccggagttccgctcccgaccgacgcgtgccagcccgccgtttgtcggactgctcgaagcggtcctcggcgacgacccccacactgcgacgactgaggaggtgagccactga

SEQ ID NO: 31421 - protein, 553 aa, Haloarcula marismortui
MPTEPETDYDPELGRKFIFVTGGVMSGLGKGITAASTGRLLKNAGFDVTAVKIDPYLNVDAGTMNPFQHGEVYVLKDGGEVDLDLGNYERFLDIDMTFDHNVTTGKTYQHVIEKERSGDYLGRTVQIIPHITDDIKRRIREAAEGNDVCIIEVGGTVGDIEGMPYLEALRQFAHEEDEDDILFTHVTLVPYSKNGEQKTKPTQHSVKELRSIGLQPDILVGRCSDKLDIDTKEKIGLFCDVPTEAVFSNPDVDDIYHVPLMVEEEGLDQYVMEELDIASEALPEDERENRWRDLVTQNTEGEVEVALVGKYDLEDAYMSVHEALKHAGLEKNVDVNVRWVNSEKMNDHHADRMREADAIVVPGGFGARGTEGKIEAIRYARENDIPFLGLCLGFQMAVVEYARNVLDLDDAHSAELEEDTPHPVIDILPEQYEIEDMGGTMRLGAHETEINANTLAATLYGGESCTERHRHRYEVNPEYIDDLEAAGLKFSGRAGNRMEILELGPEDHPYFIGTQFHPEFRSRPTRASPPFVGLLEAVLGDDPHTATTEEVSH

SEQ ID NO: 31422 - DNA, 1662 bp, Halobacterium salinarium
  CDS (1)..(1662): transl_table=11
atgccgacagagaccgaatacgacccctctctggggagcaagttcgtgttcgtgaccggcggcgtgatgtccgggctggggaagggcatcacggcggcgagtctcgggcgactgctctcgaacgcggggttcgatgttactgcggtgaaaatcgatccctacctgaacgtcgacgcgggcaccatgaacccctaccagcacggggaggtgtacgtcctcgatgacggtggggaggttgatctcgatctggggaactacgagcggttcctcgacgaggacatgacctcggatcacaacgtcaccacggggaaagtctaccaggacgtcatcgagcgcgagcgctcgggcgactacctcgggaagaccgtccagatcatcccgcacgtgaccgacgacatcaagcgccgcgtgcgcgaggccgccgaaggcagcgacgtctgcctggtggaggtcggcggcacggtcggcgacatcgaggggatgccgttcctcgaagcgctccggcagttcagccacgagcaggacgacgaggacatcctgttcacacacgtgaccctggtgccgtactcgaaaaacggcgagcagaaaaccaaacccacacagcactccgtcaaggaacttcggtcgatcggcctccagccggacatcctggtcgggcgctgcgaggaccgcctcgatcccgacgtgcgcgagaagatcgcgctgttctgtgacgtgcccatggacgccgtgttctccaatcccgacgtggaggacatctaccacgtgcccctgaccgtcgaggaggaaggcctcgaccagtacgtcatggaacagttcgatatggttgaggacgccctgccggccgcccagcggtcgacggagtggcgggatctcgtcacccgcgagcgcaccggcgaggtggacatcgcgctcgtcggcaagtacgccctggaagacgcctacatgagcatccacgaggcgctcaagcacgccagcctggaggccggcgtggaagtgaacgtgttgtgggttgactccgagaagatgcacgaccaccacgagcgccgcatcgccgacgccgacgggatcgtcgtcgccggcgggttcggctcgcgtggcacggcgggcaaaatcgacgccatccagcacgcccgcgagcacgacgtgccgttcctcgggctgtgcctgggcttccagcttgcggtcgtggagtacgcgcgcaacgttctcgggatgacgggcgcgcactccgcggagatcgacgaggacaccgagtacccggtcatcgacctgctgcccgagcagtacgacctcgaagacctcggcgggacgatgcggctgggcgcacacgagaccgccatcgaacccggaaccctggcccacgacctgtacggcgccacgtcgtgcacggagcgccaccgccaccgctacgaggtcaaccccgagtacatcgacgacctcaccgccgacggcctgacgttctccggcgaggccggcaaccgcatggagatcgtcgaacacgacgaccacccgttcttcttcgggacgcagttccaccccgagtatcggtcgcggccgacgcgagcgagcccgccgttcgtcgggctgcttgacgccgtcctcgaacgggcggacgtggctcctgctggcagcgacgccgacgtggaggtgacgaactga

SEQ ID NO: 31423 - protein, 553 aa, Halobacterium salinarium
MPTETEYDPSLGSKFVFVTGGVMSGLGKGITAASLGRLLSNAGFDVTAVKIDPYLNVDAGTMNPYQHGEVYVLDDGGEVDLDLGNYERFLDEDMTSDHNVTTGKVYQDVIERERSGDYLGKTVQIIPHVTDDIKRRVREAAEGSDVCLVEVGGTVGDIEGMPFLEALRQFSHEQDDEDILFTHVTLVPYSKNGEQKTKPTQHSVKELRSIGLQPDILVGRCEDRLDPDVREKIALFCDVPMDAVFSNPDVEDIYHVPLTVEEEGLDQYVMEQFDMVEDALPAAQRSTEWRDLVTRERTGEVDIALVGKYALEDAYMSIHEALKHASLEAGVEVNVLWVDSEKMHDHHERRIADADGIVVAGGFGSRGTAGKIDAIQHAREHDVPFLGLCLGFQLAVVEYARNVLGMTGAHSAEIDEDTEYPVIDLLPEQYDLEDLGGTMRLGAHETAIEPGTLAHDLYGATSCTERHRHRYEVNPEYIDDLTADGLTFSGEAGNRMEIVEHDDHPFFFGTQFHPEYRSRPTRASPPFVGLLDAVLERADVAPAGSDADVEVTN

SEQ ID NO: 31424 - DNA, 1623 bp, Helicobacter hepaticus
  CDS (1)..(1623): transl_table=11
atggcagtaaaatatatttttgtaacaggaggtgtcttaagttcccttggtaagggtattacttcttcttccatcgcaactttacttcaacagagcggatatagtgtatcaattttaaaaattgacccttatattaatgttgatccgggcacgatgagtccattagaacacggagaagtttttgtaacctgtgatggagcagaaacagatttggatatagggcattatgagcggtttttgaataaagatttccataaaaaaaataattttaccacaggacaaatttatatgtctgtgattgaaaatgagcgcaagggtaaatatttaggcaaaaccattcagattgtgccgcatattgttgatgaaattaaatctcgtatcaagtttgcaggagagggaagtgattttcttgttgtagaacttggtggaacagttggtgatatagagggtatgccttatcttgaagctatgcgacagatgaagcacgagctaggaggcaaacaagttatttctattcatattacgcttattcctcttatgcgtgcagcaggagagctaaagacaaagcctacccaacattccgttcaagaacttagacgcattggtatttctccacaaattcttgtagcgcgatgtgagaaaaatcttgacaaagagttaaagcgcaaacttgctttgagttgtgatgttgataatgatagtgtgatagtggctcaagatacgcagagtatttataaatgtcctcttaatttcttagaagaaggcatacttactcctattgcaaggcatttggagttgggcgaattaaaacccaaaatggataattgggatatgcttgtaaaaaaaatcattgcacccaaatcaaacataaccattggttttgtcggcaaatatttaagcctcaaagaatcttacaagtctttaatagaatctcttatacacgcaggagcaaacaccgacacacgtgtaaatatcaaatggattgatagtgagattttagtagataatcttgcgcttttatatgatgtagattctcttcttataccgggaggatttggcgagcggggcattgaaggtaaattagaggcaataaaatatgcgcgtatccagcagattccattacttggtatttgtttaggtatgcagctctcactcattgaatttgcgcgcaatgtattaggaatgagcgaagcaaactctattgaatttgatccacaaacaaaagagcctgtgatatatttaattgaaaattttatcgattcgcaaggtggggtgcaattacgcacgcatacttcacctatgggtggaacaatgcgtttgggtgagtatgaatgccatatcaaaaaaggcacaaagctttatgaggcttatggcaaacagacacttattaaagagcgtcatcgtcatagatacgaggcaaatcctcactatcgcgcactttttgaaaaaaatggtatgattgtaagtggagagagcaatggacttatagaatctattgagcttgcaaatcacccgtggtttgttggagtgcagtttcaccctgaatttacttcgcgattgcaaaaccctaatcctgtcattttggcttttgtgaaagaaactttagcacataaaaagacataa

SEQ ID NO: 31425 - protein, 540 aa, Helicobacter hepaticus
MAVKYIFVTGGVLSSLGKGITSSSIATLLQQSGYSVSILKIDPYINVDPGTMSPLEHGEVFVTCDGAETDLDIGHYERFLNKDFHKKNNFTTGQIYMSVIENERKGKYLGKTIQIVPHIVDEIKSRIKFAGEGSDFLVVELGGTVGDIEGMPYLEAMRQMKHELGGKQVISIHITLIPLMRAAGELKTKPTQHSVQELRRIGISPQILVARCEKNLDKELKRKLALSCDVDNDSVIVAQDTQSIYKCPLNFLEEGILTPIARHLELGELKPKMDNWDMLVKKIIAPKSNITIGFVGKYLSLKESYKSLIESLIHAGANTDTRVNIKWIDSEILVDNLALLYDVDSLLIPGGFGERGIEGKLEAIKYARIQQIPLLGICLGMQLSLIEFARNVLGMSEANSIEFDPQTKEPVIYLIENFIDSQGGVQLRTHTSPMGGTMRLGEYECHIKKGTKLYEAYGKQTLIKERHRHRYEANPHYRALFEKNGMIVSGESNGLIESIELANHPWFVGVQFHPEFTSRLQNPNPVILAFVKETLAHKKT

SEQ ID NO: 31426 - DNA, 1617 bp, Helicobacter pylori J99
  CDS (1)..(1617): transl_table=11
atggatagagccaaatttatattcgttacagggggcgtgttaagctctctagggaaagggatttcatcttcttcaatcgctacgcttttgcagcattgcaattaccaggtttctattttgaagattgatccttatatcaatattgatccaggcaccatgagccctttagagcatggggaagtgtttgttactagcgatggcgctgaaacggatttagacatcgggcattatgaacgctttttgaacaggaatttaacgaggttgaataatttcactaccgggcagattttttcaagcgtgatagaaaatgaaaggaaaggggaatatttaggcaaaaccattcaaatcgtcccccatgtaaccgatgaaatcaaaaggcgcattaaaagtgcggctaaggggttggattttttaatcgtggaagtgggtggaaccgtgggcgatatggagggcatgttttatttggaagcgatccgccagcttaaactggaattagggaatgaaaaagtcatcaatgtgcatgtaaccttgatcccctatatccaaaccactaacgaactaaaaaccaaacccacgcaacactccgtccaggaattacggcgtcttggcgtaacccctcaaatcattttggcgcgatcgcctaagcctttggataaagaattgaaaaagaaaatcgctttgagttgcgatgtggaacaagacagcgtgattgtagccacagacactaaaagcatttacgcatgccctattcttttcttgcaagaaggcattttaacccccattgccagacgctttaatttgaataagttgcaccctaaaatggcggcttggaacactttagtagaaaaaatcatcgctcctaaacacaaggtcaaaattggttttgtgggcaagtatttaagcttaaaagaatcttataaatccttgattgaagccctaatccatgcgggggcgcatctggatacgcaagtcaatattgaatggctggatagcgagaattttaatgaaaagactgatttagagggcgttgatgcgattttagtgccggggggctttggagaaagggggattgagggcaaaatttgcgccattcaaagggctaggttagaaaaactcccctttttagggatttgtttgggcatgcaattagcgatcgttgaattttgtcgcaatgttttaggcttgaaaggggctaactctacggaatttaaccaacgctgcgaataccctgtggtgtatttgattgaagattttatggatcaaaaccaccaaaaacaggtgcgcacctataattcgcctttaggaggcaccatgcgattaggcgaatacgaatgcgaaatcatgcctaatagcttgctagaaaaagcctataaaaagcctaacatcaaagaaagacaccgccatcgttatgaaatcaaccccaaataccgccaagagtgggaaaataaaggcttgaaagtggtgggctttggggcgaatcatttgattgaagcgattgaattagaagatcacccgttctttgtgggggtgcaattccacccggaattcacctccaggttgcaaagccctaaccctattattttggatttcattaagagcgctcttcataaatcctaa

SEQ ID NO: 31427 - protein, 538 aa, Helicobacter pylori J99
MDRAKFIFVTGGVLSSLGKGISSSSIATLLQHCNYQVSILKIDPYINIDPGTMSPLEHGEVFVTSDGAETDLDIGHYERFLNRNLTRLNNFTTGQIFSSVIENERKGEYLGKTIQIVPHVTDEIKRRIKSAAKGLDFLIVEVGGTVGDMEGMFYLEAIRQLKLELGNEKVINVHVTLIPYIQTTNELKTKPTQHSVQELRRLGVTPQIILARSPKPLDKELKKKIALSCDVEQDSVIVATDTKSIYACPILFLQEGILTPIARRFNLNKLHPKMAAWNTLVEKIIAPKHKVKIGFVGKYLSLKESYKSLIEALIHAGAHLDTQVNIEWLDSENFNEKTDLEGVDAILVPGGFGERGIEGKICAIQRARLEKLPFLGICLGMQLAIVEFCRNVLGLKGANSTEFNQRCEYPVVYLIEDFMDQNHQKQVRTYNSPLGGTMRLGEYECEIMPNSLLEKAYKKPNIKERHRHRYEINPKYRQEWENKGLKVVGFGANHLIEAIELEDHPFFVGVQFHPEFTSRLQSPNPIILDFIKSALHKS

SEQ ID NO: 31428 - DNA, 1617 bp, Helicobacter pylori
  CDS (1)..(1617): transl_table=11
atggatagagccaaatttatattcgttacagggggtgtgttaagctctctagggaaagggatttcatcttcttcaatcgctacgcttttacagcattgcaattaccaggtttctattttgaagatcgacccttatatcaatattgatccaggcaccatgagccctttagagcatggggaagtgtttgtaactagcgatggcgctgaaacggatttagacatagggcattatgaacgctttttgaacaggaatttaacgaggttgaataatttcactactgggcagattttttcaagcgtgatagaaaatgaaaggaaaggggaatatttaggcaaaaccattcaaatcgtcccccatgtaaccgatgaaatcaaaaggcgcattaaaagcgcggctaaggggttggattttttaatcgtggaagtgggcggaaccgtgggcgatatggagggcatgttttatttggaagcgatccgccagcttaaattggaattagggaatgaaaaagtcatcaatgtgcatgtaaccctgatcccctatatccaaaccactaacgaactaaaaaccaaacccacgcaacattccgtccaagaattaagacgccttggcgtaacccctcaaatcattttggcgcgatcgcctaagcctttggataaagagttgaaaaataaaatcgctttgagttgcgatgtggagcaagacagcgtgattgtcgccacagacactaaaagcatttacgcatgccctattcttttcttgcaagaaggcattttaacccccattgccagacgctttaatttgaataaactacaccccaaaatggcggcttggaacactttagtagaaaagattatcgctcctaaacacaaagtcaaaattggttttgtgggcaagtatttaagcttgaaagaatcttataaatccttgattgaagccctaatccatgcgggcgcgcatctggatacgcaagtcaatattgaatggctggatagcgagaattttaatgaaaagacggatttagagggcgttgatgcgattttagtgcctgggggctttggagaaagggggattgagggcaaaatttgcgccattcaaagggctaggttagaaaaactcccctttttagggatttgtttgggcatgcaattagcgatcgttgaattttgtcgcaatgttttgggtttaaaaggggctaactctacggagtttaaccaacgctgcgaataccctgtggtgtatttgattggagattttatggatcaaaaccaccaaaaacaggtgcgcacctataattcgcctttaggaggcaccatgcgattaggcgaatacgaatgcgaaattatgccaaacagcttgttagaaaaagcttataaaaagcctagcattaaagaaagacaccgccatcgttatgaaatcaaccccaaataccgccaagagtgggaaaataagggcttgaaagtggtgggttttggatcgaatcatttgattgaagcgattgaattagaagatcacccgttctttgtgggggtgcaattccacccagaattcacctccaggttgcaaagccctaaccctattattttagatttcattaagagcgctctttctaaatcctaa

SEQ ID NO: 31429 - protein, 538 aa, Helicobacter pylori
MDRAKFIFVTGGVLSSLGKGISSSSIATLLQHCNYQVSILKIDPYINIDPGTMSPLEHGEVFVTSDGAETDLDIGHYERFLNRNLTRLNNFTTGQIFSSVIENERKGEYLGKTIQIVPHVTDEIKRRIKSAAKGLDFLIVEVGGTVGDMEGMFYLEAIRQLKLELGNEKVINVHVTLIPYIQTTNELKTKPTQHSVQELRRLGVTPQIILARSPKPLDKELKNKIALSCDVEQDSVIVATDTKSIYACPILFLQEGILTPIARRFNLNKLHPKMAAWNTLVEKIIAPKHKVKIGFVGKYLSLKESYKSLIEALIHAGAHLDTQVNIEWLDSENFNEKTDLEGVDAILVPGGFGERGIEGKICAIQRARLEKLPFLGICLGMQLAIVEFCRNVLGLKGANSTEFNQRCEYPVVYLIGDFMDQNHQKQVRTYNSPLGGTMRLGEYECEIMPNSLLEKAYKKPSIKERHRHRYEINPKYRQEWENKGLKVVGFGSNHLIEAIELEDHPFFVGVQFHPEFTSRLQSPNPIILDFIKSALSKS

SEQ ID NO: 31430 - DNA, 1635 bp, Hyphomonas neptunium
  CDS (1)..(1635): transl_table=11
atgatccgctatattttcatcactggcggcgtggtgtcttcgctcggaaaaggcatagcctccgcctcgctcggcgcgctgctgcaatcgcgcgggtaccgcgtgcgcctgcgcaagctcgatccctatctcaacgtcgatccgggcacgatgagcccccgccagcatggtgaggtctatgtgaccgacgatggcgcagagaccgacctcgatctcggccattatgaacgctttactggcgtatcggcccggcagtccgacaacatcacgaccggccgcatctatcagcgtatcatcgagaaagaacgtcgcggcgattatctcggcgccacgatccaggtcatccctcacgtcaccaacgacatcaaggagttcgtcctttccgatcccggcgagggcgttgattttgttctctgcgaaatcgggggaacggtcggggacatcgaaggcctgccattcttcgaggcgatccgtcagctcggccaggaactggggcctcagcgggcatgctttatacacctgacactgctgccctacatcccggcggcgggcgaaatgaaaaccaaaccgacgcagcactcggtcaaggaactgcggtctattggcatccagccacagattcttctttgccgctgtgaccggccgatcccggtcaatgaaaagggcaagatcgccagcttctgcaatgtccgcctggcaagcgtgatcgaggcccgcgacgtcggacatatctatgacgtgccgatggcttatcacgcggaaggactggactctgaggttctgtcgcatttcggaataaccgatgcccccccgccggacctgtcttcctggcagcggatcgcccagacaatcaaaaaccccgatggtcaggtgacaattggcctggtcggaaaatacaccgacgtaccagatgcctacaaatcggtatccgaagcgctcggccatggcggcctcgccaacaaggtgaaggtcgacatccgattcgtggattccgaaaaattcgacgatcccgacgccgcgcttgaagatttggatggcgtacacggaattctgctgcccggcggtttcggcgaacgtggcgcacacggcaagatgcgggtcgccagatatgcgcgtgagcgtaacatgccgtgtttcggtatctgctacggcatgcagctctcggttgttgaagctgcgcgtaatctggccggcatcaagaatgcttcgaccagcgaatttggcccaaccaaagagcccgtggttggtctcatggaagagtggaccaagggcaacgagaaggtcacgcgcgacgccagcaccgaccttggcggcacaatgcgtctcggcgcgtaccctgcacgcctcaaggaaggcagcatggtcgcacaggtttatggcagtctcgaaatctccgagcgccaccgccaccgctacgaagtcaatgccagttacatcgaacgcctcgaaaaggcgggtatgatcttctcaggcatgtcgccagatggccgcctcccggaaatcgtcgagcttgaagggcacccctggttcatcggcgtgcagttccacccggaactcaagtcccggccgttcgaaccccacccgcttttcgcgagcttcattgcagcggcggtcaaacaatcccggctcgtctga

SEQ ID NO: 31431 - protein, 544 aa, Hyphomonas neptunium
MIRYIFITGGVVSSLGKGIASASLGALLQSRGYRVRLRKLDPYLNVDPGTMSPRQHGEVYVTDDGAETDLDLGHYERFTGVSARQSDNITTGRIYQRIIEKERRGDYLGATIQVIPHVTNDIKEFVLSDPGEGVDFVLCEIGGTVGDIEGLPFFEAIRQLGQELGPQRACFIHLTLLPYIPAAGEMKTKPTQHSVKELRSIGIQPQILLCRCDRPIPVNEKGKIASFCNVRLASVIEARDVGHIYDVPMAYHAEGLDSEVLSHFGITDAPPPDLSSWQRIAQTIKNPDGQVTIGLVGKYTDVPDAYKSVSEALGHGGLANKVKVDIRFVDSEKFDDPDAALEDLDGVHGILLPGGFGERGAHGKMRVARYARERNMPCFGICYGMQLSVVEAARNLAGIKNASTSEFGPTKEPVVGLMEEWTKGNEKVTRDASTDLGGTMRLGAYPARLKEGSMVAQVYGSLEISERHRHRYEVNASYIERLEKAGMIFSGMSPDGRLPEIVELEGHPWFIGVQFHPELKSRPFEPHPLFASFIAAAVKQSRLV

SEQ ID NO: 31432 - DNA, 1638 bp, Idiomarina loihiensis
  CDS (1)..(1638): transl_table=11
atggcgacaaactatattttcgtaaccggcggagttgtatcctcgctgggtaaaggcattgctgcagcctccctggcggcaattctagaagcacggggccttaacgttactatcatgaagctggatccctacattaacgtagatccgggtaccatgagtccaattcagcacggtgaagtttttgtcaccgtagacggagctgaaaccgatcttgaccttggtcactacgagcgttttatccgcacccgtatgaccagcagcaacaactttaccaccggccgtgtctatgaagacattattcgccgtgagcgtaaaggtgagtttttaggagcgaccattcaggtcattcctcacattaccaacgaaattaagcgtcgtgttattgaaggcagtaaaggcttcgacattgccattattgaaattggcggcacggtgggtgacattgagtcacaacctttccttgaagccattcgtcagttgggcacggaaattggtcgtgaccacaccttatttatgcatctgaccctggtgccattcttaggcgctgcgggtgaggtgaaaaccaaaccgactcagcactcagtgaaagaactgcgttctattggtattcaaccagatgtattggtgtgtcgttcggatcgctccttaccggcaacagagcgttcgaaaattgctttgtttaccaatgtagaagagcgagcggttattggcttgcgcgacgtagacagcatttacaaaattccttctatgttaaaggcccagagtttggatgacatagtcaccaagcgctttaatttagattgccccgaagccgacttgcatgaatgggaagaggttctgtatcaagaatctaatccgaatggtgaagtgaccgtcggttttgtcggtaagtacgttgaactgccggatgcctataagtcggtgaacgaagcgctggctcatgccggccttaaaaatcgtttaacggtaaacattcgttacatcgactctcaagacttagaaaccaaaggtacgtctaagcttgaagatgtggacgctattttggtgccaggcggttttggtgatcgtggcatagagggcaagcttattgcggcaaaatacgcacgcgagaataacattccttacttaggcatttgcttaggcatgcaagtggcaatgattgaatttgcccgtaatgttgctggtttaaccggcgctaacagcactgagtttgatgaaaattgcagtgacccggtagttggtcttatcacggaatggatggacgccagtggtcaaaaagaactgcgcgacaagcattccgacttaggcggcacgatgcgtcttggttcacaggaatgtcatttagaaaaaggttctaaagcgcttaaaatgtatggcaaagaaaccattgaagagcgtcaccgccatcgctacgaagtaaacaaccattacattgagccgctggaaaaagctggcttaaaaattaccggttactcgcacgataagcagttggttgaaattctggaaaacccgaaacaccgctggtttgtggcagtacagttccacccggaattcacttcaacgccgcgtgacgggcacccgttatttaaaggctttatagaagctgctggcgaatttcataaagagcgtttgggttaa

SEQ ID NO: 31433 - protein, 545 aa, Idiomarina loihiensis
MATNYIFVTGGVVSSLGKGIAAASLAAILEARGLNVTIMKLDPYINVDPGTMSPIQHGEVFVTVDGAETDLDLGHYERFIRTRMTSSNNFTTGRVYEDIIRRERKGEFLGATIQVIPHITNEIKRRVIEGSKGFDIAIIEIGGTVGDIESQPFLEAIRQLGTEIGRDHTLFMHLTLVPFLGAAGEVKTKPTQHSVKELRSIGIQPDVLVCRSDRSLPATERSKIALFTNVEERAVIGLRDVDSIYKIPSMLKAQSLDDIVTKRFNLDCPEADLHEWEEVLYQESNPNGEVTVGFVGKYVELPDAYKSVNEALAHAGLKNRLTVNIRYIDSQDLETKGTSKLEDVDAILVPGGFGDRGIEGKLIAAKYARENNIPYLGICLGMQVAMIEFARNVAGLTGANSTEFDENCSDPVVGLITEWMDASGQKELRDKHSDLGGTMRLGSQECHLEKGSKALKMYGKETIEERHRHRYEVNNHYIEPLEKAGLKITGYSHDKQLVEILENPKHRWFVAVQFHPEFTSTPRDGHPLFKGFIEAAGEFHKERLG

SEQ ID NO: 31434 - DNA, 1620 bp, Lactobacillus acidophilus
  CDS (1)..(1620): transl_table=11
atgacaaaatatattttcgtaactggcggtgtcgtatcttcacttggtaaaggtattactgcatcaagtctaggtcgacttcttaaaaatcgtggtttaaaggtaaccatgcaaaagtttgacccatatattaatattgatccgggtacaatgaatccttaccaacacggtgaagtttatgttactgatgatggtacagaagctgaccttgacttaggtcactatgaaagaattgtagacgttagaactagcaagtactctaacgttactactggtaaaatttatcaagaagttttggaaaaagaacgtcgcggtgattaccacggtgctacagttcaagtaattccacacattactaatatgatcaagaagaagatcatgcgtgcagctcttactactgattcagatgtaattatttctgaaattggtggtactgttggtgatattgaatcaactccattcatggaagctattcgtcaaatgcgtcgtgaagttggtgaagataacgtaatgtacatccactgtactttagtaccacttcttcatgcagctcacgaaatgaaaactaagccaactcaacattcagttgctgaacttcgcagtattggtattcagcctaacatgcttgttcttcgtgcagaacaaccaattgatcaagaacataaagacaagatttcagactttacagatgttcctgtagatcgaatcattgaatcaattgatgctccttcattattcgatgttcctttggaattccaaaagcaaggtatggatcaaaaagtttgtgatttcttgcatcttgaaagtccaaagcctgaggctgatatggaagcttggaagaagcttgacgaacgtgctaagaacttggaacacaagactaagattactttagttggtaaatatgtagagcttgaagatgcatatatttcagttactgatgcgttacaacatgcaggctacctttacaacactaagattgaggtagataaggtacaagctgaagatattactgaagataatattgcagaaattatgaaggattcagatggtttgatcgtacctggtggttttggtactcgtggacttgaaggtatgatcactgctatcaagtatgctcgtgaaaatgatattccattcttgggtatttgtttagggatgcaaatggccagtgttgaatttgcacgtaacgtattgaatcttgaagatgccaacagtgcagaagctgaaccaaactgcaagaacaacattattgatatcatggctgataagcgtgatgaagaaaatattggtggtactttacgtttgggtctttatccagcaacacttaaggaaggtactaagactcgcgaagcttacgataatcaagatgttatccaagaacgtcaccgtcaccgtttcgaatttaacaataaatatcgtgaagcttttgaaaaggctggtatggtcttctcaggtgtatctccagataatcgcttagttgaaattatcgaattaccaaagaagaagttctttattgcagctcaataccacccagaattcttgagccgtccacaacgtccagaaggcttattcaagtcattcatcggtgcagctagtggtcttccagcacaaaaattctaa

SEQ ID NO: 31435 - protein, 539 aa, Lactobacillus acidophilus
MTKYIFVTGGVVSSLGKGITASSLGRLLKNRGLKVTMQKFDPYINIDPGTMNPYQHGEVYVTDDGTEADLDLGHYERIVDVRTSKYSNVTTGKIYQEVLEKERRGDYHGATVQVIPHITNMIKKKIMRAALTTDSDVIISEIGGTVGDIESTPFMEAIRQMRREVGEDNVMYIHCTLVPLLHAAHEMKTKPTQHSVAELRSIGIQPNMLVLRAEQPIDQEHKDKISDFTDVPVDRIIESIDAPSLFDVPLEFQKQGMDQKVCDFLHLESPKPEADMEAWKKLDERAKNLEHKTKITLVGKYVELEDAYISVTDALQHAGYLYNTKIEVDKVQAEDITEDNIAEIMKDSDGLIVPGGFGTRGLEGMITAIKYARENDIPFLGICLGMQMASVEFARNVLNLEDANSAEAEPNCKNNIIDIMADKRDEENIGGTLRLGLYPATLKEGTKTREAYDNQDVIQERHRHRFEFNNKYREAFEKAGMVFSGVSPDNRLVEIIELPKKKFFIAAQYHPEFLSRPQRPEGLFKSFIGAASGLPAQKF

SEQ ID NO: 31436 - DNA, 1623 bp, Lactobacillus johnsonii
  CDS (1)..(1623): transl_table=11
atgacaaagtatatttttgtgactggtggagttgtttcatcactaggtaaggggatttcagcttcaagtttaggacgtttacttaaaaatcgtggcttaaaagttaccatgcaaaagtttgatccttacattaatatcgatccaggtacaatgaatccatatcaacatggggaagtttatgttaccgatgatggtacagaagctgaccttgacttgggtcactatgaaagaattgttgatgttagaacaagtaaatattctaatgttactactggtaaaatttatcaagaagtgcttgataaagaacgtcgcggtgactatcatggtgcaactgtgcaagtaattccacatattacggacatgattaagaaaaaaatcatgcgtgctgccttaacaactgattcagatgtcattatttctgaaattggtggtaccgtaggtgatatcgagtctactccatttatggaagcaattcgccaaatgcgtcgtgaagttggtgaagaaaatgtaatgtacattcactgtaccctagtaccttatcttcatgctgctcacgaaatgaaaactaagccaacgcaacattcagttgctgaacttagaagtattggtattcaaccaaatatgcttgttttaagagctgagaaaccaattgctcaagagttaaaaaataagatttctacctttactgatgttccagtagaccgcattattgaatctattgatgctccttcactttttgatttaccacttgcttttcaagctcaaggtatggatcaaaaggtttgcgactttttacacttggagagtccaaagccagaagcagatatggaagcttggaagaaattagatgaacgtgcaaagaacttaaagaacgaaactactattaccttagtaggtaagtatgtagaacttgaagatgcatatatttctgttactgatgcattgcaacacgctggctacttatatgacactaaaattaaggtaaataaggttcaagcagaagacattactgaagacaatattgcagaaattatgaaggattcagatggattaattgtacctggtggttttggtacacgtggtcttgaaggtatgattacttcaattaaatatgcccgtgaacacgatatcccatttttaggaatctgcttaggtatgcaaatggcaagcgttgaatttgccagaaatgtacttggcttaaaagatgctaatagtgcagaagctaatccagacactaagaataatattattgatattatggctgacaagcgtgatgaagagaatattggtggtacgcttcgtttaggtctatacccagcaactttaaagaagggtactaagacacgtgaagcatatgatgaccaagatgtaattcaagaaagacaccgtcaccgttatgaattcaataatgaatatcgtgaagcatttgaaaaggcaggcatggtcttctctggtgtttccccagataatcatttagtagaaattattgaaattccaaataaaaaattctttatcgcagctcaatatcatccagaatttttaagtcgtccacaaagaccagaaggattgtttaaagcatttattggtgcagcaagtggtcttccagcacaacattttaactag

SEQ ID NO: 31437 - protein, 540 aa, Lactobacillus johnsonii
MTKYIFVTGGVVSSLGKGISASSLGRLLKNRGLKVTMQKFDPYINIDPGTMNPYQHGEVYVTDDGTEADLDLGHYERIVDVRTSKYSNVTTGKIYQEVLDKERRGDYHGATVQVIPHITDMIKKKIMRAALTTDSDVIISEIGGTVGDIESTPFMEAIRQMRREVGEENVMYIHCTLVPYLHAAHEMKTKPTQHSVAELRSIGIQPNMLVLRAEKPIAQELKNKISTFTDVPVDRIIESIDAPSLFDLPLAFQAQGMDQKVCDFLHLESPKPEADMEAWKKLDERAKNLKNETTITLVGKYVELEDAYISVTDALQHAGYLYDTKIKVNKVQAEDITEDNIAEIMKDSDGLIVPGGFGTRGLEGMITSIKYAREHDIPFLGICLGMQMASVEFARNVLGLKDANSAEANPDTKNNIIDIMADKRDEENIGGTLRLGLYPATLKKGTKTREAYDDQDVIQERHRHRYEFNNEYREAFEKAGMVFSGVSPDNHLVEIIEIPNKKFFIAAQYHPEFLSRPQRPEGLFKAFIGAASGLPAQHFN

SEQ ID NO: 31438 - DNA, 1608 bp, Lactococcus lactis subsp
  CDS (1)..(1608): transl_table=11
atgtcaactaagtatattttcgtcactggtggtggtacttcgtcaatgggtaaagggatcgtagcggcatcgctcggtcgtttgcttaaaaatcgtgggcttaaagtcactgtccaaaaatttgacccataccttaacatcgacccagggacaatgagcccttatcaacatggtgaagtctttgttactgatgatggtgctgaaactgaccttgaccttggtcactatgaacgtttcattgacatcaatttaaataaatattcaaatgttacttccggtaaagtttacagtgagattcttcgtaaagaacgtaagggagaatatctcggagcaactgtccaaatggtaccgcatgtgactaacatgttgaaagaaaaaattaaacgtgcagcaacaacaactgatgcagatatcattatcacagaagttggtggaacggttggcgatatggaaagtttgccatttattgaagctttacgccaaatgaaagccgaagttggtgcggacaacgtcatgtacattcacactgttccaattcttcacttgcgtgctgctggagaattgaaaactaaaatcgcccaaaatgcgactaagacacttcgtgaatatggtatccaagctaacatgctcgtattacgtagtgaagttccaatcacgacagaaatgcgtgataaaattgcgatgttctgtgacgtagcaccagaagcagtcattcaatcgcttgatgttgaacacttataccaaattccattgaaccttcaagcacaaaatatggaccaaatcgtttgtgaccatttaaaacttgatgcaccaaaagcagatatgacagaatggtcagcaatggttgaccatgtcatgaacctcaagaaaaaagtaaaaattgctttggttggtaaatatgtagaattaccagatgcttatatttcagtgactgaagcgcttaaacatgcaggttattcatctgatgccgaagttgatattaactgggttaatgctaatgatgtaactgatgaaaatgttgctgaacttgttggtgatgctgcaggaattattgttcctggaggatttggtcatcgtggcacagaaggtaagattgcagctattaaatatgcgcgtgaaaatgacgttccaatgcttggaatctgtcttggaatgcaattgacagcagttgaattcgctcgtaatgttcttggacttgaaggagctcattcatttgaattagaccctgaaacaaaatatccagtcattgacattatgcgtgaccaagttgatgttgaagacatgggtggaacactacgtcttggactttacccagctaaattgaaaaatggctcacgcgctaaagcagcctacaatgatgctgaagtggttcaacgtcgccaccgtcaccgttatgaattcaataacaaattccgcgaagactttgaaaaagctggtttcgtattctcaggcgtttcaccagataaccgtttggttgaaatcgttgaactttctgataaaaaattcttcgtggcatgtcaatatcacccagaattgcaatcacgtccaaaccgtccagaagaactctacacagaatttattcgtgtagcggttgaaaatagtaaataa

SEQ ID NO: 31439 - protein, 535 aa, Lactococcus lactis subsp
MSTKYIFVTGGGTSSMGKGIVAASLGRLLKNRGLKVTVQKFDPYLNIDPGTMSPYQHGEVFVTDDGAETDLDLGHYERFIDINLNKYSNVTSGKVYSEILRKERKGEYLGATVQMVPHVTNMLKEKIKRAATTTDADIIITEVGGTVGDMESLPFIEALRQMKAEVGADNVMYIHTVPILHLRAAGELKTKIAQNATKTLREYGIQANMLVLRSEVPITTEMRDKIAMFCDVAPEAVIQSLDVEHLYQIPLNLQAQNMDQIVCDHLKLDAPKADMTEWSAMVDHVMNLKKKVKIALVGKYVELPDAYISVTEALKHAGYSSDAEVDINWVNANDVTDENVAELVGDAAGIIVPGGFGHRGTEGKIAAIKYARENDVPMLGICLGMQLTAVEFARNVLGLEGAHSFELDPETKYPVIDIMRDQVDVEDMGGTLRLGLYPAKLKNGSRAKAAYNDAEVVQRRHRHRYEFNNKFREDFEKAGFVFSGVSPDNRLVEIVELSDKKFFVACQYHPELQSRPNRPEELYTEFIRVAVENSK

SEQ ID NO: 31440 - DNA, 1614 bp, Lactobacillus plantarum
  CDS (1)..(1614): transl_table=11
atgaccaaatatatttttgtaactggtggcgttgtgtcatccattggtaaaggtatcgtcgctgcttcgctagggcgtttattgaagaaccggggcttaaaggtcacgattcaaaagtttgatccctatatcaacgttgatcctggtacgatgagtccttatcaacacggtgaagtcttcgtgaccgatgatgggaccgaaactgacttagaccttggacattatgaacggtttatcgacattaaccttaataaatattcaaatgttaccaccggtaagatttattcagaagttctgcaaaaggaacggcggggcgattatttaggcgccacggtgcaagtgattccgcatatcacgaacgctatcaaggaaaaaatcatgcgtgcgggtacgacgacggattccgatatcgtgattactgaaatcggtgggacggtcggtgatatcgaatccttgccatttattgaagcgctacggcaaatgaagagtgatttaggttccgacaatgttttctatatccataccacattgatcccatatttacgggcagctggtgaaatgaagacgaagccaacgcaacattctgttaaggaattgcggagttatgggattcagccgaacatgttagttgtccggactgaacaaccaattacgcgggaaatgcggaataagattgcgtccttctgtgacgtggaaccagaagcagtcattgaatccttagacgttaagacgatttattcaattccgttgaatgttcagaaacaaaacatggaccaaatcgtccttgaccattttgatgtacaggcacctaaggccgacatgagtgaatggattgacttagaacatcatgttcagaacttatcacggaccatcaagattgcgctagtcggaaaatacgtcgctttacaggatgcttatatctcagtgacggaagcattgaagcatgctggctatacggatgatgccgacattgatttgaagaagatttctgctgaagatgttacgccagaaaatgtcgaagaactactcggcgatgctgacggaatcttagttcctggtggctttggtgatcggggaattgaaggtaagattacggcaatcaagtatgcccgtgaaaacgacgtgccattcttaggtatctgcttgggaatgcaaatggccagtgtcgaatttgcacgtaacgtacttggattgaaggatgctaactctgctgaaatcgatccgaagacgccggacaatattattgatttgatggccgaccaagaagacgttgaagacatgggtggaacgcaacgtttaggcgcttacccttgcaagctgaagccgggaactgtggcggctaaagcctatcacaatgaagaagttgtgatggaacgtcatcgccaccgttatgaattcaataataagtatcgtgaagcaatggctgctaagggcatggtcttctccggaacttcgcctgacaaccggctcgtcgaagtgattgaattaccaaagaagcgcttcttcgtggcctcacaataccatccagaattcttatcacggcctaaccgtccagaagggttattcaaggcattcatcgatgccgctaaccagactggtaaggtgaaggcataa

SEQ ID NO: 31441 - protein, 537 aa, Lactobacillus plantarum
MTKYIFVTGGVVSSIGKGIVAASLGRLLKNRGLKVTIQKFDPYINVDPGTMSPYQHGEVFVTDDGTETDLDLGHYERFIDINLNKYSNVTTGKIYSEVLQKERRGDYLGATVQVIPHITNAIKEKIMRAGTTTDSDIVITEIGGTVGDIESLPFIEALRQMKSDLGSDNVFYIHTTLIPYLRAAGEMKTKPTQHSVKELRSYGIQPNMLVVRTEQPITREMRNKIASFCDVEPEAVIESLDVKTIYSIPLNVQKQNMDQIVLDHFDVQAPKADMSEWIDLEHHVQNLSRTIKIALVGKYVALQDAYISVTEALKHAGYTDDADIDLKKISAEDVTPENVEELLGDADGILVPGGFGDRGIEGKITAIKYARENDVPFLGICLGMQMASVEFARNVLGLKDANSAEIDPKTPDNIIDLMADQEDVEDMGGTQRLGAYPCKLKPGTVAAKAYHNEEVVMERHRHRYEFNNKYREAMAAKGMVFSGTSPDNRLVEVIELPKKRFFVASQYHPEFLSRPNRPEGLFKAFIDAANQTGKVKA

SEQ ID NO: 31442 - DNA, 1629 bp, Leptospira interrogans serogroup Icterohaemorrhagiae serovar
  CDS (1)..(1629): transl_table=11
gtggaatatacgttgtcgagaactaagtttatctttgtaaccggaggggtgagttcctcgcttggaaaaggagtcaccgtcgcggctctaggttgtttgttggaaagtaggggatatactgtctctctccaaaaaatggatccttacatcaatatagatcctggaaccatgagcccttatcagcatggagaagtttatgtaaccgcagacggagccgaaaccgacctcgatttaggttattacgaacgttttactcattctaaattgactcgaaaaaattcagtatctaccggtcagatttataatactgtcattcaaagagaaagaaagggagattacctaggtcgtacagtccaagttgtccctcatatcacaaacgaaatccgaaatcggatgtatattgtcgccagagaagaaaatccagattttatcatcgttgaaattggaggaacggtaggcgacattgaatcgattccgtttttagaggcgattcgtcaaatgcgttatgaacatggaagttctaacgtattgtttgttcacctaacactggttccaacgattaccgctgcaggagaagcaaagacaaaaccaacccaacattccgtcaaagaattactcggacttggaattcaaccggatatactcgtttgtagagtttctcaaccgatgacaaaagagatgaaaaacaaactttctcttttttgtaatgtgaaagaagagaacgtaatctcagcaagtgatatttccacttctatatacgaaattcctaaaatgtataaagaagaaaaattagacgaagtagttttgaaaaccatgggaatggaacttagagaatctaatttttccgaatgggataaaatggtgaaaggtttgttgaccactaaacaaaccgttcaaatcgccgttgttggaaagtatatttctctacaagatgcatatcgttccatttatgaaagtctttctcacggtggtattgcacatgatacaaaagtagagtttatcaaagtggacccggagaatttaaacaaagattcttatgtagagattctaaaaaaagtacacggtattttagttccaggcggttttggtgatagaggaatcgaaggaaagattcttgcgatccaatatgcaagaacgaatggaattccttttttaggaatttgtctagggatgcaatgtgcggttgtggaatacggaagaaacgttttgggacttaaagatgcaaattctacggaaattagacctgacacagaacatccggtgatttctcttttagaagaacaaaacgacatcgaacaaatgggtgggacgatgaggttaggttcttatccttgtaaggttaaagaaaatactctctcttattccgaatataagtctattctcatacacgaacgtcatagacatagatttgaatttacaaatcgttatagaaaacaatatgaagaaaatggaatgatcattgcgggcacttctcctgacgataacctcgtcgaaattgtggaaattccaaaacacaattggtttataggagttcagtttcatcctgaatttcagtctaaacctactttacctcatcccttattcgctggatttatccgcgcctctgtgaaatactctaaaaaaggatga

SEQ ID NO: 31443 - protein, 542 aa, Leptospira interrogans serogroup Icterohaemorrhagiae serovar
MEYTLSRTKFIFVTGGVSSSLGKGVTVAALGCLLESRGYTVSLQKMDPYINIDPGTMSPYQHGEVYVTADGAETDLDLGYYERFTHSKLTRKNSVSTGQIYNTVIQRERKGDYLGRTVQVVPHITNEIRNRMYIVAREENPDFIIVEIGGTVGDIESIPFLEAIRQMRYEHGSSNVLFVHLTLVPTITAAGEAKTKPTQHSVKELLGLGIQPDILVCRVSQPMTKEMKNKLSLFCNVKEENVISASDISTSIYEIPKMYKEEKLDEVVLKTMGMELRESNFSEWDKMVKGLLTTKQTVQIAVVGKYISLQDAYRSIYESLSHGGIAHDTKVEFIKVDPENLNKDSYVEILKKVHGILVPGGFGDRGIEGKILAIQYARTNGIPFLGICLGMQCAVVEYGRNVLGLKDANSTEIRPDTEHPVISLLEEQNDIEQMGGTMRLGSYPCKVKENTLSYSEYKSILIHERHRHRFEFTNRYRKQYEENGMIIAGTSPDDNLVEIVEIPKHNWFIGVQFHPEFQSKPTLPHPLFAGFIRASVKYSKKG

SEQ ID NO: 31444 - DNA, 1599 bp, Listeria innocua
  CDS (1)..(1599): transl_table=11
atgacaaagtatattttcgttacaggtggcgtagtttcgtcaatcggaaaaggaatcacagcagcatcgctcggacgtttgctgaaaaatcgtggacttagtgttaccattcaaaaatttgatccatacattaacgtggatccaggaacaatgagcccataccaacacggggaagtttatgtgacagatgatggcgcagaaacagacctagaccttggccattacgaacgttttatcgatattaacttaaataaatacagcaatgtaacaactggtaaagtttactcagaagttattaaaaaagaacgtcgcggggattacttaggtggaacagtgcaagttattccacacattacaaacgaattaaaagatcgtgttttccgtgcagctcgcatgaccaattcagatattattatcacagagattggtggaactgtaggagacatcgaatcattaccattcttagaagcaattcgtcaaattaaaagtgatgttggtgcggaaaacgtactttacatccacacaactttaattccttatatcaaagcagctggtgaaatgaaaactaaaccaactcaacatagcgttaaagaacttcgcagtctaggaattcaaccaaacattatcgttgttcgtacagagcaaccagtttctcaagaaatgaaagataagattgcgctattttgtgatattaaagcttcagaggttattgaatctcgtgatgaagaaacactttataacgtaccgctttctttacaaaaacaaaaaatggatgatattgtcctagaacacttgcaattagaagcaccgcaagctgaaatgactgattggaaaaacttagtacaccgcgtgaaaaacctatccaaaaaagttcgtatcggtctagttggtaaatatgtatccttacaagatgcttatctttctgtagcagaagcacttcgtcatgcaggatatgagcacgatgcggaaatcgaaatcgactggattgattccgaaaaagtaacaaaagaaaatgttgctgaaatcatgaaagacgttgatggtattttagttcctggtggttttggagatcgtgccatcgaaggtaaaattgctgctatcgaatatgcacgcgtaaataaagtgccttattttggtatttgtttaggtatgcaactagcaacagtcgaatttgctcgtaacgtgcttggtcttgaaggagcgcattcagcagaaatcgaaccagaaacaaaacataacatcattgatttattaccagaacaaaaaaatatcgaaaacatgggtggaacacttcgtctaggactgtatccagcacgtattaagcagggcactaaagctgaggctgcttatggtacaactcttgtagaagagcgtcaccgtcaccgttatgagtttaataacgaatatagagaacaaatggaagaagctggcatgattgtgtctgcaacgagcccagatggccgcctagttgaagtagttgaattagctgaccatccttggtttgtcgcttgtcaatatcacccagaattcatttcccgtccaaatcgtccgcaaagcttgtttaaagattttgttggtgctgcgcttaataacaaataa

SEQ ID NO: 31445 - protein, 532 aa, Listeria innocua
MTKYIFVTGGVVSSIGKGITAASLGRLLKNRGLSVTIQKFDPYINVDPGTMSPYQHGEVYVTDDGAETDLDLGHYERFIDINLNKYSNVTTGKVYSEVIKKERRGDYLGGTVQVIPHITNELKDRVFRAARMTNSDIIITEIGGTVGDIESLPFLEAIRQIKSDVGAENVLYIHTTLIPYIKAAGEMKTKPTQHSVKELRSLGIQPNIIVVRTEQPVSQEMKDKIALFCDIKASEVIESRDEETLYNVPLSLQKQKMDDIVLEHLQLEAPQAEMTDWKNLVHRVKNLSKKVRIGLVGKYVSLQDAYLSVAEALRHAGYEHDAEIEIDWIDSEKVTKENVAEIMKDVDGILVPGGFGDRAIEGKIAAIEYARVNKVPYFGICLGMQLATVEFARNVLGLEGAHSAEIEPETKHNIIDLLPEQKNIENMGGTLRLGLYPARIKQGTKAEAAYGTTLVEERHRHRYEFNNEYREQMEEAGMIVSATSPDGRLVEVVELADHPWFVACQYHPEFISRPNRPQSLFKDFVGAALNNK

SEQ ID NO: 31446 - DNA, 1599 bp, Listeria monocytogenes serotype 4b
  CDS (1)..(1599): transl_table=11
atgacaaagtatattttcgttacaggtggcgtagtttcgtcaatcggaaaaggaatcacagcagcatcactcggacgtttgctgaaaaatcgtggacttagtgtaaccattcaaaaatttgatccatacatcaacgtagatccaggaacaatgagtccataccaacacggggaagtttatgtgacagatgacggcgcggaaacggacctagaccttggccattacgaacgttttatcgatattaacttaaataaatacagcaacgtgacaactggtaaagtttactcggaagttattaaaaaagaacgtcgcggggattacttaggtggaacagtgcaagttattccacacattacaaacgaattaaaagaccgtgttttccgtgcagcgcgcatgaccaattcagatattatcatcactgaaattggtggaacagttggggatatcgaatctttaccattcttagaagcaattcgccaaattaaaagtgatgttggtgcagaaaacgtactttatatccacacaactttaattccttacatcaaagcagctggcgaaatgaaaactaaaccaacacaacatagtgtaaaagagcttcgtagcttaggaattcaaccaaacattatcgttgttcgcacagagcagccagtttcacaagaaatgaaagataagattgcgctattctgtgatattaaagcttccgaggttattgaatctcgcgatgaagaaacactttataacgtaccactttctctacaaaaacaaaaaatggatgatatcgtccttgagcacttacaattagaagcaccacaagcggaaatgacggattggaaaaacttagtacaccgtgtgaaaaacctttccaaaaaagttcgtattggcctagttggtaaatatgtttccttgcaagatgcttacctttctgtagcagaagcacttcgtcatgcaggatatgatcatgatgcagaaatcgaaattgactggattgattccgaaaaagtaacaaaagaaaatgttgctgaaatcatgaaagacgttgatggtatcttagttcctggtggtttcggcgaccgtgccattgaaggtaaaattgctgctattgaatatgcacgcgtaaacaaagtgccttattttggtatttgtttaggaatgcaactagcaactgttgaatttgcccgtaatgttcttggtcttgaaggagctcattctgcagaaatcgaaccagaaacaaaacataacatcattgatttattaccagaacaaaagaacatcgaaaacatgggcggaacacttcgtttaggactttatccagcgcgtattaagcaaggtactaaagccgaggccgcttatggtacaactcttgttgaagagcgtcaccgtcatcgttatgagtttaataacgaatatagagagcagatggaagaagctggtatgattgtttctgcaacaagtccagatggtcgtttagttgaagtagttgaattagctgatcatccttggtttgtcgcttgtcaatatcacccagaattcatttctcgtccaaatcgtccgcaaagcttgtttaaagattttgttggcgctgcacttaataataaataa

SEQ ID NO: 31447 - protein, 532 aa, Listeria monocytogenes serotype 4b
MTKYIFVTGGVVSSIGKGITAASLGRLLKNRGLSVTIQKFDPYINVDPGTMSPYQHGEVYVTDDGAETDLDLGHYERFIDINLNKYSNVTTGKVYSEVIKKERRGDYLGGTVQVIPHITNELKDRVFRAARMTNSDIIITEIGGTVGDIESLPFLEAIRQIKSDVGAENVLYIHTTLIPYIKAAGEMKTKPTQHSVKELRSLGIQPNIIVVRTEQPVSQEMKDKIALFCDIKASEVIESRDEETLYNVPLSLQKQKMDDIVLEHLQLEAPQAEMTDWKNLVHRVKNLSKKVRIGLVGKYVSLQDAYLSVAEALRHAGYDHDAEIEIDWIDSEKVTKENVAEIMKDVDGILVPGGFGDRAIEGKIAAIEYARVNKVPYFGICLGMQLATVEFARNVLGLEGAHSAEIEPETKHNIIDLLPEQKNIENMGGTLRLGLYPARIKQGTKAEAAYGTTLVEERHRHRYEFNNEYREQMEEAGMIVSATSPDGRLVEVVELADHPWFVACQYHPEFISRPNRPQSLFKDFVGAALNNK

SEQ ID NO: 31448 - DNA, 1599 bp, Listeria monocytogenes
  CDS (1)..(1599): transl_table=11
atgacaaagtatattttcgttacaggtggcgtagtttcgtcaatcggaaaaggaattacagcagcatcactaggacgtttgctgaaaaatcgtggacttagtgtaaccattcaaaaatttgatccatacatcaacgtggatccaggaacaatgagcccataccaacacggggaagtttatgtgacagatgacggcgcggaaacggacctagaccttggccattacgaacgttttatcgatattaacttaaataaatacagcaacgtgacaactggtaaagtttactcagaagttattaaaaaagaacgtcgcggggattacttaggtggaacagtgcaagttattccacacattacaaacgaattgaaagatcgtgttttccgtgcagcgcgcatgaccaattcagatattatcatcactgaaattggtggaacagttggggatatcgaatctttaccattcttagaagcaattcgtcaaattaaaggggatgttggtgcggaaaacgtactttatatccacacaactttaattccttacatcaaagcagcaggcgaaatgaaaacaaaaccaacacaacatagtgtaaaagaacttcgcagcttaggaattcaaccaaacattatcgttgttcgtacagagcaaccagtttcacaagaaatgaaagacaagattgcgctattttgtgatattaaagcttctgaggttattgaatctcgtgatgaagaaacactttataacgtaccactttctttacaaaaacaaaaaatggatgatatcgtccttgaacacttgcaattagaagcaccacaagcggaaatgactgattggaaaaacctggtacaccgtgtgaaaaacctttccaaaaaagttcgtatcggtttagttggtaaatatgtttccttgcaagatgcttacctttctgtagcagaagcacttcgtcatgcaggatatgatcatgatgcagaaatcgaaatcgactggattgattccgaaaaagtaacaaaagaaaacgttgctgaaatcatgaaagatgtcgacggtatcttagttcctggtggtttcggtgatcgtgccattgaaggtaaaattgctgctatcgagtatgcacgcgtaaataaagtaccttatttcggtatttgtttaggtatgcaactagcaactgttgaatttgcccgcaatgttcttggtcttgaaggagctcattctgcagaaatcgaaccagaaacaaatcataatatcattgacttattaccagaacaaaaaaatatcgaaaacatgggtggaacgcttcgtttaggtctttatccagcgcgtattaagcaaggaaccaaagcggaggctgcttatggtacaacacttgtagaagagcgtcatcgtcatcgttatgagtttaataatgaatatagagaacaaatggaagaagctggcatgattgtttctgcaacgagcccagatggtcgtttagttgaagtagttgaactgattgatcacccttggtttgtcgcttgtcaatatcacccagaattcatttctcgtccaaaccgtccacaaagcttgtttaaagattttgttggcgcagcacttaaaaataaataa

SEQ ID NO: 31449 - protein, 532 aa, Listeria monocytogenes
MTKYIFVTGGVVSSIGKGITAASLGRLLKNRGLSVTIQKFDPYINVDPGTMSPYQHGEVYVTDDGAETDLDLGHYERFIDINLNKYSNVTTGKVYSEVIKKERRGDYLGGTVQVIPHITNELKDRVFRAARMTNSDIIITEIGGTVGDIESLPFLEAIRQIKGDVGAENVLYIHTTLIPYIKAAGEMKTKPTQHSVKELRSLGIQPNIIVVRTEQPVSQEMKDKIALFCDIKASEVIESRDEETLYNVPLSLQKQKMDDIVLEHLQLEAPQAEMTDWKNLVHRVKNLSKKVRIGLVGKYVSLQDAYLSVAEALRHAGYDHDAEIEIDWIDSEKVTKENVAEIMKDVDGILVPGGFGDRAIEGKIAAIEYARVNKVPYFGICLGMQLATVEFARNVLGLEGAHSAEIEPETNHNIIDLLPEQKNIENMGGTLRLGLYPARIKQGTKAEAAYGTTLVEERHRHRYEFNNEYREQMEEAGMIVSATSPDGRLVEVVELIDHPWFVACQYHPEFISRPNRPQSLFKDFVGAALKNK

SEQ ID NO: 31450 - DNA, 1683 bp, Mannheimia succiniciproducens; identical to SEQ ID NO: 31114
  CDS (55)..(1683): transl_table=11

SEQ ID NO: 31451 - protein, 542 aa, Mannheimia succiniciproducens
MATNYIFVTGGVVSSLGKGIAAASLAAILEARGLNVTMMKLDPYINVDPGTMSPTQHGEVFVTQDGAETDLDLGHYERFIRTKMTKRNNFTTGKIYSEVLRKERRGDYLGATVQVIPHITNEIKARVIEGAAGHDVAIVEVGGTVGDIESLPFLEALRQLAVQVGREKTIFMHLTLVPYIPTAGEVKTKPTQHSVKELLSIGIQPDVLICRSDRMVPPNERAKIALFCNVPEKAVISLKDVDSIYRIPALLQSQGLDDLICQRFRLACKEADLSEWEQVLYRQANPTGDVTIGMVGKYVELPDAYKSVNEALKHAGLTNRLNVHIKYIDSQDVETKGIDVLKGVDGILVPGGFGYRGVEGKILTAQYARENNIPYLGICLGMQVAFIEYARHVAGLTQANSSEFDKNCPQPVVGLITEWQDADGSVEQRSENSDLGGTMRLGAQQCHLIEGSKARELYGKETIEERHRHRYEVNNTLLPQIEAAGLKVTGLSADKKLVEIIEVPNHPWFVACQFHPEFTSTPRDGHPLFAGFVKAAKENQKK

SEQ ID NO: 31452 - DNA, 1599 bp, Mesoplasma florum
  CDS (1)..(1599): transl_table=4
atggcaaaatttgtgtttgtaacaggtggagtggtttctggcttaggtaaaggaattactgcaagttcattaggtaatttattaaaagcgagcgggttaaaagtgtttatgcaaaaatttgacccttatttaaatgttgacccaggaacaatgagcccatatcaacatggagaagttttcgtaactgatgatggtggagaaactgatttagatttaggtcactatgaaagatttatagatgaaaagttaacaaaaatgtcttcaacttcagcaggtaaaatttacttagaaacaattaatgctgaaagacgtggggattgaggcggacaaactattcaagtagttccgcacataactgattcaattaaaaacaaagtttaccaagctgctaaaacatcaggagctgacgttatcatttcagaaattggtggtactgttggtgatattgaatctcaaccattcattgaagctattagacaaattagaatggaacaaggaaaagaaaatgttgtgtttattcatgttgcgttacttttatatctaaatgcatcaaaagaatacaaaacaaaacctattcaaatgtcagttaaagaattattaagtttaggaatccaacctgatattattgttcaaagaactgataaacattcttcaaaagaaattaaagaaaaaatttcattattttgtaacatcccaacatctaatgttattgatgcaattgataaagaatcaatatatgaagttcctttagaaatgtatgagcaaaatttacatggtttagttttagatcaattacaaattagaactaaaaaaacagatatggaatcttgaataaaattctgtgaaaaaataaaagcatcaaaagaagaattcgaagttacttttgtaggaaaatatattgaattacaagatgcatatttatcagttatcgaatctttaaaaattgcaggatatgaatttaaaagaaaactaaaaatcaattgaattcaagccgataaattaaatgaatcaaactataaagaagttttacaaaatgcaaaaggtattttggttcctggaggttttggagacagaggtatcgaaggaatgattttagcttctaaatttgctagagaaaatagcattccgtatttaggtatttgtttagggatgcaaattgcaactatttcaatcgctagagattgattgaatttaccagaagctaattcaactgaatttgatcactcaggagctgttcctatctttgacttcattagaggaatagatgttcaaaatttaggtggtacattaagattaggagcattctataaaacaacaattaaagaaggaacaaaagcagaaaaactttatggaagtagagaagtttttgaaagacatagacatagatatgaattcaataacgaatacaaaaaagcattagaagaaaaaggtttagtgttttcaggtatttatgaagaaaaaaaattagtagaaattattgaattaccaaatcatcctttttttgttggaagtcaatatcatccagagtttacttcaagacctaataaaccaaatccattgttcaaaggttttgttgaagctatagttaataataaataa

SEQ ID NO: 31453 - protein, 532 aa, Mesoplasma florum
MAKFVFVTGGVVSGLGKGITASSLGNLLKASGLKVFMQKFDPYLNVDPGTMSPYQHGEVFVTDDGGETDLDLGHYERFIDEKLTKMSSTSAGKIYLETINAERRGDWGGQTIQVVPHITDSIKNKVYQAAKTSGADVIISEIGGTVGDIESQPFIEAIRQIRMEQGKENVVFIHVALLLYLNASKEYKTKPIQMSVKELLSLGIQPDIIVQRTDKHSSKEIKEKISLFCNIPTSNVIDAIDKESIYEVPLEMYEQNLHGLVLDQLQIRTKKTDMESWIKFCEKIKASKEEFEVTFVGKYIELQDAYLSVIESLKIAGYEFKRKLKINWIQADKLNESNYKEVLQNAKGILVPGGFGDRGIEGMILASKFARENSIPYLGICLGMQIATISIARDWLNLPEANSTEFDHSGAVPIFDFIRGIDVQNLGGTLRLGAFYKTTIKEGTKAEKLYGSREVFERHRHRYEFNNEYKKALEEKGLVFSGIYEEKKLVEIIELPNHPFFVGSQYHPEFTSRPNKPNPLFKGFVEAIVNNK

SEQ ID NO: 31454 - DNA, 1605 bp, Methanosarcina acetivorans
  CDS (1)..(1605): transl_table=11
atgaaatatatcgtagttaccggtggggtgatgagcgggcttgggaaaggcatcaccatcgcgtccatcggcagaaacctgaaaaataaaggttacaaagttacggctatcaagatcgacccttacatcaatattgatgccggcaccatgagcccctaccagcacggggaagtttttgtgctcagggacgggggtgaagttgacctggacctcggaaactacgagaggttccttgacacggaacttacccgagaccacaaccttaccacaggcaagatctaccaggaagtgatcgccaaggagagaagaggagactacctcggaaagaccgtccagatcatcccccatatcacaaacgagattaagagcagaataagaaaggttgcagccaggagtggggctgatgtctgtcttgttgaaatcggagggactgtcggagacatagaaagcatgcctttcctcgaagctgtccgtcagatgcacagggaagaaccttccgaaaatattgtctttattcatgttacccttgttatggaagacctccagggcgaacagaaaaccaagccttctcagcactcagtaaaagaactccgagcacttggtctgagccctgaagtgatagttacgaggtcaaagacccctcttcaggaaagcgccaaggaaaaaatcgccttattctgtgatgtgcctcaggaactggttatcagcgctcatgatgccgctgatatttatgaagtgcctcttgagattgaagagcagggcctgaccacaaggctcatgaagcacctgaagctggagtccagtgtagaggacaatggatggagggaaatggtttcaaggatgaagtccacaaccgaagaggtcaagctggcaatcgtaggcaaatacacaaaccttgaagactcttacctcagtatccttgaagctgtcaagcacggcggaattgataatggttgtaaggttgaagtcaacatggttgaggctgaaaccctggaagaagaccctgcagagattgagaagctcagacagtttgacggcatcctgattcccggaggttttgggggacgcgggactgaaggcaagatgcttgcaatcaaatttgccagggaaaatgatgtcccattcctcgggatctgccttggcatgcagcttgctgtgatagaatttgcccgaaatgttgtaaatcttgaaaacgcaaacagtacggagtttgatgaagacactccctacccggtcattgacatcctcccggagcagaccggagttgcggatatgggcggcaccatgcgtcttggggactatgacgctatcctaaaagacggttcccttgcaacaaaactctacggcaccaattacattgtcgagcgccatcgccacaggtatgaggtcaaccctgagttcgtggatagacttgagtcctttggcatagtcttttccggcaaaaacaaaaacaggatggaaattgccgaaattcctgacaaacgtttcttctttgcctctcagttccaccccgagttcaggtcaagaccgggcagaccatctcccccgttcaagggcctcgtcagggcaatgtgcaaatataataaggaaaaggaaggccagtaa

SEQ ID NO: 31455 - protein, 534 aa, Methanosarcina acetivorans
MKYIVVTGGVMSGLGKGITIASIGRNLKNKGYKVTAIKIDPYINIDAGTMSPYQHGEVFVLRDGGEVDLDLGNYERFLDTELTRDHNLTTGKIYQEVIAKERRGDYLGKTVQIIPHITNEIKSRIRKVAARSGADVCLVEIGGTVGDIESMPFLEAVRQMHREEPSENIVFIHVTLVMEDLQGEQKTKPSQHSVKELRALGLSPEVIVTRSKTPLQESAKEKIALFCDVPQELVISAHDAADIYEVPLEIEEQGLTTRLMKHLKLESSVEDNGWREMVSRMKSTTEEVKLAIVGKYTNLEDSYLSILEAVKHGGIDNGCKVEVNMVEAETLEEDPAEIEKLRQFDGILIPGGFGGRGTEGKMLAIKFARENDVPFLGICLGMQLAVIEFARNVVNLENANSTEFDEDTPYPVIDILPEQTGVADMGGTMRLGDYDAILKDGSLATKLYGTNYIVERHRHRYEVNPEFVDRLESFGIVFSGKNKNRMEIAEIPDKRFFFASQFHPEFRSRPGRPSPPFKGLVRAMCKYNKEKEGQ

SEQ ID NO: 31456 - DNA, 1605 bp, Methanosarcina barkeri
  CDS (1)..(1605): transl_table=11
atgaagtatatcatagttaccggtggggtgatgagcgggcttggaaaaggcattaccatcgcatccattggcagaaaccttaaagacaaaggttataaagttacggctatcaagatcgacccttacatcaatattgatgcgggcaccatgagcccctaccagcatggggaagtttttgtgctcaaggacggcggggaagtggatctggatcttgggaattacgagcggttccttgatactgaacttacaagggaccataatcttaccacaggcaagatctacttagaagtaatttccaaagagagaagaggagactacctcggaaaaaccgttcagattattccccacgtcacaaatgagatcaaaagcaggatcagaaaggtcgctgccaggagtggggctgatatatgtcttattgaaatcggaggaactgttggggatattgaaagcatgcctttccttgaggctgtgcgccagatgcacagggaagaaccttccgaaaatatcgcatttatacatgtgaccctggctatggaagaccttcagggtgagcaaaaaaccaagccttcgcagcattctgtaaaggaactccgtgcccttgggctcagtcctgaagtaatcgttgtaagatcaaagtctcctcttcaggaaagtgccaaagagaagattgccctcttttgtgatgtgccccaggagctggttatcagcgctcacgacgccgacgatatttatgaagtgcctcttgagatagaagagcagggattgaccacccagctcatgaaacacctgcaactggagtcaagtgtcgaaaacggtgcatggaaaaagatggtctcaaggatgcactctacaaccaacacggttaaacttgcaatcgtcggaaaatatacgaatcttgaggactcttacctcagcatccttgaagctgtcaagcacggaggaattgataacggatgcagggttgaagtcaatatggttgaagccgaaatcctggaagaaaatccagccgagattgagaagctaatacagtatgatgggattcttattccgggcggttttggcggtcgcggcacagaaggcaagatgatggcgattaagttcgccagggaaaatgatattcctttccttgggatctgcctgggcatgcagcttgcagtcatcgaatttgccagaaatgtggctaaactcaaaggagcaaacagtacggaatttgatgaagattccccttatcctgtgattgatctcctacctgagcagaccggtgttgcagaaatgggcggaaccatgcgccttggagactatgaagccatccttacagaaggctctattgccgctaaaatctatgggaccaattacattgtcgagcgtcaccgccacaggtatgaggttaacccggagtttgttgacagacttgagtcttatggcattgtcttttccggcaaaaacaagaacaggatggaaattgccgagattcctggcaagcgtttcttctttggttcccagttccatcctgagttcagatcacggcctggaagaccgtctcctccattcaatggcctcgtcgcagcaatgtgcaaatacagaaaggaaagagaaggacgataa

SEQ ID NO: 31457 - protein, 534 aa, Methanosarcina barkeri
MKYIIVTGGVMSGLGKGITIASIGRNLKDKGYKVTAIKIDPYINIDAGTMSPYQHGEVFVLKDGGEVDLDLGNYERFLDTELTRDHNLTTGKIYLEVISKERRGDYLGKTVQIIPHVTNEIKSRIRKVAARSGADICLIEIGGTVGDIESMPFLEAVRQMHREEPSENIAFIHVTLAMEDLQGEQKTKPSQHSVKELRALGLSPEVIVVRSKSPLQESAKEKIALFCDVPQELVISAHDADDIYEVPLEIEEQGLTTQLMKHLQLESSVENGAWKKMVSRMHSTTNTVKLAIVGKYTNLEDSYLSILEAVKHGGIDNGCRVEVNMVEAEILEENPAEIEKLIQYDGILIPGGFGGRGTEGKMMAIKFARENDIPFLGICLGMQLAVIEFARNVAKLKGANSTEFDEDSPYPVIDLLPEQTGVAEMGGTMRLGDYEAILTEGSIAAKIYGTNYIVERHRHRYEVNPEFVDRLESYGIVFSGKNKNRMEIAEIPGKRFFFGSQFHPEFRSRPGRPSPPFNGLVAAMCKYRKEREGR

SEQ ID NO: 31458 - DNA, 1605 bp, Methanococcoides burtonii
  CDS (1)..(1605): transl_table=11
atgaaatatatcatagttaccggcggtgtcatgagtggtcttggaaaagggatcacaacggcttcagtcggcaggaatctgaaaaacaaaggttataaggtaacagcgataaagattgatccttacatcaatattgatgcaggcaccatgagtccttaccagcatggtgaggtctatgtccttaaagatgggggcgaggtagatcttgatcttggtaattatgaaaggttccttgatactgaactcacaagggatcacaacctaactaccggcaagatctatcagacggtcattgacaaggaacgtaaaggtgaatatctgggtaagaccgtacagatcatccctcatataaccaacgagatcaaagatcgcattcgcaggatcgcggcaaaaagtggtgctgatgtctgtcttattgaagttggtggaactgttggtgatatcgaaagcatgcctttccttgaggcagtaaggcaaatgtacagggaggaatctcctgagaacatcgcattgctccacgtgacattggtccctattgactctcagggcgatcaaaaaacaaagccaacgcaacattctgtcaaagaattaagggaattgggcctgacaccgcatgtaattgtctcaagatgcaagaaagcacttatggaaagtacccgttccaagatcgctcttttctgtgacgtacctgtcgaggcggtcattagtgcgcatgactccgcagacatttatgaagtgccactccagcttgaaaatgagggtctgagcaattatctgttaaagaagctcattctcaaatccacgcttgaggataccaactgggaagaaatggtcataaggatgaacaattgcacaggtaatgtgaatgtggcaattgtaggtaaatatacacaccttgaagattcgtacatcagtatcgtggaatcactcaaacatggtgctatcgaaattggttgtaagttcgaaataacctggttcgatgctgaatcattcgatgacgatccaagtgaggtcgaaaaattgaatggttttgatggaattcttgttcctggaggatttggtgagcgtgggaccgagggaaagatgctcgcaatcaaatatgcccgtgagaacaatatcccatatcttggactttgccttggtatgcagcttgctgtcatagagtttgcaaggaatgtcgttggactggatggcgcaaacagcagcgagttcgatgagaatactccatatccggtaatcgatctgttgcctgaacaggaggatgtagtggatatgggagccacaatgcgtcttggtgattatgaagccactcttaaggcaggttctcttgctgaatccatatatggtgcttctctcattactgagcgtcacaggcataggtatgaagtaaatcccaattatgtggaccgtatagaagaacatgggatgatcttttctggaaagaacaagaacaggatggaaattgcagaagttccttcaaaagacttctacttcgcatcccaattccacccggagttcaaatcccggcctggtaggccttccccaccattcaaagcatttatgggtgcaatgcttaaaaagagcaaagaaaagaaagatcaataa

SEQ ID NO: 31459 - protein, 534 aa, Methanococcoides burtonii
MKYIIVTGGVMSGLGKGITTASVGRNLKNKGYKVTAIKIDPYINIDAGTMSPYQHGEVYVLKDGGEVDLDLGNYERFLDTELTRDHNLTTGKIYQTVIDKERKGEYLGKTVQIIPHITNEIKDRIRRIAAKSGADVCLIEVGGTVGDIESMPFLEAVRQMYREESPENIALLHVTLVPIDSQGDQKTKPTQHSVKELRELGLTPHVIVSRCKKALMESTRSKIALFCDVPVEAVISAHDSADIYEVPLQLENEGLSNYLLKKLILKSTLEDTNWEEMVIRMNNCTGNVNVAIVGKYTHLEDSYISIVESLKHGAIEIGCKFEITWFDAESFDDDPSEVEKLNGFDGILVPGGFGERGTEGKMLAIKYARENNIPYLGLCLGMQLAVIEFARNVVGLDGANSSEFDENTPYPVIDLLPEQEDVVDMGATMRLGDYEATLKAGSLAESIYGASLITERHRHRYEVNPNYVDRIEEHGMIFSGKNKNRMEIAEVPSKDFYFASQFHPEFKSRPGRPSPPFKAFMGAMLKKSKEKKDQ

SEQ ID NO: 31460 - DNA, 1659 bp, Methylococcus capsulatus
  CDS (1)..(1659): transl_table=11
atgacgaaatacatcttcatcaccggcggagtcgtttcgtcgctgggtaaaggcattgccgcatcctccctcgccgcgatcctcgaggcgcgcggcttgaaagtcacgctgacgaagctcgatccctacatcaacgtcgatccgggcaccatgagcccgttccaacatggcgaggtgttcgtgaccgaggacggcgccgaaaccgacctcgatctgggccattacgagcgcttcgtccgcaccaccatgggcagggcgaacagcttcaccaccggccagatctacgagaacgtgatccgcaaggaacgccgcggcgaatatctgggcgccaccgtgcaggtcatcccccacatcaccgacgagatcaaacgcggcatccgcctcagcgcggaaggctacgacgtggcgctgatcgaaatcggcggcaccgtcggcgacatcgaatccctgccctttctggaggcgatccgccaaatgcgggtcgatctgggcgaagaacgctcgctgttcatccatctgaccctggtgccttacatctccagcgccggcgagctgaagacgaagccgacccagcattcggtcaaggaactccgcaccatcggtatccagccggacatcctgatctgccgctcggaccggccgatcccgaagagcgaatgccgtaagatcgctctgttcaccaacgttcaggaagatgcggtcatcgcttcagtggatgccgacaccatctaccggattcccgccctgctgcacgagcagcagctcgacgagatcgtggtgcgcaagctgcggctcgacgccggccccgccgacctgagcgaatggcatcgtgtggtcgatgcgctccagaatccggagcgctcggtcaccgtcgccatggtcggcaagtacgtcaaccattccgacgcctacaaatcgctgagcgaggcgttggtccacgcgggcatccacacccgcacccgggtcgacatccgcttcatcgagtccgaggaaatcgaggaccacggcaccggcgcgctggaaggggtcgacgccatcctggttcccggcggcttcggtgaacgcggtatcgaaggcaagatcgccgccgtgaaatacgcccgcgagcaccgcgtgccctacctcggcatctgcctggggatgcaggtcgccgtgatcgaattcgcccgcaacgtggccggactggaaggcgcgcacagcaccgagttcctgccatcgtcgccgcatccggtcatcgccctcatcaccgagtggaagaccgaggccggcggcatcgaataccgcagcggcgattcggacctgggcggcacgatgcggctgggcggacagaaatgccggctggtacccaacacgctggcccatgccacctatggcaaggacgtcatcaccgaacggcaccgccaccgctacgaattcaacaatcactacctcaagacgctggaagcggcgggcctgcgggtgtccggcaaatcgctggacggccgcctggtcgagatggtggaaattcccgagcacccgtggttcctggcctgccagttccatcccgagttcacctccacgccgcgcggcggccatccgctgttcagcggcttcgtccgcgccgcccgtgcgcgcagcgaaggcacgtcaccccccgagagcggtggagcccaaccatga

SEQ ID NO: 31461 - protein, 552 aa, Methylococcus capsulatus
MTKYIFITGGVVSSLGKGIAASSLAAILEARGLKVTLTKLDPYINVDPGTMSPFQHGEVFVTEDGAETDLDLGHYERFVRTTMGRANSFTTGQIYENVIRKERRGEYLGATVQVIPHITDEIKRGIRLSAEGYDVALIEIGGTVGDIESLPFLEAIRQMRVDLGEERSLFIHLTLVPYISSAGELKTKPTQHSVKELRTIGIQPDILICRSDRPIPKSECRKIALFTNVQEDAVIASVDADTIYRIPALLHEQQLDEIVVRKLRLDAGPADLSEWHRVVDALQNPERSVTVAMVGKYVNHSDAYKSLSEALVHAGIHTRTRVDIRFIESEEIEDHGTGALEGVDAILVPGGFGERGIEGKIAAVKYAREHRVPYLGICLGMQVAVIEFARNVAGLEGAHSTEFLPSSPHPVIALITEWKTEAGGIEYRSGDSDLGGTMRLGGQKCRLVPNTLAHATYGKDVITERHRHRYEFNNHYLKTLEAAGLRVSGKSLDGRLVEMVEIPEHPWFLACQFHPEFTSTPRGGHPLFSGFVRAARARSEGTSPPESGGAQP

SEQ ID NO: 31462 - DNA, 1629 bp, Methylobacillus flagellatus
  CDS (1)..(1629): transl_table=11
atgaccaaattcgtattcgttaccggcggggttgtttcctctttaggtaaaggcattgcagccgccagcttaggcgcaattcttgagtcgcgtggcatcaaggtgaccatgctcaagctggatccttatattaacgtcgacccgggcaccatgagcccgttccagcatggcgaggtgttcgtcaccgacgacggcgccgaaaccgacctcgacctcggccattacgagcgcttcatcagcgcccgcatgggtaagcgcaataacttcactaccggccagatctacgaaaccgtgatcaagaaggagcgccgcggtgaatacctgggcaagaccgtgcaggtgattccgcacattaccgacgagatcaaggcgcatgtgaagcgcggcgccgaaggggccgatgtggcgattgtcgaagtgggcggcacagtgggcgatatcgagtccctgcctttcctcgaagccatccgtcagatgggcatcgaggaggggcgcagcaatacctgtttcatgcatctgacgctgctgccgtggattcccaccgcaggcgagctcaagaccaaacctacccagcattccgtgaaggagttgcgcgaaatcggcatccagccagacatcctgctctgccgtgcggaccgtgccattcccgaggacgaaaagcgcaagatcgcattatttactaatgtgcctcacgaggctgtcatttcggtagtcgatgcagacagtatttacagcattcctcgcatgctgcacgaccagatgctggacgagatcgtctgccacaagctcaacctgctcgcgcgcgcggcagacctgtcgagctggaaccgcatcgtacatgcattgaagaaccccaagcatgaggtcaatgtcgccttcgtcggcaagtatgtggacctgaccgagtcctacaaatccctgaccgaggcgctgattcatgccgggattcataacgagtccaaagtcaatatccactacatcgattccgaggaggtggaaaaacacggcaccggcgaactggagaaaatggatgccatcctggtgccaggcggtttcggcaagcgcgggacggaaggcaagattgccgcgatccgctatgcgcgtgaaagcaagacaccctacctgggaatctgcttggggatgcagctggccgtcatcgagtttgcgcgcaacgtggcagggctcaaggacgccaatagcaccgaattcgacccccatactcctcatccgcttgttggcctgattaccgaatggaagaatgccgacggcaaggtggagcagcgcagcgaggattccgacctcggtggcacgatgcgcctgggtgcgcagaaatgtcccatcgtgccggataccaaggcgtttaccatctacggtgcggaagtcaacgaacgccaccgccaccgctacgaagtcaacaaccactatgtggacaagctggaaaaggccggcctggtggtatcagcgcgcacgccgaccgagcagctctgtgaaatggttgagctgcccagcgaggtacatccttggttcgtcgcctgccagttccaccctgaattcacttccaatccacgtaccgggcatcccttgtttaatgcctatattgcagcggccctggccaatagaaaggcgtaa

SEQ ID NO: 31463 - protein, 542 aa, Methylobacillus flagellatus
MTKFVFVTGGVVSSLGKGIAAASLGAILESRGIKVTMLKLDPYINVDPGTMSPFQHGEVFVTDDGAETDLDLGHYERFISARMGKRNNFTTGQIYETVIKKERRGEYLGKTVQVIPHITDEIKAHVKRGAEGADVAIVEVGGTVGDIESLPFLEAIRQMGIEEGRSNTCFMHLTLLPWIPTAGELKTKPTQHSVKELREIGIQPDILLCRADRAIPEDEKRKIALFTNVPHEAVISVVDADSIYSIPRMLHDQMLDEIVCHKLNLLARAADLSSWNRIVHALKNPKHEVNVAFVGKYVDLTESYKSLTEALIHAGIHNESKVNIHYIDSEEVEKHGTGELEKMDAILVPGGFGKRGTEGKIAAIRYARESKTPYLGICLGMQLAVIEFARNVAGLKDANSTEFDPHTPHPLVGLITEWKNADGKVEQRSEDSDLGGTMRLGAQKCPIVPDTKAFTIYGAEVNERHRHRYEVNNHYVDKLEKAGLVVSARTPTEQLCEMVELPSEVHPWFVACQFHPEFTSNPRTGHPLFNAYIAAALANRKA

SEQ ID NO: 31464 - DNA, 1623 bp, Methanococcus jannaschii
  CDS (1)..(1623): transl_table=11
gtgaaaataatgaagtttatatttatcactggaggagttatatcatcattaggtaaaggaattacagcagcttcgttagggagattattgaaagcaagaggattcaaagttaatatgattaagatagacccttatctgcagatagatgcaggaacaatgtctccttatgagcatggagaggtttttgttacagaggatggtggagagtcagatttagatttggggcattatgagaggtttattgatgagaatttaaccaaaaacaacaacataacaacaggaaagatatattggagtgtcttaacaaaggagaggaagggagagtatttaggaaagacagttcaagttatccctcacataacaaatgagataaaggattggattaaaaaccttggagaggggtatgatataactatcgttgaaattggaggaactgttggagatattgaaagcttacctttcttagaagctataaggcagtttaaaaaggatgtgggtaaagaaaacgttttatacatccatgtttctcttttaccttatataagagctgccggagagttgaagacaaaacctactcaacatagtgttaaagagctaagaagcatcggaattcaaccagatatattaatttgtagaacggaaatgccaataagtgataaaattagggagaaattagccctattctgtgatgttgataaagaggcggttattgaggcaagagatgcaagaacaatatatgaagtccctcttaatttagaaaaagaaggtttagggaaattagttaccaaaaagttaaatcttccagatagagaaccagatttagacgaatggagaaagtttgttgatagggttataaacccattaaatgaagtaactattggtatagttgggaagtatgttgagctaaaagatgcttatttaagtattacagaggcattaatccatgctggagctaaaaatgacactaaagttaatataaactggatacattctgaaagattagaaagtgaagaatttgaagaattattagataggtatagagaagataatcaattagatggtatcttagttccaggaggatttggagatagaggagttgaaggtaaaataaacgctataaaatatgcaagagaaaacgacattcctttcttaggtatatgcatgggaatgcagtgtgcagttatagagtttgcaaggaacgtttgtggcttagagggagcgaattcaacagagtttgatgaaaacactaagtatccagttgttgatttactgccagagcagaaggagattgatgcaaaaggaggaactatgagattaggagcttatccagcgatattgatggagggaactttagcttataagttgtatggaagaaaggaagtttatgagagacatagacataggtatgaggttaatccggaatatcatgagatattagaaaatcatggcttaacaatttctggaaaatctccagatggaagattggcagagtttatagaaatcagcaaaaatagatacttcatagcaacacaggcacatccagagtttaaatcaagacctaacaaaccacatccattgtttgatgggttagtaagggcttctttgggagagaagattaaataa

SEQ ID NO: 31465 - protein, 540 aa, Methanococcus jannaschii
MKIMKFIFITGGVISSLGKGITAASLGRLLKARGFKVNMIKIDPYLQIDAGTMSPYEHGEVFVTEDGGESDLDLGHYERFIDENLTKNNNITTGKIYWSVLTKERKGEYLGKTVQVIPHITNEIKDWIKNLGEGYDITIVEIGGTVGDIESLPFLEAIRQFKKDVGKENVLYIHVSLLPYIRAAGELKTKPTQHSVKELRSIGIQPDILICRTEMPISDKIREKLALFCDVDKEAVIEARDARTIYEVPLNLEKEGLGKLVTKKLNLPDREPDLDEWRKFVDRVINPLNEVTIGIVGKYVELKDAYLSITEALIHAGAKNDTKVNINWIHSERLESEEFEELLDRYREDNQLDGILVPGGFGDRGVEGKINAIKYARENDIPFLGICMGMQCAVIEFARNVCGLEGANSTEFDENTKYPVVDLLPEQKEIDAKGGTMRLGAYPAILMEGTLAYKLYGRKEVYERHRHRYEVNPEYHEILENHGLTISGKSPDGRLAEFIEISKNRYFIATQAHPEFKSRPNKPHPLFDGLVRASLGEKIK

SEQ ID NO: 31466 - DNA, 1608 bp, Methanopyrus kandleri
  CDS (1)..(1608): transl_table=11
gtgaagttcgtcgtgatcacgggtggggtagtgtccggtatcgggaaaggtatcaccacggcgtctatcggtaggatcctaagggcacgagagctggaagttaccgcggtcaagatcgacccttacattaacgtggacgcgggcaccatgaacccttttcaacatggagaggtgttcgtcacggaggacggtgttgagacggatctggacctgggccattatgaacggttcatggacgtcacgctatccggagcccacaatatcacgactggcaagatctaccagcgggtgatcgaaaaggagcgccgtggggactacttgggcgagaccgtccaggtgattccccacataaccgacgagatcaagtcgtggatccgcgaggtgggcaaggccagcggtgcggacgtcgtgctggtggagataggcggtaccgtcggcgacattgaagggatgcccttctacgaggcggttcggcagttgcagctggaggaaggtcgagagaacgtgatgttcgtccacctgacctacgtcccatacttggaacacgtccacgagctgaagacgaagcccacccaacatagcgtcaaggagctccgtagtctaggtatccagccggacgccatcgtgtgcaggtgtgaacgtcccctcgacgacggcgtcaaacggaagatcgccctgcatacgaacgtcccgagggaggccgtaatcgacgcccacgacgtcgatctggtgtacaaggtgccgttgttgctcgagcgtcagggcttcggcgattacatctgcgagcgtctgggtctcgacgcggacgagcccgattactccgactggctggatttcgttaccaggatcgaggaagccgacgacgagatcaggatcgcggtcgtgggtaagtacgtggacctaccggacgcctacatcagcatccgggaggccttagtccacgccggggctcatgtcggggttggcgtggacgtagcgtgggtggactcggaggcgctcgaagccggcgactccgaagcgtgggaggaggtgaaagacgccgacggtgtactagttccaggtggcttcggcaagagaggtgtcgaaggtaagatcgaggcggttcgatacgcccgggagaacgacgttccgttcctgggtatctgcttgggcttccagctcgtcgtggtcgagtacgcccgcagcgttctcgggctcgaggacgctcacagcacggagttcaatcccgacaccgatcatcccgtcgtggacttgctcccggaacagcgcggagtgaagcggaaaggaggcacgatgcggttaggcgccgagcccgtggtgctcgaggaaggatcgctcctcagacgcctctacgacgaccgtgagatcgttttggaacggcatcgacaccgttacgaagtgaacccgtcgtacgttcgcgaactggaggaccatggactgaggttttcgggacactcccccgacgggcgcatggaggccctcgaactgccggatcatccttacttcgttggcacacagttccatccggagttcaagtcccgtcccggtgacccgtcgccgccgttcgtaggcctcatcaaggctgcagcaggtcaagggcccgattga

SEQ ID NO: 31467 - protein, 535 aa, Methanopyrus kandleri
MKFVVITGGVVSGIGKGITTASIGRILRARELEVTAVKIDPYINVDAGTMNPFQHGEVFVTEDGVETDLDLGHYERFMDVTLSGAHNITTGKIYQRVIEKERRGDYLGETVQVIPHITDEIKSWIREVGKASGADVVLVEIGGTVGDIEGMPFYEAVRQLQLEEGRENVMFVHLTYVPYLEHVHELKTKPTQHSVKELRSLGIQPDAIVCRCERPLDDGVKRKIALHTNVPREAVIDAHDVDLVYKVPLLLERQGFGDYICERLGLDADEPDYSDWLDFVTRIEEADDEIRIAVVGKYVDLPDAYISIREALVHAGAHVGVGVDVAWVDSEALEAGDSEAWEEVKDADGVLVPGGFGKRGVEGKIEAVRYARENDVPFLGICLGFQLVVVEYARSVLGLEDAHSTEFNPDTDHPVVDLLPEQRGVKRKGGTMRLGAEPVVLEEGSLLRRLYDDREIVLERHRHRYEVNPSYVRELEDHGLRFSGHSPDGRMEALELPDHPYFVGTQFHPEFKSRPGDPSPPFVGLIKAAAGQGPD

SEQ ID NO: 31468 - DNA, 1605 bp, Methanosarcina mazei
  CDS (1)..(1605): transl_table=11
atgaagtatatcgtagttaccggtggggtgatgagcgggcttgggaaaggcatcaccatcgcgtccatcggcagaaacctgaaaaataaaggttataaagttacggctatcaagatcgacccttacatcaatatcgatgcaggtaccatgagcccttaccagcacggggaagtttttgtgctcagggacggaggcgaagttgacctggatctcggaaactacgagaggttccttgacacggaactcaccagggaccacaacataacaactggcaaggtttatcaggaagtgatcgccaaagaaaggaggggagactacctcggaaaaaccgtccagattattcctcacattacaaatgagatcaaaaataaaataagaaaagttgcagcaaggagcggggctgatgtctgtcttattgagataggagggactgtaggagacattgagagcatgcctttccttgaagcagtccgccagatgcacagggaagaaccttcggaaaacattgtttttatccatgtgacccttgtaatggaagatttgcagggagaacagaagaccaaacctacgcagcactcggtgaaagaactccgggcacttgggctgagccccgaagtgatagttacaaggtcaaagactcccctccaggaaagcgccaaggaaaaaattgccttattctgtgatgttccccaggagctggttatcagcgcccatgatgccggcgacatttacgaagtgcctcttgagatcgaggagcagggactgaccacccagcttatgaagcacctgaggctggagtccggtgttgatgatggtggctggagagaaatggttgcaaggatgaagtccacaaccgacgaggtaaagctggcaatcgtgggcaaatatacaaatctcgaagattcctatctcagcatccttgaagctgtaaagcacggaggaattgataacgcgtgcagggttgaagtcaacatggttgaagctgagacccttgaagaagacctggtagaagttgaaaaactaaaacagtatgatggcatcctgattccaggcggcttcggaggccgtggaactgaagggaagatgcttgcaattaaatttgccagggaaaacgacatcccgttccttggaatctgcctgggtatgcagcttgcggtaattgagtttgcaagaaatgtggcaaaccttgaaaacgcaaacagcacggagtttgatgaagatactccttaccctgtgattgatatcctcccggaacagaccggagttgcggatatgggaggcaccatgcgtcttggggactatgatgctatcctgaaagaaggctcctttgccacaaagctctatgggaccaattatattgttgagcgtcaccgccacaggtatgaagtaaaccccgaattcgtggacaggcttgaatcctttggcatagtgttttccggcaaaaataaaaatagaatggaaattgccgaaatcccaggaaaacgatttttctttgcctcccagttccaccctgagttcaagtcgagaccaggcaggccgtctcctccatttaaagggctcgtcagggcaatgtgtaaatacaggaaggaaagagaagttcagtaa

SEQ ID NO: 31469 - protein, 534 aa, Methanosarcina mazei
MKYIVVTGGVMSGLGKGITIASIGRNLKNKGYKVTAIKIDPYINIDAGTMSPYQHGEVFVLRDGGEVDLDLGNYERFLDTELTRDHNITTGKVYQEVIAKERRGDYLGKTVQIIPHITNEIKNKIRKVAARSGADVCLIEIGGTVGDIESMPFLEAVRQMHREEPSENIVFIHVTLVMEDLQGEQKTKPTQHSVKELRALGLSPEVIVTRSKTPLQESAKEKIALFCDVPQELVISAHDAGDIYEVPLEIEEQGLTTQLMKHLRLESGVDDGGWREMVARMKSTTDEVKLAIVGKYTNLEDSYLSILEAVKHGGIDNACRVEVNMVEAETLEEDLVEVEKLKQYDGILIPGGFGGRGTEGKMLAIKFARENDIPFLGICLGMQLAVIEFARNVANLENANSTEFDEDTPYPVIDILPEQTGVADMGGTMRLGDYDAILKEGSFATKLYGTNYIVERHRHRYEVNPEFVDRLESFGIVFSGKNKNRMEIAEIPGKRFFFASQFHPEFKSRPGRPSPPFKGLVRAMCKYRKEREVQ

SEQ ID NO: 31470 - DNA, 1602 bp, Methanococcus maripaludis
  CDS (1)..(1602): transl_table=11
atgaaatatatatttgttacaggcggtgtagtgtcttctttaggtaaagggataacttcatcatctcttggaagacttctcaaagccaggggtttgaacgtaaatatgattaaaatcgacccttatttacagatcgatgcaggtacgatgtccccatttgaacatggtgaagttttcgtaactgatgatggcggagaaactgatcttgaccttggaaattacgaaagatttgtagatattggattgaaagctgacaacaatattacaacaggtaaaatttactggagcgttctttcaaaagaaagaaaaggagattatcttggaaaaacggttcaggtaattccgcacattacaaacgagataaaagatagaatcaaaaatcttggaaaagaatccgacattacaattattgaaattggtggaactgttggagatatcgaaagtttaccttttttagaagcaattaggcaatttaaaaaagatgttggaaaggaaaatgttctctatattcacgtttcacttctcccatatattagaagtgcaggcgaattaaagacaaaaccaacacaacactcggtaaaagaattgaaaggaattggaattcagccagatatattggtttgtagatcagaaattccgataagtgaaaaaataaaagacaaacttgcgctcttttgcgatgttgaaaaagaagcagtaattgaatgtaaagacgcaagaacaatttacgaagttccactaaatcttgaaaaagaaggacttggaaaattagttactgaaaaacttaatttaagagattcaactccagatttaactgaatggagagctattgttgacagaatcataaacccgatgaatgaaatcacaattggaatcgttggaaaatacatcgaattaaaagattcttacatgagtataatggaagctttaggccatgcaggtgctaaaaacgatactaaagtaaatattgcatggattaattcagaagaactagaaaccaaaaattatgaagaaatcctcaacaaaatggttgacgatgaaaaattacatggtattttggttcccggcggttttggagatcgaggaatcgatggaaaagtaaatgccgtacgatatgcaagagaaaaaaatattccgtttttaggaatatgtcttggaatgcagtgtgcagtaattgaatttgcaagacacgtatgtggtttaaatgccaattcaacagaatttgacgaagaaactgaacatcctgtaattgattacattccagaacagcgtgaagtaactgaaaaagggggaaccatgagacttggtgcataccctgcagttttaacagaaaattcgcttgcaagtgaattatacggttcaataaatgcatctgaaagacacagacaccgatatgaagtaaatccagaataccatgaaatattgaagaaaaacgggttaataatttcgggaatgtcacctgacggaaaacttgcagaattcatagaacttgaaaatcacaagtactttattgcaacacaagcacaccccgaatttaaatcaagaccaaacaaacctcacccattattccatggattggtaaaagcttcgattgaaaaataa

SEQ ID NO: 31471 - protein, 533 aa, Methanococcus maripaludis
MKYIFVTGGVVSSLGKGITSSSLGRLLKARGLNVNMIKIDPYLQIDAGTMSPFEHGEVFVTDDGGETDLDLGNYERFVDIGLKADNNITTGKIYWSVLSKERKGDYLGKTVQVIPHITNEIKDRIKNLGKESDITIIEIGGTVGDIESLPFLEAIRQFKKDVGKENVLYIHVSLLPYIRSAGELKTKPTQHSVKELKGIGIQPDILVCRSEIPISEKIKDKLALFCDVEKEAVIECKDARTIYEVPLNLEKEGLGKLVTEKLNLRDSTPDLTEWRAIVDRIINPMNEITIGIVGKYIELKDSYMSIMEALGHAGAKNDTKVNIAWINSEELETKNYEEILNKMVDDEKLHGILVPGGFGDRGIDGKVNAVRYAREKNIPFLGICLGMQCAVIEFARHVCGLNANSTEFDEETEHPVIDYIPEQREVTEKGGTMRLGAYPAVLTENSLASELYGSINASERHRHRYEVNPEYHEILKKNGLIISGMSPDGKLAEFIELENHKYFIATQAHPEFKSRPNKPHPLFHGLVKASIEK

SEQ ID NO: 31472 - DNA, 1602 bp, Methanobacterium thermoautotrophicum
  CDS (1)..(1602): transl_table=11
ttggttcatctggccaagtacatcgttgtaacgggaggagttgtaagctctattggaaagggaataacagcagcatcaataggcaggatactcagatcatatggattatctgtgacagccataaagatagacccctacctgaactgggactcagggaccctcaacccctaccagcacggtgaggtctttgtaaccgatgatggaatggagacagaccttgacctgggccactatgagaggttcctggactctgatctccctggtgaggccaacataacaaccggaaaggtctacatgtccgtcataaataaggagcggtcaggggattacctgggctcctgtgtacagataataccccacataaccgacgagatcaagtcaatgataagaaaaatcgctgataaaagcggtgctgaggtggtactggtggaggtcgggggtacggtgggtgacatagagggtcagcccttcctggaggccctcaggcagctgaggaacgaggagggtcatgagaacgtcatgttcgtccatgtgacctacgtcccatatctgagggctgcaggggaatttaagaccaaaccgacacagcacagtacaaaggagctcagaagtacaggtataaaccctgatatgatcatctgccggagtgagatgccaatagactcctcactcaagaggaagatagcccacttctgtgacgttgaggaggaggccgttgtgaatgcccccgacgcatcatcaatctatgaggtccccctggtacttgacagtgagcgggtgggggactacatagtccggaggatagaactggatgttgatggtgaagcagacctcagtgaatgggcagggatagttgagtcactcatgatagatgagccggtggttaccgttggaatagtcggcaagtacgtggagcttgaggactcatacataagtataagggaagccctcaaacatgcagcggcacacctacgggtaagggttgatattgagtggataagtgccgatgatgcagtaaatgaggaggacctttcacgtcttgactccatactcatccctggtggatttggtgaaaggggaatcgcaggaaaacttgaggcggtcaggttcgcccttgaaaacagggttcccatcttcggcatatgcctgggcatgcagtgcatggtcatagaattcgcaaggctcaacggcatggagggtgccaacagcacagagttcgacccggaaaccccctaccctgtcatagacatgatggaggagcagaagaggataaagaacatggggggtaccatgcgcctcggctcctaccagtgcaggataagggagggtacactggcacatgaggcctacggcaccgaactcgtgggtgagaggcacaggcacaggtttgaactcaacaacgaattcagggaggaactggagagtaagggccttataatctcaggaacatctccggacgacttcctcgtggagatggttgagatcaaggatcacccatggttcctcggatgccagttccacccagagttcaggtcaagaccaaacagggcccatccactctttgtatccttcctcagggccgcccttgaaaggagccgttaa

SEQ ID NO: 31473 - protein, 533 aa, Methanobacterium thermoautotrophicum
MVHLAKYIVVTGGVVSSIGKGITAASIGRILRSYGLSVTAIKIDPYLNWDSGTLNPYQHGEVFVTDDGMETDLDLGHYERFLDSDLPGEANITTGKVYMSVINKERSGDYLGSCVQIIPHITDEIKSMIRKIADKSGAEVVLVEVGGTVGDIEGQPFLEALRQLRNEEGHENVMFVHVTYVPYLRAAGEFKTKPTQHSTKELRSTGINPDMIICRSEMPIDSSLKRKIAHFCDVEEEAVVNAPDASSIYEVPLVLDSERVGDYIVRRIELDVDGEADLSEWAGIVESLMIDEPVVTVGIVGKYVELEDSYISIREALKHAAAHLRVRVDIEWISADDAVNEEDLSRLDSILIPGGFGERGIAGKLEAVRFALENRVPIFGICLGMQCMVIEFARLNGMEGANSTEFDPETPYPVIDMMEEQKRIKNMGGTMRLGSYQCRIREGTLAHEAYGTELVGERHRHRFELNNEFREELESKGLIISGTSPDDFLVEMVEIKDHPWFLGCQFHPEFRSRPNRAHPLFVSFLRAALERSR

SEQ ID NO: 31474 - DNA, 1614 bp, Moorella thermoacetica
  CDS (1)..(1614): transl_table=11
atgcctgccaaatttatttttgttaccggcggtgtcacttcttccctggggaaggggataaccgccgcttctttaggtagacttctaaaaagccgaggcctcaaagtagccatccagaagttcgacccctatatcaatatcgaccccggcaccatgagcccgtaccagcatggcgaggtcttcgtcaccgatgacggcgccgaaactgatctggacctgggccattacgagcgctttatcgacattagccttaccaaggccagcaacgtcaccgccggcaaggtatactggtccgtcatcacgaaagaacggcgcggcgatttcctcggcggtacagtccaggtcataccccacatcaccaatgagatcaaggcccgcctcctccgggtggccgaggagagcgacccggacgttgtcattaccgagattggcggtactgtgggggatatcgaatctctgcctttcctggaagccatccgccagatgaagagcgatatcggccgcgatcgtgtcctctatatccatgtcaccctggttccctacctgcgggctgccggcgaagccaaaaccaaacctacccagcacagcgtcaaagagttacgcagcattggcatccagccggatatcatcgtctgccggactgaacgtcccttctcccgggaaatggaagaaaaaatagctctcttttgcgatattgaccccgatgccgtcatccaggcctgggatgccgattccatctatgaggtccccctgatgatgcaagaggaaggcctggacagcatcgtcgtcgagcggctgaagttaaactgcggtcctgctcaaatggacgattggcgggccatggtagcaaagttaaagaatatcaccaggcacctggagatcgccctggtgggcaaatacgtcaccctgccggacgcctatttaagcgtagtagaatccctgcgccatgccggcatgtatcacaacgtccaggtggatattcgctggatttattcggctgacctggagcgggggggccttgaacaactccaggatgtggccggcatcctggtacccgggggctttggcgaccggggggttgaagggaagatcatagccgcccggtatgcccgggagcatggtatacccttcctgggtatttgcctggggatgcagctggcagtggttgagtttgcccgtcacgtctgcggactggaagcggccaacagctcggaattcaacccggaaacgccccacccagtcatcgaccttttgccggagcaaaaggagattgaagataagggtggtaccatgcgcctgggcctctatccctgccgcttacagcccggtacccgggcccaccaggcctatggcgaagaaattatctatgaacgccatcgccatcgctatgaatttaataacaactaccgggccgaactgacggccaggggtatggttatcagcggcacctccccggacgaccgcctggttgagattattgagctggcggatcacccgtggtttgtggcctgccagttccatccggaattcaaatcccggcctaaccggccgcatccccttttccgggacttcatcggcgccgcctgccggcgggccggggggggtgcaggctga

SEQ ID NO: 31475 - protein, 537 aa, Moorella thermoacetica
MPAKFIFVTGGVTSSLGKGITAASLGRLLKSRGLKVAIQKFDPYINIDPGTMSPYQHGEVFVTDDGAETDLDLGHYERFIDISLTKASNVTAGKVYWSVITKERRGDFLGGTVQVIPHITNEIKARLLRVAEESDPDVVITEIGGTVGDIESLPFLEAIRQMKSDIGRDRVLYIHVTLVPYLRAAGEAKTKPTQHSVKELRSIGIQPDIIVCRTERPFSREMEEKIALFCDIDPDAVIQAWDADSIYEVPLMMQEEGLDSIVVERLKLNCGPAQMDDWRAMVAKLKNITRHLEIALVGKYVTLPDAYLSVVESLRHAGMYHNVQVDIRWIYSADLERGGLEQLQDVAGILVPGGFGDRGVEGKIIAARYAREHGIPFLGICLGMQLAVVEFARHVCGLEAANSSEFNPETPHPVIDLLPEQKEIEDKGGTMRLGLYPCRLQPGTRAHQAYGEEIIYERHRHRYEFNNNYRAELTARGMVISGTSPDDRLVEIIELADHPWFVACQFHPEFKSRPNRPHPLFRDFIGAACRRAGGGAG

SEQ ID NO: 31476 - DNA, 1761 bp, Mycobacterium bovis
  CDS (1)..(1761): transl_table=11
gtgcgaaagcacccgcaaaccgctaccaagcacctcttcgtcagcggcggcgttgcttcctcgctcggcaagggactgaccgccagcagcctaggacaattgttgacggctcgtgggttacacgtcacgatgcaaaagctcgacccgtacctcaacgtcgacccgggtaccatgaacccgttccagcacggcgaggtcttcgtgaccgaggacggtgccgaaaccgatctcgacgtcggccactacgaacggttcctcgatcgcaatttgcccggctcagcgaatgtgactaccgggcaggtgtattcaacggtgatcgcgaaggagcgccgcggcgaatacctgggcgacaccgtgcaggtgatcccccatatcaccgacgagataaaacggcgcatcctggcgatggcccaaccggacgccgacggtaaccgcccggacgtggtcatcaccgaaatcgggggcactgtcggcgatatcgagtcacagcccttcctggaggcagcgcggcaagtccggcactatctcggccgggaggacgtgttttttctgcacgtgtcgctggtgccctacctggcgccgtcgggtgagctcaaaaccaagccaacacagcactcggtggccgcactgcgcagcattgggattaccccggacgcgttgatcctgcgctgcgaccgcgacgttcccgaagcgctgaaaaacaagattgcgttgatgtgtgacgtcgatatcgacggcgttatctccaccccggacgcgccctccatctacgacatacccaaggtattgcaccgcgaggagctcgatgcgttcgtggtgcgccgactcaatctgccgttccgcgacgtcgattggaccgaatgggacgacctgctgcgccgggttcacgaaccacatgagacagtgcgaattgctttggtgggcaagtacgtcgaattatccgacgcttacctctcggttgccgaggcattgcgtgccggcggattcaagcaccgggccaaggtcgagatctgttgggtggcatccgacggttgtgaaacgaccagtggtgccgcggcggcgctcggcgatgtgcatggggtgctcattccgggcggattcggcatcaggggcatcgagggcaagatcggcgccattgcatacgcgcgggcgcgcgggttgccggtgttggggctgtgcctcggtttgcagtgcattgtgatcgaggccgcgcgatcggtcggtctcaccaacgccaattcggccgaatttgatcccgacacaccagatcccgttatcgccacgatgcccgatcaagaagaaatcgtggccggcgaggcggatctgggcggtaccatgcgtctcgggtcctaccccgccgtgttggagccggattcggttgttgcccaggcataccaaactacccaggtgtccgagcggcatcgccaccggtacgaggtcaacaacgcgtaccgagacaagatcgccgaaagcggcctgaggttttccgggacgtcacctgacggacacttggtagagttcgtcgagtatccgccggatcggcatccgttcgttgtcggcacccaggcccaccccgagttgaagagccgacccacccggccgcacccactgtttgtcgcattcgtcggggcagccatcgattacaaggcgggtgagttgctgcctgtcgagatccccgagatccccgagcacacacccaacggtagctcccatcgggacggcgtgggccagccgctaccggaacctgcgtctcgtggctga

SEQ ID NO: 31477 - protein, 586 aa, Mycobacterium bovis
MRKHPQTATKHLFVSGGVASSLGKGLTASSLGQLLTARGLHVTMQKLDPYLNVDPGTMNPFQHGEVFVTEDGAETDLDVGHYERFLDRNLPGSANVTTGQVYSTVIAKERRGEYLGDTVQVIPHITDEIKRRILAMAQPDADGNRPDVVITEIGGTVGDIESQPFLEAARQVRHYLGREDVFFLHVSLVPYLAPSGELKTKPTQHSVAALRSIGITPDALILRCDRDVPEALKNKIALMCDVDIDGVISTPDAPSIYDIPKVLHREELDAFVVRRLNLPFRDVDWTEWDDLLRRVHEPHETVRIALVGKYVELSDAYLSVAEALRAGGFKHRAKVEICWVASDGCETTSGAAAALGDVHGVLIPGGFGIRGIEGKIGAIAYARARGLPVLGLCLGLQCIVIEAARSVGLTNANSAEFDPDTPDPVIATMPDQEEIVAGEADLGGTMRLGSYPAVLEPDSVVAQAYQTTQVSERHRHRYEVNNAYRDKIAESGLRFSGTSPDGHLVEFVEYPPDRHPFVVGTQAHPELKSRPTRPHPLFVAFVGAAIDYKAGELLPVEIPEIPEHTPNGSSHRDGVGQPLPEPASRG

SEQ ID NO: 31478 - DNA, 1773 bp, Mycobacterium leprae
  CDS (1)..(1773): transl_table=11
gtgcgtaagcacccgcaatccgctaccaagcacctctttgtcagcggtggcgtcgcttcttcgcttggcaaaggactcaccgcgagcagcctcgggcaactgttgaccgctcgtgggttgcacgtgacaatgcagaaactcgacccgtacctcaatgttgacccgggcaccatgaacccgttccagcacggggaggtctttgtgaccgaggatggcgccgagactgacctcgacgtcggccactacgagcggttcctggatcgcgatctgtccggctcggcgaatgtcactaccgggcaggtgtattcgacagtgatcgccaaagaacggcgtggcgaatatctcggtgacacagtccaggtgatcccgcacatcaccgacgagatcaagcagcgcatcatggcgatggcccagcccgacggcggagacaaccgcccagacgtcgtcattaccgaaatcggtggcaccgtgggtgatatcgaatcgcagccctttttggaggcggcacggcaggtccgtcacgaccttggccgggagaacgtcttctttctacatgtgtcgttggtgcctcacctggcgccttcgggtgaactcaaaaccaagcctacccagcactcagtggccgcgctgcgcagcatcggtattaccccggatgccctgatcctgcgctgcgaccgagatgttcccgaatcgttgaagaacaagattgcgctgatgtgcgacgttgatatcgatggagtcatctccaccccggacgcgccatcgatctatgacatacccaaagtgttgcatcgtgaggaactcgacgcctttgtggtgcgccgactcaatctaccgttccgcgacgtggactggaccgagtgggacgacttgctgcgccgtgttcacgagcctcacgggactgtgcgaattgctcttgtaggtaagtacgttgacttttccgacgcctatctgtcagtctccgaagcgctacatgccggcgggttcaaacattacgccaaggttgaggtagtttgggtggcttccgacgattgcgaaactgccacgggcgctgcagcggtgctggccgacgttcacggtgtgctgatccctggtgggttcggtatccgcggaatcgaaggaaaaatcggcgccatccggtatgctcgggctcgggggctgccggtgcttggcctatgcttgggtttgcaatgtatcgtgatcgaggccacccgctcggtcggtctcgtgcaagcgaactcggccgaattcgaaccagctacaccagatccggtgatctcaacgatggccgatcaaaaagagatcgtggccggcgaagcggatttcggcggcacgatgcggctgggggcctatcccgcggttttgcaaccggcttcgatcgtggcccaagcgtatggcacaacgcaggtgtccgagcgacaccggcaccgctacgaagtcaacaacgcctaccgcgattggatcgccgaaagtgggctgcggatttctggaacttcgcccgacggttatctggtggagttcgtcgaatatccggccaacatgcatccattcgttgtcggcacccaggctcaccctgaactgaagagccgacccacccggccgcatccactgttcgtcgctttcgtcggggcggccatcgactacaagtcggcggagttgctccctgtggagatacctgcggtcccggaaatttctgagcacttgcccaacagcagtaaccagcatcgagatggcgtcgagcggtcgttcccggcacctgcagcccgtggctga

SEQ ID NO: 31479 - protein, 590 aa, Mycobacterium leprae
MRKHPQSATKHLFVSGGVASSLGKGLTASSLGQLLTARGLHVTMQKLDPYLNVDPGTMNPFQHGEVFVTEDGAETDLDVGHYERFLDRDLSGSANVTTGQVYSTVIAKERRGEYLGDTVQVIPHITDEIKQRIMAMAQPDGGDNRPDVVITEIGGTVGDIESQPFLEAARQVRHDLGRENVFFLHVSLVPHLAPSGELKTKPTQHSVAALRSIGITPDALILRCDRDVPESLKNKIALMCDVDIDGVISTPDAPSIYDIPKVLHREELDAFVVRRLNLPFRDVDWTEWDDLLRRVHEPHGTVRIALVGKYVDFSDAYLSVSEALHAGGFKHYAKVEVVWVASDDCETATGAAAVLADVHGVLIPGGFGIRGIEGKIGAIRYARARGLPVLGLCLGLQCIVIEATRSVGLVQANSAEFEPATPDPVISTMADQKEIVAGEADFGGTMRLGAYPAVLQPASIVAQAYGTTQVSERHRHRYEVNNAYRDWIAESGLRISGTSPDGYLVEFVEYPANMHPFVVGTQAHPELKSRPTRPHPLFVAFVGAAIDYKSAELLPVEIPAVPEISEHLPNSSNQHRDGVERSFPAPAARG

SEQ ID NO: 31480 - DNA, 1599 bp, Mycoplasma mycoides subsp
  CDS (1)..(1599): transl_table=4
atggcaaagtttatatttgtaactggtggagtagtttcaggtttaggaaaaggaattacagctagttcaattggtgcattattaaaagctagtggattaaaagtatttatgcaaaaatttgatccatatttaaatgttgatccaggaacaatgtctccatatcagcatggtgaagtttttgttacaaaagatgggggagaaactgatttagatctaggacattatgaacgttttattgatgaagaactaactaaattatcttcaacaacttctggaaaaatctatttatctgtaattcaaggtgaaagaaaaggagttaatagtggtaaaactattcaagtagttcctcatataactgatgctattaaacaaaaagtttatcaagcagctaaacaaagccaagctgatgtgataatttcagaaattggtggaactgttggagatattgaatctcaaccttttattgaagcaattagacaaattagactagaacaaggtaaagaaaatgtaatgtttgttcatgttgttttattattatgattagctgcttcaaaagaatataaaactaaacctattcaaaactcagtaaaagcaatggctagtttaggaattcaacctgatgttatagtatgtagaagtgattcttcttcaccaaaagatattaaagaaaaaatttctttattttgtaatgttcctattacaaatattattgatgcaattgatcaagattcaatttatagagtgccattagctttagcaaaacaaaatcttcaagatattataattgaacagttacaattaaaagctaaaaatatagatctatctttatgaaaacaatttaataaaaaaatcgattcatcaactgaagaaattgaaattagttttgttggtaaatatatagaattacaagatgcatatttatcagttttagaatcattaaaaatagctggttgagaatttaataaaaaaattaaaatcagatgagttcaagcagataaattagatgaatcaaactataaagaagttttaaaaaatagtcaaggtattttagttccaggtggatttggtaaaagaggaattgaaggaatgatgttagctagtagatatgctagagaaaatgatattccttatttaggaatttgtttaggaatgcaaatagcaacaatttcaattgcaagagatttattaaattgaagtgatgctgattcaactgaatttaataaaaatactactcatccaatttttgattatattaaaggtattgatagagataatattggtggaactttaagattaggtacaatggttactaaattagaaaaaaattcattagtttctaagttatataattctgatattgctttagaaagacatagacatagatatgaatttaataatgaatataaaaaagatttagaaagtgttggattaagattttctggaatttatgaagaaaaaaatatagttgaagttgttgaaatgccaagtttaaaattctttgttgctagtcaatttcatcctgaatttacttctcgtcctaataagccaactcctttatttaaaggatttattaaagcaattgttgaaaataataaatag

SEQ ID NO: 31481 - protein, 532 aa, Mycoplasma mycoides subsp
MAKFIFVTGGVVSGLGKGITASSIGALLKASGLKVFMQKFDPYLNVDPGTMSPYQHGEVFVTKDGGETDLDLGHYERFIDEELTKLSSTTSGKIYLSVIQGERKGVNSGKTIQVVPHITDAIKQKVYQAAKQSQADVIISEIGGTVGDIESQPFIEAIRQIRLEQGKENVMFVHVVLLLWLAASKEYKTKPIQNSVKAMASLGIQPDVIVCRSDSSSPKDIKEKISLFCNVPITNIIDAIDQDSIYRVPLALAKQNLQDIIIEQLQLKAKNIDLSLWKQFNKKIDSSTEEIEISFVGKYIELQDAYLSVLESLKIAGWEFNKKIKIRWVQADKLDESNYKEVLKNSQGILVPGGFGKRGIEGMMLASRYARENDIPYLGICLGMQIATISIARDLLNWSDADSTEFNKNTTHPIFDYIKGIDRDNIGGTLRLGTMVTKLEKNSLVSKLYNSDIALERHRHRYEFNNEYKKDLESVGLRFSGIYEEKNIVEVVEMPSLKFFVASQFHPEFTSRPNKPTPLFKGFIKAIVENNK

SEQ ID NO: 31482 - DNA, 1752 bp, Mycobacterium paratuberculosis
  CDS (1)..(1752): transl_table=11
gtgcgaaagcacccgcaaaccgccaccaagcacctcttcgtcagcgggggcgtcgcatcctcgttgggcaagggattgaccgccagcagcctcggtcagctactgacggcgcgcgggttgtacgtgacgatgcaaaagctcgatccgtacctcaacgtcgaccccggcaccatgaacccgttccagcacggcgaggtcttcgtcaccgaggacggcgccgaaaccgacctcgacgtcggccattacgagcggttcctggatcgcgatctgtccggttcggcgaatgtcactacgggacaggtgtattcgaccgtcatcgccaaggaacggcgcggtgaatacctgggcgacaccgtccaggtgatcccgcacatcaccgacgagatcaagggccgcatcctggcgatggcccagccggacgcgcagggcaaccgccccgacgtcgtcatcaccgaaatcggcggcaccgtcggcgacatcgagtcgcagcccttcctggaggcggcccggcaggtgcgccacgacctgggccgggaaaacgtcttcttcctgcacgtgtcgctggtgccctacctggcaccgtccggtgagctcaagaccaaacccacccagcactcggtcgccgcgctgcgcagcatcggtatcacccccgacgcgctgatcctgcgctgcgaccgcgacgtgcccgaggcgctgaagaacaagatcgcgctgatgtgcgacgtggacatcgacggcgtcatctccaccccggacgcgccgtccatctacgacattcccaaggtgctgcaccgcgaggagctcgacgcctacgtggtgcgccggctcaacctgccgttccgcgatgtcgactggaccgaatgggacgacctgctgcgccgggtgcacgaaccgcacgagacggtgcgaatcgccttggtgggcaagtacgttgagctttccgacgcctacctgtcggtcaccgaggcattgcgtgccggcgggttcttccaccacgccaaggtcgagatggtgtgggtggcctccgacgactgcgagagcgcgtccggtgccgcggcggcgctgggggaggtgcacggcgtgctgatccccggcgggttcggcatccgcggcatcgagggcaagatcggggccatccactacgcccgcacccgcgggctgccggtgctggggctgtgcctgggcctgcaatgcattgtgatcgaggccgcccgcgcggccggcctggccggcgccaactcggccgaattcgacccggacacaccggatcccgtcatctccacgatggccgaccaggtggacatcgtcgccggcgcggccgacctgggcggcaccatgcgactgggcgcctatcccgctgtgctggaagaggattcgatcgtggcccgggcctacgggacgacgcaggtgtcggagcggcaccggcaccgctacgaggtcaacaacgcctaccgcgacaagatcgccgaaagcggcctgaggttctccggaacatcgcccgacggccatctggtggagttcgtcgaatacccgcccgacgtgcacccgttcatcgtgggcacccaggcccacccggagctgaagagccggcccacccgtccgcacccgttgttcgtcgcattcgtcggggcggccatggattacaaagcgggagaactgcttccggtggaaatccccgagcagtcctccaacggcatccagcatcgggacagcgctgcgcggcccatacctgagcccgcggcccgtggctga

SEQ ID NO: 31483 - protein, 583 aa, Mycobacterium paratuberculosis
MRKHPQTATKHLFVSGGVASSLGKGLTASSLGQLLTARGLYVTMQKLDPYLNVDPGTMNPFQHGEVFVTEDGAETDLDVGHYERFLDRDLSGSANVTTGQVYSTVIAKERRGEYLGDTVQVIPHITDEIKGRILAMAQPDAQGNRPDVVITEIGGTVGDIESQPFLEAARQVRHDLGRENVFFLHVSLVPYLAPSGELKTKPTQHSVAALRSIGITPDALILRCDRDVPEALKNKIALMCDVDIDGVISTPDAPSIYDIPKVLHREELDAYVVRRLNLPFRDVDWTEWDDLLRRVHEPHETVRIALVGKYVELSDAYLSVTEALRAGGFFHHAKVEMVWVASDDCESASGAAAALGEVHGVLIPGGFGIRGIEGKIGAIHYARTRGLPVLGLCLGLQCIVIEAARAAGLAGANSAEFDPDTPDPVISTMADQVDIVAGAADLGGTMRLGAYPAVLEEDSIVARAYGTTQVSERHRHRYEVNNAYRDKIAESGLRFSGTSPDGHLVEFVEYPPDVHPFIVGTQAHPELKSRPTRPHPLFVAFVGAAMDYKAGELLPVEIPEQSSNGIQHRDSAARPIPEPAARG

SEQ ID NO: 31484 - DNA, 1620 bp, Mycoplasma pulmonis
  CDS (1)..(1620): transl_table=4
atgacactaaggagtaaaatgactaaatatatttttgtcactggaggagttgtctctggtctaggtaagggtgtaagtgctgcttcaataggtaatttattaaaacatagaggttttaaaatttttgttttaaaattagatccttacttaaatattgacccaggagtaatgtccccttatgaacatggagaagtctatgttacagctgatggaggagaaactgaccttgatctaggacactacgaaagatttattgatgtagaactttcaaaagatagcaattacacaagtggaaaaatcttttcaaatttatttactcaagaaagaaatggtaattttttaggaaaaactgttcaattaattccacattttactaatgaaattttaaatacaattgaaaaaatagccacaaagcataaacctgattttatgattgttgaaattggtggaacaattggagatattgaatcaaactcttttatttatgccatggcagagcttgctcttgcaaaacctgatagatttttcttagttcatgtaacttatgtcatttttttagaagcttcaaatgagtttaaatcaaagccaactcaagtaagtattaactctttaagatcttttggtattagccctaatttagttttacttagaaattcaaaaatggtgcctgacaatatagttgaaaaaattgctaaaaaatcagttttaaataaagattatgtaatttcagttccagatatgaaaaatatttatgaagctcctttatattttgaatcacaaaatatagctcaaattattttgtctcattttaaaattaaagacattgagccagatttaagcaaatgaaacaaattagttgattcaataaaaaaaccaaaagcttataaagctaaaattttaatggtaggaaagtacgttgagtttttggatgcttataaatcaataattgaagcttttaaagttagctcatatgaagaaaatattgatttaaaaatggactgagttgactcaagcaagttagagttaactaacttagatgagtttttaaaaggctatgacggagttgtaattttacctggctttggaattagaggttgagaacaaaaagtaagaattgctcagtatacaagagaaaataaaatacctacttttggaatttgtcttggttttcaagcaatgagtgtagctcatgctagaatgaaaggtattaaaaatgcaaattcacgagaatttgccaatgacaaaaatgatgaaacttatattttagatttaattcaaggaaaagcaaaagataaaaatttaggtggtacactaagactaggaaattacacaacaacaattaaagaaaatactctagctaagaaaatttaccaaaaagatcaagtcatcgaaagacatagacatcgctatgagataaattctaagtatatagacttacttgaagatgaagaatttgtattttcaggaatttgaaatgaagggaaattagctgaaatttgtgaagttaaaaaccatcctttttatctgggagttcaatatcacccagaatttacatcaagaccgctaaaaccaaatcctctatttacaagttttcttagagttttaataaaaaacaattaa

SEQ ID NO: 31485 - protein, 539 aa, Mycoplasma pulmonis
MTLRSKMTKYIFVTGGVVSGLGKGVSAASIGNLLKHRGFKIFVLKLDPYLNIDPGVMSPYEHGEVYVTADGGETDLDLGHYERFIDVELSKDSNYTSGKIFSNLFTQERNGNFLGKTVQLIPHFTNEILNTIEKIATKHKPDFMIVEIGGTIGDIESNSFIYAMAELALAKPDRFFLVHVTYVIFLEASNEFKSKPTQVSINSLRSFGISPNLVLLRNSKMVPDNIVEKIAKKSVLNKDYVISVPDMKNIYEAPLYFESQNIAQIILSHFKIKDIEPDLSKWNKLVDSIKKPKAYKAKILMVGKYVEFLDAYKSIIEAFKVSSYEENIDLKMDWVDSSKLELTNLDEFLKGYDGVVILPGFGIRGWEQKVRIAQYTRENKIPTFGICLGFQAMSVAHARMKGIKNANSREFANDKNDETYILDLIQGKAKDKNLGGTLRLGNYTTTIKENTLAKKIYQKDQVIERHRHRYEINSKYIDLLEDEEFVFSGIWNEGKLAEICEVKNHPFYLGVQYHPEFTSRPLKPNPLFTSFLRVLIKNN

SEQ ID NO: 31486 - DNA, 1740 bp, Mycobacterium sp
  CDS (1)..(1740): transl_table=11
ttgcccgcgctacgcaagcatccgcaaacggccacaaagcacctcttcgtcacgggcggcgtcgtctcctccctgggcaagggtctgacgggctcgagtctcggacagttgttgactgccaggggcctgcaggtgacgatgcagaagctcgacccctatctcaacgtcgaccccggcaccatgaacccgttccagcacggtgaggtgttcgtcaccgaggacggcgccgagaccgacctcgacgtcgggcactacgaacggttcctcgaccggaacctgtcggggtccgcgaacgtcaccacggggcagatctattcgtcggtgatcgccaaggaacgccgcggggagtacctcggtgacaccgtgcaggtgatcccgcacatcaccgacgagatcaagagccgcatcctcgcgatggccgcgccggacgagcacggcaaccgtccggacgtggtgatcaccgaagtcggcggcacggtcggcgacatcgaatccctgcccttccttgaggccgcgcgccaggtgcgccacgaggtcggccgcgagaactgcttcttcctgcactgctcgctggtgccctacatggcgccgtcgggtgagctcaagaccaaacccacgcagcattcggtcgccgcactgcgcagcatcggcatccagccggacgccctgatcctgcgctgcgaccgggacgtgcccgaggcgctgaagaacaagatcgcgctgatgtgcgacgtcgacatcgacggggtcatctcgacgccggacgcaccgtcgatctacgacatccccaaggtgctgcaccgggaggaactcgacgcctacgtggtgcgccggttgaacctgccgttccgcgacgtggactggacccagtggaacgatctcctcaagcgggtgcacgaaccgcacgagacggtccggatcgcgctggtgggcaagtacatcgacctctccgatgcgtacctgtcggtgaccgaggcgctgcgtgcgggcgggttcttccaccacgccaaggtcgagatgcggtgggtggcctccgacgactgcgaactcgacagcggtgcggccgcggcgctggccgacgtcgacggggtgctgatccccggcgggttcggcatccgcggtatcgaaggcaagatcggtgcgatcagctacgcccgcaaacgcggcctgccggtgctcgggctgtgcctcgggttgcagtgcatcgtgatcgaggcggcccgctcggtgggcatcaccggagcgaactccgccgaattcgatccggccacccccgacccggtcatctcgacgatggccgaccagcgcgacgccgtggccggtgcggccgatctgggcggcaccatgcggttgggtgcctatccggctgtgctggaggaagattcgatcgtcgcgcgtgcctaccaggcgaccgaggtctccgaacggcaccggcaccgctacgaggtcaacaacgcctaccgcgaccgcatcgccgagagtgggctgcgcttctcgggcacgtcgcccgacggacatctggtcgagttcgtcgagtacgacgccgagcagcatccgttcctcgtcggcacccaggcgcatcccgaactcaagagccggcccacccgtccgcacccgctgttcgccgcgttcatcggcgcggcgctcgactacaaggccgccgagcggctgccggtcgagattcccgagcaacggtccaacggggtggagctgctgcaagaacccgcgtcccgtggctga

SEQ ID NO: 31487 - protein, 579 aa, Mycobacterium sp
MPALRKHPQTATKHLFVTGGVVSSLGKGLTGSSLGQLLTARGLQVTMQKLDPYLNVDPGTMNPFQHGEVFVTEDGAETDLDVGHYERFLDRNLSGSANVTTGQIYSSVIAKERRGEYLGDTVQVIPHITDEIKSRILAMAAPDEHGNRPDVVITEVGGTVGDIESLPFLEAARQVRHEVGRENCFFLHCSLVPYMAPSGELKTKPTQHSVAALRSIGIQPDALILRCDRDVPEALKNKIALMCDVDIDGVISTPDAPSIYDIPKVLHREELDAYVVRRLNLPFRDVDWTQWNDLLKRVHEPHETVRIALVGKYIDLSDAYLSVTEALRAGGFFHHAKVEMRWVASDDCELDSGAAAALADVDGVLIPGGFGIRGIEGKIGAISYARKRGLPVLGLCLGLQCIVIEAARSVGITGANSAEFDPATPDPVISTMADQRDAVAGAADLGGTMRLGAYPAVLEEDSIVARAYQATEVSERHRHRYEVNNAYRDRIAESGLRFSGTSPDGHLVEFVEYDAEQHPFLVGTQAHPELKSRPTRPHPLFAAFIGAALDYKAAERLPVEIPEQRSNGVELLQEPASRG

SEQ ID NO: 31488 - DNA, 1641 bp, Myxococcus xanthus
  CDS (1)..(1641): transl_table=11
atgcgctccaagaaaaccaagttcatcttcgtgacgggcggagtggtcagctccctcggcaagggtctcgcctccgcttcgattggcgccctgctggagaaccgtgggctggccgtcaccctcatcaagctggacccctacatcaacgtggacccgggcacgatgagcccgttccagcacggcgaggtgttcgtcaccgaggacggcggtgagacggacatggacctcggccactacgagcggttcaccaacgcgcggatgagccggctcaacaacttcacgtccggccgcatctaccacgcggtcatcatgaaggagcggcggggcgaatacctgggcaagacggtccaggtgattccgcacgtcaccgacgaaatcaagtccagcatccgccaggcggcgcaggacgcggacgtggtcatcgtggaggtgggcggcaccgtgggcgacatcgagtcgctgcccttcctcgaggccatccggcagatgcgctacgacgtgggcaacgagaacgtcgtctacgtccacctcacgctgctgccgtacatcggcgcggctggcgaggtgaagaccaagcccacgcagcactcggtgatgaagctgcgggagataggcatccagcccgacttcctcgtgtgccgcaccgaccgcgaggtgccccgcgagctgaaggacaagatcgccatgttctgcaacgtggacacgcgcagcgtcttcacgtcgccggatgtgcgcagcacctacgagctgccgctggagctgcaccgccagggcctggatgagcggctcgcggaggtcctcaacatctggagccgggcgccccacctggagcgctgggagaacatcatccgcaaggtgtacgagcccgcgcgcggccaggtccgcatcgcgattgtcggcaagtacgtcaacctcacggagagctacaagagcctcaacgaggcgctgctgcacggcggcatcgccaacgacgtgaaggtgaacctgcacttcgtcgacagccaggaggtcgaagagcagggcgcggagaagctgctggccggcgtggacgccatcctggtgcccggcggcttcggcgtgcgcggcaccgagggcaagatcgccgccgtgcgctacgcgcgtgagaagaaggtgccgttcttcggcatctgcctgggcctgcagatggccgtggtggagttcagccgcggcgtgctgggcctgtcctccgccaacagcttggagttcaacgagcacacgccgcacccggtggtgacgctcatggagagccaggtgaaggtgcaggacaagggcggcaccatgcgcctgggcagctacgcctgtgcgctgaagcccggctcgctcgcccaccagctctatgggcaggacaccatccaggagcgccaccgccaccgctacgaagtgaacaacgcgtaccgtagcaagctgcaggaggcggggctggtcatctccggctccaaccccgagctcaacctggtggagatgattgagctggccgaccacccctacttcatcggctgccagttccaccctgaattcaagagcaagcccttcgcaccccaccccctcttctccggcttcatccgcgcggcgctcgcccagcgggacgcgaacgcggcggccggcaaggtgaccgaatga

SEQ ID NO: 31489 - protein, 546 aa, Myxococcus xanthus
MRSKKTKFIFVTGGVVSSLGKGLASASIGALLENRGLAVTLIKLDPYINVDPGTMSPFQHGEVFVTEDGGETDMDLGHYERFTNARMSRLNNFTSGRIYHAVIMKERRGEYLGKTVQVIPHVTDEIKSSIRQAAQDADVVIVEVGGTVGDIESLPFLEAIRQMRYDVGNENVVYVHLTLLPYIGAAGEVKTKPTQHSVMKLREIGIQPDFLVCRTDREVPRELKDKIAMFCNVDTRSVFTSPDVRSTYELPLELHRQGLDERLAEVLNIWSRAPHLERWENIIRKVYEPARGQVRIAIVGKYVNLTESYKSLNEALLHGGIANDVKVNLHFVDSQEVEEQGAEKLLAGVDAILVPGGFGVRGTEGKIAAVRYAREKKVPFFGICLGLQMAVVEFSRGVLGLSSANSLEFNEHTPHPVVTLMESQVKVQDKGGTMRLGSYACALKPGSLAHQLYGQDTIQERHRHRYEVNNAYRSKLQEAGLVISGSNPELNLVEMIELADHPYFIGCQFHPEFKSKPFAPHPLFSGFIRAALAQRDANAAAGKVTE

SEQ ID NO: 31490 - DNA, 1635 bp, Neisseria gonorrhoeae
  CDS (1)..(1635): transl_table=11
atgaccaaattcattttcgtaaccggcggcgttgtctcctcactgggtaaaggtatcgccgccgcttctattgccgccatcctcgaatcgcgcggcttgaacgttaccatgctcaagcttgatccttatatcaacgtcgatcccggcacgatgagcccgttccaacacggcgaagtgttcgtaaccgacgacggcgcggaaaccgacctcgacttgggacactacgaacgtttcatcgattccacgatgacccgccgcaacagcttcagcacgggtcaggtgtacgaaaacgttatcgccaaagaacgccgcggcgactatctcggcggtacggttcaagtcatcccgcacattaccgacgaaatcaaacgacgcatccacgaaggcgcggcgggttacgatgtggcgattgtcgaaatcggcggtacggtcggcgacatcgaatcgctgccgtttttggaagccatccgccagatgcgaagccagttgggacgcaacaacaccctgttcgcccacttgagctacgttccctacatcgccgccgcaggcgaaatcaaaaccaagccgacccagcacaccgtgaaagaaatgttgagcatcggcttgcaacccgacatcctgatttgccgtatggacaggaaaatgccggcagacgaacgccgcaaaatcgccttgttctgcaacgtggaagagcgcgcgattgtcggcagctacgatgtggacagcatctacgaatgccccgaaatgctgcacgaccaaggcatcgacaacatcattaccgagcagttgcagcttaacgtgcagcaggcggatttgaccgcgtggaaaaaaatcgtccacgccgtcaaaaacccgaaacacaccgtcaaaatcgcgatggtcggcaaatacgttgatttgaccgaatcctacaaatcattgattgaagccttgaaacacgcgggcatccataccgaaaccgatgtgcagattaccttcgttgacagcgaaagcatcgagaaaaacaagggcgacgtttccgtactcaaagatatggatgccatcctcgttcccggcggcttcggttcgcgcggcgtggaaggcaaaatcgccgccgtgcgctacgcccgtgaaaacaacgtgccatacttgggcatctgcctcggtatgcagattgcgctgattgaatacgcccgcgacgtggcaggtttgaaaggtgcgaattccactgagtttgacttgaaatgcgctgcccccgtcgtcgccctgattgacgaatggcaaaccgccgacggcagcgtcgaaacccgtgacgaatccgccgatttgggcggcacgatgcgtttgggcgcgcaagaagtcgaattgaaagcaggcagcctcgccgtcaaaatctacggcagcggacacattcgcgaacgccaccgccaccgctacgaagtcaacaacaactatgtttccgcgctggaacaggcaggtttggtcatcggcggcgtatccgccggacgcgaacgcttggtcgaaaccatcgaactgccgaaccatccttggttcttcgcctgccagttccatcccgagttcacgtccaacccgcgcaaagggcatcctttgttcaccgcgtttgtcaaagccgcgttgaacaataaaaaagcctga

SEQ ID NO: 31491 - protein, 544 aa, Neisseria gonorrhoeae
MTKFIFVTGGVVSSLGKGIAAASIAAILESRGLNVTMLKLDPYINVDPGTMSPFQHGEVFVTDDGAETDLDLGHYERFIDSTMTRRNSFSTGQVYENVIAKERRGDYLGGTVQVIPHITDEIKRRIHEGAAGYDVAIVEIGGTVGDIESLPFLEAIRQMRSQLGRNNTLFAHLSYVPYIAAAGEIKTKPTQHTVKEMLSIGLQPDILICRMDRKMPADERRKIALFCNVEERAIVGSYDVDSIYECPEMLHDQGIDNIITEQLQLNVQQADLTAWKKIVHAVKNPKHTVKIAMVGKYVDLTESYKSLIEALKHAGIHTETDVQITFVDSESIEKNKGDVSVLKDMDAILVPGGFGSRGVEGKIAAVRYARENNVPYLGICLGMQIALIEYARDVAGLKGANSTEFDLKCAAPVVALIDEWQTADGSVETRDESADLGGTMRLGAQEVELKAGSLAVKIYGSGHIRERHRHRYEVNNNYVSALEQAGLVIGGVSAGRERLVETIELPNHPWFFACQFHPEFTSNPRKGHPLFTAFVKAALNNKKA

SEQ ID NO: 31492 - DNA, 1635 bp, Neisseria meningitidis serogroup A
  CDS (1)..(1635): transl_table=11
atgaccaaattcattttcgtaaccggcggcgttgtctcctcactgggtaaaggtatcgccgccgcttctattgccgccatcctcgaatcgcgcggcttgaacgttaccatgctcaagctcgatccttatatcaacgtcgatcccggcacgatgagcccgttccaacacggcgaagtgttcgtaaccgacgacggcgcggaaaccgacctcgacttgggacactacgaacgctttatcgattccacgatgacccgccgcaacagcttcagcacgggacaggtgtacgaaaacgttatcgccaaagaacgacggggcgactatttgggcggcacggttcaagtcattccgcacattaccgacgaaatcaaacgacgcatccatgaaggcgcggcaggttacgatgtggcgattgtcgaaatcggcggcacggtcggcgacattgaatcgctgccgtttttggaagccatccgccagatgcgcagccagttgggacgcaacaacaccctgttcgcccacttgagctacgttccctacatcgccgctgcaggcgaaatcaaaaccaagccgacccagcacaccgttaaagaaatgttgagcatcggtttgcaacccgacatcctgatttgccgtatggacaggacaatgcctgcggacgaacgccgcaaaatcgccttgttctgcaacgtggaagaacgcgcgattgtcggcagctacgatgtggacagcatctacgaatgccccgaaatgctgcacgaccaaggcatcgacaacatcattaccgagcagttgcagcttaatgtgcaacaggcggatttgaccgcgtggaaaaaaatcgtccacgccatccaaaacccgaaacacaccgtcaaaatcgccatggtcggcaaatacgttgatttgaccgagtcctacaaatcactgattgaagccttgaaacacgcaggtgttcacaccgaaaccgacgtacaaattacctttgttgacagcgaaagcatcgagaaaaacaacggcgacgtttctatgctcaaagatatggacgccatcctcgttcccggcggttttggttcgcgcggcgtggaaggcaaaatcgccgctgtgcgctatgcccgcgaaaacaacgtgccatacttgggtatctgcctcggtatgcagattgcgctgattgaatacgcccgcgacgtggcaggtttgaaaggtgcgaattccactgagttcgacctcaaatgcgccgcccccgtcgttgccctgattgacgaatggcaaactgccgacggcagcgtcgaaacccgcgacgaatccgccgatttgggcggcaccatgcgtttgggtgcgcaagaagtcgaattgaaagcaggcagcctcgccgccaaaatctacggcagcgaacacatccgcgagcgccaccgccaccgctacgaagtcaacaacaactacgttcctacgctggaacaagcaggtttggtcatcggcggtgtatctgccggacgcgaacgcttggtcgaaaccatcgaactgccgaaccatccttggttcttcgcctgccagtttcatcccgaattcacttccaacccgcgcaaagggcatcctttgttcaccgcgtttgtcaaagctgcgttgaacaataaaaaagcctga

SEQ ID NO: 31493 - protein, 544 aa, Neisseria meningitidis serogroup A
MTKFIFVTGGVVSSLGKGIAAASIAAILESRGLNVTMLKLDPYINVDPGTMSPFQHGEVFVTDDGAETDLDLGHYERFIDSTMTRRNSFSTGQVYENVIAKERRGDYLGGTVQVIPHITDEIKRRIHEGAAGYDVAIVEIGGTVGDIESLPFLEAIRQMRSQLGRNNTLFAHLSYVPYIAAAGEIKTKPTQHTVKEMLSIGLQPDILICRMDRTMPADERRKIALFCNVEERAIVGSYDVDSIYECPEMLHDQGIDNIITEQLQLNVQQADLTAWKKIVHAIQNPKHTVKIAMVGKYVDLTESYKSLIEALKHAGVHTETDVQITFVDSESIEKNNGDVSMLKDMDAILVPGGFGSRGVEGKIAAVRYARENNVPYLGICLGMQIALIEYARDVAGLKGANSTEFDLKCAAPVVALIDEWQTADGSVETRDESADLGGTMRLGAQEVELKAGSLAAKIYGSEHIRERHRHRYEVNNNYVPTLEQAGLVIGGVSAGRERLVETIELPNHPWFFACQFHPEFTSNPRKGHPLFTAFVKAALNNKKA

SEQ ID NO: 31494 - DNA, 1635 bp, Neisseria meningitidis serogroup B
  CDS (1)..(1635): transl_table=11
atgaccaaattcattttcgtcaccggcggcgttgtctcctcactgggtaaaggtatcgccgccgcttctattgccgccatcctcgaatcgcgcggcttgaacgttaccatgctcaagctcgatccttatatcaacgtcgatcccggcacgatgagcccgttccaacacggcgaagtgttcgtaaccgacgacggcgcggaaaccgacctcgacttgggacactacgaacgctttatcgattccacgatgacccgccgcaacagcttcagcacgggacaggtgtacgaaaacgttatcgccaaagaacgacggggcgactacctcggcggtacggttcaagtcattccgcacattaccgacgaaatcaaacgacgcatccacgaaggcgcggcaggttacgatgtggcgattgtcgaaattggcggcacggtcggcgacatcgaatcgctgccgtttttggaagccatccgccagatgcgaagccagttggggcgcaacaacaccttgtttgcccacttgagctacgtcccctacatcgccgccgcaggcgaaatcaaaaccaagccgacccagcacaccgttaaagaaatgttgagcatcggtttgcaacccgacatcctgatttgccgtatggacaggacaatgcctgcggacgaacgccgcaaaatcgccttgttctgcaacgtggaagaacgcgcgattgtcggcagctacgatgtggacagcatctacgaatgccccgaaatgctgcacgaccaaggcatcgacaacatcattaccgagcagttgcagcttaatgtgcagcaggcggatttgaccgcgtggaaaaaaatcgtccacgccatccaaaacccgaaacacaccgtcaaaatcgccatggtcggcaaatacgtcgatttgaccgagtcctacaaatcgctgatcgaagccttgaaacacgcaggcattcacaccgaaaccgacgtgcagattacctttgtcgacagcgaaaacatcgagaaaaacaagggcgacgtttccatgcttaaagacatggacgccatcctcgttcccggcggtttcggttcgcgcggtgtggaaggcaaaatcgccgccgtgcgctacgcccgcgaaaacaacgtgccatacttgggcatctgcctcggtatgcagattgcgctgatcgaatacgcccgcgacgtggcaggcttgaaaggcgcgaattccaccgagttcgacctcaaatgcgccgcgccagtcgttgccctgattgacgaatggcaaactgccgacggcagcgtcgaaacccgcgacgaatccaccgatttgggcggcacgatgcgtttgggcgcgcaagaagtcgaattgaaagcaggcagcctcgccgccaaaatctacggcagcggacatatccgcgaacgccaccgccaccgctacgaagtcaacaacaactacgttcctacactggaacaggcaggtttggtcatcggcggtgtatctgccggacgcgaacgcttggtcgaaaccatcgaactgccgaaccatccttggttcttcgcctgccagttccaccccgagtttacctccaatccgcgcaaagggcatcctttgttcaccgcgtttgtcaaagctgcgttgaacaataaaaaagcctga

SEQ ID NO: 31495 - protein, 544 aa, Neisseria meningitidis serogroup B
MTKFIFVTGGVVSSLGKGIAAASIAAILESRGLNVTMLKLDPYINVDPGTMSPFQHGEVFVTDDGAETDLDLGHYERFIDSTMTRRNSFSTGQVYENVIAKERRGDYLGGTVQVIPHITDEIKRRIHEGAAGYDVAIVEIGGTVGDIESLPFLEAIRQMRSQLGRNNTLFAHLSYVPYIAAAGEIKTKPTQHTVKEMLSIGLQPDILICRMDRTMPADERRKIALFCNVEERAIVGSYDVDSIYECPEMLHDQGIDNIITEQLQLNVQQADLTAWKKIVHAIQNPKHTVKIAMVGKYVDLTESYKSLIEALKHAGIHTETDVQITFVDSENIEKNKGDVSMLKDMDAILVPGGFGSRGVEGKIAAVRYARENNVPYLGICLGMQIALIEYARDVAGLKGANSTEFDLKCAAPVVALIDEWQTADGSVETRDESTDLGGTMRLGAQEVELKAGSLAAKIYGSGHIRERHRHRYEVNNNYVPTLEQAGLVIGGVSAGRERLVETIELPNHPWFFACQFHPEFTSNPRKGHPLFTAFVKAALNNKKA

SEQ ID NO: 31496 - DNA, 1647 bp, Neorickettsia sennetsu
  CDS (1)..(1647): transl_table=11
ttgaataggagatcctgtgccttcatatttgttacagggggtgtctcgtcgtctattggtaaggggcttacgacctccgccttggcatctttgatgcagtctatggggtttcgtgtttgcatcaggaaaatggatccctatcttaacgtcgatcctggaactatgagcccactgcagcacggtgaggtcttcgtcactgaagatggtactgaggctgatcttgatcttggtcattacgagcgatttactggtataaactgcacccaccgtgatagcacgacggcagggaggatatatgttgaccttatagaacgcgagcggaatggtgagtatcttggtgcaactgttcaagttattccacacgtcacgaatcttattaaggactttatttactccgggtctgaccagtatgatgtgatactgtgtgagattggtggtacagtcggagatattgaggggcagccattttttgaatccgcaaggcaggttgcctacgaagttgggaaggaaaatgtcatatacatacatcttacccttgttccttacttagaagcttctggtgagcttaaaacaaaaccttctcaacactctgtcaaggcattgaatgctttaggtatacaacctgatttcttaatatgcagaacacaatcagcacaaatgtctgctgcagacaaaaggaagatagctctattttgtaatattagggagggtaacgttatagaagcgcaggacgtagacaacatatacaagatccctctgatctataaagagcaggggcttgacacaaaaataagtgcgcttcttgggtgcggtccactagaagcaggcgtatctcactggaaagagattgtaggaagaacacgatctcttgcaaacagtggtaaaaaactttttgtagcgataattggtaagtactcaggtttatgcgacgcttacatttcggttgattctgctttgcagcatgctgctttcgctgtaggagtaaatttatctgtccaaattatagacgcacgaggaaaagacatgtccgacctttcaaaatttgacatgatactcatcccgggtggttttggtaataatggaatagacggcaagctattagcaataacgcatgcaagaatcaacaatattccttttttaggtatttgttttggttttcagttagcaattttagaatttgcgaggaatgttgtcggaattaaagatgctgattcaacggagtttaacaaaaattgtaaagcacctgtaatttgctttttggacgagtggcaccgttcagactcatctgtggaaaggcgccgtcaatcctcacaagttgggggcacgatgcgtcttggtggatataattgcgttctaaaaaaggaatcaaaagcttacgcgatctacaacgaaacagaggtaatttcagaacgacacagacacagatacgaagccaatccacattatttgcctgaactggaggcaaaaggtatgcttttttctggatattcagagaaaggttgcgatattccagaaatcctcgaactcaaagatcatccttggtttctgggggtacagtttcacccagaattcaaatccaggatatttaaaccacatccgctgtttttatcattcgtaagagcaggactgctacgtaaatacagctga

SEQ ID NO: 31497 - protein, 548 aa, Neorickettsia sennetsu
MNRRSCAFIFVTGGVSSSIGKGLTTSALASLMQSMGFRVCIRKMDPYLNVDPGTMSPLQHGEVFVTEDGTEADLDLGHYERFTGINCTHRDSTTAGRIYVDLIERERNGEYLGATVQVIPHVTNLIKDFIYSGSDQYDVILCEIGGTVGDIEGQPFFESARQVAYEVGKENVIYIHLTLVPYLEASGELKTKPSQHSVKALNALGIQPDFLICRTQSAQMSAADKRKIALFCNIREGNVIEAQDVDNIYKIPLIYKEQGLDTKISALLGCGPLEAGVSHWKEIVGRTRSLANSGKKLFVAIIGKYSGLCDAYISVDSALQHAAFAVGVNLSVQIIDARGKDMSDLSKFDMILIPGGFGNNGIDGKLLAITHARINNIPFLGICFGFQLAILEFARNVVGIKDADSTEFNKNCKAPVICFLDEWHRSDSSVERRRQSSQVGGTMRLGGYNCVLKKESKAYAIYNETEVISERHRHRYEANPHYLPELEAKGMLFSGYSEKGCDIPEILELKDHPWFLGVQFHPEFKSRIFKPHPLFLSFVRAGLLRKYS

SEQ ID NO: 31498 - DNA, 1695 bp, Nitrosomonas europaea
  CDS (1)..(1695): transl_table=11
atgactaaatttgtctttgtgactggcggcgtagtatcttccctgggtaaggggattgctgcggcctctctggcagcattgttggaaacacgtggcatcagggtaaccatactcaaactggatccttatatcaatgtcgatccggggaccatgaatccatttcagcatggtgaagtgttcgtaacagacgatggtgctgaaactgacctggatctgggtcattatgagcgtttcatcagcaccaaaatgacccggcaaaacaatttcaccaccgggcagatttatgaaagtgtaattcgcaaggagcgtcgcggggattatctggggggaactgtacaggtgattccgcatattactgatgaaatcaagctgttcatccgtaatggcgtttccgatgcacaagttgcaatcgtggaaatcggcggtacggtgggtgatatcgaatccttgccgtttctggaagcaatccggcaaatgtcagtccagcttcctcatcatgatacctgtttcatccatttgacactgttgccttacatcagctcggctggcgagctgaaaaccaaacctactcaacattcggtcaaggaacttcgtgaaatcggtattcagccggatgtactgctttgtcgttccgatcgtccgcttccgttggaagagcggcgaaaaatcgcgttatttaccaacgttcgtgaagaatctgtcatttctgcgatcgatgtagacaatatctacaaaatcccggcgttgttacatgaacaaatgctggatgaaatcgtgtgccacaggctggatatcctggccaggccggctaatctgacagtctggaaaaaactggttcacgcgctcgaacaccccgaacatgaagtttccatcgcactggtagggaaatatgtcgatctgacggaatcttacaaatcgctgtcagaggcattgatccatgccggtattcacacacgctgcaaaatcaatatccactatatcgattcagaaaatatcgagcagcatggaaccggctgcctgacaaacatggatgccattctggtacccgggggatttggcaaacgtggggtggaaggcaaaatcatggcaatcagttatgcccgtaaccaccggattccttatctcggtatatgcctggggatgcaactcgcagtcattgaattttcccgtaatcgtctgcaacttgaaaacgcgcacagcacggaattcgatccggatacaccttacccggtattggggctgattaccgaatggcgtgatcgctgcggtcgtgtcgagaaacgctccgctcagacggatctgggaggaaccatgcggctgggagggcaggagtgcttgctgaaaccacataccctggcacacaaaatctatggggcggacaaggtcatcgagcgccaccggcaccgttatgaagtcaacgccgagtttattcctcaactggaacaggccggtatgcatataagcggtttatctgctgaaggtgatctctgtgagatgattgagctgcctcaatctgaacatccgtggttcgtcgcttgccaattccatccggagtttacctccactccccgaaatggtcatcctctcttcaaaagctacatacaggccgctatcagctttgccggtcagtccgatcgtacaaagttgcacagtcgcaatgtacaggaaagtgttacaacagacagctcgaactga

SEQ ID NO: 31499 - protein, 564 aa, Nitrosomonas europaea
MTKFVFVTGGVVSSLGKGIAAASLAALLETRGIRVTILKLDPYINVDPGTMNPFQHGEVFVTDDGAETDLDLGHYERFISTKMTRQNNFTTGQIYESVIRKERRGDYLGGTVQVIPHITDEIKLFIRNGVSDAQVAIVEIGGTVGDIESLPFLEAIRQMSVQLPHHDTCFIHLTLLPYISSAGELKTKPTQHSVKELREIGIQPDVLLCRSDRPLPLEERRKIALFTNVREESVISAIDVDNIYKIPALLHEQMLDEIVCHRLDILARPANLTVWKKLVHALEHPEHEVSIALVGKYVDLTESYKSLSEALIHAGIHTRCKINIHYIDSENIEQHGTGCLTNMDAILVPGGFGKRGVEGKIMAISYARNHRIPYLGICLGMQLAVIEFSRNRLQLENAHSTEFDPDTPYPVLGLITEWRDRCGRVEKRSAQTDLGGTMRLGGQECLLKPHTLAHKIYGADKVIERHRHRYEVNAEFIPQLEQAGMHISGLSAEGDLCEMIELPQSEHPWFVACQFHPEFTSTPRNGHPLFKSYIQAAISFAGQSDRTKLHSRNVQESVTTDSSN

SEQ ID NO: 31500 - DNA, 1722 bp, Nocardia farcinica
  CDS (1)..(1722): transl_table=11
gtgggtcaaacacggattcaggcgcgaaccgccacgaaacacatcttcgtcagcggtggtgtcgcctcctcattgggcaagggccttaccgcctccagcctcggtcagctgctcaccgcgcgcggactgcgcgtcaccatgcagaaactcgacccctatctgaacgtcgatcccggcaccatgaatccgttccagcacggcgaggtgttcgtgacggaagacggtgccgagaccgatctcgacgtcggccactacgagcgattcctcgaccgtgacctgtcgcgggacgcgaacgtgaccaccgggcaaatctattcctcggtcatcgccaaggaacgccgcggcgaatacctgggcgacaccgtccaggtcatcccgcacatcaccgacgagatcaagaaccgcatcctggccatgcgcggccccgatctacagggccagacgccggacgtggtgatcaccgagatcggcgggacggtcggcgacatcgaatcccagccgttcctcgaggcggcccgccagatccgccacgacgtcggccgcgacaacgtcttcttcctgcacgtctcgctggtgccctacctggcgccctcgggcgagctcaagaccaagcccacccagcactcggtggccgcgctgcgcaacatcggcatccagcccgacgcgctgatcctgcgctgcgaccgcgaggtgccgcaggcgctcaagtcgaagatcgcgctgatgtgcgacgtcgaggtggacgcctgcatctccaccccggacgcgccgtcgatctacgacatcccgaaggtgctgcaccgcgagggcctggacgcctacgtggtgcggcggctggggctgcccttccgcgacgtggactggaccgtgtggggcgacctgctcgaccgtgtgcactccccgcgcgaggaggtcgaggtcgcgctggtcggcaagtacgtcgacctgcccgatgcctacctctcggtcaccgaggcgctgcgcgccggtggcttcgcctcccgggccaaggtgaacatccgctgggtggcctccgacgagtgcgagaccgcggcgggcgccgcggccgcgctgcgcgatgtcgacgcgatcctgatccccggcggtttcggcatccgcggcatcgagggcaaggtcggcgccatccacttcgcccgcacccgcggtatcccgctgctcggcctgtgcctcggcctgcagtgcgtggtgatcgaggcggcccgctcgatcgggctcaccgacgccaactccaccgagttcgagcccgacacccagcacccggtgatctccaccatggccgatcagaagcaggccgtggccggtgaggccgacctgggcggcaccatgcgcctgggcgcctacccggcggtgctggagaagggatcggtggtcgcccgcgcctacggctcggagcaggtctccgaacggcaccggcaccgctacgaggtgaacaacgcctaccgcgacaagatcgccaccagcgggctgaagttcagtggcacctccccggacgggctgctggtcgagttcgtggagctgcccgccgaggtgcacccgttcttcgtcgccacccaggcgcatccggagctgaagagcaggccgacccgcccgcatccgctgttcgccgcgctgatcgcggccgcgctgaaatataaactggccgagcggcttccggtcgacattccggacgacgagttggcgagcgcagaacagggagcgtga

SEQ ID NO: 31501 - protein, 573 aa, Nocardia farcinica
MGQTRIQARTATKHIFVSGGVASSLGKGLTASSLGQLLTARGLRVTMQKLDPYLNVDPGTMNPFQHGEVFVTEDGAETDLDVGHYERFLDRDLSRDANVTTGQIYSSVIAKERRGEYLGDTVQVIPHITDEIKNRILAMRGPDLQGQTPDVVITEIGGTVGDIESQPFLEAARQIRHDVGRDNVFFLHVSLVPYLAPSGELKTKPTQHSVAALRNIGIQPDALILRCDREVPQALKSKIALMCDVEVDACISTPDAPSIYDIPKVLHREGLDAYVVRRLGLPFRDVDWTVWGDLLDRVHSPREEVEVALVGKYVDLPDAYLSVTEALRAGGFASRAKVNIRWVASDECETAAGAAAALRDVDAILIPGGFGIRGIEGKVGAIHFARTRGIPLLGLCLGLQCVVIEAARSIGLTDANSTEFEPDTQHPVISTMADQKQAVAGEADLGGTMRLGAYPAVLEKGSVVARAYGSEQVSERHRHRYEVNNAYRDKIATSGLKFSGTSPDGLLVEFVELPAEVHPFFVATQAHPELKSRPTRPHPLFAALIAAALKYKLAERLPVDIPDDELASAEQGA

SEQ ID NO: 31502 - DNA, 1632 bp, Novosphingobium aromaticivorans
  CDS (1)..(1632): transl_table=11
atggcgcggtacatattcatcaccggcggcgtggtttcctcgctcggcaagggactcatggcagcgagcctcgcggctctgttgcaggcacgcggatttcgcgtgcgcatccgcaagttcgacccctatctgaacgtcgatccggggacgatgagcccctatcagcacggcgaggtctacgtgaccgacgacggcgccgagaccgacctcgacctcggccactacgaacgcttcaccggcgtttcggcgcggcaggcggacaacatcacttcgggccgcatctatcgcgatatcatcacgaaggagcggcgcggcgactatctcggcgcgacggtccaggtgattccgcacgtgaccgatgcgatcaaggacttcgcccaggccgagaccgaggatctcgacttcgtgctgtgcgagatcggcggcaccgtgggcgacatcgagggtctgcccttcatcgaggcgctgcgtcagctccacaacgagcttgaccgcgaccagacctgtttcgtccacgtgacgctggtgccctacatcgcggcggcgggcgagctgaagaccaagccgacccagcattccgtgcgcgaactgaccgggcttggcatccagccggacatcctgctttgccgctgcgagaagccgcttccggagggtgagcgcgccaagatcgcgcagttctgcaacgtgcgcaaatcggcggtcattcccgcgctcgacgcttcgagcatctatgcggtgccgttgcagtatcacgccgaggggctggacggcgaagtgctgcgccacttcggcctgaccgctccggacccggacctggcgcggtgggaagacatcgtcgaccgctaccagaaccccgagggcgaagtgacgatcggcgtggtcggcaagtatgtcggcctgcaggacgcctacaagtcgctcaacgaggcgctggcgcatggcggcatggccaatcgcgtcaaggtgcgggtcaagtggctcgacgccgagcttttcgagaagggcgacgacgagatcgccgcgcagctcgagccgatgcacggcattctcgtgcccggcggcttcggcgagcgcgggaccgaaggcaagatcgcctcggtgcgctttgcgcgcgaacgcaaggtgccgttcttcggcatctgcctcggcatgcagatggcctgcgtcgagggggcccgcaacacggcggggatcgcgggcgcttcgtcgacagagttcgggccgaccgacgagccggtcgtgggcatcatcaccgagtggatgaccgccgaagggcttgagaaacgctccgaaggcggggatctgggcggcaccatgcgcctgggcgcgtatgaggcgcaccttgcaggcaacagtcacgtcgccaacatctatggcagcaccgtgatcagcgaacggcatcgccaccgctacgaagtgaacgtcgcctacaaggaacggctggaaaagggcgggctggtgttttcgggcatgtcgcccgacggactgctccccgagatcgtggagcgtcccgaccatccgtggttcatcggtgtgcagttccatcccgaactgaagagccgtccgttcgagccgcacccgctgttcaaggggttcatcgcggccgcagtcaagcaggcgcgtctggtttaa

SEQ ID NO: 31503 - protein, 543 aa, Novosphingobium aromaticivorans
MARYIFITGGVVSSLGKGLMAASLAALLQARGFRVRIRKFDPYLNVDPGTMSPYQHGEVYVTDDGAETDLDLGHYERFTGVSARQADNITSGRIYRDIITKERRGDYLGATVQVIPHVTDAIKDFAQAETEDLDFVLCEIGGTVGDIEGLPFIEALRQLHNELDRDQTCFVHVTLVPYIAAAGELKTKPTQHSVRELTGLGIQPDILLCRCEKPLPEGERAKIAQFCNVRKSAVIPALDASSIYAVPLQYHAEGLDGEVLRHFGLTAPDPDLARWEDIVDRYQNPEGEVTIGVVGKYVGLQDAYKSLNEALAHGGMANRVKVRVKWLDAELFEKGDDEIAAQLEPMHGILVPGGFGERGTEGKIASVRFARERKVPFFGICLGMQMACVEGARNTAGIAGASSTEFGPTDEPVVGIITEWMTAEGLEKRSEGGDLGGTMRLGAYEAHLAGNSHVANIYGSTVISERHRHRYEVNVAYKERLEKGGLVFSGMSPDGLLPEIVERPDHPWFIGVQFHPELKSRPFEPHPLFKGFIAAAVKQARLV

SEQ ID NO: 31504 - DNA, 1608 bp, Oceanobacillus iheyensis
  CDS (1)..(1608): transl_table=11
gtgacaaagtatatcttcgttactggaggagtagtatcttctctaggtaaaggaataacagcagcatctttaggtcgtttactgaaaaaccgtggattaagtgtgactatccaaaaatttgatccatatattaatgtggatcctggaacaatgagtccatatcaacatggtgaagtatttgtaacacaagatggagcggaaacggacttagacttaggtcattatgaacgctttattgatattaacttgaacaaatacagtaacattacaacaggaaaagtttattcaagcgttattcgtaaggaacgtcgcggagattatcttggtggtactgttcaagtaattcctcatataacgaatgagataaaagatcaagtgtttcgagcaggtgaagcaactggtgcagatgtagtaattacagaaattggtggaacagttggggatattgaatctcttccattccttgaagccattcgtcaaataaaaagtgatgtgggtcgtgacagtgttatgtatgtacattgtacattagttccctatattaaagcagctggcgaaatgaaaactaaaccaacccaacacagtgttaaagaattacgttcactgggaattcaaccagatgcgattgtattacgtacagaaatggcgataagcaaagatatgaaagaaaagattgctttattctgtgatattgatgataaatcagttattgaaatgcgtgatgcggacacactttaccaagtaccaatcgctctacaagaagaaaagctagatcaaattacttgtaatcattttggacttgattgtccagaagcggatatggaagaatggaaaggtcttgtgaataaggtccgtaacttaagtaaaacaactcatataggacttgttggtaagtatgtagaacttccagatgcttatttatctgttgtagagtctttaaaacatgcaggatatgattatgatactgatgtgaagatacattggattaactcggaattactatctgaagagcaaattaaagaggaactatccaaagtggacggtgtattagttccaggtggattcggagatcgaggtattgatggaaaaattgaagcgattcgttatgctcgtgagaacaatattccgttctttggtatatgcttaggaatgcaattagcttctgtagaattcgctcgtaacgtggtgggtctttctcaagcccattcagcggaaatcaatccacatacaccgcatccagtcattgatttactaccagaacaaaaggatatcgaggatttaggtggtacccttcgtttaggtgcatatccttgtaaacttgttgatggtacaaaagcgaaagaggcatatgatggtgcagatgttattgaagaaagacatcgtcatcgttatgaatttaataatgtatatagagatcaaatggcggagaaaggttttgtgttttctggtacaagcccagatggtcgtttagtggaaacaattgaagtgaaagaccatccgtggtttgtagcttgtcaattccatccagaatttacttcacgcccaactcgtgcacaaagcttatttaaagggtttattggcgcttccgtcgactatcgtaaaggttaa

SEQ ID NO: 31505 - protein, 535 aa, Oceanobacillus iheyensis
MTKYIFVTGGVVSSLGKGITAASLGRLLKNRGLSVTIQKFDPYINVDPGTMSPYQHGEVFVTQDGAETDLDLGHYERFIDINLNKYSNITTGKVYSSVIRKERRGDYLGGTVQVIPHITNEIKDQVFRAGEATGADVVITEIGGTVGDIESLPFLEAIRQIKSDVGRDSVMYVHCTLVPYIKAAGEMKTKPTQHSVKELRSLGIQPDAIVLRTEMAISKDMKEKIALFCDIDDKSVIEMRDADTLYQVPIALQEEKLDQITCNHFGLDCPEADMEEWKGLVNKVRNLSKTTHIGLVGKYVELPDAYLSVVESLKHAGYDYDTDVKIHWINSELLSEEQIKEELSKVDGVLVPGGFGDRGIDGKIEAIRYARENNIPFFGICLGMQLASVEFARNVVGLSQAHSAEINPHTPHPVIDLLPEQKDIEDLGGTLRLGAYPCKLVDGTKAKEAYDGADVIEERHRHRYEFNNVYRDQMAEKGFVFSGTSPDGRLVETIEVKDHPWFVACQFHPEFTSRPTRAQSLFKGFIGASVDYRKG

SEQ ID NO: 31506 - DNA, 1623 bp, Onion yellows phytoplasma
  CDS (1)..(1623): transl_table=11
ttgaataataaagatttaaaaaccaaatttatttttattactggaggagtcgtttcaagcctaggaaaaggtatcactgctgcttctattggacaaattttaaaaaatagaggtcttaaagtaagtattcaaaaactagatccttatattaatattgatcctggaacaatgagcccttatcaacacggtgaggtctttgtcactgatgatggcgctgaaactgatcttgatttgggtcattatgaaagatttttagatgaaaacatgagcaaaaagtcaaatgtcactgcagggcaaatttatcaaagtgtgatcaataaagaacgcgaaggcaaatacttaggtaaaactgttcaagttattccacacatcactgaagaaatcaaacaaaaactaattgatgttgctctttttcacaaatcagatgttgttattgtagaaattggaggcaccgtaggagacattgaatcatcgccttttttagaagccatcagacaagtgcgctttgattttggttatcacaatgttttgtatcttcataccactttagttccttatttaaaaaaagctcaagaaatcaaaacaaaacctacccaacacagcgttaaagaattacgtgctttaggaatacaacctcaaattttggtcttacgtagtgaagttcctatcaacccagaaaccaaaaataaaattgctgctttatgtgacatcaatccacaagctatttttgaagccttagatgttgatattttatatcaaatgattcttaacttgcatcatcaaggaatcgatgattttattttacaacattttaaacttactaatttctcaaacgccgatttgcaatcctggaaacaactaattacacgcatccaaaatttagaaaaaaaagtagtcattgctctagtgggtaaatacattgttttacatgatgcttatttatcaatcatagaagctcttaaacatgcttcttatcaatataattgtaaactggaaattaaatggatagatgctgaaaaagtaacgccagacaatatttcttctttgcttgaagactatgatggtattttagttccttatggttttggcaatcgcgctattgaaggcaaaattttagccattaattatgcaagaactaacaatattcctttctttgggatttgtttaggtatgcagttagcagttattgaatatgcccgcaatgtgctacatttacaaggtgccaattctttggaagttgatgaaaagacgccgcatcctgtaattactaaaaaaatagttgacagcaatttaggaggaaccctgcgattaggttcttatccgtgccatcttaaagccaacaccaaaagtaaagctatttataatcaagaaataatttatgaaagacatcgtcatcgttttgagatgaatcctcattatgttgctttatttgaaaaaaataatgattttgttgtttctggaataaatcaagaacaaaagctttgtgaaattgttgagttaaaaagccatccttggtttattgcagtacaatttcatcctgagtttttgtcaagaccattaaaaccacatcctttatttaaagggtttgttgaagcgtctttattaaatcaaaaaaataaataa

SEQ ID NO: 31507 - protein, 540 aa, Onion yellows phytoplasma
MNNKDLKTKFIFITGGVVSSLGKGITAASIGQILKNRGLKVSIQKLDPYINIDPGTMSPYQHGEVFVTDDGAETDLDLGHYERFLDENMSKKSNVTAGQIYQSVINKEREGKYLGKTVQVIPHITEEIKQKLIDVALFHKSDVVIVEIGGTVGDIESSPFLEAIRQVRFDFGYHNVLYLHTTLVPYLKKAQEIKTKPTQHSVKELRALGIQPQILVLRSEVPINPETKNKIAALCDINPQAIFEALDVDILYQMILNLHHQGIDDFILQHFKLTNFSNADLQSWKQLITRIQNLEKKVVIALVGKYIVLHDAYLSIIEALKHASYQYNCKLEIKWIDAEKVTPDNISSLLEDYDGILVPYGFGNRAIEGKILAINYARTNNIPFFGICLGMQLAVIEYARNVLHLQGANSLEVDEKTPHPVITKKIVDSNLGGTLRLGSYPCHLKANTKSKAIYNQEIIYERHRHRFEMNPHYVALFEKNNDFVVSGINQEQKLCEIVELKSHPWFIAVQFHPEFLSRPLKPHPLFKGFVEASLLNQKNK

SEQ ID NO: 31508 - DNA, 1629 bp, Pasteurella multocida
  CDS (1)..(1629): transl_table=11
atggcaacaaattatatttttgtgacgggcggtgttgtatcttcgctgggtaaaggtattgctgcagcatcattagcagcaattttagaagcgcgtggtttaaaggtcaccatgttaaaactggatccttatatcaacgtggacccgggcaccatgagtccaactcaacatggtgaagtttttgtcacccaagatggcgctgaaaccgacttagacttagggcattatgagcgttttattcgcaccaaaatgaccaaacgtaacaatttcaccacaggcaaaatctattccgaagtcttacgcaaagagcgtcgtggtgattatttaggtgcaaccattcaagtcattcctcatattacaaacgaaattaaatctcgcgtcattgatggcgcagctgggcatgatgtcgcaattgtcgaagtagggggaacagtaggtgacattgaatctttacctttccttgaagccttacgtcaactggcggtgcaagtcggtcgtgaacgtaccttgtttatgcacttaaccctcgtgccttatattccaacggcaggtgaagtgaaaacgaaaccaacacaacattcagtgaaagaattattatccattgggattcaacctgatgtcttaatttgtcgttctgatcgcatggtcccaccgaatgagcgagcaaaaatcgccttattctgtaatgtgccagaaagagcggtcatttcactgaaagatgtcagctcaatttaccaaattccagccttattaaaatcacaaggtttggatgatttcatttgtcaacgtttccacttagattgcccagaagccgatctgtctgaatgggaacaagtgttataccaagaagctaatccaacaggtgaagtggtgatcggtatggtgggtaaatacacggaattaccagatgcctacaaatcggttaatgaggccttaaaacacgcaggcttaaaaaaccgtcttagcgtacaaatcaaatatattgattcacaagatgtggaaaccaaaggcacagaagtgttagaaggcgttgacggtattttagtaccgggtggatttggtaatcgtggtgtagaaggtaaaattctcaccgccaaatatgcacgtgaaaatcacattccttatttagggatctgcttaggaatgcaagtggcttacattgaatatgctcgcaatgttgccggtttaacggatgcaaattctactgaatttgaccgcacttgtgactatcctgtcgtgggcttaattaccgaatggcaagacgccgaagggaatattgaaacacgtaccgatgcctctgatttaggtggcaccatgcgtttaggtgcacaacaatgccatttaatggaaggtagcaaagcacgtgaactttatggtgctgaaaccatcgaagaacgtcatcgtcatcgttatgaagtcaataacgtcttacgtccacaagtggaaaaagcaggcttaaaagtcacgggcttatccgcagataaaaaattagtggaaattattgaagtaccaaatcacccttggtttgtggcatgtcaattccacccagaattcacctccaccccacgtgatggtcacccactctttgccggctttgtcaaagcggcaaaagacaatcaaaagaaataa

SEQ ID NO: 31509 - protein, 542 aa, Pasteurella multocida
MATNYIFVTGGVVSSLGKGIAAASLAAILEARGLKVTMLKLDPYINVDPGTMSPTQHGEVFVTQDGAETDLDLGHYERFIRTKMTKRNNFTTGKIYSEVLRKERRGDYLGATIQVIPHITNEIKSRVIDGAAGHDVAIVEVGGTVGDIESLPFLEALRQLAVQVGRERTLFMHLTLVPYIPTAGEVKTKPTQHSVKELLSIGIQPDVLICRSDRMVPPNERAKIALFCNVPERAVISLKDVSSIYQIPALLKSQGLDDFICQRFHLDCPEADLSEWEQVLYQEANPTGEVVIGMVGKYTELPDAYKSVNEALKHAGLKNRLSVQIKYIDSQDVETKGTEVLEGVDGILVPGGFGNRGVEGKILTAKYARENHIPYLGICLGMQVAYIEYARNVAGLTDANSTEFDRTCDYPVVGLITEWQDAEGNIETRTDASDLGGTMRLGAQQCHLMEGSKARELYGAETIEERHRHRYEVNNVLRPQVEKAGLKVTGLSADKKLVEIIEVPNHPWFVACQFHPEFTSTPRDGHPLFAGFVKAAKDNQKK

SEQ ID NO: 31510 - DNA, 1638 bp, Photorhabdus luminescens subsp
  CDS (1)..(1638): transl_table=11
atgaaaactaattatatttttgtgaccggcggggtcgtatcctctctgggtaaaggcattgccgcagcctctttggcggctatactcgaagcccgtggactcaatgtcacgattatgaaactggacccgtacatcaatgtcgatccaggtacgatgagcccaatccaacatggggaggtcttcgttaccgaagacggcgctgaaactgatctcgatttaggtcactatgagcgtttcatccgcactaaaatgactcgtcgcaataacttcactacggggcgagtttattccgaagttttgcgtaaagagcgccgtggtgactatctgggggcgacggttcaagttattcctcacatcaccaatgaaattaaagatcgcatcatcagtggtggagaaggtcatgacgtggtgctggtggaagtcggtggtactgtcggtgatatcgaatcgctgccattccttgaagctattcgtcaaatggcggtagaagttggccgtgaacacactttatatttgcatttgacactggtgccttatctggcagcggctggcgaagttaaaactaagccgactcagcactcggtaaaagaactgctctctatcggtattcaaccggatattctgatttgtcgttcagatcgcgttatccctgctaacgaacgtgcaaaaattgcccttttctgtaatgtgccagaaaaagcggttatctccctaaaagatgttgattccatttataaaatcccagggctattgaaatctcaaggcttagatgattatatttgtaaacgattcagccttgattgcccggaagcaaatttatccgaatgggagcaggtcatttacgaagaagcgaatccttccggtgaagtcactattgggatggtgggtaaatacgttgaactgcctgatgcgtacaaatccgtgattgaggcattgaagcacggtgggttgaaaaatcgcttgacggttaacatcaaactgcttgattcccaggatgttgaaactcgtggcgttgaattattgaagggactggatgcgattctggttcctggtggtttcggtggccgcggtgtggaaggcaaaatcatgacagcccgttatgcgcgtgagaacaacattccttatctgggaatctgtctcggcatgcaggtagcattgattgagttttctcgtcatgttgcgggcttggaaaaagccagctcaacagaatttgaacctgattgccggttgccggttgttggtctgatcaccgaatggcgtgatgaagacggtaatttagaagtgcgtagcgaagagagtgatcttggtggaacgatgcgtgtgggcgggcagccatgccacctgacaaaagatagcttggtgcgcactttgtatggagcagatacgattgttgagcgtcatcggcatcgttatgaagtgaataatttactactgaaacgtattgaagatgcgggtctgcgggtagcgggtcgttcagtagacaataaattagtcgaaattattgagatccctgaccatccttggttcgtggcttgtcagttccacccagaatttacttccactcctcgtgatggccatccgttgtttactggttttgttaaagccgccggtaaataccagaaaggccagctcaaataa

SEQ ID NO: 31511 - protein, 545 aa, Photorhabdus luminescens subsp
MKTNYIFVTGGVVSSLGKGIAAASLAAILEARGLNVTIMKLDPYINVDPGTMSPIQHGEVFVTEDGAETDLDLGHYERFIRTKMTRRNNFTTGRVYSEVLRKERRGDYLGATVQVIPHITNEIKDRIISGGEGHDVVLVEVGGTVGDIESLPFLEAIRQMAVEVGREHTLYLHLTLVPYLAAAGEVKTKPTQHSVKELLSIGIQPDILICRSDRVIPANERAKIALFCNVPEKAVISLKDVDSIYKIPGLLKSQGLDDYICKRFSLDCPEANLSEWEQVIYEEANPSGEVTIGMVGKYVELPDAYKSVIEALKHGGLKNRLTVNIKLLDSQDVETRGVELLKGLDAILVPGGFGGRGVEGKIMTARYARENNIPYLGICLGMQVALIEFSRHVAGLEKASSTEFEPDCRLPVVGLITEWRDEDGNLEVRSEESDLGGTMRVGGQPCHLTKDSLVRTLYGADTIVERHRHRYEVNNLLLKRIEDAGLRVAGRSVDNKLVEIIEIPDHPWFVACQFHPEFTSTPRDGHPLFTGFVKAAGKYQKGQLK

SEQ ID NO: 31512 - DNA, 1638 bp, Photobacterium profundum
  CDS (1)..(1638): transl_table=11
atgacaacgaattatatttttgttacgggcggggtcgtatcctctctaggtaaaggcattgcagcagcatcattagcggcaattttagaagcacgtggtcttaaagtgaccatgatgaaactagacccttacatcaacgttgacccaggcacaatgagcccaactcaacacggcgaagtattcgttacggaagacggtgcagagaccgaccttgatttaggtcactatgagcgttttatccgtaccaaaatgactaagcgtaataactttacagctggtcgtgtttacgaagaagtacttcgtaaagaacgtcgcggagactaccttggtgcaactattcaggtaattcctcacatcacgaacgaaattaaagaacgtgtgattgcaggttctgaaggccacgatattgctatcgttgaagttggtggcactgttggtgatatcgaatcgttaccgtttatggaagcaattcgtcagttagcagtacaaaaaggtcgtgaacgtactatgtttatgcacctaacgttagttccttatctggctgcggctggtgaagtgaaaacaaagccaacgcaacactcggtaaaagaattacgttctatcggtattcagcctgacattttgatctgtcgttctgaccgtgttattcctgcgaacgaacgtgcaaaaattgcactgttctgtaatgtgcaggaaaaagcagtaatctcaatgaaagatgtagattcaatctacaaaatccctcagttaatcaaagcgcaaggtcttgatgattttgtttgtaagcgctttggtattacagcaccagaagctaacttggctgagtgggaacaagttatctacgaagaagcaaacccaaccgatgaagtaaccatcggtatggtaggcaagtatattgaactgcctgatgcttacaagtcagttaacgaagcattaaaacacgctggtctgaaaaatcgtctctcagtgaagatcaaatacattgactcacaagatgttgaggcgaaaggttttgaaatgcttgaaggtctagatgcaattctagttcctggtggcttcggcagtcgtggtattgaaggtaaaatccgtaccgcacaatatgctcgtgaaaacaaaattccgtacttaggcatttgtctgggtatgcaagttgcgttgattgaatttgcccgtaatgttgcaggtttggctgatgcacactcaactgaatttaatgctgaaactaaaaacccagtggtgggtctaatcactgaatgggttgacagtgaaggcaaggtggaagagcgtacagagaattcaaaccttggcggtacaatgcgccttggttctcagttatgccacctgaaaaacggttctaaagcgcgtgagctttatggtaacgcaagcattcatgagcgtcaccgtcaccgctatgaagtgaataacaatttgcttccgcaactagaaaaagctggattgaaaatttcaggtctgtcagcagacaagaaattagtggaaattattgaaatgcctaaccacccatggtttgtggctgctcaattccaccctgagttcacatcaactcctcgcgatggtcaccctctatttgaaggtttcgtgaaggcagcaggtcaacaactgcgtggtgaacttaaataa

SEQ ID NO: 31513 - protein, 545 aa, Photobacterium profundum
MTTNYIFVTGGVVSSLGKGIAAASLAAILEARGLKVTMMKLDPYINVDPGTMSPTQHGEVFVTEDGAETDLDLGHYERFIRTKMTKRNNFTAGRVYEEVLRKERRGDYLGATIQVIPHITNEIKERVIAGSEGHDIAIVEVGGTVGDIESLPFMEAIRQLAVQKGRERTMFMHLTLVPYLAAAGEVKTKPTQHSVKELRSIGIQPDILICRSDRVIPANERAKIALFCNVQEKAVISMKDVDSIYKIPQLIKAQGLDDFVCKRFGITAPEANLAEWEQVIYEEANPTDEVTIGMVGKYIELPDAYKSVNEALKHAGLKNRLSVKIKYIDSQDVEAKGFEMLEGLDAILVPGGFGSRGIEGKIRTAQYARENKIPYLGICLGMQVALIEFARNVAGLADAHSTEFNAETKNPVVGLITEWVDSEGKVEERTENSNLGGTMRLGSQLCHLKNGSKARELYGNASIHERHRHRYEVNNNLLPQLEKAGLKISGLSADKKLVEIIEMPNHPWFVAAQFHPEFTSTPRDGHPLFEGFVKAAGQQLRGELK

SEQ ID NO: 31514 - DNA, 1605 bp, Picrophilus torridus
  CDS (1)..(1605): transl_table=11
atgcattatatagttataaccggtggtgttatatcagggcttggcaagggtacgatcacctcaagcctttcatatcttttaaagaatagcggctttaaggtaacaaacataaagatagacccgtacataaattacgatgcaggcacaatgaacccataccagcatggagaggtctttgtccttgacgatggcagcgaagtcgatctcgaccttggcaactatgagaggttccttgatactgatctaacagggaataataatataacaacaggaaagatttacaaaagcgttatagaaagggaaaggcatggcgattatcttggaaaaactgttcagataataccgcatataaccaatgaaataaaggaaagaattaaaagggcatccagcggctatgatatagcattaatagaggtcggtggaaccgtcggtgacatagaatcaatgccattcatagaggctgtaaggcagttaaggtcaacggatgacgttatatacagccacgtaactttggttcccgagataaacggtgagcagaaaacaaagccaacacagcacagtgttaaggaattaagatctcttggaatatcgcctgatatactattctgcagatctgaaaagccccttggaaaggacgttattgaaaagatctcgctgttcacggacgtccctgcaagcggaataataagcatgtacaatgtaaaaaatgtgtacatgatccctgaaataatgatgcgccagggtattttagaatacataaagaagagaaccgggacatcgaatcataatttagattacacatggagtaactttgttgagaatataaagaatcccgcagaatcggttgacattgcaatagttggcaagtacatagagctccaggatgcatatataagccacaaggaggcattttcacatgtaacaggaaacactggaatatcggttaacatacactgggttgatgctgataagctcttaaacagtacacatgatcttaaaaatgttgatggcatacttgtcccaggcggcttcggctaccgcggtgttgagggaaagatcatagccgcaaggtatgccagggagaatagaataccatatttgggcatatgccttggattccaggtttctgtaatagaaatatcaaggtcattgcttggattaaagggtgcaaacagcacagaatttgataataataccgattatcctgtaatagatatacttccggagcagagcaatgtaagcgatcttggcggcacaatgcgccttggctcaaaaaaggtattaataaaagatggaacgattgcaaaaaacatttataaatcagatataatatacgagaggcataggcacaggtacgaggtaaacccggattacatagaaagactggaggattcaggtgtgatattctccggaacagacgatgaaaagatacgcatggagatactcgagttatcagaccgtgataattacatagcaacacagtaccatgcagagtttaaatccagaccattgaacccatcgaaagtgcacatgcaccttgtgctgaaggccctcgaatacaggaggaatatttatgaaagaaacacttcaggaattagtagataa

SEQ ID NO: 31515 - protein, 534 aa, Picrophilus torridus
MHYIVITGGVISGLGKGTITSSLSYLLKNSGFKVTNIKIDPYINYDAGTMNPYQHGEVFVLDDGSEVDLDLGNYERFLDTDLTGNNNITTGKIYKSVIERERHGDYLGKTVQIIPHITNEIKERIKRASSGYDIALIEVGGTVGDIESMPFIEAVRQLRSTDDVIYSHVTLVPEINGEQKTKPTQHSVKELRSLGISPDILFCRSEKPLGKDVIEKISLFTDVPASGIISMYNVKNVYMIPEIMMRQGILEYIKKRTGTSNHNLDYTWSNFVENIKNPAESVDIAIVGKYIELQDAYISHKEAFSHVTGNTGISVNIHWVDADKLLNSTHDLKNVDGILVPGGFGYRGVEGKIIAARYARENRIPYLGICLGFQVSVIEISRSLLGLKGANSTEFDNNTDYPVIDILPEQSNVSDLGGTMRLGSKKVLIKDGTIAKNIYKSDIIYERHRHRYEVNPDYIERLEDSGVIFSGTDDEKIRMEILELSDRDNYIATQYHAEFKSRPLNPSKVHMHLVLKALEYRRNIYERNTSGISR

SEQ ID NO: 31516 - DNA, 1620 bp, Porphyromonas gingivalis
  CDS (1)..(1620): transl_table=11
atggcagatactaagtatatcttcgtgaccggtggtgtggtttcttctcttggaaaaggcatcgtagcagcatctctcggcaaactcctccaagctcgcggtttcaacgtagctcttcagaagttcgacccctatatcaatatcgatcccggtacgctcaatccttatgagcacggcgaatgctatgtcaccgaggacggacatgaggccgatttggatctcggccactatgagcgtttcctcaatacgcccactactcgtgccaataatatcacgacaggcaggatctatcagaacgtaatccgcaaggaacgcaagggcgagtacttgggcaagaccgtgcaagtggtgcctcatattacggatgagatcaagcgcaacgtcaaactcctgggacaaaagagtcagtacgactttgtcatcacagagataggcggtacggtaggagacatcgaatccctacccttccttgaaagcgtgcgtcagctcaagtgggagttggggcagaattgcctctgcgttcacttgacctatgtaccctacattgctgctgccggcgaggtgaagaccaagccgactcagcactccgtgaagcagttgcaggaagtgggtattcagcccgacatccttgtattgagaacggagcacgagcttcagcccgacattttgaagaaggtagccctgttctgcaacgtggctcccgattcggtggtacagagtgtggacgtgcctactatctatgaggtgcctctggtcttgcagcagcagcatatggacgagacggtacttcggaaagtggggctgcaagtgggacctgtgcccgagatgcgtcagtggcatgaatttttggaaatgaagcatacggcccgagaaacggttacgatcgctttggtgggtaagtatgtggagcttcaggatgcgtacaagtccatagacgaatcgctgatgcaggcggctatatataataggaagaagctgaacctcatatccgttcacagcgaaaaggtgacggaggctaacgtagccgagaccctgaaagatatggacggcatcgtgatcgcccccggattcggttccagaggggtcgaaggcaaactcatagcactgaaatatgcgcgtgagaacgatctgcccacactgggtatctgtctgggtatgcagtgtatggtgatcgaatatgctcgcaatgtattgggcttcaaggacgccaatacgacggagatcgaatccaatatcgagcacaaggtcatcgacctgatggacgaacagaagacggttacggatatgggcggttccatgcgtttgggcgcatacgactgtgctctgcgcaaaggatcgaaattggctgctgcctatggcaaggaattcgtgcgcgaacgccatcgccatcgcttcgaattcaacagccagtatcgcgaagctttcgaaaaagccggtatgcaatgtgtgggcgagaatccggagacgggcttggtagaagccgtggaagtgcctgcctgccgctggttcgtgggggtacagttccatcccgaatacaatagtacggtggtcaatcccaaccccttgttcatggctttcattcgtgaagcaatcaaaacgagaaaaaaagataaagaataa

SEQ ID NO: 31517 - protein, 539 aa, Porphyromonas gingivalis
MADTKYIFVTGGVVSSLGKGIVAASLGKLLQARGFNVALQKFDPYINIDPGTLNPYEHGECYVTEDGHEADLDLGHYERFLNTPTTRANNITTGRIYQNVIRKERKGEYLGKTVQVVPHITDEIKRNVKLLGQKSQYDFVITEIGGTVGDIESLPFLESVRQLKWELGQNCLCVHLTYVPYIAAAGEVKTKPTQHSVKQLQEVGIQPDILVLRTEHELQPDILKKVALFCNVAPDSVVQSVDVPTIYEVPLVLQQQHMDETVLRKVGLQVGPVPEMRQWHEFLEMKHTARETVTIALVGKYVELQDAYKSIDESLMQAAIYNRKKLNLISVHSEKVTEANVAETLKDMDGIVIAPGFGSRGVEGKLIALKYARENDLPTLGICLGMQCMVIEYARNVLGFKDANTTEIESNIEHKVIDLMDEQKTVTDMGGSMRLGAYDCALRKGSKLAAAYGKEFVRERHRHRFEFNSQYREAFEKAGMQCVGENPETGLVEAVEVPACRWFVGVQFHPEYNSTVVNPNPLFMAFIREAIKTRKKDKE

SEQ ID NO: 31518 - DNA, 1689 bp, Propionibacterium acnes
  CDS (1)..(1689): transl_table=11
gtgggcaccgacaatcactgcagcaagcacgttttcgtcactggaggggtcgtttcctccctgggaaaggggctcacggcctcctccctcgggtcgcttctgaaggcgcgtggccttaaggtcacaatgcagaagctggacccttacctcaacgtcgatccgggaacgatgaacccgttccagcatggcgaggtgttcgtcaccgaggacggcgcggagactgacctcgacatcggccactacgagcgtttccttaacgagaacttgtcagggcaggccaatgtgaccactggcaaggtgtactccgcggtcatcgccaaggagcgtcggggcgactacctgggagacaccgtccaggtgatcccccatatcactaacgagatcaaggaacgtatgttggcgatggaggagggccatcccgatgttgtcatccacgagatcggtggcaccgtcggcgacatcgagtcgcttcctttcctcgaggccgcccgccaggtgcgtcacgagatcggccgggagaatgttttcttcctgcacgtctcgcttgttccttacatcaagccgtccggcgagatgaagaccaagcccacccagcattcggtggccgcgttacgtgaggtcggcatccagcccgacgccatcgtgtgtcgatccgagcgtccaattggcaagggcatcaagtcgaagatcgctctcatgtgcgacgtcgagggcccggccgtcgtctcctgtccggacgctccgtcgatctacctcattccgaaggttctgcaccgtgaaggtctcgacgcctacgtcgtgcagaagttgagcctgtttttccgcgacgtcgactggacaacctgggacgacctgctggatcgcgtccgtaagccgcgcagcgaggtgaccgtggccttggtcggcaagtacatcgacttgccggacgcttacctgtcggtgaccgaggcgctgcgagccggcggattcgccaacaaggcgaaggtcaacgtggtgtgggtggcctccgattcctgcgccactgccgaaggtgctgcccagcagttacgtgatgctgatgccatctgcgttccgggcgggttcgggatccgcggtgttgagggcaaagtcggtgccatccgctacgcccgcgaacacaaggttcccttcctggggctgtgccttggcatgcagtgcgccgtcattgaggttgcccgcgatctggctggcatcaaggatgccgcatccagtgagttcgactcacaaacccccgatccggtcatcgcgacgatggcagagcaggtcgaggcagtggccggcaaggccgatctcggtggaacgatgcgtctgggggcctacccggccaagcttgccaaggactccctggtcgccgaattgtatggcacgacgacagttaccgaacgccaccgtcaccgttacgaggtcaacaacgcctaccgtgaccgtctggagcaggctgggctgcgtattagtggtacttcccccgatggcggccttgttgagtttgtcgagttggaccgtcagacccatccgtacttcgtggccacccaggctcatcctgagctcaagtcccgtccgactcacgcccacccgctgttccgcggactcgtcgcagcggccgtcgggcatgccaaagcagcatcgaagggagcggccaaggagtcctccaccaaggtggccgacaagtga

SEQ ID NO: 31519 - protein, 562 aa, Propionibacterium acnes
MGTDNHCSKHVFVTGGVVSSLGKGLTASSLGSLLKARGLKVTMQKLDPYLNVDPGTMNPFQHGEVFVTEDGAETDLDIGHYERFLNENLSGQANVTTGKVYSAVIAKERRGDYLGDTVQVIPHITNEIKERMLAMEEGHPDVVIHEIGGTVGDIESLPFLEAARQVRHEIGRENVFFLHVSLVPYIKPSGEMKTKPTQHSVAALREVGIQPDAIVCRSERPIGKGIKSKIALMCDVEGPAVVSCPDAPSIYLIPKVLHREGLDAYVVQKLSLFFRDVDWTTWDDLLDRVRKPRSEVTVALVGKYIDLPDAYLSVTEALRAGGFANKAKVNVVWVASDSCATAEGAAQQLRDADAICVPGGFGIRGVEGKVGAIRYAREHKVPFLGLCLGMQCAVIEVARDLAGIKDAASSEFDSQTPDPVIATMAEQVEAVAGKADLGGTMRLGAYPAKLAKDSLVAELYGTTTVTERHRHRYEVNNAYRDRLEQAGLRISGTSPDGGLVEFVELDRQTHPYFVATQAHPELKSRPTHAHPLFRGLVAAAVGHAKAASKGAAKESSTKVADK

SEQ ID NO: 31520 - DNA, 1656 bp, Prochlorococcus marinus
  CDS (1)..(1656): transl_table=11
atggcaaaatttgtcttcgttactggaggagttgtttcaagcatcggtaaaggaattgttgctgccagtcttggacgactcctcaaatcaagaggatatagcgtatccattttgaaattagatccatacttaaatgtggatcctggaaccatgagtccttttcaacatggagaagtttttgttaccgaagatggtgcagaaacagatttagatctagggcattacgagcgttttactgatactgcaatgtcacgattaaatagtgtgacgacaggctctatctatcaatctgtaatcaataaagaaagacgcggtgactataacggtggaacagtacaggttatccctcatatcacaaaagaaatccgcgagcggattcatcgcgtatctgcaaatagtaatgctgatattattattactgaaattggtggaactgtaggagatattgaatctcttccttttctagaagcaattcgtgaattcaaaggtgatgttgggagaaatgatattgcttatatacatgtcactcttttacctttcatcaacacgtcaggggaaatcaaaactaaaccaactcaacattcagtaaaagaattacgttctataggaattcaaccagatgtcttggtctgcagaagtgatagaaacattaataaagaattaaaaactaaaattagtggattttgtggagtacatgctgaggctgtaattccagcattagacgctgacagtatttattcagttcctctttctttaaaaaaagaaggcctttgtagagaaatacttaaaattttagaattagaggatcatcaatgtgacttggaagaatgggaagccttgatccatcaattacgaaatcctggaccatcagtcacagttgctgttgttggaaaatatgtccgactaaatgatgcctacctttctgtagtagaagcattacgtcacgcctgcatagctcagaatgcctctttaaatataacctgggtatctgctgaaaaaatagaaactgaaggtcccgaaaatcttctagaaggaattgatgcaattgtagttccaggaggtttcgggaatagaggtgtcaatggaaaaattacagctatacaatgggcaagagagaaaaggattccattccttgggctttgcttaggaatgcaatgtgctgtcattgaatgggcaagaaatatagcagggttaaaagaagctacaagttctgaactcgatccaaacgcaagtcatccagtcattcatttacttcctgaacaacaagatgtaatagatttaggtggaacaatgcgactaggtgtgtatccatgcaggttaaccccagagacaatggggcacaagctctatggagaagaagtagtgtatgaacggcatagacatcgctatgaattcaacaattcttataggaatctcttcgttgaatctggatatagcattagcggaacatcaccagatggtcgattagtggaactgattgaattgaaaagtcatcctttctttacagcctgccaatatcaccctgaattcttatccagaccaggaaaaccacatccactatttcaagggctaatagaagccgcccaactccgtttacctgcaacacctcaagaagtattcaaaaatactctgcccaattttcaaaagaataaatga

SEQ ID NO: 31521 - protein, 551 aa, Prochlorococcus marinus
MAKFVFVTGGVVSSIGKGIVAASLGRLLKSRGYSVSILKLDPYLNVDPGTMSPFQHGEVFVTEDGAETDLDLGHYERFTDTAMSRLNSVTTGSIYQSVINKERRGDYNGGTVQVIPHITKEIRERIHRVSANSNADIIITEIGGTVGDIESLPFLEAIREFKGDVGRNDIAYIHVTLLPFINTSGEIKTKPTQHSVKELRSIGIQPDVLVCRSDRNINKELKTKISGFCGVHAEAVIPALDADSIYSVPLSLKKEGLCREILKILELEDHQCDLEEWEALIHQLRNPGPSVTVAVVGKYVRLNDAYLSVVEALRHACIAQNASLNITWVSAEKIETEGPENLLEGIDAIVVPGGFGNRGVNGKITAIQWAREKRIPFLGLCLGMQCAVIEWARNIAGLKEATSSELDPNASHPVIHLLPEQQDVIDLGGTMRLGVYPCRLTPETMGHKLYGEEVVYERHRHRYEFNNSYRNLFVESGYSISGTSPDGRLVELIELKSHPFFTACQYHPEFLSRPGKPHPLFQGLIEAAQLRLPATPQEVFKNTLPNFQKNK

SEQ ID NO: 31522 - DNA, 1677 bp, Prochlorococcus marinus
  CDS (1)..(1677): transl_table=11
atggccaagttcgtctttgttaccggtggagtcgtatcaagcatcggcaagggaattgtggccgcgagccttggtcgcctactcaaatcgcgtggctacagcgtctcgatcctgaagctggatccctacctcaatgtggacccaggcaccatgagtccatttcaacatggtgaagtgttcgttaccgaagacggcgccgaaaccgacttggatcttggccactacgagcgctttactgacacagccatgtcacgcctcaatagcgtaaccactggctcaatctatcaagcagtcatcaataaggaacggcgcggcgactacaacggcggcactgtgcaagtgatcccccacatcactggtgagattcgcgaacgcatccaccgagtagcagccaatagtggcgcagatgtcgtgatcacagaaatcggcggcactgtcggagacatcgaatctctgcccttcctcgaagcaatccgtgaattccgtggtgacgtaggacgcaacgacctcgcctacatccatgtgaccctactcccgttcatcggcacatccggtgaactcaaaaccaagcccacacagcactccgtcaaggaactgcgcgcaattggcatacaaccagatgtactggtttgccgcagcgaccgcccaatcaatgaagacctaaagagcaaaattggaggcttctgcggggtaccaaaccgggctgtcatcactgctcttgatgccgacagcatttatgccgtacccatctcactagaggaagagggcctctgtctagaaatgctggatgtactcaacctgactgaccatgacagcgacatgaaaagctgggttgagctggttcataagctgcgcaacccaggtcccgctgtgaaggtggccctagtcggaaaatatgtgcaactcaacgacgcctacctttcagtagtagaagccctgcgccatgcctgcctcacccaagacgcctccctcgagctgtcttgggtctgcgccgagcagatcgaaacgcatggtccagaaaacctactcaaaggaatggatgctgttgtagttcctggaggcttcggtaaccgcggcgtagatggcaaagttgctgccattcgctgggcgagagaacaacgagtgccattcctagggctttgtctaggcatgcaatgcgctgtgatcgagtgggcacgcaaccaggcaggactcactggagccagtagttccgagctggagcccgacaccaaccatcctgttatccacctcctgccagagcaacaagacgtagtcgatctaggcggcacaatgaggcttggtgtctatccatgccgcatcgcaccagacacgttggcacagaagctttatggcgaacaggttgtctacgagcgccaccgccatcgctatgaattcaacaactcctaccgcaacctatttattgaatccggctacaccatcagcggtagctcacccgatggacgcctcgtagaactgatcgagctgaaaggtcatcccttcttcacagcctgccaataccaccctgaatttctctcccgacccggaaaaccccatcccctcttccggggattgattgaggcagctcaactacggctaccagcctcacctgacgaagccctacgccgacaaagccagaccaacatctccgctcaggagcaacccagccggattggatga

SEQ ID NO: 31523 - protein, 558 aa, Prochlorococcus marinus
MAKFVFVTGGVVSSIGKGIVAASLGRLLKSRGYSVSILKLDPYLNVDPGTMSPFQHGEVFVTEDGAETDLDLGHYERFTDTAMSRLNSVTTGSIYQAVINKERRGDYNGGTVQVIPHITGEIRERIHRVAANSGADVVITEIGGTVGDIESLPFLEAIREFRGDVGRNDLAYIHVTLLPFIGTSGELKTKPTQHSVKELRAIGIQPDVLVCRSDRPINEDLKSKIGGFCGVPNRAVITALDADSIYAVPISLEEEGLCLEMLDVLNLTDHDSDMKSWVELVHKLRNPGPAVKVALVGKYVQLNDAYLSVVEALRHACLTQDASLELSWVCAEQIETHGPENLLKGMDAVVVPGGFGNRGVDGKVAAIRWAREQRVPFLGLCLGMQCAVIEWARNQAGLTGASSSELEPDTNHPVIHLLPEQQDVVDLGGTMRLGVYPCRIAPDTLAQKLYGEQVVYERHRHRYEFNNSYRNLFIESGYTISGSSPDGRLVELIELKGHPFFTACQYHPEFLSRPGKPHPLFRGLIEAAQLRLPASPDEALRRQSQTNISAQEQPSRIG

SEQ ID NO: 31524 - DNA, 1611 bp, Prochlorococcus marinus subsp
  CDS (1)..(1611): transl_table=11
atgtcaaagtttgtttttgttactggaggagtcgtttctagcataggtaaaggtattgttgccgcaagcttaggaagattattaaaatcaagagggtatagcgtttcaatacttaaactagatccctatctaaatgttgacccaggaacaatgagcccgtttcaacatggcgaagttttcgttaccgaagatggagctgaaacagatttagatttaggtcactatgagagatttactgacactgcaatgactcgtttaaatagtgtcactacaggatccatctaccaagcagtaattaataaagaaagaagagggagttacaacggaggtacagttcaagttattcctcacatcacaagagaaataagagaaaggattcatagagtagcagctaacagcaatgctgatatcgttataactgagattggtggaacagtaggagatattgaatctctaccctttttagaggctataagagaatttaaaaatgatgttaataaaaatgatgtcgcttatattcacgtaactttacttccttatatcaaaacatctggtgagataaaaactaaacctactcaacattctgtaaaggagttacgatccattggtatacaaccagatttacttgtatgcagaagtgataaagaaattaatgaagggctaaaaagaaaactaagtggtttctgcggagttaatcttaattgtgtaattgaagcattagatgctgatagtatttattcagttcctctttctttaaagaatgaaggtttatgtaaacagactttaaattgtctagaactcgaagataaagaatgtgatttagagaattgggaaaaaataattcataatcttagaaatcctggtaaccctataaaggttgctttagttggaaaatatatagaacttggtgatgcatatctttcagtagtggaggcattaaggcatgcttgtattgaacaaaaagctttattagatttgtattggataagtgctgaaatgatcgaagagaaatcagccgaagagtatttaaatgatgttgacgcaattgtagttccaggaggatttggaaatagaggagtgaatggaaaaattgaagcaataaaatttgcaagagaaaagaatattcctttcctaggtttatgtttaggtatgcaatgcgcagtaatagaatgggcaagaaatatagcccaattacctgatgcatctagctcagaattaaatccagattccgaaaacccggttattcatttattacctgaacaagaagacattgttgatcttggaggaactatgagattaggagtttatccttgtagacttcaaaaaaatacaactggtaaagagttgtataacgaagatgttatatatgagagacatcgacatagatatgaatttaataattactacaaacaaagttttttagattctggatacaaaatcagtggtacatcaccagatggaagattagtagaattaattgaattagttgatcatccatattttttagcatgtcaataccatcctgaattcttatcaaggccagggaagccacatccattatttaaagggttgatcaaagcatcgcaggaaaaattagagcaatcaaattaa

SEQ ID NO: 31525 - protein, 536 aa, Prochlorococcus marinus subsp
MSKFVFVTGGVVSSIGKGIVAASLGRLLKSRGYSVSILKLDPYLNVDPGTMSPFQHGEVFVTEDGAETDLDLGHYERFTDTAMTRLNSVTTGSIYQAVINKERRGSYNGGTVQVIPHITREIRERIHRVAANSNADIVITEIGGTVGDIESLPFLEAIREFKNDVNKNDVAYIHVTLLPYIKTSGEIKTKPTQHSVKELRSIGIQPDLLVCRSDKEINEGLKRKLSGFCGVNLNCVIEALDADSIYSVPLSLKNEGLCKQTLNCLELEDKECDLENWEKIIHNLRNPGNPIKVALVGKYIELGDAYLSVVEALRHACIEQKALLDLYWISAEMIEEKSAEEYLNDVDAIVVPGGFGNRGVNGKIEAIKFAREKNIPFLGLCLGMQCAVIEWARNIAQLPDASSSELNPDSENPVIHLLPEQEDIVDLGGTMRLGVYPCRLQKNTTGKELYNEDVIYERHRHRYEFNNYYKQSFLDSGYKISGTSPDGRLVELIELVDHPYFLACQYHPEFLSRPGKPHPLFKGLIKASQEKLEQSN

SEQ ID NO: 31526 - DNA, 1668 bp, Prochlorococcus marinus
  CDS (1)..(1668): transl_table=11
atggcaaaatttgttttcgtcactggtggtgtagtttcaagcattggcaaaggaattgttgccgcaagtcttggcagactacttaaatcaaaagggtacagtgtttcgattttgaagcttgacccatatttaaatgttgatcctgggacgatgagcccatttcaacatggagaagtttttgtaactgaagacggagctgaaactgatttggaccttgggcattatgagcgctttacagatactgcaatgtcaagactaaacagtgtcacgacaggttccatttatcaagctgtgattaataaagaaagaagaggtgactatgacggaaggacagttcaagtcatcccccacatcactcgtgaaattcgcgaaagaattaaacgtgtagcaaacaatagtggtgcagatgtagtgatctcagaaattggcggaacagttggagatattgaatctctaccttttcttgaagcaataagagaatttaaaggggatgtaaaaagaaacgatgttgtttatgttcacgtcacattattgccttacataggtacatctggagaaattaaaaccaagccaacacagcactcagtaaaagaattgcgttctataggtattcagccagatattttagtttgtcgcagtgataggcccattaatgatggcttaaaaaataaaatagggggtttctgtggagttaactctgatgcggtcatagcatccttagatgctgacagtatttactcagtaccattagcgctcaaagatgagggactttgtaaggaagtattagattgcttggatctgaatgatcatgaaagtgatttaaaagactgggaacgattagtccataaattgcgcaatccaggtccttctgtcaaagttgcattagttggcaaatatgtacaattaaatgatgcctacttatcagtagtcgaagcattacgtcacgcatgtatctcgcatgatgcatctttagatcttcactggatcaatgcagaaaacatagaatccgagggagctgaaaaactacttcagggaatggacgcaattgtcgttccaggaggttttggtaaccgtggcgtcaatgggaaaatagctgctattagatgggcaagggagcaaagggtaccttttctagggctttgcttaggtatgcaatgtgctgtcattgaatgggctcgcaatatcgctggtttagaagatgcatctagtgccgaactaaatccgaattcaaaacacccagtaattcacttacttccagaacaacaagacgtcgttgatttaggaggaacaatgagattaggagtatatccttgtagacttcaagcaaacacaaccggacaaagtttatacaacgaagaagttgtttacgaaaggcatagacatcgttatgaattcaataattcatacagaactctactaatggaatctgggtatgtaattagtggtacttcacctgatggtcgattagtagagttaatagaattaaaaaatcacccattttttattgcatgtcaatatcatccagaattcctctctaggccaggaaaaccacaccctttattcggtggtttgattcaagccgcacaaatgcgtgtaccatcctcgccgagtgaggcatttaatcctcaatcaaaaattattgaaaaaaaatcactagaacagcaatag

SEQ ID NO: 31527 - protein, 555 aa, Prochlorococcus marinus
MAKFVFVTGGVVSSIGKGIVAASLGRLLKSKGYSVSILKLDPYLNVDPGTMSPFQHGEVFVTEDGAETDLDLGHYERFTDTAMSRLNSVTTGSIYQAVINKERRGDYDGRTVQVIPHITREIRERIKRVANNSGADVVISEIGGTVGDIESLPFLEAIREFKGDVKRNDVVYVHVTLLPYIGTSGEIKTKPTQHSVKELRSIGIQPDILVCRSDRPINDGLKNKIGGFCGVNSDAVIASLDADSIYSVPLALKDEGLCKEVLDCLDLNDHESDLKDWERLVHKLRNPGPSVKVALVGKYVQLNDAYLSVVEALRHACISHDASLDLHWINAENIESEGAEKLLQGMDAIVVPGGFGNRGVNGKIAAIRWAREQRVPFLGLCLGMQCAVIEWARNIAGLEDASSAELNPNSKHPVIHLLPEQQDVVDLGGTMRLGVYPCRLQANTTGQSLYNEEVVYERHRHRYEFNNSYRTLLMESGYVISGTSPDGRLVELIELKNHPFFIACQYHPEFLSRPGKPHPLFGGLIQAAQMRVPSSPSEAFNPQSKIIEKKSLEQQ

SEQ ID NO: 31528 - DNA, 1632 bp, Pseudomonas syringae pv
  CDS (1)..(1632): transl_table=11
atgacgcgctacatcttcgtcacgggcggtgttgtttcttcattggggaaaggcattgcctcggcttcattggcggccatcctggaggcgcggggactcaaggtcaccatgctcaaactggatccctatatcaacgtggatccaggcaccatgagcccgttccagcacggtgaggtgttcgtcactcacgacggcgccgagaccgacctggaccttggtcactacgagcggttcatccgcaccaccatgacccagaacaacaacttcaccaccggccgtgtgtacgaacacgtcctgcgcaaagagcgccgtggtgattatctgggggcgaccattcaggtcattccgcatatcaccgacgaaatcaagcgccgcatcatcaagggtgcaggcgatgccgacgtggcgctggtcgaaatcggcggcacggtgggtgacatcgagtcgcagccgttcctcgaggccatccgccagttgcgtttcgaagtgggcgcacgccgcgcgatgctgatgcacctgacgctggtgccgtacatcgccactgccggcgagaccaagaccaagccgactcagcattcggtgaaggaattacgctccatcggtctgcagcctgatgtgctggtctgccgctccgaccacccgatcgacgtgtcgtcgcgtcgcaagatcgctcagttcaccaacgttgaagagcgtgcggttatcgcccttgaagacgcggacaccatctacaagatcccgggcatcctgcattcgcaaggcctggacgattttgtggtcgagcgcttcggcctgcaatgtgagggtgccgatctgtccgagtgggacaaggtcgtcgacgccaagctcaaccccgagcacgaagtcaccatcgcgatggtcggcaaatacatggaactgctcgacgcctacaagtcgttgatcgaagccatgagccacgccggcatcaccaaccgtaccaaggtgaacctgcgttatatcgattccgaagacatcgaaaaccagggcaccggcctgcttgaaggcgtggatgcgattctggttccaggcggctttggcctgcgtggggtcgagggcaagatcactgccgtccagtttgcacgggaaaacaaggttccgtatctgggcatctgcctgggcatgcaagtggcggtcatcgagttcgcacgtaacgtgctgggctggaaagacgccaactccaccgagttcaaccgtaccagcgcgcacgccgtggtgggtctcatcaccgagtgggaagatgccactggtgcagtcgaaacccgtaccgaaagttccgatctgggcggcaccatgcgtcttggggcgcaggattgccagcttgaagccggttcgctggtacacgactgctaccgcaaggacgtaattgtcgagcgtcatcgtcatcgctatgaagtgaacaacaatctgctgccacaactgattgaggctggcctgaagatttccggtcgctccggcgacggtgcgctggttgaagtggtcgaagcaccggatcatccatggttcgtcgcttgccagttccacccggaattcacttccacgccccgtgacggtcatccgctgttcagcggtttcgtcaaggcggcactggctcaacatcagaaaaactcctga

SEQ ID NO: 31529 - protein, 543 aa, Pseudomonas syringae pv
MTRYIFVTGGVVSSLGKGIASASLAAILEARGLKVTMLKLDPYINVDPGTMSPFQHGEVFVTHDGAETDLDLGHYERFIRTTMTQNNNFTTGRVYEHVLRKERRGDYLGATIQVIPHITDEIKRRIIKGAGDADVALVEIGGTVGDIESQPFLEAIRQLRFEVGARRAMLMHLTLVPYIATAGETKTKPTQHSVKELRSIGLQPDVLVCRSDHPIDVSSRRKIAQFTNVEERAVIALEDADTIYKIPGILHSQGLDDFVVERFGLQCEGADLSEWDKVVDAKLNPEHEVTIAMVGKYMELLDAYKSLIEAMSHAGITNRTKVNLRYIDSEDIENQGTGLLEGVDAILVPGGFGLRGVEGKITAVQFARENKVPYLGICLGMQVAVIEFARNVLGWKDANSTEFNRTSAHAVVGLITEWEDATGAVETRTESSDLGGTMRLGAQDCQLEAGSLVHDCYRKDVIVERHRHRYEVNNNLLPQLIEAGLKISGRSGDGALVEVVEAPDHPWFVACQFHPEFTSTPRDGHPLFSGFVKAALAQHQKNS

SEQ ID NO: 31530 - DNA, 1629 bp, Pseudomonas aeruginosa
  CDS (1)..(1629): transl_table=11
atgacgcgctacatcttcgtcacgggtggtgttgtttcttcattggggaaaggcatcgcttcggcttctctggctgcgatcttggaagcgcgtggcctgaagatcacgatgctcaagctggacccttacatcaacgtggacccgggcaccatgagcccgttccagcacggtgaggtcttcgtgacccaggacggcgccgagaccgacctggacctgggccattacgagcgcttcgttcgtaccaccatgacccagaacaacaacttcaccaccggccgcgtctacatggacgtgttgcgcaaggaacgccgcggcgactacctgggcgccaccgtgcaggtgatcccgcacatcaccgacgagatcaagcggcgcatcatcaagggcgccggcgatgccgacgtcgccctggtggagatcggtggcaccgtcggcgacatcgagtcgcagccgttcctcgaggcgatccgccaactgcgcgtcgagatcggcgccaagcgcgcgatgctgatgcacctgaccctggtcccgtacatcgccaccgccggcgagaccaagaccaagccgacccagcactcggtcaaggagctgcgctccatcggcctgcaaccggacgtgctggtctgccgttccgaccacccgatcgacgtctcctcgcggcgcaagatcgcgctcttcaccaacgtcgaggagcgcgcggtgatcgccctggaagacgtcgacaccatctaccgcatcccgtcggtgctgcatgcccagggcctagacgacatcgtcgtcgagcgcttcggcctggagtgcgggcaggccgacctgtccgaatgggaccgggtggtcgatgccaagctcaaccccgagcgtgaagtcaccatcgccatggtcggcaagtacatggaactgctggacgcgtacaagtcgctgatcgaggcgatgacccacgccggcatccagagccgcaccaaggtcaacctgcgctacatcgactccgaagacatcgagcagcagggcaccagcctgctggaaggcgtcgacgccatcctggtcccgggcggcttcggcctgcgcggcgtggaaggcaagatcagcaccgtgcagtacgcccgcgagaacaagattccctacctgggcatctgcctgggcatgcaggtcgcggtcatcgaatacgcccgcaacgtgctcggctggagcgacgccaactccaccgagttcgacaagtccagcggccatccggtggtcggcctgatcaccgaatggcaggacgcgaccggcgccaccgagatccgcaccgaagcttccgacctgggcggcaccatgcgcctgggcgcccaggagtgccagctgcagaccggcaccttggtgcacgactgctatgccaaggacgtgatcgtcgagcgccatcgccatcgctacgaagtgaacaacaacctgctgccgcaactggaacaggccggcctgaagatttccggccgctccggcgacggcgccctggtggaagtggtcgaggccccggagcatccgtggttcgtcgcctgccagttccacccggagttcacctccacaccgcgtgatggccacccgctgttcagcggtttcgtcaacgccgcgctgaaatattccgggaaggcctga

SEQ ID NO: 31531 - protein, 542 aa, Pseudomonas aeruginosa
MTRYIFVTGGVVSSLGKGIASASLAAILEARGLKITMLKLDPYINVDPGTMSPFQHGEVFVTQDGAETDLDLGHYERFVRTTMTQNNNFTTGRVYMDVLRKERRGDYLGATVQVIPHITDEIKRRIIKGAGDADVALVEIGGTVGDIESQPFLEAIRQLRVEIGAKRAMLMHLTLVPYIATAGETKTKPTQHSVKELRSIGLQPDVLVCRSDHPIDVSSRRKIALFTNVEERAVIALEDVDTIYRIPSVLHAQGLDDIVVERFGLECGQADLSEWDRVVDAKLNPEREVTIAMVGKYMELLDAYKSLIEAMTHAGIQSRTKVNLRYIDSEDIEQQGTSLLEGVDAILVPGGFGLRGVEGKISTVQYARENKIPYLGICLGMQVAVIEYARNVLGWSDANSTEFDKSSGHPVVGLITEWQDATGATEIRTEASDLGGTMRLGAQECQLQTGTLVHDCYAKDVIVERHRHRYEVNNNLLPQLEQAGLKISGRSGDGALVEVVEAPEHPWFVACQFHPEFTSTPRDGHPLFSGFVNAALKYSGKA

SEQ ID NO: 31532 - DNA, 1632 bp, Pseudomonas fluorescens
  CDS (1)..(1632): transl_table=11
atgacgcgctacatattcgtcacgggcggtgttgtttcttcattggggaaaggcattgcctcggcttcattggcggccatcctggaggcgcgggggcttaaggtcaccatgctcaagctggacccgtacatcaacgtcgacccgggcaccatgagcccgttccagcacggtgaagtgttcgtcacccacgacggcgccgagaccgacctggacctgggccactacgagcggttcatccgcacgaccatgacccagaacaacaacttcaccaccggccgcgtgtacgagcacgtgctgcgcaaggagcgccgtggtgattatctgggtgccaccatccaggtgattccgcacatcaccgacgagatcaagcgtcgcatcatcaagggcgccggcgatgccgacgtggccctggtggaaatcggcggtaccgtgggtgacatcgagtcgcaaccgttcctcgaagccatccgtcaactgcgtgtggaagtcggttccaagcgcgcgatgctgatgcacctgacgctggttccgtacatcgccaccgctggcgagaccaagaccaagccgacccagcactcggtaaaagagctgcgttcgatcggcttgcagccggacgtgctgatctgccgctccgaccatccggtggatgtgtcgtcgcgccgcaagatcgcgctgttcaccaacgttgaagagcgtgcggtgatctccctggaagacgtcgacaccatctacaagatcccggccgtgctgcacgcccagggcctggacgatttcgtcgtcgagcgtttcggcctgcagtgcaacggtgctgacctgtccgagtgggaaaaagtggtggacgccaagctcaacccagagcacgaagtcaccatcgccatggtcggcaagtacatggaactgctggacgcctacaagtcgctgatcgaagcgatgagtcatgccggcattaccaaccgtaccaaggtcaacctgcgctacatcgattccgaagacatcgagaaccagggcaccgcgctgctggaaggcgtcgacgcgatcctggttccaggcggtttcggcctgcgtggcgtggaaggcaagatcaccgcggtgcaatacgctcgcgagaacaaggtgccgtacctgggtatctgcctgggcatgcaagtggcggtcatcgagttcgcccgtaatgtcatgggctggaaagacgccaactccaccgagttcgatcgcaccagcggccatccggtcgtcggcctgatcaccgagtgggaagacgccaccggtgccgttgaagtgcgtaccgaagcttccgacctgggcggcaccatgcgtctgggcgctcaggaatgcttgctggaagcgggctccaaggtccacgactgctacgccaaggacgtgatcatcgagcgtcaccgtcaccgttacgaagtgaacaacaagctgctgccgcaactgatcgaagctggcctgaagatctccggtcgctcgggtgacggcgcgctggttgaagtggtcgaggcccaggatcatccatggttcgtcgcttgccagttccaccccgagttcacctcgactccccgtgacggccacccactgttcagcggtttcgtcaaagcagcattggctcaacaccagaagaaggcgtga

SEQ ID NO: 31533 - protein, 543 aa, Pseudomonas fluorescens
MTRYIFVTGGVVSSLGKGIASASLAAILEARGLKVTMLKLDPYINVDPGTMSPFQHGEVFVTHDGAETDLDLGHYERFIRTTMTQNNNFTTGRVYEHVLRKERRGDYLGATIQVIPHITDEIKRRIIKGAGDADVALVEIGGTVGDIESQPFLEAIRQLRVEVGSKRAMLMHLTLVPYIATAGETKTKPTQHSVKELRSIGLQPDVLICRSDHPVDVSSRRKIALFTNVEERAVISLEDVDTIYKIPAVLHAQGLDDFVVERFGLQCNGADLSEWEKVVDAKLNPEHEVTIAMVGKYMELLDAYKSLIEAMSHAGITNRTKVNLRYIDSEDIENQGTALLEGVDAILVPGGFGLRGVEGKITAVQYARENKVPYLGICLGMQVAVIEFARNVMGWKDANSTEFDRTSGHPVVGLITEWEDATGAVEVRTEASDLGGTMRLGAQECLLEAGSKVHDCYAKDVIIERHRHRYEVNNKLLPQLIEAGLKISGRSGDGALVEVVEAQDHPWFVACQFHPEFTSTPRDGHPLFSGFVKAALAQHQKKA

SEQ ID NO: 31534 - DNA, 1632 bp, Pseudomonas fluorescens
  CDS (1)..(1632): transl_table=11
atgacgcgctacatattcgtcacgggcggtgttgtttcttctttggggaaaggcattgcatcggcttcattggcggccatcctggaggcgcgggggcttaaggtcaccatgctgaagctggatccgtacatcaacgtcgacccgggcaccatgagcccgttccagcacggtgaagtgttcgtcacccacgacggcgccgagaccgacctggacctgggccactacgagcggttcatccgcacgaccatgacccagaacaacaacttcaccaccggccgtgtctacgagcacgtgctgcgcaaagagcgccgtggtgactacctgggtgcaaccatccaggtgattccgcacatcaccgacgaaatcaagcgtcgcatcatcaagggtgccggcgacgccgacgtggccctggtggaaatcggcggtactgttggcgacatcgagtcgcaaccgttcctagaagccatccgccagctgcgtgtggaagtcggctccaagcgcgcgatgctgatgcacctgaccctggttccgtacatcgccaccgctggcgagaccaagaccaagccgacccagcactccgtgaaggaactgcgttcgatcggcctgcagccagacgtcctgatctgccgctccgaccatccggtggatgtgtcctcgcgtcgcaagatcgcgctgttcaccaacgttgaagagcgtgcggtgatctccctggaagacgtcgacaccatctacaagatcccggccgtgctgcacgctcagggtctggacgatttcgtcgtcgagcgtttcggcctgcaatgcaatggcgccgacctgtccgagtgggaaaaggtcgttgatgccaagctcaatccagagcacgaagtcaccatcgcgatggtcggcaagtacatggagctgctggacgcctacaagtcgctgatcgaagcgatgagtcacgccggcatcaccaaccgcaccaaggtcaacctgcgctacatcgattccgaagacatcgaaaaccagggcactgccctgctggaaggcgtcgacgcgatcctcgtaccgggcggcttcggtctgcgtggcgtggaaggcaagatcaccgccgttcaatacgctcgcgaaaacaaggttccatacctgggcatctgcctgggcatgcaagtggcggtcatcgagttcgcccgtaacgtgctgggctggaaagacgccaactccaccgagttcgatcgtgccagcggccatccggttgtcggtctgatcaccgagtgggaagacgccaccggtgccgttgaagtgcgtaccgaagcgtccgacctgggcggcaccatgcgcctcggcgctcaggaatgcctgctcgaagccggctccaaggtgcacgactgctacggcaaggatgtgattgtcgagcgtcaccgtcaccgttacgaagtgaacaacaacctgctgccgcaaatcatcgaagccggcctgaagatttccggtcgctcttccgatgcagcgctggttgaagtggtcgaagcaccggatcatccatggttcgtcgcttgccagttccacccagagttcacctcgacgccacgcgatggccatccgctgttcagcggcttcgtcaaagcggcattggctcaacaccagaagaaggcgtaa

SEQ ID NO: 31535 - protein, 543 aa, Pseudomonas fluorescens
MTRYIFVTGGVVSSLGKGIASASLAAILEARGLKVTMLKLDPYINVDPGTMSPFQHGEVFVTHDGAETDLDLGHYERFIRTTMTQNNNFTTGRVYEHVLRKERRGDYLGATIQVIPHITDEIKRRIIKGAGDADVALVEIGGTVGDIESQPFLEAIRQLRVEVGSKRAMLMHLTLVPYIATAGETKTKPTQHSVKELRSIGLQPDVLICRSDHPVDVSSRRKIALFTNVEERAVISLEDVDTIYKIPAVLHAQGLDDFVVERFGLQCNGADLSEWEKVVDAKLNPEHEVTIAMVGKYMELLDAYKSLIEAMSHAGITNRTKVNLRYIDSEDIENQGTALLEGVDAILVPGGFGLRGVEGKITAVQYARENKVPYLGICLGMQVAVIEFARNVLGWKDANSTEFDRASGHPVVGLITEWEDATGAVEVRTEASDLGGTMRLGAQECLLEAGSKVHDCYGKDVIVERHRHRYEVNNNLLPQIIEAGLKISGRSSDAALVEVVEAPDHPWFVACQFHPEFTSTPRDGHPLFSGFVKAALAQHQKKA

SEQ ID NO: 31536 - DNA, 1629 bp, Pseudomonas putida
  CDS (1)..(1629): transl_table=11
atgacgcgctacatattcgtcacgggcggtgttgtttcttcattggggaaaggcattgcctcggcttccctggcggccatcctggaagcgcggggcctgaaggtcaccatgctcaagctggatccgtacatcaacgtcgacccgggtaccatgagcccgttccagcacggtgaagtttttgtcacccacgatggcgccgagaccgacctcgacctggggcactacgagcggttcatccgcaccaccatgacccagaacaacaacttcaccaccggccgtatctacgagcacgtgctgcgcaaagagcgtcgtggtgattatctgggcgcgaccatccaggtcatcccgcacatcaccgacgaaatcaagcgtcgcatcatcaagggtgccggcgatgccgacgtggccctggtggagatcggcggtaccgtgggtgatatcgagtcgcagccgttcctcgaggcgattcgccagctgcgtgtcgaagtgggctccaagcgtgccatgctgatgcacctgaccctggtcccgtacatcgccaccgctggcgaaaccaagaccaagccgacccagcactcggtcaaggagctgcgctccatcggcctgcagcctgacgtgctgatctgccgctccgaccacccggtggatgcttcgtcgcgtcgcaagatcgcgctgttcaccaacgttgaagagcgtgcggtgatttcgctggaagacgtcgacaccatctacaagatcccgggcgtgctgcatgctcagggcctggacgacttcgtcgtcgagcgcttcggcctgcagtgcaatggcgccgacctgtccgagtgggacaaggtggtcgatgccaagctcaacccggagcacgaagtgaccatcgccatggtcggcaagtacatggagctgctggatgcgtacaagtcgctgatcgaagcgatgagccacgccggcatcaccaaccggaccaaggtcaacctgcgctacatcgattcggaagacatcgagaaccagggcaccagcctgctcgaaggcgccgatgccatcctggtaccgggcggtttcggcctgcgcggtgtggaaggcaagatcactgcggtgcaatacgcccgtgagaacaaggtgccgtacctgggtatctgcctgggcatgcaggtggccgtcatcgaattcgcccgtaacgtgatgggctggaaagacgccaactccaccgagttcgaccgtaacagcggccacccagtggtcggcctgatcaccgagtgggccgatgccaccggtgccgtcgagacccgcgacgaggcttccgacctgggcggcaccatgcgcctgggcgcacaggattgccagctggctgccggttccaaggtgcacgactgctacggcaaggacgtgatcaccgagcgtcaccgtcaccgctacgaagtgaacaacaacctgctgccacaactggtggaagctggtctggtggtttccggccgttccgaagacggcgcgctggtggaagtggtcgagtccaaggatcacccatggttcgtcgcttgccagttccacccggagttcacctctaccccgcgtgacggccacccgctgttcagtggtttcgtcaaggcagccctggctcagaagaacaaggcctga

SEQ ID NO: 31537 - protein, 542 aa, Pseudomonas putida
MTRYIFVTGGVVSSLGKGIASASLAAILEARGLKVTMLKLDPYINVDPGTMSPFQHGEVFVTHDGAETDLDLGHYERFIRTTMTQNNNFTTGRIYEHVLRKERRGDYLGATIQVIPHITDEIKRRIIKGAGDADVALVEIGGTVGDIESQPFLEAIRQLRVEVGSKRAMLMHLTLVPYIATAGETKTKPTQHSVKELRSIGLQPDVLICRSDHPVDASSRRKIALFTNVEERAVISLEDVDTIYKIPGVLHAQGLDDFVVERFGLQCNGADLSEWDKVVDAKLNPEHEVTIAMVGKYMELLDAYKSLIEAMSHAGITNRTKVNLRYIDSEDIENQGTSLLEGADAILVPGGFGLRGVEGKITAVQYARENKVPYLGICLGMQVAVIEFARNVMGWKDANSTEFDRNSGHPVVGLITEWADATGAVETRDEASDLGGTMRLGAQDCQLAAGSKVHDCYGKDVITERHRHRYEVNNNLLPQLVEAGLVVSGRSEDGALVEVVESKDHPWFVACQFHPEFTSTPRDGHPLFSGFVKAALAQKNKA

SEQ ID NO: 31538 - DNA, 1632 bp, Pseudomonas syringae pv
  CDS (1)..(1632): transl_table=11
atgacgcgctacatcttcgtcacgggcggtgttgtttcttcattggggaaaggcattgcctcggcttcattggcggccatcctggaggcgcggggactcaaggtcaccatgctcaaactggatccctacatcaacgtggacccaggcaccatgagcccgttccagcacggtgaggtgttcgtcactcacgacggcgccgagaccgacctggaccttggtcactatgagcggttcatccgcaccaccatgacccagaacaacaacttcaccaccggccgtgtgtacgagcacgtcctgcgcaaagagcgccgtggtgattacctgggcgcgaccattcaggtcatcccgcacatcaccgatgaaatcaagcgccgcatcatcaagggtgcaggcgatgccgacgtggcgctggtcgagatcggcggcacggtgggtgacatcgagtcccagccgttccttgaagccatccgccagttgcgtttcgaagtcggcgcgcgccgcgcgatgctcatgcacctgacgctggtgccgtatatcgccactgccggcgagaccaagaccaagccgacccagcattcggtgaaggaattgcgctccatcggcctgcagcctgatgtgctggtctgccgttccgatcacccgatcgacgtttcctcgcgtcgcaagatcgctcagttcaccaacgtcgaagagcgtgcagtcatcgccctcgaagacgcggacaccatctacaagatcccgggcattctgcattcgcaaggcctggacgattttgtggtcgagcgcttcggcctgcaatgtggcggtgccgacctgtccgagtgggacaaggttgtcgacgccaagctcaacccggaacacgaagtgaccatcgcgatggtcggcaagtacatggaactgctcgacgcctacaagtcgttgatcgaagccatgagccacgccggtattaccaatcgcaccaaggtcaacctgcgctacatcgattctgaagacattgaaaaccagggcaccggcctgctggaaggcgtggatgcaatcctggttccgggtggcttcggtctgcgcggcgtggaaggcaagatcacggccgttcagttcgcccgtgagaacaaggttccgtacctgggcatctgcctgggcatgcaggtcgcagtcatcgagttcgcccgtaacgtgctgggctggaaagacgccaactccaccgagttcgaccgcaccagcgcacacgctgtggtggggctgatcaccgaatgggaagacgccaccggcgcggtcgaaacccgtaccgaaagctccgatctgggcggcaccatgcgtctgggtgcgcaagagtgccagcttgaagccggttcgctggttcacgattgctacaccaaggacgtgattgtcgaacgtcatcgtcatcgttacgaagtgaacaacaacctgttaccgcaactgatcgaggccggcctgaagatttccggtcgctccggcgacggcgcgctggttgaagtggtcgaagcaccggatcatccatggttcgtcgcttgccagttccacccggaattcacctccacgccccgtgacggtcatccgctgttcagcggcttcgtcaaggcggcactggctcaacatcagaaaaattcctga

SEQ ID NO: 31539 - protein, 543 aa, Pseudomonas syringae pv
MTRYIFVTGGVVSSLGKGIASASLAAILEARGLKVTMLKLDPYINVDPGTMSPFQHGEVFVTHDGAETDLDLGHYERFIRTTMTQNNNFTTGRVYEHVLRKERRGDYLGATIQVIPHITDEIKRRIIKGAGDADVALVEIGGTVGDIESQPFLEAIRQLRFEVGARRAMLMHLTLVPYIATAGETKTKPTQHSVKELRSIGLQPDVLVCRSDHPIDVSSRRKIAQFTNVEERAVIALEDADTIYKIPGILHSQGLDDFVVERFGLQCGGADLSEWDKVVDAKLNPEHEVTIAMVGKYMELLDAYKSLIEAMSHAGITNRTKVNLRYIDSEDIENQGTGLLEGVDAILVPGGFGLRGVEGKITAVQFARENKVPYLGICLGMQVAVIEFARNVLGWKDANSTEFDRTSAHAVVGLITEWEDATGAVETRTESSDLGGTMRLGAQECQLEAGSLVHDCYTKDVIVERHRHRYEVNNNLLPQLIEAGLKISGRSGDGALVEVVEAPDHPWFVACQFHPEFTSTPRDGHPLFSGFVKAALAQHQKNS

SEQ ID NO: 31540 - DNA, 1614 bp, Pyrococcus abyssi
  CDS (1)..(1614): transl_table=11
atgacgaagttcatcttcgtaaccgggggagttgtcagcggtcttggaaaaggaataacgagcgcctcaatagggcttctcatgaaggcgagagggtacaaaaccaccaacataaagatagatccctatataaactacgatgccggaaccatgaatccgtatcagcacggagaagtcttcgttcttgacgatggcggtgaagtagatttagatcttgggaattatgaaaggttcctcgacacaagcttaactttcgaccacaacataaccacaggtaaagtttactcgacggttatagagaaggagaggaggggagaatatctaggggcgacggttcaggttataccccacatcacggatgagataaagaggaggattagggagatagctagaaattacgacattgtagtggttgaaatcggtggaacggttggagatatagagagcatgcctttccttgaagccgcgaggcaaatgcaacttgaagaaggaagagagaatgtcgccttcgttcacgtaacttacgttccgaagcttagagttgttggagagcaaaagaccaagccaacgcagcacagcgtcaaggaacttaggagcctaggaattcagccagatgctatagtcgcgaggagcgaagatccccttgaggagggtgccagaaagaagataagcctattcacgaacgttcctgaggaggccgttataagtgcctacgacgttgaagacacttacgaagttcccctccttcttgaaagggaagggctaggaaaatacctagttaagaggcttggattggaagatagagaacctgacttgagggaatgggagaagatggttgccaaatacaaggcgctccaggatagcgtggagatagctatagttgggaagtacgtgaagctcaccgattcttatctcagcataaaggaagccctaaagcatgcgagcgttagcaacgaagttaaagtaaagataaggtggatagaggccgaggatatagaagagcatggcacgaagcttctcgaaggtgtcgatggaataatagtcccaggagggtttggggctaggggagctgaagggaagataatgacgattagatacgctagagaaaacgacatacctttcctggggatatgcttcggcttccagcttacggtagttgagttcgcaaggaacgtcctgggaatgaaaggggcacattcaactgagatagatccacaaactccctacccagttgtggatttaatgcctgaacagaggaacctcgacaagttaggagggactatgagacttggagcttatccagtgaagataaagaaaggtaccctagcttatgagctttacaagaaggacctcgtttacgagaggcataggcacaggtgggaagttaatccagattacattgaagcctttgaaaaagcaggtctagtgttcagcggaatagcgggagatgacgagaggagaatggaaatccttgagttgccagacaagaggtactttatagcaactcaattccatccagagttcaagtcaaggcctatgaagccagctccggtattccacgggctcgttaaagctgcaaaagagtacaagcaggagaaagatgctactcactaa

SEQ ID NO: 31541 - protein, 537 aa, Pyrococcus abyssi
MTKFIFVTGGVVSGLGKGITSASIGLLMKARGYKTTNIKIDPYINYDAGTMNPYQHGEVFVLDDGGEVDLDLGNYERFLDTSLTFDHNITTGKVYSTVIEKERRGEYLGATVQVIPHITDEIKRRIREIARNYDIVVVEIGGTVGDIESMPFLEAARQMQLEEGRENVAFVHVTYVPKLRVVGEQKTKPTQHSVKELRSLGIQPDAIVARSEDPLEEGARKKISLFTNVPEEAVISAYDVEDTYEVPLLLEREGLGKYLVKRLGLEDREPDLREWEKMVAKYKALQDSVEIAIVGKYVKLTDSYLSIKEALKHASVSNEVKVKIRWIEAEDIEEHGTKLLEGVDGIIVPGGFGARGAEGKIMTIRYARENDIPFLGICFGFQLTVVEFARNVLGMKGAHSTEIDPQTPYPVVDLMPEQRNLDKLGGTMRLGAYPVKIKKGTLAYELYKKDLVYERHRHRWEVNPDYIEAFEKAGLVFSGIAGDDERRMEILELPDKRYFIATQFHPEFKSRPMKPAPVFHGLVKAAKEYKQEKDATH

SEQ ID NO: 31542 - DNA, 1593 bp, Pyrobaculum aerophilum
  CDS (1)..(1593): transl_table=11
gtgccgaagttaataattgtcactggcggcgtgatgtccggcgttggcaagggagttgtagtcgctagtattggaagaattctcagggcccggggcttgtcggtaaatgccgtgaaaatagatccctatataaacgtagacgcggggactatgaacccatacgcccacggagaggtgtttgtcacttacgacgggggagagacagacctagatctcggccattacgagcgttttctagacgtggagctctccaagaggaataacataacgtcggggcagatctacctcacagtaattgagaaggagaggcggggagagtatttgggccagacggtgcaactcatacctcatgtaactgatgagataaagaggaggattgtggaggcctccggcggttacgacgtgactttagtagagataggcgggacggtgggagactacgaacagctcccgtttttggaagcggctaggcagttggggcttgagctgggagaggacgtggtttttatacacgtggcgtgggtcccgcttttaaaaatcacgggagagtttaagactaagccccttcagcacagcgtcgctgagcttaggcgctatggcatacagcccgacgccgttgtggtgaggtctgaaaagcccatagacgccaactctataaagaaaatagcgcttttcgcccacgtgcctcagtgggctatttttaattcatacgacgttgatactatataccgcgttcccttaatactagaacagcagggattgggggatttcttgactaggaggctccgccttccgtcgcgctcccccgagtatagagactgggaggagtttttatccaagctgtctgctcctaagtacagaatttccgtagggatgtgcgggaaatacgtggagctccctgacgcgtatttgagcattgtggaggctttaaaacacgcaggcgccgcgcttgacgcgaggccggagctagtgtggataaactcggtggaggtagagaaaaacccggacatactccgtaaattagatctcgacgccatagtggtactgcccggttttggcaaaaggggcactgagggcatgatcgagtgcattagacacgcccgcatggagaaaataccgtttctcggcatttgtttcggcatgcaactggccgtggtggagttcgccagaaacgtcttgggactaaagggggccaactccacagagcttgatccagagacgccccacccagttgtacacttggcgcctgaacagcgggaggtagacgtcttgggcgggagcatgatactgggcaatagggaggtggaaatagtgccgggcactctcgccgcatcgctctacggtgtctctgtaatcacagagaggcacagacaccgctacgaggtgaatttgtcttatctccccaaatttacagaggcggggttggtagtgtcggggtggaggagggatattaagagagtggaaattattgagctgcccggacatccctattttatagccacgcagttccacccggagtttaagtccaggcccgccaagccccggcctgtttttctcgggcttttaaaagcggcgttattcgctaagaggtga

SEQ ID NO: 31543 - protein, 530 aa, Pyrobaculum aerophilum
MPKLIIVTGGVMSGVGKGVVVASIGRILRARGLSVNAVKIDPYINVDAGTMNPYAHGEVFVTYDGGETDLDLGHYERFLDVELSKRNNITSGQIYLTVIEKERRGEYLGQTVQLIPHVTDEIKRRIVEASGGYDVTLVEIGGTVGDYEQLPFLEAARQLGLELGEDVVFIHVAWVPLLKITGEFKTKPLQHSVAELRRYGIQPDAVVVRSEKPIDANSIKKIALFAHVPQWAIFNSYDVDTIYRVPLILEQQGLGDFLTRRLRLPSRSPEYRDWEEFLSKLSAPKYRISVGMCGKYVELPDAYLSIVEALKHAGAALDARPELVWINSVEVEKNPDILRKLDLDAIVVLPGFGKRGTEGMIECIRHARMEKIPFLGICFGMQLAVVEFARNVLGLKGANSTELDPETPHPVVHLAPEQREVDVLGGSMILGNREVEIVPGTLAASLYGVSVITERHRHRYEVNLSYLPKFTEAGLVVSGWRRDIKRVEIIELPGHPYFIATQFHPEFKSRPAKPRPVFLGLLKAALFAKR

SEQ ID NO: 31544 - DNA, 1638 bp, Pyrococcus furiosus; identical to SEQ ID NO: 31052
  CDS (25)..(1638): transl_table=11

SEQ ID NO: 31545 - protein, 537 aa, Pyrococcus furiosus
MTKYIFVTGGVVSGLGKGITSASIGLLMKARGYKTTNIKIDPYINYDAGTMNPYQHGEVFVLDDGGEVDLDLGNYERFLDTELTFDHNITTGKVYSTVIEKERRGEYLGATVQVIPHITDEIKRRIREIAKDYEVVVVEIGGTVGDIESMPFLEAARQMQLEEGRDNVAFVHVTYVPKLKVVGEQKTKPTQHSVKELRSLGIQPDAIVARSEDPLEEAARKKISLFTNVPEEAVISAYDVEDTYEVPLLLEREGLGKYLTKRLKLEDREPDLKDWEKMVAKYKALTETVEIAIVGKYVKLQDSYLSIKEALKHASVSNEVKVKIRWIEAEDVETHGTKLLEGVDGIIIPGGFGARGAEGKIQAIRYARENDIPFLGICFGFQLTVVEFARNVLGMKGAHSTEIDPQTPYPVVDLMPEQRNLDRLGGTMRLGAYPVKIKKGTLAYSLYNKELVYERHRHRWEVNPNYIEALEKAGLVFSGVAGDDERRMEILELPDKRYFIATQFHPEFKSRPMRPAPVFHGLVRAAKEYKQEKNVTH

SEQ ID NO: 31546 - DNA, 1674 bp, Pyrococcus horikoshii
  CDS (61)..(1674): transl_table=11
atgaaatttaaattatcaaagaaacaaaaggttttaaattctccaatccacctctcaactatgacaaagttcatctttgtaaccggtggggttgtaagtgggcttggaaagggtattactagtgcttcaataggactcttaatgaaagcaagagggtataaaactacaaatataaaaatagatccctacataaactacgatgccggaacgatgaacccctatcagcatggggaggtcttcgttcttgatgatggaggggaagtagacctagacctagggaactatgaaagatttctagatacgaacttaacctttgaacacaacatcacaacgggaaaagtgtactcaacggtcatagagaaggagagaagaggggaatatctcggggccacagtacaggtgattccccatattactgatgagataaagaggagaattagggagatcgcaaaggactatgacatagtggttgttgaaataggtggaacggttggggatatagagagcatgcctttccttgaagcagcgaggcaaatgcaacttgaggagggaagagagaacgtagccttcgttcatgtaacttacgtaccaaagctgaaggtagttggtgagcagaaaacaaaaccaactcaacacagcgttaaagagcttaggagccttggaatacaaccggatgcaatagttgcaaggagtgaagatcccttagaagaggaggccaggaaaaaaattagcctcttcacgaacgttccaagggaagccgtagtaagtgcctacgatgtagaggatacgtatgaagtacccctactccttgagagggaagggttaggaaagtacctaataaagaggttgaagttagaagatagggaaccggatctaagggaatgggaaaagatggttgctaagtacaaagccttaaaggaaactgtcgaaattgccatagtcggaaagtacgtcaaactaacagattcatatctaagcataaaagaagccttaaagcatgcaagcgttagcaatgacgttaaggttaagataaggtggatagaagcagaagacatagaagagcatggaactaagttacttgaaggtgttgatgggataatagttcctggggggtttggagctagaggggctgaagggaaaataatgacgattaagtatgcaagggagaacgatatcccattcttaggcatatgctttggtttccaacttaccgttgtcgagtttgcaaggaatgtcctcgggatgaaaggggcccattcgacagagatagatccccaaaccccttatcccgttgttgatctgatgccagagcagagaaacttggaaaagctgggaggaaccatgaggctcggagcatacccagtaaagataaaaaagggaacccttgcgtataggttatacaaaaaagaactcgtctacgagagacatagacacagatgggaggtaaatccagactacattgaagcttttgaaaaagctggattagtgtttagtggagttgcaggagatgatgaaaggagaatggaaattctagagctaccagataagaggtacttcatagcaactcagttccacccagaatttaagtcgagaccaatgaggcctgctccagtctttcatggactcgttagggcggcaaaagaatacaagcaggagaaaaatgctactaactaa

SEQ ID NO: 31547 - protein, 537 aa, Pyrococcus horikoshii
MTKFIFVTGGVVSGLGKGITSASIGLLMKARGYKTTNIKIDPYINYDAGTMNPYQHGEVFVLDDGGEVDLDLGNYERFLDTNLTFEHNITTGKVYSTVIEKERRGEYLGATVQVIPHITDEIKRRIREIAKDYDIVVVEIGGTVGDIESMPFLEAARQMQLEEGRENVAFVHVTYVPKLKVVGEQKTKPTQHSVKELRSLGIQPDAIVARSEDPLEEEARKKISLFTNVPREAVVSAYDVEDTYEVPLLLEREGLGKYLIKRLKLEDREPDLREWEKMVAKYKALKETVEIAIVGKYVKLTDSYLSIKEALKHASVSNDVKVKIRWIEAEDIEEHGTKLLEGVDGIIVPGGFGARGAEGKIMTIKYARENDIPFLGICFGFQLTVVEFARNVLGMKGAHSTEIDPQTPYPVVDLMPEQRNLEKLGGTMRLGAYPVKIKKGTLAYRLYKKELVYERHRHRWEVNPDYIEAFEKAGLVFSGVAGDDERRMEILELPDKRYFIATQFHPEFKSRPMRPAPVFHGLVRAAKEYKQEKNATN

SEQ ID NO: 31548 - DNA, 1602 bp, Pyrococcus kodakaraensis
  CDS (1)..(1602): transl_table=11
atgacgaagttcatatttgtcacgggtggtgttgttagcggtctcggaaagggcatcaccagcgcttctataggcatgctcttcaaggctcgcggcttcaggacgacgaacatcaagatagacccctacctcaactacgacgcggggacgatgaacccctaccagcacggtgaagtcttcgtcctcgacgacgggggagaggttgacctcgacctcggcaactacgagcgctttttggacaccagtttgagcttcgaccacaacataaccaccggaaaggtctattctgcagtcatcgagaaggagcgtaaaggagagtacctcggagccactgtccaggtcataccgcacataaccaacgagatcaaggagcgcataaggagaatagccagggactacgacgttgttgtggtcgagataggtggaacggtcggcgacatcgagagcatgcccttccttgaggcagctagacagatgcagatagaggagggcagggagaacgtcgccttcgtccacgttacctacgtccccaggctgagggtcgtcggcgagcagaagacaaagccaacccagcacagcgtcaaggagctgcgctctctcggaatacagcctgacgccattgtggcccgctcagaggatccgctggaagattcagcgaggaggaagataagcctgttcaccaacgtcccagaagaggccgtcataagcgcctacgatgtcgaagatacttatgaagtccctctgatgctcgaaaaggagggcctgcccgcttacctcgccaggaggctcggccttcccgagagagaacccgacttggaagcctggcgcgagatggtggagaagtacaagtccctcaccgacacggtcgagatagcgatagtcggcaagtacgtcaagctggctgactcctacctgagcatcaaggaggcgctgaagcactccagcgtggcgaacgacgtcaaggtaaagataaggtggattgaggccgaagacgttgagaggcagggagttaagctccttgagggcgttgatgggataatcgtgcccggaggcttcggggctaggggtacagagggcaagatgatggcgataaggtacgcgagagaaaataacatcccgttcctcggcatctgcttcggcttccagcttaccgttgttgagttcgcccgcaacgtcctcggacttgagggggcacattcaactgagatagaccctcagacaccctatccggttgttgacctgatgccggagcagagggaccttgacaggctcggcggcaccatgaggcttggggcatatccagtccacatcaagccgaacaccctcgcgagaaggctttacggcagggagatagtctacgaaaggcaccgccaccgctgggaggttaacccggactacgttgagaagttcgaggaggctgggcttgtcttcagcggcatagccggagacgacgagagaaggatggagatactcgaacttccgggacacagctacttcatagccacccagttccatccggagttcaagtcgagaccgatgaggccagctccagtcttcaggggtctcgttgaagcggcaaagaaaaagaagtatggaagctaa

SEQ ID NO: 31549 - protein, 533 aa, Pyrococcus kodakaraensis
MTKFIFVTGGVVSGLGKGITSASIGMLFKARGFRTTNIKIDPYLNYDAGTMNPYQHGEVFVLDDGGEVDLDLGNYERFLDTSLSFDHNITTGKVYSAVIEKERKGEYLGATVQVIPHITNEIKERIRRIARDYDVVVVEIGGTVGDIESMPFLEAARQMQIEEGRENVAFVHVTYVPRLRVVGEQKTKPTQHSVKELRSLGIQPDAIVARSEDPLEDSARRKISLFTNVPEEAVISAYDVEDTYEVPLMLEKEGLPAYLARRLGLPEREPDLEAWREMVEKYKSLTDTVEIAIVGKYVKLADSYLSIKEALKHSSVANDVKVKIRWIEAEDVERQGVKLLEGVDGIIVPGGFGARGTEGKMMAIRYARENNIPFLGICFGFQLTVVEFARNVLGLEGAHSTEIDPQTPYPVVDLMPEQRDLDRLGGTMRLGAYPVHIKPNTLARRLYGREIVYERHRHRWEVNPDYVEKFEEAGLVFSGIAGDDERRMEILELPGHSYFIATQFHPEFKSRPMRPAPVFRGLVEAAKKKKYGS

SEQ ID NO: 31550 - DNA, 1653 bp, Ralstonia eutropha
  CDS (1)..(1653): transl_table=11
atgaccaaattcgtcttcgtcaccggtggcgtcgtctcttctctcggcaagggcatcgctgccgcctcgctcgcggctattctcgagtcgcgcggcctcaaagtcaccctcctcaagctagatccctacatcaacgtcgatcccggcacgatgagccccttccagcatggcgaggtgtttgtcacggaagacggtgcggaaaccgacctcgatcttggccactacgagcgcttcgtctcggccaagatgcgcaagtcgaacaacttcactacgggccaaatctacgaatcggtgatccgcaaggagcgccgcggcgaatacctgggcaagaccgtgcaggtgattccgcatatcaccaacgagatccaggcctttatcgagcgtggcgctgcagcgtcgcacgacggcaaggctgatgtggcgctggtggaaatcggcggcaccgtcggtgacatcgaatcgctgccgttcctggaagccgcgcgccagatgagcctgcgcatgggccgcaaccgctgcgcgttcgtgcacctgaccctggtgccgttcattgccagcgccggcgagctgaagaccaagccgacccagcactcggtgcagaagctgcgtgaaatcggcatttcgccgaccgcgctgctgtgccgcgctgaccgtccgatcccggacgacgagcgcgccaagatttcgctgttcgccaacatcccgcaagacgccgtgatttcggtgtgggatgccgacagcatctacaagatcccgcagatgctcaacgagcagggcctggaccgcctgatctgcgaagagctgcgcctggacccgaagccggccgacctgtcgatgtggcagaagctggtgaacgcgcaggaaaaccccgagcacgaaatcaccatcggcatggtcggcaagtacgtcgacctgaccgagtcgtacaagtcgttgatcgaggcgctgcgccacgccggcatgcacaccgccacgcgcgtgaacatcgagtacatcgattccgaagaactcgaatcgggccatctcgaagtgctggccccgctggacgccatcctggtgccgggcggtttcggcaagcgcggcacggaaggcaagatccgcgcgatccagtacgcccgcgagaacaaggttccgtacctgggcatctgcctgggcatgcagctcgccgtgatcgagttcgcccgtcacgtggctggcatgaccgacgccaactcgaccgagttcaacctggaaaccgaacatccggtggtcgcgctgatcacggagtgggtggaccgcgaaggcaaggtcgagcagcgttcggccgaatccgacctgggcggcaccatgcgcctgggtgcccaacgcgtaccggtgaaggaagggaccaaggcggcgtcgatctacggcgcggaggtcaacgagcgtcaccgtcaccgctacgaagtcaacaaccactatgtgccgacgctggaaaacgccggcatggtgatttcggcccgtaccccgaccgagaacctgcccgagatgatggaactgccggggtcgatgcacccgtggttcgtcggcgtgcagttccacccggaattcacctccacgccgcgtgacggccatccgctgttcaaggcctacgtcgaagccgcgctggctggccagcagcgcaagggcgcctga

SEQ ID NO: 31551 - protein, 550 aa, Ralstonia eutropha
MTKFVFVTGGVVSSLGKGIAAASLAAILESRGLKVTLLKLDPYINVDPGTMSPFQHGEVFVTEDGAETDLDLGHYERFVSAKMRKSNNFTTGQIYESVIRKERRGEYLGKTVQVIPHITNEIQAFIERGAAASHDGKADVALVEIGGTVGDIESLPFLEAARQMSLRMGRNRCAFVHLTLVPFIASAGELKTKPTQHSVQKLREIGISPTALLCRADRPIPDDERAKISLFANIPQDAVISVWDADSIYKIPQMLNEQGLDRLICEELRLDPKPADLSMWQKLVNAQENPEHEITIGMVGKYVDLTESYKSLIEALRHAGMHTATRVNIEYIDSEELESGHLEVLAPLDAILVPGGFGKRGTEGKIRAIQYARENKVPYLGICLGMQLAVIEFARHVAGMTDANSTEFNLETEHPVVALITEWVDREGKVEQRSAESDLGGTMRLGAQRVPVKEGTKAASIYGAEVNERHRHRYEVNNHYVPTLENAGMVISARTPTENLPEMMELPGSMHPWFVGVQFHPEFTSTPRDGHPLFKAYVEAALAGQQRKGA

SEQ ID NO: 31552 - DNA, 1650 bp, Ralstonia metallidurans
  CDS (1)..(1650): transl_table=11
atgaccaaattcgtcttcgtcaccggtggcgtcgtctcttctctcggcaagggcatcgctgctgcttcgctcgcggctattctcgagtcgcgcggcctcaaagtcaccctcctcaagctcgatccctacatcaacgtcgatcccggcacgatgagccccttccagcatggcgaggtgttcgtgaccgaagatggcgcggaaaccgacctcgacctggggcactacgagcggttcgtgtcggccaagatgcggaagtcgaacaacttcacgactggccagatctacgaatcggtgatccgcaaggaacgccgcggtgagtacctcggcaagaccgttcaggtcattccccatatcacgaacgaaatccaggctttcgtcgagcgtggcgctgccgcgtcgcacgacggcaaggccgacgtggcactggtggagatcggcggcacggtgggtgacatcgagtcgctgccgttcctggaagccgcgcgccagatgagcctgcgccttggccgcaatcactgcgcgttcgtgcacctgacgctggtgccgttcatcgccagcgccggcgagctcaagaccaagccgacccagcactcggtgcagaagctccgcgaaatcggcatttcgccgaccgcgctgctgtgccgcgccgaccgcccgattccggacgacgagcgggccaagatttcgctgttcgccaacatcccgcaggaagccgtgatctcggtctgggatgccgacagcatctacaagattccgcagatgctcaacgagcagggcctcgaccgcctgatctgcgaggaactgcgtctggacccgaagccggctgacctgtcgatgtggcagaagctggtcaaggcacaggaaaaccccgagcacgagatcacgatcggcatggttggcaagtacgtcgacctgaccgagtcgtacaagtcactgatcgaggcgctgcgccacgctggcatgcataccgccacgcgcgtgaacatcgagtacatcgattcggaagaactcgagtcgggtcacctcgaagtgctgcagccgctggatgccatcctggtaccgggcggtttcggcaagcgcggtaccgaaggcaagatccgcgcgatccagtatgcccgcgagaacaaggtgccgtacctgggcatctgcctgggtatgcagctcgccgtgatcgaattcgcgcgtcacgttgccagcatgggcgacgccaattcgaccgaattcaacctcgacacggaacacccggtagtcgcgctgatcaccgagtgggtcgatcgcgacggcaaggtggaacagcgttcggcagactccgatctcggcggcacgatgcgcctgggcgcccagcgggtacccatcaagaccggcaccaaggcctcgcagatctatggcgccgaagtcaacgagcgtcatcgtcaccgctacgaagtcaacaaccactacgtgccggagctggaaaaggctggcatggtgatctcggcccgcacgccgaccgagaacctgccggagatgatggaactgccggaatcgatgcacccgtggttcgtcggcgttcagttccacccggaattcacctcgacgccgcgtgatggccacccgctgttcaaggcctacgtggaagccgcgctcgccgcgcaacgccaaggcgcctga

SEQ ID NO: 31553 - protein, 549 aa, Ralstonia metallidurans
MTKFVFVTGGVVSSLGKGIAAASLAAILESRGLKVTLLKLDPYINVDPGTMSPFQHGEVFVTEDGAETDLDLGHYERFVSAKMRKSNNFTTGQIYESVIRKERRGEYLGKTVQVIPHITNEIQAFVERGAAASHDGKADVALVEIGGTVGDIESLPFLEAARQMSLRLGRNHCAFVHLTLVPFIASAGELKTKPTQHSVQKLREIGISPTALLCRADRPIPDDERAKISLFANIPQEAVISVWDADSIYKIPQMLNEQGLDRLICEELRLDPKPADLSMWQKLVKAQENPEHEITIGMVGKYVDLTESYKSLIEALRHAGMHTATRVNIEYIDSEELESGHLEVLQPLDAILVPGGFGKRGTEGKIRAIQYARENKVPYLGICLGMQLAVIEFARHVASMGDANSTEFNLDTEHPVVALITEWVDRDGKVEQRSADSDLGGTMRLGAQRVPIKTGTKASQIYGAEVNERHRHRYEVNNHYVPELEKAGMVISARTPTENLPEMMELPESMHPWFVGVQFHPEFTSTPRDGHPLFKAYVEAALAAQRQGA

SEQ ID NO: 31554 - DNA, 1665 bp, Ralstonia solanacearum
  CDS (1)..(1665): transl_table=11
atgaccaagttcgtattcgtcaccggtggcgttgtgtcctcgctcggcaagggcatcgccgccgcctcgctcgcggccatccttgagtcgcgcggcctcaaagtcaccctcctcaaactcgatccctacatcaacgtcgacccgggcacgatgagcccgttccagcacggcgaggtgttcgtgacggaggacggtgcagaaaccgacctcgatcttggccactacgagcgcttcgtctcggccaagatgcgcaaggccaacaacttcaccaccggccagatctacgaatccgtgatccgcaaggagcgtcgcggcgagtatctcggcaagacggtgcaggtcattccgcacatcaccaacgagatccaggccttcatcgagcgtggcgccaaggcctcgcacgatggcaaggcagacgtggcgatcgtcgagatcggcggcacggtgggcgacatcgagtcgctgccgttcctggaagccgcgcggcagatgagcctgcgcctgggccgcaaccaggcggcgttcgtgcatctgacgctggtgccgttcatcgccagcgccggcgagctcaagaccaagccgacccagcactcggtgcagaagctgcgcgagatcggcgtccagccgaccgcgctgctgtgccgcgccgaccgccccatccccgatgacgagcgcgcgaagatctcgctgttcgccaacatgccgcaggacgcggtgatctcggtgtgggacgtcgacaccatctacaagatcccgcagatgctcaacgagcagggcctcgaccgcatcatctgcgaggagctgcgcatcgatgcaccgccggccgacctgtccatgtggtcgcgcatggtgcacacgctggagaacccgcagcacgagatcaccatcggcatggtcggcaagtatgtcgacctgaccgagtcgtacaagtcgctgatcgaggcgctgcgccatgccgggctgcacacctcgacgcgcgtcaacatcgagtacatcgattccgaagagctggagtcgggccatacgcaggtgctggaatcgctcgacgcgatcctggtgccgggcggcttcggcaagcgcggcacggaaggcaagatccgcgcgatccagtacgcccgcgagaagactgtgccgtacctgggcatctgcctggggatgcagctggccgtcatcgagttcgcccgccacgtggccggcatgcaggacgccaacagcacggaattcaacctcgagaccgagcatccggtggtggcgctgatcaccgaatggcaggatcgcgacggccgcgttgaaaaacgctcggccgactccgacctgggcggcaccatgcgcctgggcgcgcagcgcgtgccggtccagaccggcaccaaggcgtcgcagatctatggtgctgaggtcaacgagcgccaccgtcatcgctacgaagtgaacaaccactacgtgccgcagctggagaagtccgggatgatcatctcggcgcgcacgccgtcggaaaacctgccggaaatgatggagctgccgggcgcgatgcacccgtggttcgtcggcgtgcagttccacccggaattcacctcgacaccgcgcgacggccacccgctgttcaaggcctatgtggaagccgcgctggcgcatcgccagcgccaggcacaacgcgcggtcgcctga

SEQ ID NO: 31555 - protein, 554 aa, Ralstonia solanacearum
MTKFVFVTGGVVSSLGKGIAAASLAAILESRGLKVTLLKLDPYINVDPGTMSPFQHGEVFVTEDGAETDLDLGHYERFVSAKMRKANNFTTGQIYESVIRKERRGEYLGKTVQVIPHITNEIQAFIERGAKASHDGKADVAIVEIGGTVGDIESLPFLEAARQMSLRLGRNQAAFVHLTLVPFIASAGELKTKPTQHSVQKLREIGVQPTALLCRADRPIPDDERAKISLFANMPQDAVISVWDVDTIYKIPQMLNEQGLDRIICEELRIDAPPADLSMWSRMVHTLENPQHEITIGMVGKYVDLTESYKSLIEALRHAGLHTSTRVNIEYIDSEELESGHTQVLESLDAILVPGGFGKRGTEGKIRAIQYAREKTVPYLGICLGMQLAVIEFARHVAGMQDANSTEFNLETEHPVVALITEWQDRDGRVEKRSADSDLGGTMRLGAQRVPVQTGTKASQIYGAEVNERHRHRYEVNNHYVPQLEKSGMIISARTPSENLPEMMELPGAMHPWFVGVQFHPEFTSTPRDGHPLFKAYVEAALAHRQRQAQRAVA

SEQ ID NO: 31556 - DNA, 1629 bp, Rhizobium leguminosarum bv
  CDS (1)..(1629): transl_table=11
atggcgcgatacgtattcatcactggcggcgtggtttcctctctcggaaaaggaattgcggccgcggctctcggagcgttactgcaggcccgtggatatcgggttcggcttcgcaagctcgacccctatctgaacgtggatccgggcacgatgagcccaacccagcacggcgaggtcttcgtcaccgacgacggcgcggaaaccgatctcgatctcggtcactacgaacgcttcacggggcgttcggcgaccaagaccgacaacatcaccaccggccgcatctacaagaacatcatcgacaaggaacggcgcggcgactatctcggcgcgacggtgcaggtcattccgcacgtcaccaatgagatcaaggatttcgtcatcgagggcaatgacgactacgacttcgtcatctgcgagatcggcggcacggtcggcgacatcgaagcgatgcccttcatggaggcgatccgccagctcggaaacgacctgccgcggggcaccgccgtctacgttcacctgacgctgatgccctatattccggcggccggcgagctcaagaccaagccgacgcagcattcggtgaaggaactgcaggcactcggcattcatcccgatatcctgctggtgcgggcggaccgcgaaattccggaagccgaacgccgtaagctctcattgttctgcaacgttcgcccgtctgccgtcatccaggcgctcgacgtcgccaacatctacgatgtcccgatagcctaccacaaggaaggcctcgacgacgaggtgctcgcggcctttggtatcgagccggcgccgaagccgcggctcgacccgtgggaagaggtctgcaaccgcatccgcacgccggagggcgaggtgacgatcgcgatcgtcggcaaatataccggcctcaaggatgcctataagtcgctgatcgaggcgctgcatcacggcggcatcgccaatcgcgtcaaggtcaatcttgaatggatcgagtccgaggtcttcgaaaaggaagatccggcgccctatctcgaaaaggtgcacggcatcctcgtgcccggcggcttcggtgaacgcggttcggaaggcaagatccacgctgcccgctttgcccgcgagcgcaaggtgccgtatttcggcatctgcttcggcatgcagatggcggtcatcgaggcggcgcgcaatctcgccgacgtgtccggtgcctcctcgaccgaattcggtccgacgaaagagccggtggtcggcctgatgaccgaatgggtcaagggcaacgagttgcagaagcgcacggcagccggcgatctcggcggcacgatgcgcctcggtgcctacaaggcggcgctgaagaagggcacgaagatctcggatatctacggttccaccgatatttccgagcgtcaccgccaccgctacgaggtcaatgtcgactacaaggaccggcttgaaaactgcggcctcgtcttctccggcatgtcgcctgatggtgtgctgccggagacgatcgaatatcccgatcacccctggttcatcggcgtacagtaccacccggaactgaaaagccggccgctcgacccgcatccgctgtttgccagcttcatagaagcggcgacggaacagagccgtctcgtctga

SEQ ID NO: 31557 - protein, 542 aa, Rhizobium leguminosarum bv
MARYVFITGGVVSSLGKGIAAAALGALLQARGYRVRLRKLDPYLNVDPGTMSPTQHGEVFVTDDGAETDLDLGHYERFTGRSATKTDNITTGRIYKNIIDKERRGDYLGATVQVIPHVTNEIKDFVIEGNDDYDFVICEIGGTVGDIEAMPFMEAIRQLGNDLPRGTAVYVHLTLMPYIPAAGELKTKPTQHSVKELQALGIHPDILLVRADREIPEAERRKLSLFCNVRPSAVIQALDVANIYDVPIAYHKEGLDDEVLAAFGIEPAPKPRLDPWEEVCNRIRTPEGEVTIAIVGKYTGLKDAYKSLIEALHHGGIANRVKVNLEWIESEVFEKEDPAPYLEKVHGILVPGGFGERGSEGKIHAARFARERKVPYFGICFGMQMAVIEAARNLADVSGASSTEFGPTKEPVVGLMTEWVKGNELQKRTAAGDLGGTMRLGAYKAALKKGTKISDIYGSTDISERHRHRYEVNVDYKDRLENCGLVFSGMSPDGVLPETIEYPDHPWFIGVQYHPELKSRPLDPHPLFASFIEAATEQSRLV

SEQ ID NO: 31558 - DNA, 1629 bp, Rhizobium loti
  CDS (1)..(1629): transl_table=11
atggcgcgatatgtattcatcacaggcggcgtggtttcctcacttggaaaaggcatagccgcagcggcccttggggctctcctgcaggcgcgaggttatcgcgcacgcatcaaaaaactcgacccgtatctcaatgtcgatccgggcacgatgtcgccgtaccagcatggcgaggtgttcgtcaccgatgacggtgcggagaccgatctcgatcttggccattacgagcgcttcaccggccgctcggccaatcagcaagacaacatcaccaccggccgcatttacaaaaacatcatcgagcgtgagcggcgcggcgactatctcggcgcgaccgttcaggtcattccgcatgtcaccgacgagatcaagaatttcgtcctcaacggcaatgacgactacgatttcgtgctgtgcgagatcggcggcacggtcggcgacatcgaggccatgccgttcctcgaggcgatccgccagctcggcaacgatctgccgcgcaacaatgccgtctacgtgcatctgaccctgatgccctacatcccgacggcgggtgaactgaagaccaagccgacccagcattcggtcaaggaactgcgcggcatcggcatcgcgcccgacatcctgctggtccgtgcggaccgcgccattcccaaggaagagcgcagaaagctgtcgctgttctgcaatgtcagggaaagcgccgtcatccaggcgctcgatgtgccgcacatctacgacgtgccgatggcctaccacaaggaagggctcgattcggaggtgctggctgccttcggcatcgatccggcgcctaagccgcgcatggagccctggcagaaagtgtcggaccgcatccacagcccggaaggcgaggtgaccatcgccatcgtcggcaaatacaccggcctcaaggatgcctacaaatcgctgatcgaagcgctttcgcatggcggcctggccaatcacgtcaaggtcaagctcgactggatcgaatcggagatcttcgagaaggaggatccgacgccgtggctggaaaaggtgcatggcatcctggttccgggcggctttggcgaacgcggctccgaaggcaagatcctggcggcgaaattcgcgcgcgagcgcaaggtgccgtatttcggcatctgcttcggcatgcagatggcctgcatcgaggcggcgcggtcgctggctggcgtcgagcatgcctcctcgaccgagttcggcccgaccgaggagcccgttgtcggcctaatgaccgaatggctgaagggcaacatgctggagaagcggcgtgagaccggcgacctcggtggcacaatgcgtctcggtgcctatcaggcggacctcgccaagggctccaagatcgccgagatctatggcgatacgcagatttccgagcgccaccgccaccgctacgaggtcaatatcgactacaaggagcggctggaggattgcggcctggtgtttgccggcatgtcgcccgatggcgtgctgccggagacggtcgaatatcccgaccatccgtggttcatcggcgtgcagtatcatcccgagctgaagagccggccactcgatccgcatccgctgttcgccagcttcatcgaagcggctgtggagcagtctcgcctggtgtag

SEQ ID NO: 31559 - protein, 542 aa, Rhizobium loti
MARYVFITGGVVSSLGKGIAAAALGALLQARGYRARIKKLDPYLNVDPGTMSPYQHGEVFVTDDGAETDLDLGHYERFTGRSANQQDNITTGRIYKNIIERERRGDYLGATVQVIPHVTDEIKNFVLNGNDDYDFVLCEIGGTVGDIEAMPFLEAIRQLGNDLPRNNAVYVHLTLMPYIPTAGELKTKPTQHSVKELRGIGIAPDILLVRADRAIPKEERRKLSLFCNVRESAVIQALDVPHIYDVPMAYHKEGLDSEVLAAFGIDPAPKPRMEPWQKVSDRIHSPEGEVTIAIVGKYTGLKDAYKSLIEALSHGGLANHVKVKLDWIESEIFEKEDPTPWLEKVHGILVPGGFGERGSEGKILAAKFARERKVPYFGICFGMQMACIEAARSLAGVEHASSTEFGPTEEPVVGLMTEWLKGNMLEKRRETGDLGGTMRLGAYQADLAKGSKIAEIYGDTQISERHRHRYEVNIDYKERLEDCGLVFAGMSPDGVLPETVEYPDHPWFIGVQYHPELKSRPLDPHPLFASFIEAAVEQSRLV

SEQ ID NO: 31560 - DNA, 1629 bp, Rhizobium meliloti
  CDS (1)..(1629): transl_table=11
atggcgcgatatgtattcatcactggcggcgtggtctcctccctcggaaaaggcatcgctgcggccgctcttggagcgttgctgcaggcgcgtggctaccgtgtgaggctgcgcaagctcgatccctacctgaacgtcgatccgggcaccatgagccccacccagcacggcgaggtgttcgtcaccgacgacggcgcggaaacggacctcgatctcgggcactacgagcgtttcacggggcgctcggcgaccaagaccgacaacatcaccacgggccggatctacaagaacatcatcgacaaggagcggcgtggcgactatctcggcgcgacggtccaggtgatcccgcacgtaacaaatgaaatcaagaacttcgtcaccgaaggcaatgaggactacgatttcgtcatctgcgaaatcggcggcacggtcggcgatatcgaggcgatgcccttcatggaggcgatccgccagctcggcaacgatctgccgcgcggcaccgccgtctatgtccatttgacgctgatgccctacattccggccgcgggcgagctgaagaccaagccgacccagcattccgtcaaagaactgcaggcgctcggcattcatccggacatcctgctcgtgcgcgccgaccgggaaatcccggaagcggaacgccgcaagctgtcgctcttctgcaatgtccgccagtccgcggtcatccaggcgctcgacgtcgcttcgatctatgacgtgccgatcgcctatcacaaggaagggctcgacaacgaagtgcttgccgccttcggcatcgagccggcgccgaagccgcgcatggaagcctgggaagatgtggcgcaccggatccgcacgccggaaggcgaggtgacgatcgcgatcgtcggcaaatataccggcctgaaggatgcctataagtcgctgatcgaggcgctctaccatggcggcatcgccaatcgcgtcaaggtcaagctcgagtggatcgagtcggaagtcttcgaaaaggaggacccggcgccctatctggaaaaggtccacggcattctcgttccgggcggcttcggcgaacgcggctcggaaggcaagatcaatgcggcgcgctttgcccgcgagcgcaaggtgccctatttcggcatctgcttcggcatgcagatggcggtcgtcgaagcggcgcgcaatctcgccggtatcgaaaaggcgtcttcgacggaattcggcccgaccaaggagccggtcgtcggcctgatgaccgagtgggtgaagggcaatgaactcgagaagcggtccgccgcgggcgatctcggcggcaccatgcgcctcggcgcctatcgcgcagcgttgaagcccgacacgaagatcgccgggatctatgggtcgcccgatatttccgagcgtcaccgccaccgctacgaggtcaatgtcgattacaagagccgactggaatcctgtggcctggttttctccggcatgtccccggacggcgttctgccggagacgatcgagtatcccgaccatccctggttcatcggcgttcagtaccatccggaactgaagtcgcgtccgctcgatccgcacccgctcttttcgagcttcatcgaggcagcgctcgaacagtcccggcttgtgtag

SEQ ID NO: 31561 - protein, 542 aa, Rhizobium meliloti
MARYVFITGGVVSSLGKGIAAAALGALLQARGYRVRLRKLDPYLNVDPGTMSPTQHGEVFVTDDGAETDLDLGHYERFTGRSATKTDNITTGRIYKNIIDKERRGDYLGATVQVIPHVTNEIKNFVTEGNEDYDFVICEIGGTVGDIEAMPFMEAIRQLGNDLPRGTAVYVHLTLMPYIPAAGELKTKPTQHSVKELQALGIHPDILLVRADREIPEAERRKLSLFCNVRQSAVIQALDVASIYDVPIAYHKEGLDNEVLAAFGIEPAPKPRMEAWEDVAHRIRTPEGEVTIAIVGKYTGLKDAYKSLIEALYHGGIANRVKVKLEWIESEVFEKEDPAPYLEKVHGILVPGGFGERGSEGKINAARFARERKVPYFGICFGMQMAVVEAARNLAGIEKASSTEFGPTKEPVVGLMTEWVKGNELEKRSAAGDLGGTMRLGAYRAALKPDTKIAGIYGSPDISERHRHRYEVNVDYKSRLESCGLVFSGMSPDGVLPETIEYPDHPWFIGVQYHPELKSRPLDPHPLFSSFIEAALEQSRLV

SEQ ID NO: 31562 - DNA, 1656 bp, Rhodopirellula baltica
  CDS (1)..(1656): transl_table=11
atgactaaacacatttttgttaccggcggcgttgtcagttctctcggcaaaggcctgaccagtgcatccataggcatggttctcgaacgccgcggactgcgggttcgaatgcagaaactggatccgtacatcaacgttgatccggggacgatgagtccctaccaacacggcgaggtttacgttttggacgatgggtccgaaaccgatctcgacctcggccactatgaacgattcacgtcgggcaagctgaatcgcgattgcaattacaccaccggacagatttatctttcggtgatcgaaaaagagcgacgaggccagttcctcggcaaaaccgttcaggtcatcccgcacgtcaccaacgaaatcaaacgcgtcatcaaacgcatgggcggcgatgacgtcgacgttgtgatcaccgagattggtggcacggtcggtgacatcgagagcctcccttttctcgaagcgattcgtcaattctcactcgatgccggtcgcgaaaattgcttgtacatgcacctgacattggtgccatacctgaaggccgctgacgaactgaaaaccaaaccgactcaacactcggtcggtcaactgcgtgaaatcggaattcaaccggacgtattggtttgccgctgcgaacaatcgatcagccgtgatgaccgagacaagattgctttgttctgcaacgtggaaccggaagcggtcatcgaagaaaaggacaaagacttttcgatctacgaagttccattgtcgctcgtcgacaacaaactcgacgagttgatcgtcaagaaactcgggctgacttcagcaggcagtttggacatgaccccgtggaatgacttgctgcatcgattgcgcaatccacggcacgaaatttcgatcgcggtcgtcggtaaatacgccgagcacaaagacgcatacaaatcgatctacgaatcactcgatcacgcgggcatgcaccatgacgcgcagatccgaatcggacgcattcaaagcagcgacattgaacgcgaaggtgctgagcgattgctgagtggattccacggcatccttgttccgggtggctttggcgaacgaggcgttgagggcaaggtccaagcgatccagtttgctcgcgagagaaacgtgccgttctttggcatttgcttgggcatgcaaacggcagtcatcgaatacggccgcaatgtgctgggactggaaaaagctcactcgaccgaatttgacaaagacacacctcatccggtcatttgtttgttggacgaacaacaaaacgtgatcgacttgggcggcacgatgcgtttgggaagccagccgtctcgattggtcgccgactcaaaagccatccaggcgtacggtcgcgaagagatcgacgaacgacaccgacaccgttacgaattcaacaatgagtatcgcaaggctttcgaagacgctggcatgcgtttcactggattgagccccgacggtgggttggttgaaatcgtcgaaatcgattcccacccgtggttcgtggcggctcaattccaccccgaattcaagagcaagccgttgaaatcgcatccgttgttcaccgattttatcgaagcagcgatcaaccgtcgcaaacaacgcgtaaccgaagaaattgcctcggagacagagaagccaaccgcttcctga

SEQ ID NO: 31563 - protein, 551 aa, Rhodopirellula baltica
MTKHIFVTGGVVSSLGKGLTSASIGMVLERRGLRVRMQKLDPYINVDPGTMSPYQHGEVYVLDDGSETDLDLGHYERFTSGKLNRDCNYTTGQIYLSVIEKERRGQFLGKTVQVIPHVTNEIKRVIKRMGGDDVDVVITEIGGTVGDIESLPFLEAIRQFSLDAGRENCLYMHLTLVPYLKAADELKTKPTQHSVGQLREIGIQPDVLVCRCEQSISRDDRDKIALFCNVEPEAVIEEKDKDFSIYEVPLSLVDNKLDELIVKKLGLTSAGSLDMTPWNDLLHRLRNPRHEISIAVVGKYAEHKDAYKSIYESLDHAGMHHDAQIRIGRIQSSDIEREGAERLLSGFHGILVPGGFGERGVEGKVQAIQFARERNVPFFGICLGMQTAVIEYGRNVLGLEKAHSTEFDKDTPHPVICLLDEQQNVIDLGGTMRLGSQPSRLVADSKAIQAYGREEIDERHRHRYEFNNEYRKAFEDAGMRFTGLSPDGGLVEIVEIDSHPWFVAAQFHPEFKSKPLKSHPLFTDFIEAAINRRKQRVTEEIASETEKPTAS

SEQ ID NO: 31564 - DNA, 1632 bp, Rhodopseudomonas palustris
  CDS (1)..(1632): transl_table=11
atggcgcggtacatcttcatcaccggcggcgtggtctcctcgctcggcaagggtctggcatcggcggcacttggtgcgctgctgcaggcgcgtggctacaaagtccgccttcgcaagctcgatccctatctcaacctcgatcccggaacgatgtcgccgtatcagcacggcgaagtgttcgtgaccgacgatggcgccgagaccgacctcgatctcggccactacgaacgtttcaccgggcggcctgcgaccaagcaggacaacatcaccaccggccggatctatcaggacatcctcaccaaggaacgccgcggcgactatctcggcgccaccatccaggtggtcccgcacgtcaccaacgcgatcaaggaattcatcgtcagcgacaacgacggctacgacttcgtgctggtcgagatcggcggcaccgtcggcgatatcgagggcctgccgttcttcgaggcgatccgccagatcaagaacgatctgccgcgcggcgacgtcatctacatccacctgacgctgctgccgtacatcccgagcgcgggcgaactgaagaccaagccgacccagcactcggtcaaggagctgcgctcgatcggcatccagcccgacatcctgctgtgccgcaccgaccggccgatcccgaaggaggagcggcgcaagctcgggctgttctgcaacgtccgcgaaagcgcggtgatcgaggcgcgcgacgccgacagcatctacgcggtgccggaagcgtatcacgccgccgggctcgacgacgaagtgctggcggcgtttgcgatcgccgccaaggagccgccgcagctcggacggtggcacgagatcaacgaacgtatccgcaatcccgaaggcgcggtgacgatcgcgatcgtcggcaagtacaccgggatgaaggacgcctataagtcgctgatcgaggcgcttagccacggcggcatcgccaacaaggtccaggtcaagctcgactggatcgagagcgaggtgttcgagaacgaagacccggcgccgttccttgaacacgtcaacggcatcctggtgccgggcggcttcggccagcgcggcgccgagggcaagatcgaggcggcgcgtttcgcccgcgagcgtaatgtgccgtatttcggcatctgcttcggcatgcagatggcggtgatcgaagcggcgcggaatctcgccggcatcgagcaggccaactccaccgaattcggcccgacgcccgagccgctggtcggcctgatgaccgaatgggtccgcggcaacgagcttgagaagcgcagccaggccggcgatctcggcggcacgatgcggctcggcgcctatccggcgacgctcaagcgcggtagccgggtgtcgcaggtctatggcggtgttaccgagatctcggagcgccatcgccaccgctatgaggtcaacaccgcctataaggaccggctcgaacagcacggcctgaagttctccggcatgtcgccggacggcgtgttgccggagatcgtcgagtacgaggatcacccctggttcatcggcgtccagttccaccccgaactgaaatcgcgcccgttcgacccgcacccgctgttcgcttcgttcgtccaagcggcgctggtgcagagccggctggtgtga

SEQ ID NO: 31565 - protein, 543 aa, Rhodopseudomonas palustris
MARYIFITGGVVSSLGKGLASAALGALLQARGYKVRLRKLDPYLNLDPGTMSPYQHGEVFVTDDGAETDLDLGHYERFTGRPATKQDNITTGRIYQDILTKERRGDYLGATIQVVPHVTNAIKEFIVSDNDGYDFVLVEIGGTVGDIEGLPFFEAIRQIKNDLPRGDVIYIHLTLLPYIPSAGELKTKPTQHSVKELRSIGIQPDILLCRTDRPIPKEERRKLGLFCNVRESAVIEARDADSIYAVPEAYHAAGLDDEVLAAFAIAAKEPPQLGRWHEINERIRNPEGAVTIAIVGKYTGMKDAYKSLIEALSHGGIANKVQVKLDWIESEVFENEDPAPFLEHVNGILVPGGFGQRGAEGKIEAARFARERNVPYFGICFGMQMAVIEAARNLAGIEQANSTEFGPTPEPLVGLMTEWVRGNELEKRSQAGDLGGTMRLGAYPATLKRGSRVSQVYGGVTEISERHRHRYEVNTAYKDRLEQHGLKFSGMSPDGVLPEIVEYEDHPWFIGVQFHPELKSRPFDPHPLFASFVQAALVQSRLV

SEQ ID NO: 31566 - DNA, 1629 bp, Rhodospirillum rubrum
  CDS (1)..(1629): transl_table=11
atgactcgtttcatctttatcaccggcggtgtggtttcttccctgggcaagggcttggcttcggcggcgcttggcgccctgttgcaggcgcgcggctataaggttcggctgcgcaagcttgatccctacctcaacgtcgatcccggcacgatgagcccgacccagcatggcgaggtcttcgttaccgatgacggggcggaaaccgaccttgatctgggccattacgagcgcttcaccggcgtttcggcccggcgcagcgacaatgtgacgacggggcgcatctattccgacgtcatcgcccgcgagcgtcgcggcgattatctgggcaagaccgttcaggtcattccccatgtgaccgacgccatcaaggaattcgccaccgccgacctcaccgacgaggatttcgtgctgtgcgagatcggcggcacggtcggcgatatcgaaagcctgcccttcctcgaggcgatccgccagctccgcaacgagatgggggccgagcgcagcctgatcattcacctgacgctgctgccctatatcccctcggccggcgaattgaagaccaagccgacccagcattcggtcaaggagctgctgggtctgggcattcagcccgatcttttgatgtgccgctccgaccggccgatcccggaagccgagcgcaacaagatctcgctgttttgcaacgtgcggcgcgaggcggtgatcccggcccttgacgtcgacaccatctatcaggtgcccgtcagctaccacgcccagggtcttgacgttcaggtctgccgccatttccacctgccgatgaacgaggatctcgacctcacgcgctggcagaccatcgtcgatcgcgttcgccatcccgaaggcgaggtgaccatcgccgtcgtcggcaagtataccagcctgatcgacagctataagtcgctggccgaggccctggtccatggcggcatcgccaatgcggtcaaggtcaagctggtctggctcgacagcgagatcttcgaacgcgaggacgccgttcattatctggaaggcgtcaacggcattctggtgcccggcggcttcggcgagcgcggctcggaaggcaagatcgaagcggcgcgcttcgcccgcgagcgctccgtgccttatttcggcatctgctttggcatgcagatggcggtgatcgaattcgcccgccatgtcgccggtctcccgggggccagttcctcggaattcggcgttcccgaggtgccgttggtcggcttgatgaccgaatgggtgcgcggcaacgaacgcgtggcgcgcggctcgggcgatgacctgggcggcaccatgcggctgggcgcctatgaatgccatctgcgggccctgagcaaggtgcgcgagatctatggcgccgaggtgatccacgagcgtcaccgccatcgctatgaggtcaatgtcaccttcaaggaccagcttgaggaaaaggggctggcgttttccggcatgtcgcccgatggggtgttgcccgagatcgtcgagcttcccgatcatccctggttcatcggcgtgcagttccaccccgaactgaaatccaagcccttcgatccccatccgctgttcacatcctttgtccaggcggcgattacccaatcccgcctggtctga

SEQ ID NO: 31567 - protein, 542 aa, Rhodospirillum rubrum
MTRFIFITGGVVSSLGKGLASAALGALLQARGYKVRLRKLDPYLNVDPGTMSPTQHGEVFVTDDGAETDLDLGHYERFTGVSARRSDNVTTGRIYSDVIARERRGDYLGKTVQVIPHVTDAIKEFATADLTDEDFVLCEIGGTVGDIESLPFLEAIRQLRNEMGAERSLIIHLTLLPYIPSAGELKTKPTQHSVKELLGLGIQPDLLMCRSDRPIPEAERNKISLFCNVRREAVIPALDVDTIYQVPVSYHAQGLDVQVCRHFHLPMNEDLDLTRWQTIVDRVRHPEGEVTIAVVGKYTSLIDSYKSLAEALVHGGIANAVKVKLVWLDSEIFEREDAVHYLEGVNGILVPGGFGERGSEGKIEAARFARERSVPYFGICFGMQMAVIEFARHVAGLPGASSSEFGVPEVPLVGLMTEWVRGNERVARGSGDDLGGTMRLGAYECHLRALSKVREIYGAEVIHERHRHRYEVNVTFKDQLEEKGLAFSGMSPDGVLPEIVELPDHPWFIGVQFHPELKSKPFDPHPLFTSFVQAAITQSRLV

SEQ ID NO: 31568 - DNA, 1644 bp, Rhodobacter sphaeroides
  CDS (1)..(1644): transl_table=11
atggcacgctacgtcttcatcaccggcggggtggtgtcttccctgggcaagggtctggcctcggcggcgctcggcgccctgctgcaggcgcggggcttctcggtcagactgagaaagctcgacccctatctcaacgtcgatcccggcacgatgtcgcccttcgaacatggcgaagtcttcgtgaccgacgacggcgccgagaccgatctcgatctcggccattacgagcgattcaccggcgtctcggcccgaaagacggactcggtctcgtccggccggatctattcgaacgtgctcgagaaggagcgccgcggcgactacctcggcaagaccatccaggtgatcccgcacgtcaccaacgagatcaaggacttcctccgggtgggcgaggatgaggtcgatttcatgctctgcgagatcggcggcacggtgggcgacatcgagggcctgcccttcttcgaagccatccgccagttcgcgcaggacaagccgcgcggccagtgcatcttcgtccacctgacgctcctgccctatgtctcggcctcgggcgagctgaagacgaagcccacccagcattcggtcaaggagctgcgctcgatcggcattgcgcccgacgtgctgctgctgcgctccgaacgcgcgatccccgagaaggagcgcgagaagatcgctctcttctgcaatgtccggaaagaggcggtgatcgccgcctacgacctcaagaccatctacgaggcgccgctcgcctatcaccgcgagggtctcgatcaggcggtgctcgacgccttcgggatctcgcccgcgccgaagcccaacctcgaccgctgggtcgatgtgatggaccggctcgagaatgccgagggcgaggtgcgcgtggccatcgtcgggaaatacacccagctcgaggatgcctacaaatccattgccgaggcgctgacccacggcgggatggcgaaccgcacccgcgtgcgggcggaatggatcaatgccgagctcttcgaacgggaggatccgagccccttcctcgagggcttccacgccatcctcgtgcccggcggcttcggcgagcgcggcaccgagggcaagatccgggcggcgcaatatgcgcgcgagaaggccatcccctatctcggcatctgtctggggatgcagatggcggtgatcgaggcggcgcggaacctcgcccaggtgaaggatgcgggctccgaggagttcgatcacgaggtgggcaagaagcggttcacgccggtggtctatcacctcaaggaatggattcagggcaaccatatcgtcgagcgcaagcatgacgacgacaagggcggcaccatgcggctcggcgcctacaccgccgcgctgacgccgggttcgcgcgtgtccgagatctaccacgcgaccgagatcgaggaacgccaccgccaccgctacgaggtggacgtgcgctaccgcgaggcgctggagggctgcgggctgaccttctccgggatgagcccggatgggcggttgcccgagatcgtcgagatcaaggatcatccgtggttcatcggcgtgcagttccaccccgagctcaagtcgaagcccttcgcgccgcatccgctgttcgccgatttcgtgcgcgccgcggtcgaggtgtcgcggctggtctga

SEQ ID NO: 31569 - protein, 547 aa, Rhodobacter sphaeroides
MARYVFITGGVVSSLGKGLASAALGALLQARGFSVRLRKLDPYLNVDPGTMSPFEHGEVFVTDDGAETDLDLGHYERFTGVSARKTDSVSSGRIYSNVLEKERRGDYLGKTIQVIPHVTNEIKDFLRVGEDEVDFMLCEIGGTVGDIEGLPFFEAIRQFAQDKPRGQCIFVHLTLLPYVSASGELKTKPTQHSVKELRSIGIAPDVLLLRSERAIPEKEREKIALFCNVRKEAVIAAYDLKTIYEAPLAYHREGLDQAVLDAFGISPAPKPNLDRWVDVMDRLENAEGEVRVAIVGKYTQLEDAYKSIAEALTHGGMANRTRVRAEWINAELFEREDPSPFLEGFHAILVPGGFGERGTEGKIRAAQYAREKAIPYLGICLGMQMAVIEAARNLAQVKDAGSEEFDHEVGKKRFTPVVYHLKEWIQGNHIVERKHDDDKGGTMRLGAYTAALTPGSRVSEIYHATEIEERHRHRYEVDVRYREALEGCGLTFSGMSPDGRLPEIVEIKDHPWFIGVQFHPELKSKPFAPHPLFADFVRAAVEVSRLV

SEQ ID NO: 31570 - DNA, 1776 bp, Rhodococcus sp
  CDS (1)..(1776): transl_table=11
ttgccacagtcacgcactcattcgcgtaccgctaccaagcacatcttcgtgagcggcggcgtcgcctcctcactcggcaagggcctcacagcctcgagcctcgggcaattgctgaccgcgcgaggaatgcgcgtgaccatgcagaaactggatccgtatctcaacgtcgatccgggcacgatgaacccgttccagcacggtgaggtcttcgtcaccgacgacggtgccgagaccgacctcgacgtcggccactacgagcgtttcctcgatcgcgacctgtccggtcaggcgaatgtcaccaccggccaggtgtattcgacggtcatcgccaaggagcggcgcggcgaatacctcggcgacaccgtccaggtgatcccgcacatcacggatgagatcaagagccggatcctcgccatgagcggaccggacctccagggacaccagccggacgtcgtcatcaccgagatcggtggcaccgtcggtgacatcgagtcgcagccgttcctcgaggccgcccgtcaggtgcgccacgacgtcggtcgcgacaatgtcttcttcctccacgtctccctggtgccgtacctggcgccgtcgggcgagctcaagacgaagcccacccagcactcggtcgcggcactgcgaaacatcggtatccagcccgacgcgctgatcctgcgctgcgaccgcgaggttcccccggcgctgaagaacaagatcgccctcatgtgcgacgtcgacgtcgacgggtgcatctcgacacccgacgcgccctcgatctacgacatcccgaaggtgctgcacagcgagggcctcgacgcctacgtggtgcgtcagctgggtctgccgttccgcgatgtggactggaccgtgtggggcaacctgctcgagcgcgtccaccagccgcgcgagaccgtgcgaatcgccctggtcggaaaatacgtcgacctgccggacgcctacctgtccgtcaccgaggcgctgcgtgccggtgggttcgcgaaccgctcgaaggtggaaatctcctgggtgccgtccgacgcgtgtgagacggaggcgggcgcgcaggccgccctcggcgacgtcgacggcgtgctgattcccggcggcttcgggatccgcggtatcgagggcaagctcggtgcgatccggtacgcccgtcaccggaagatcccgctgctcggactatgcctcggcctgcagtgcgtcgtgatcgaggctgcgcgcagcgtgggtctcgacgacgccaactccgccgagttcgagcccgagaccacgcaccccgtgatctccacgatggccgaccaggaagacgtcatcgccggcgaggcggacctcggcggcacgatgcgcctcggcgcgtaccccgccgtcctgacgaagggatccgtcgtcgcccgcgcgtacggcagcgaagaggtgtccgagcgtcaccgtcaccgctacgaggtcaacaacgcgtaccgcgaccggatcgcgaagagcggactccggttcagcggaacctcgcccgacggtcacctcgtcgagttcgtcgagtacccggccgaccagcacccgttcttcgtcgcgacgcaggcgcaccccgagctgaagagccgtccgacgcgtccgcacccgctgttcgcggcgttcgtcgacgcggcgctgaagcacaagctcgaagagcggcttcccgtcgacgtgcacggtgaggagcgggccgccgtcgccaccgatgacgaactcgccgactccgccgaccgcgacgaggtcgcgtccgtcgacagcgcgggatag

SEQ ID NO: 31571 - protein, 591 aa, Rhodococcus sp
MPQSRTHSRTATKHIFVSGGVASSLGKGLTASSLGQLLTARGMRVTMQKLDPYLNVDPGTMNPFQHGEVFVTDDGAETDLDVGHYERFLDRDLSGQANVTTGQVYSTVIAKERRGEYLGDTVQVIPHITDEIKSRILAMSGPDLQGHQPDVVITEIGGTVGDIESQPFLEAARQVRHDVGRDNVFFLHVSLVPYLAPSGELKTKPTQHSVAALRNIGIQPDALILRCDREVPPALKNKIALMCDVDVDGCISTPDAPSIYDIPKVLHSEGLDAYVVRQLGLPFRDVDWTVWGNLLERVHQPRETVRIALVGKYVDLPDAYLSVTEALRAGGFANRSKVEISWVPSDACETEAGAQAALGDVDGVLIPGGFGIRGIEGKLGAIRYARHRKIPLLGLCLGLQCVVIEAARSVGLDDANSAEFEPETTHPVISTMADQEDVIAGEADLGGTMRLGAYPAVLTKGSVVARAYGSEEVSERHRHRYEVNNAYRDRIAKSGLRFSGTSPDGHLVEFVEYPADQHPFFVATQAHPELKSRPTRPHPLFAAFVDAALKHKLEERLPVDVHGEERAAVATDDELADSADRDEVASVDSAG

SEQ ID NO: 31572 - DNA, 1614 bp, Rickettsia conorii
  CDS (1)..(1614): transl_table=11
atggtacatttcatttttgttaccggcggcgttgtttcatcactcggtaaaggtctaacggcagcatctcttgctatgctattgcaagcgaaaggttttagagtaagtgtacgaaaactagacccttatcttaacattgacccgggaactatgaatcctcacgaacatggtgaggtatatgtcaccgatgacggagcagaaaccgacctagatcttggacattatgaacgttttaccggagtttccgcatgcaaatttgatagcatcacaacaggtgcgatatactcaaaattacttaaagatgaacgtttaggaaattacgccggcgttactgttcaagtcatcccgcatgttacaaatataataaaagattttatactttcaaacaccaagggttttgattttattatttgtgaaataggcggtacagtcggtgatattgaaggtctaccgttttttgaagctataaggcaaattggtaacaaactaaaaagcgaaaattgtttatttattcatttaacattattaccttatgttaaaaccgcccgtgaattaaaaataaaacctacccaacactcagttaaagcattacgcgctataggtatttcacctaatatattagtgtgtcgtgcagaacgtaacatttcaaaaggcgaaatagataaaatatctttattgtgtaatatagaatctgagtatgttgttccggcaatagatcaaaaaaatatatatttagtaccgattgcatatcataattcaggtcttgataataaagtattaaaattttttaatattaatatcatgccatctaaattagataaatggcatgatataattaataggctaaaagattctaattcaaaagtaagaatcgctataatagctaaatatcataaattaaaagatgcttataaatcagtaatcgaggcacttgatcatgcaggtatttattacaaatacaaaattgatttagtatggataaatgctgaaaatctaactgaagagaatattaataaaaaattattagatatagatgggattttagtaccaggtggatttggagaacgggcaactaaaggaacaattatagcaataaaatatgcccgtactaataacatacctttttttggaatatgtttcggtatgcaacttgcgacgatcgaaatagctcagaatttaatcggtattaaagatgcagtaacggaagaatttaaagtagacggtacaaaaattattgagaaaataaataaaaactgtgaagactcaaaaataacaattgaaaatgtaaaaaagactatgaggctcggctcttatccttgtagtttggtcgcaagtaccattgcagctaatgcttataaaagccttgaaataaatgagagacatcgtcatagatataaatttaataatgaatttcaaaatatttttgaaaaacatggaatagtatttagcggtttttcaaaagatgaagagattgtagaaataattgaactaccgctactgcgttggttcgtaggagtacaatttcatccggaatttaaatctaaaccttttgaagctcatccgttattcattcagtttattaaagcagcgattgagtataacaaatgtaattaa

SEQ ID NO: 31573 - protein, 537 aa, Rickettsia conorii
MVHFIFVTGGVVSSLGKGLTAASLAMLLQAKGFRVSVRKLDPYLNIDPGTMNPHEHGEVYVTDDGAETDLDLGHYERFTGVSACKFDSITTGAIYSKLLKDERLGNYAGVTVQVIPHVTNIIKDFILSNTKGFDFIICEIGGTVGDIEGLPFFEAIRQIGNKLKSENCLFIHLTLLPYVKTARELKIKPTQHSVKALRAIGISPNILVCRAERNISKGEIDKISLLCNIESEYVVPAIDQKNIYLVPIAYHNSGLDNKVLKFFNINIMPSKLDKWHDIINRLKDSNSKVRIAIIAKYHKLKDAYKSVIEALDHAGIYYKYKIDLVWINAENLTEENINKKLLDIDGILVPGGFGERATKGTIIAIKYARTNNIPFFGICFGMQLATIEIAQNLIGIKDAVTEEFKVDGTKIIEKINKNCEDSKITIENVKKTMRLGSYPCSLVASTIAANAYKSLEINERHRHRYKFNNEFQNIFEKHGIVFSGFSKDEEIVEIIELPLLRWFVGVQFHPEFKSKPFEAHPLFIQFIKAAIEYNKCN

SEQ ID NO: 31574 - DNA, 1614 bp, Rickettsia felis
  CDS (1)..(1614): transl_table=11
atggtacgtttcatttttgttaccggcggcgttgtttcatcactcggtaaaggtctaacggcagcatctcttgctatgctattacaagcgaaaggatttaaagtttgcgtacgaaaactagacccttatcttaacgtcgaccctgggactatgaatcctcacgaacatggggaagtatatgtaacggatgacggagcagaaaccgatctagatcttggacattatgaacgttttaccggagtttcctcgtgcaagtttgatagcatcacaacaggagctatatactcaaaattacttaaagatgagcgtttaggaaattacaccggcgttaccgttcaaatcatcccgcatgttacaaatataataaaagattttatactttcaaacaccaagggctttgattttattatttgtgaaataggtggtacagtcggtgatattgaaggtctaccgttttttgaagctataagacaaatcggtaacaaattaaaaaacgaaaattgtttatttattcatttaacattattaccttatgttaaaaccgcccgtgaattaaaaacaaaacctacccaacactcagttaaagaattacgtgctataggtattacacctaatatactagtatgtcgtgcagaacgtaacatttcaaaaagcgaaatagataaaatagctttattttgtaatatagaatctgagtatgttattccggcaatagatcaaaaaaatatatatttagtaccgattgcgtatcataattcaggtcttgataataaagtactaaaattttttaatattaatgtcgtaccgtccaaattagataaatggtatgatataattggtaggctaaaagattctagttcaaaagtaagaattgctataatagctaaatatcataaattaaaagatgcttataaatcagtaatcgaggcacttgatcatgcaggtatttattacaaatacaaaattgatttagtatggataaatgctgaaaatctaactgaagagaatattaataaaaaattattaaatatagatgggattttagtaccaggcggatttggagaacgggcaactaaaggaaaaattacagcaataacatatgcccgtactaataacatacctttttttggaatatgtttcggtatgcaacttgcaacgatcgaaatagctcagaacttaatcggtattaaagatgcagtaacggaagaatttaaagtagacggtacaaaaattattgagaaaataaataaaaactgtgaaggctcaaaaataacaattgaaaatgtaaaaaagactatgaggctcggctcttatccttgtagtttggttgcaaataccattgcagctaatgcttataaaagccttgaaataaatgagagacatcgtcatagatataaatttaataatgaatttcaaaatatttttgaaaaaaacggagtagtatttagcggtttttcaaaggatgaagaaattgtagaaataattgaactaccggaacttcgttggttcgtaggagtacaatttcatccggaatttaaatctaaaccttttgaagctcatccgttatttattcagttcattaaagcagcgattgagtatactctgcgtaaatga

SEQ ID NO: 31575 - protein, 537 aa, Rickettsia felis
MVRFIFVTGGVVSSLGKGLTAASLAMLLQAKGFKVCVRKLDPYLNVDPGTMNPHEHGEVYVTDDGAETDLDLGHYERFTGVSSCKFDSITTGAIYSKLLKDERLGNYTGVTVQIIPHVTNIIKDFILSNTKGFDFIICEIGGTVGDIEGLPFFEAIRQIGNKLKNENCLFIHLTLLPYVKTARELKTKPTQHSVKELRAIGITPNILVCRAERNISKSEIDKIALFCNIESEYVIPAIDQKNIYLVPIAYHNSGLDNKVLKFFNINVVPSKLDKWYDIIGRLKDSSSKVRIAIIAKYHKLKDAYKSVIEALDHAGIYYKYKIDLVWINAENLTEENINKKLLNIDGILVPGGFGERATKGKITAITYARTNNIPFFGICFGMQLATIEIAQNLIGIKDAVTEEFKVDGTKIIEKINKNCEGSKITIENVKKTMRLGSYPCSLVANTIAANAYKSLEINERHRHRYKFNNEFQNIFEKNGVVFSGFSKDEEIVEIIELPELRWFVGVQFHPEFKSKPFEAHPLFIQFIKAAIEYTLRK

SEQ ID NO: 31576 - DNA, 1761 bp, Rickettsia prowazekii
  CDS (1)..(1761): transl_table=11
atggtacgtttcatttttgttactggcggtgttgtttcatcactcggtaaaggtataactgctgcatctcttgctatgttattacaagctaaaggttttagagtcagtgtacgaaaactagacccatatctcaatgttgaccctggcactatgaatcctcacgaacacggagaagtatatgtaacggatgatggagcagaaactgatctagatcttggacattatgaacgttttacaggagtgaccgcatgcaaatgtgataacatcacaacgggagctatatactcaaaattacttaaagatgaacgtttaggaaattacacaggcattacagttcaagttataccacatgttacaaacataataaaagattttataatgtcaaataccaatggttttgattttattatttgtgaaataggtggtacagtaggtgatattgaaggtttaccattttttgaggctatacggcaaataggtaataaattaaaaaatgcaaattgtttatttattcatttaacgttattaccttatgtaaaaaccgcacgtgaattaaaaacaaaacctacacaacactcagttaaagaattacgggctataggtatttcacctaatatattagtgtgtcgcgcagagcgtaacatttcaaaaagtgcaatagataaaatagcgttattttgtaatataaagcctgaatatgtgattccagcaatagatcaaaaaaatatatatttagtaccaattgcatatcacaattcaggtcttgaaaataaagtattaaatttttttaatattaatgtcgtgccttctaaattagataaatggtatgatataattgataagataaaagattctaattctaaagttaaaatcgctataataactaaatatcataaaacacaggatgcttataaatcagtaatcgaggcacttaatcatgcaggtatttattacaaatataaaattgatgtattatggataaatgctgaaaatcttactgaagagaatattaataaaaaattattagatataaacggaattttagttccaggagggtttggagtacgagccactcaagggaaaatgatagcaataaaatatgcacgtactaataacatacctttttttggaatatgtttcggtatgcaacttgcaacgatcgaaatagctcaaaatttaatcggtattcaagatgcagtaacagaagaatttaaaatcaaaggtacaaaaattattgaaaaaataaataaaaactgtgaagatgcaacaataaaaattaaaaatgcacatatttccaaatgtacttatagtgaagcatttgaatgcgacgcttccactgtatatacaaatatacatgaggattcaaataacttgtctacagacaaattgcagatagaaacaaattttagaaatatgtctgatatagaaaaaactatgagactcggggcttatccttgtaacttggtcgcaaatactatcgcagctaacgcgtataaaagcctcgaaataaatgagagacatcgtcatagatataaatttaataatgaatttcaaaatatttttgaacaacatggggtagtatttagtggtttttctcaaaataaacaaattgtagaaataattgaactaccagaactgcgttggttcgtaggagtacaatttcatccagaatttaaatctaaaccatttgaagcgcatccattatttattcagtttattaaagcaacaattgagtataataaaagtaatgaacaacaataa

SEQ ID NO: 31577 - protein, 586 aa, Rickettsia prowazekii
MVRFIFVTGGVVSSLGKGITAASLAMLLQAKGFRVSVRKLDPYLNVDPGTMNPHEHGEVYVTDDGAETDLDLGHYERFTGVTACKCDNITTGAIYSKLLKDERLGNYTGITVQVIPHVTNIIKDFIMSNTNGFDFIICEIGGTVGDIEGLPFFEAIRQIGNKLKNANCLFIHLTLLPYVKTARELKTKPTQHSVKELRAIGISPNILVCRAERNISKSAIDKIALFCNIKPEYVIPAIDQKNIYLVPIAYHNSGLENKVLNFFNINVVPSKLDKWYDIIDKIKDSNSKVKIAIITKYHKTQDAYKSVIEALNHAGIYYKYKIDVLWINAENLTEENINKKLLDINGILVPGGFGVRATQGKMIAIKYARTNNIPFFGICFGMQLATIEIAQNLIGIQDAVTEEFKIKGTKIIEKINKNCEDATIKIKNAHISKCTYSEAFECDASTVYTNIHEDSNNLSTDKLQIETNFRNMSDIEKTMRLGAYPCNLVANTIAANAYKSLEINERHRHRYKFNNEFQNIFEQHGVVFSGFSQNKQIVEIIELPELRWFVGVQFHPEFKSKPFEAHPLFIQFIKATIEYNKSNEQQ

SEQ ID NO: 31578 - DNA, 1752 bp, Rickettsia typhi
  CDS (1)..(1752): transl_table=11
atggcacgtttcatttttgttactggtggtgttgtttcatcacttggtaaaggtataacggcagcatctcttgctatgttattacaggccaaaggttttagagttagtgtacgaaaactagacccttatctcaatgttgatccaggcactatgaatcctcacgaacacggggaagtatatgtaacggatgacggagcagaaactgatctagatcttggacattatgaacgttttacaggagtaacagcatgcaaatttgataacatcacaacaggagctatatactcaaagttacttaaagatgagcgtttaggaaattacacaggcattacagttcaagtcataccacatgttacaaatataataaaagattttattatgtcaaataccaatggttttgattttattatttgtgaaataggtggtacagtaggagatattgaaggtttaccattttttgaggctataaggcaaataggtaacaaattaaaaagtgcaaattgtttatttattcatttaacgttattaccttatgtaaaaaccgtacgtgaattaaaaacaaaacctacacaacactcagttaaagagttacgtgctataggtatatcacctaatatattagtatgtcgcgcagaacgtaacatttcaaaaagcgcaatagataaaatagcattattttgtaacataaagcctgaatatgtgattccagcaatagatcaaaaaaatatatatttagtaccaattgcatatcacaattcaggtcttgaaaataaagtattaaatttttttaatattaatctcgtaccttctaaattagataaatggtacgatataattggtaagataaaagattctaattctaaagttaaaatcgctataataattaaatatcacaaatcacatgatgcttataaatcagtaatcgaggcacttaatcatgcaggtatttattacaaatacaaaattgatttattatggataaatgctgaaaatcttactgaagaaaatattaataaaaaattattaaatataaacggaattttagtaccaggagggtttggagtacgagcaacgaaagggaaaatgatagcaataaaatatgcacgtactaataacatacctttttttggaatatgttttggtatgcaacttgcaacgatcgaaatagctcaaaatttaatcggtattaaagatgcagtaacagaagaatttaaaatcaaagggacaaaaattattgaaaaaataaataaaaactctgaagatgtaacaataacaattaaaaatacacatatttccaaatgcacttatagtgaggaatttgaatgcgacacctccactgtatattcaaatatacatgaggattcaaataaagaatctacacacagattaccgatagaaacaaattttggaaatatatctgatataaaaaaaactatgagactcggtgcttatccttgtaacttggttgcaaatactattgcagctactgcgtatcaaagcctcgaaataaatgagagacatcgtcatagatataaatttaataatgaatttcaaaatatttttgaacaacacggtgtagtatttagtggtttttctaaaaacaaacaaattgtagaaataattgaactaccagaacttcgttggttcataggagtgcaatttcatccagaatttaaatctaaaccatttgaggctcatccattatttattcagtttattaaagccgcaattgagtataataaatgtaattaa

SEQ ID NO: 31579 - protein, 583 aa, Rickettsia typhi
MARFIFVTGGVVSSLGKGITAASLAMLLQAKGFRVSVRKLDPYLNVDPGTMNPHEHGEVYVTDDGAETDLDLGHYERFTGVTACKFDNITTGAIYSKLLKDERLGNYTGITVQVIPHVTNIIKDFIMSNTNGFDFIICEIGGTVGDIEGLPFFEAIRQIGNKLKSANCLFIHLTLLPYVKTVRELKTKPTQHSVKELRAIGISPNILVCRAERNISKSAIDKIALFCNIKPEYVIPAIDQKNIYLVPIAYHNSGLENKVLNFFNINLVPSKLDKWYDIIGKIKDSNSKVKIAIIIKYHKSHDAYKSVIEALNHAGIYYKYKIDLLWINAENLTEENINKKLLNINGILVPGGFGVRATKGKMIAIKYARTNNIPFFGICFGMQLATIEIAQNLIGIKDAVTEEFKIKGTKIIEKINKNSEDVTITIKNTHISKCTYSEEFECDTSTVYSNIHEDSNKESTHRLPIETNFGNISDIKKTMRLGAYPCNLVANTIAATAYQSLEINERHRHRYKFNNEFQNIFEQHGVVFSGFSKNKQIVEIIELPELRWFIGVQFHPEFKSKPFEAHPLFIQFIKAAIEYNKCN

SEQ ID NO: 31580 - DNA, 1656 bp, Rubrobacter xylanophilus
  CDS (1)..(1656): transl_table=11
atgagcgggaccaagtacatcttcgtcaccgggggggtcgtctcctccatcggcaaggggaccagcgcggcggcgctggggatgctcctcaagagccggggctaccgggtggtcttgcagaagttcgacccgtacatcaacgtggaccccggcaccatgaacccctaccagcacggggaggtcttcgtcaccgaggacggggccgagaccgacctagacctcggccactacgagcggtttctggacgagaacctggggcgcctctccaacgtcaccaccggcagcgtctactgggaggtaataagccgggagcggcggggggactacctcggggccaccgtgcaggtcatcccgcacataaccaacgagataaaggcccgcatcgggcggctggggcgggagaaggacgtggtgatcaccgagatcggggggaccgtcggggacatcgagagccagccgtttctggaggccataaggcagttccggaacgacgtggggcgcaagaacgtcctgtacgtgcacgtctcctacgtgccctacatcgaggccgcgggggagctgaagaccaagcccacccagcactccacccagcgcctgcgggagatgggcatctcgccggacatcctcatctgccgggccgacaggcccataggcgaggagatccgcaggaagatagcgctcttcggggacgtggaggtggactcggtgatccccgcgcaggacgcccccaccctctacgacatcccgctcagcctgcacgggtcgggcctggacgcgctggtgctcgagaagctggggctgcccgccccgccggcgcggctggaggagtggcgcgggctcgtccggcggctgcacggggccgagcgggaggtgcgcgtggccgtgatcgggaagtacatccggctgcaggacgcctacctctccgtggtcgaggcgctccggcacgcggggggcgcccacgaggtgcgggtcgagctggactgggtggactccgagcagatctccgaccccgaggccgcccgggagcggctgcggggggccgacggggtgctggtgctccacggcttcgggcagcgcgggatagagggcaagatcgaggcggcccgctacgcccgcgagagcggcaccccgtatctcgggctgtgcctggggatgcagatcgccgtgatcgagttcgcccgcaacgtcgccgggctggagatggccaactccaccgagttcgacgaggagaccccccacccggtcatagacatcatgccggaccaggtgggggtggagatgggcggcacgatgcggctgggctcctacccctgcaggctccggcccgggaccctggcggccagggtctacggcgccgaggtggtccacgagcggcaccgccaccgctacgaggtgaacaacgcctaccgggaggtgctggaggaggccggcatggtcttcagcggcacctccccggacggccggctggtggagatcgccgagctcgccggccacccgttcttcatcgggagccagttccacccggagttcaagagccgccccctgcggccccacccgctgttccgcggcttcgtgggggcctgcctgggggccgcggaggaggccggccgggtgaccgcccccgcggccgggcgaaaggacggggcctccggctag

SEQ ID NO: 31581 - protein, 551 aa, Rubrobacter xylanophilus
MSGTKYIFVTGGVVSSIGKGTSAAALGMLLKSRGYRVVLQKFDPYINVDPGTMNPYQHGEVFVTEDGAETDLDLGHYERFLDENLGRLSNVTTGSVYWEVISRERRGDYLGATVQVIPHITNEIKARIGRLGREKDVVITEIGGTVGDIESQPFLEAIRQFRNDVGRKNVLYVHVSYVPYIEAAGELKTKPTQHSTQRLREMGISPDILICRADRPIGEEIRRKIALFGDVEVDSVIPAQDAPTLYDIPLSLHGSGLDALVLEKLGLPAPPARLEEWRGLVRRLHGAEREVRVAVIGKYIRLQDAYLSVVEALRHAGGAHEVRVELDWVDSEQISDPEAARERLRGADGVLVLHGFGQRGIEGKIEAARYARESGTPYLGLCLGMQIAVIEFARNVAGLEMANSTEFDEETPHPVIDIMPDQVGVEMGGTMRLGSYPCRLRPGTLAARVYGAEVVHERHRHRYEVNNAYREVLEEAGMVFSGTSPDGRLVEIAELAGHPFFIGSQFHPEFKSRPLRPHPLFRGFVGACLGAAEEAGRVTAPAAGRKDGASG

SEQ ID NO: 31582 - DNA, 1632 bp, Saccharophagus degradans
  CDS (1)..(1632): transl_table=11
atgacgcgttttattttcgtaacgggtggtgttgtttcgtcattgggtaaaggaattgcctcggcgtcactcgctgcagtacttgaggcccgcggccttaaagtgaccatcctcaagcttgatccatatatcaacgtagacccgggcaccatgagccctttccagcacggggaagtttttgttaccgatgacggcgcagaaaccgatttggatcttggtcactatgagcgcttcattcgcacccgtatgaccaagcgcaacaacttcaccaccgggcgcgtgtacgaaaccgtattgcgcaaagagcgccgcggtgactaccttggtggaactgttcaggttattccccatattaccgatgagattaagcgccgcatcttagctggcggcgacggtgtagatattgcgctagtagagattggcggcaccgtgggtgatattgaatcccagccgttcttagaagctgtgcgtcagcttaaagtggagctaggcaaccagcgcgcattgcttatgcaccttacgcttgtgccctatattgctacagcaggcgaaaccaaaactaagcctacccagcactcggtaaaagagttgcgttctataggcttacagccagacattttattgtgccgctcagagaaagaaatagacgtagattcacgccgtaaaatttctttgtttaccaacgtagaagagcgcgcagttgtaccgctaccagatgcgaaaagcatctacctcattcctcgcttgttacaaagctataacctagaccaaatcgtattagataaatttggcctagaagccgcagaaacagatttggcagaatgggatgaagttgtacgccgtgagcaaaacccagagcatgccgttaccattgcaatggtaggcaagtatatggatctgctcgatgcctataagtcgcttaacgaagcgctgttgcatgcaggcttacacaccttaaccaaagttaagattaactacatcaatgcagaagatgtagaaactcaaggcgtaagcattctagaagatgccgacgcgatattagtgcctggcggttttggtgagcgcggtttagaaggcaaattaatggccgtgcgctatgcgcgtgaaaacaaagtgccatacttgggcatttgtttgggtatgcaaaccgcggttatcgaatttgcgcgcaacgtattaaaactcgatggcgccaacagtactgagtttgatcgcaagtctcctttccctgttattggtcttatcaccgagtggataaacgaagaaggtaaagtagaaacgcgcgatgaaagttctgatttgggcggtaccatgcgcttgggggcacaggagtgccacctagaagaaaacagccgaattcgtgaaatttacggcaaagccaatattatcgagcgtcaccgtcaccgctttgaagtaaacaaccggttcttggaccagttgcgtcaaggtggtttgcgtattggtggctggtcatccgacgacacattggtagaagttgtggaagtgccagatcatccttggtttgtggcttgtcagttccacccagagttcacctctacgccgcgcgatggtcacccgctgtttactagctatattcaagctgctgtagagcagaacgaacgcgctaaataa

SEQ ID NO: 31583 - protein, 543 aa, Saccharophagus degradans
MTRFIFVTGGVVSSLGKGIASASLAAVLEARGLKVTILKLDPYINVDPGTMSPFQHGEVFVTDDGAETDLDLGHYERFIRTRMTKRNNFTTGRVYETVLRKERRGDYLGGTVQVIPHITDEIKRRILAGGDGVDIALVEIGGTVGDIESQPFLEAVRQLKVELGNQRALLMHLTLVPYIATAGETKTKPTQHSVKELRSIGLQPDILLCRSEKEIDVDSRRKISLFTNVEERAVVPLPDAKSIYLIPRLLQSYNLDQIVLDKFGLEAAETDLAEWDEVVRREQNPEHAVTIAMVGKYMDLLDAYKSLNEALLHAGLHTLTKVKINYINAEDVETQGVSILEDADAILVPGGFGERGLEGKLMAVRYARENKVPYLGICLGMQTAVIEFARNVLKLDGANSTEFDRKSPFPVIGLITEWINEEGKVETRDESSDLGGTMRLGAQECHLEENSRIREIYGKANIIERHRHRFEVNNRFLDQLRQGGLRIGGWSSDDTLVEVVEVPDHPWFVACQFHPEFTSTPRDGHPLFTSYIQAAVEQNERAK

SEQ ID NO: 31584 - DNA, 1638 bp, Salmonella choleraesuis
  CDS (1)..(1638): transl_table=11
atgacaacgaactatatttttgtgaccggcggggtcgtatcctctctgggtaaaggcattgccgcagcctccctcgcagccattctggaagcccgtggtctcaacgtgaccatcatgaaactggatccgtacatcaacgtcgatccgggtactatgagcccaatccaacacggggaagtgttcgttactgaagacggcgctgaaaccgacctggacctggggcactacgagcgtttcatccgcaccaagatgtctcgccgcaacaacttcacgactggccgcatctactccgacgttctgcgtaaagaacgccgtggcgactatctgggcgcaaccgtacaggtaatccctcacatcactaacgcgattaaagagcgcgtgctggaaggcggcgaaggccacgatgtggtactggtggaaatcggcggtaccgtcggtgatatcgaatcgctgccgtttcttgaggcgattcgtcaattggcggtagatatcggtcgtgaacacgcgctgtttatgcacctgacgctggtaccttacctggcggctgcgggcgaagtgaaaactaaaccgactcagcactccgtgaaagagctgctgtctatcggtattcagcccgatattctgatttgtcgttccgaccgtgcggttcctgccaacgagcgtgcaaaaattgcattgttctgtaatgtgccggaaaaagccgttatttcaatgaaagatgtcgattccatttataaaattccaggcctgttgaaatctcaggggcttgatgattatatttgtaaacgattcagcttgaactgtccggaagctaacctgtctgaatgggaacaggtcatttacgaagaagcgaacccggcaggcgaagtgactatcggcatggtcggcaaatatattgaactgccggatgcctataagtcggtgatcgaagcgctgaaacacggtggtctgaaaaaccgcgttaccgtcaacatcaaattgatcgattcgcaagatgttgaaacgcgcggcgtcgaaattctgaaagatttggacgctatcctgatccccggcggcttcggctatcgtggcgttgaaggtaaaatcgccactgcgcgctatgcgcgtgaaaacaatattccttatctgggcatttgcctggggatgcaggttgcgttgattgagttcgctcgtaacgtggccggcatggacaacgccaactcaacggaatttgtgccagactgtaagtacccggttgtggcgttaattaccgagtggcgcgatgaagacggtaacgttgaagtccgtagcgagaaaagcgatctgggcggcaccatgcgcctgggcgcgcagcagtgccagcttagcgatgacagtctggtacgtcagttgtacggcgcgtcgacgattgttgaacgtcatcgccatcgttacgaagtcaacaatatgttgttgaaacaaattgaagcagcgggtctgcgtgtcgcaggccgttccggtgatgatcagttagtcgagatcattgaggtaccgaatcatccgtggttcgtggcctgtcagttccatccggaatttacttccacgccgcgtgatggacatccgttgttcgctggctttgttaaagccgccaacgagcatcagaaacgtcaggcgaagtaa

SEQ ID NO: 31585 - protein, 545 aa, Salmonella choleraesuis
MTTNYIFVTGGVVSSLGKGIAAASLAAILEARGLNVTIMKLDPYINVDPGTMSPIQHGEVFVTEDGAETDLDLGHYERFIRTKMSRRNNFTTGRIYSDVLRKERRGDYLGATVQVIPHITNAIKERVLEGGEGHDVVLVEIGGTVGDIESLPFLEAIRQLAVDIGREHALFMHLTLVPYLAAAGEVKTKPTQHSVKELLSIGIQPDILICRSDRAVPANERAKIALFCNVPEKAVISMKDVDSIYKIPGLLKSQGLDDYICKRFSLNCPEANLSEWEQVIYEEANPAGEVTIGMVGKYIELPDAYKSVIEALKHGGLKNRVTVNIKLIDSQDVETRGVEILKDLDAILIPGGFGYRGVEGKIATARYARENNIPYLGICLGMQVALIEFARNVAGMDNANSTEFVPDCKYPVVALITEWRDEDGNVEVRSEKSDLGGTMRLGAQQCQLSDDSLVRQLYGASTIVERHRHRYEVNNMLLKQIEAAGLRVAGRSGDDQLVEIIEVPNHPWFVACQFHPEFTSTPRDGHPLFAGFVKAANEHQKRQAK

SEQ ID NO: 31586 - DNA, 1803 bp, Schizosaccharomyces pombe
  CDS (1)..(1803)
atgaagtacgttttagtatctggaggtgttattagtggtattggaaaaggtgtaattgcctcttccactggattactgctaaaaaccctaggattgaaagttactagcatcaagattgacccttacatgaatattgatgctggcactatgtctccccttgaacatggggaagtttttgttttgaatgatggcggtgaagtcgatttggatcttggaaactatgagcgctatcttaatgttacattaacccatgataacaatattacaactggaaaagtgtattctaatgtcattcagaaggaacgtcgcggtgattatcttggaaaaacagtgcaaattgttcctcatgttacgaatgaaattcaagactgggtggagcgtgttgctcgaattccagttgatcaaagtggtgaagaaccagatgtttgtattgttgaactcggtggtacggttggcgatatcgagtctgctgcttttgtggaggccatgcgtcaatttcaatttcgtgtgggtcatgaaaactttgtatcaatccatgtttctcttgtccctgtaattaatggcgagcagaaaactaagcctactcaacaagcaattcgtgatttgcgtagcttgggcattactccagacttgattgcttgccgctgtaaacaacctcttgagaaatctgtgattgataaaatttctcttttctgtcatgttggtcccgaacaggtgctagctgtgcatgatgtctctagtacatatcacgttcctcaactgcttgaagacaagctattggaatatttgaaaattcgtttcgcactggataagataagtgtatctcgcgaactcgctctcgcaggcgagaatatgtggagctcgtggaaacatttaacacagggatacgatcatcttttcaagaaggtcaccatcgtcctcgtaggaaaatacactcatcttcaagattcctatatatcagtcatcaaagcattggagcactctgctatgcgctgtggtcgtaaacttgacctccaatgggtagaagcttctcatttggaagctagtacaaatactagtgacccacttagttaccataaggcatggcatttagtctgttctgccaatggtatcctagtgcctggcggattcggctctcgcggtgtcgaagggatgattgccgcagccaagtgggctcgtgaaaataatacaccctacttgggcatttgccttggtatgcaagttgccgttattgaattcgcgagaagtgtttgtggaattgaaggtgcattttctgaagaattcgataaggaatgcgaaaacaatgttgttgtttatatgcctgagattgataaggataaactgggtggaactatgcgtttgggattgagacctacctttttccaacccaattccgaatggagtaaacttcgtaaacttcataagatggttgatgaagttttggaaagacatcgtcatagatatgaaataaatcctgcgtttgtaagccgtttggaacaaggtggaatttctttcatcggaaaagatgaacgtggtgagcgtatggaaattattgagaaacgtgaccatccttactttgttggcgtacaataccatcctgaatatttatctaagccacttaagccctccccaccgatttttggattggttgcggccagtgctggcttgttggatgaatttattcagtctggtgaggaagtcgaatggagcaacttttctcattttaacgctgaatctgccttagctgacatgaatgactctgttgaagttactgaagaagccactgtcgtcaccatcagttag

SEQ ID NO: 31587 - protein, 600 aa, Schizosaccharomyces pombe
MKYVLVSGGVISGIGKGVIASSTGLLLKTLGLKVTSIKIDPYMNIDAGTMSPLEHGEVFVLNDGGEVDLDLGNYERYLNVTLTHDNNITTGKVYSNVIQKERRGDYLGKTVQIVPHVTNEIQDWVERVARIPVDQSGEEPDVCIVELGGTVGDIESAAFVEAMRQFQFRVGHENFVSIHVSLVPVINGEQKTKPTQQAIRDLRSLGITPDLIACRCKQPLEKSVIDKISLFCHVGPEQVLAVHDVSSTYHVPQLLEDKLLEYLKIRFALDKISVSRELALAGENMWSSWKHLTQGYDHLFKKVTIVLVGKYTHLQDSYISVIKALEHSAMRCGRKLDLQWVEASHLEASTNTSDPLSYHKAWHLVCSANGILVPGGFGSRGVEGMIAAAKWARENNTPYLGICLGMQVAVIEFARSVCGIEGAFSEEFDKECENNVVVYMPEIDKDKLGGTMRLGLRPTFFQPNSEWSKLRKLHKMVDEVLERHRHRYEINPAFVSRLEQGGISFIGKDERGERMEIIEKRDHPYFVGVQYHPEYLSKPLKPSPPIFGLVAASAGLLDEFIQSGEEVEWSNFSHFNAESALADMNDSVEVTEEATVVTIS

SEQ ID NO: 31588 - DNA, 1641 bp, Shewanella oneidensis
  CDS (1)..(1641): transl_table=11
atgactacaaggtatatcttcgttactggtggtgtggtttcatcactaggtaaaggcattgcagccgcttcattagccgcaattttagaggcccgtggtctcaatgtaaccatcatgaaactggacccatacattaacgtcgatccagggaccatgagcccaacgcaacatggtgaagtgtttgtgactgaggacggcgcagaaacagacctcgacctaggtcactatgagcgtttcatccgcactaagatgaaccgtcgcaataacttcaccacaggccgtatttacgaagaagtattacgcaaagaacgtcgtggtgactatttaggtgcgacaattcaggtgatcccgcacatcactaacgcgatcaaagaaaaagtattagcaggtggcgaaggtcacgatgtggctatcgttgaaatcggcggtactgtgggtgatatcgaatcactaccattccttgaatcaatccgccaattaggcgttgaactgggccgcgatcgcaccctgtttatgcatttaaccttagtgccattcttaggcgctgcgggcgaagtgaaaactaagccaactcaacactcagtaaaagaattgcgttctatcggtattgcacctgatgtgttgatctgccgtggcgatcgcgcaattcctgcaaacgagcgcgctaagatttcgctattctgtaacgttgaagaacgtgcagtgatttcattaaaagacgtcgacagcatctacaagatcccggcattgctgcgctcacaaggtttagatgaattagtggttaagcgttttagcttaacttgccgcgaagccgacttgtccgagtgggaaaatgtgatttaccaagaagccaatccaaacggcgaagtcgtgattggtatggtgggtaaatacatcgaactgcctgatgcctataagtcagtcaacgaagcgttaaaacacgcaggccttaaaaaccgcgtatcagtgaccatcaagtacattgactcacaaactgtagaagccaaaggcgatgaagtcttacaaggtttagacggtatcttagtcccaggtggcttcggtgagcgtggtgttgaaggtaagattttggcggctaaatttgcccgtgaaaacaatctgccatactttggtatttgcttaggcatgcaagttgccttgattgaatttgcccgtaacgttgccggcatggcagatgcacattcaaccgaattcaacaaagcaacgccattcccagtggttggtttaatcactgaatgggtagatgaagaaggcaatgttgagcagcgccacgaagcgtctgacttaggtggcactatgcgtttaggtgcgcagttatgtcacctgcttgaaggttcaaaagccgctcaagcttataaaggtaacagctgtgttgaacgtcatcgtcatcgttatgaagtcaacaacaagtacaaagagcgtttagagcaagcgggtctagtatttagtggtttatcttctgaccgtaaactggttgagatgattgaacttaaagatcatccttggtttgtggcgggtcaattccacccagaattcacttcgaccccacgcgatggtcatccattgttcgaaggttttgttgctgccgcgagtgcacatcaaaaacgtgatctgaagaaataa

SEQ ID NO: 31589 - protein, 546 aa, Shewanella oneidensis
MTTRYIFVTGGVVSSLGKGIAAASLAAILEARGLNVTIMKLDPYINVDPGTMSPTQHGEVFVTEDGAETDLDLGHYERFIRTKMNRRNNFTTGRIYEEVLRKERRGDYLGATIQVIPHITNAIKEKVLAGGEGHDVAIVEIGGTVGDIESLPFLESIRQLGVELGRDRTLFMHLTLVPFLGAAGEVKTKPTQHSVKELRSIGIAPDVLICRGDRAIPANERAKISLFCNVEERAVISLKDVDSIYKIPALLRSQGLDELVVKRFSLTCREADLSEWENVIYQEANPNGEVVIGMVGKYIELPDAYKSVNEALKHAGLKNRVSVTIKYIDSQTVEAKGDEVLQGLDGILVPGGFGERGVEGKILAAKFARENNLPYFGICLGMQVALIEFARNVAGMADAHSTEFNKATPFPVVGLITEWVDEEGNVEQRHEASDLGGTMRLGAQLCHLLEGSKAAQAYKGNSCVERHRHRYEVNNKYKERLEQAGLVFSGLSSDRKLVEMIELKDHPWFVAGQFHPEFTSTPRDGHPLFEGFVAAASAHQKRDLKK

SEQ ID NO: 31590 - DNA, 1641 bp, Shewanella sp
  CDS (1)..(1641): transl_table=11
atgactacaaggtatatcttcgttactggtggtgtggtttcatcactaggtaaaggcattgcagccgcttcattagccgcaattttagaggcccgtggtctcaatgtaaccatcatgaaactggacccatacattaacgttgatccaggtaccatgagcccaacgcaacatggtgaagtgtttgtgactgaggacggcgcagaaacagaccttgaccttggccactatgagcgtttcatccgcactaagatgaaccgtcgcaacaacttcactacgggtcgtatttacgaggaagtactgcgtaaagagcgtcgcggtgattacttaggtgcgaccattcaggtgatcccacacatcactaacgcgatcaaagaaaaagtgattgcaggtggtgaaggtcacgatgtggctatcgttgaaatcggcggtactgtgggtgatatcgaatcactgccattccttgagtctatccgccagttaggtgttgaactgggccgcgatcgtaccctgtttatgcatttaaccttagtaccattccttggcgcagcgggtgaagtgaaaaccaaaccgactcaacattcagtcaaagaattgcgttctatcggtattgcaccagatgtgctgatctgccgtggcgaccgcgcgattcctgccaacgagcgtgcgaagatttcgttattctgtaacgttgaagaacgtgcggttatttcattaaaagatgtcgacagcatctacaagatcccagcgctgctgcgctcacagggtttagatgacttagtggttaagcgttttggcttagaatgccgcgaagctgacttgtctgagtgggaaaacgtcatttaccaagaagctaatccaaacggcgaagtcgtgattggtatggtaggtaaatacatcgaactgccagacgcctataagtcagtcaacgaagcattaaagcacgctggccttaaaaatcgcgtatctgtgactatcaagtatatcgattcacaaaccgtagaagcgaaaggcgatgaagttctgcaaggtttagacggtatcttagttccaggcggcttcggtgagcgcggtgtggaaggtaagattctggcggctaaatatgcccgtgaaaacgagctgccgtactttggtatctgtttaggtatgcaagtggcgctgattgaatttgcccgtaacgttgcaggcatggccgatgcacactcaaccgaattcaataaagcaacgccattcccagtggttggcttaatcactgaatgggttgatgaagaaggtaacgttgaacaacgccatgaagcctctgatttaggtggcactatgcgtttaggggcacagttatgtcacctgcttgaaggttcaaaagcggcgcaagcgtacaaaggtaacacttgtgttgagcgtcaccgtcaccgttacgaagtgaacaacaagtacagagaacgtttagagcaagcgggtctagtatttagtggtttatcttctgaccgtaaactggttgagatgattgagctgaaagatcatccttggtttgttgcgggtcaattccacccagaattcacttcgaccccacgcgatggtcatccattgttcgaaggtttcgttgctgccgcaagtgcacatcaaaaacgtgatctgaagaaataa

SEQ ID NO: 31591 - protein, 546 aa, Shewanella sp
MTTRYIFVTGGVVSSLGKGIAAASLAAILEARGLNVTIMKLDPYINVDPGTMSPTQHGEVFVTEDGAETDLDLGHYERFIRTKMNRRNNFTTGRIYEEVLRKERRGDYLGATIQVIPHITNAIKEKVIAGGEGHDVAIVEIGGTVGDIESLPFLESIRQLGVELGRDRTLFMHLTLVPFLGAAGEVKTKPTQHSVKELRSIGIAPDVLICRGDRAIPANERAKISLFCNVEERAVISLKDVDSIYKIPALLRSQGLDDLVVKRFGLECREADLSEWENVIYQEANPNGEVVIGMVGKYIELPDAYKSVNEALKHAGLKNRVSVTIKYIDSQTVEAKGDEVLQGLDGILVPGGFGERGVEGKILAAKYARENELPYFGICLGMQVALIEFARNVAGMADAHSTEFNKATPFPVVGLITEWVDEEGNVEQRHEASDLGGTMRLGAQLCHLLEGSKAAQAYKGNTCVERHRHRYEVNNKYRERLEQAGLVFSGLSSDRKLVEMIELKDHPWFVAGQFHPEFTSTPRDGHPLFEGFVAAASAHQKRDLKK

SEQ ID NO: 31592 - DNA, 1641 bp, Shewanella sp
  CDS (1)..(1641): transl_table=11
atgactacaaggtatatcttcgttactggtggtgtggtttcatcactaggtaaaggcattgcagccgcttcattagccgcaattttagaggcccgtggtctcaatgtaaccatcatgaaactggacccatacattaacgttgatccaggtaccatgagcccaacgcaacatggtgaagtgtttgtgactgaggacggcgcagaaacagaccttgaccttggccactatgagcgtttcatccgcactaagatgaaccgtcgcaacaacttcactacgggtcgtatttacgaggaagtactgcgtaaagagcgtcgcggtgattacttaggtgcgaccattcaggtgatcccacacatcactaacgcgatcaaagaaaaagtgattgcaggtggtgaaggtcacgatgtggctatcgtagaaatcggcggtactgttggtgatatcgaatcactgccattccttgagtctatccgccaattaggcgttgaactgggccgcgatcgtaccctgtttatgcatttaaccttagtgccattccttggcgctgcgggtgaagtgaaaaccaaaccgactcaacattcagtgaaagaattgcgttctatcggtattgcaccagatgtgctgatctgccgtggcgaccgcgcgattcctgccaacgagcgtgcgaagatttcgttattctgtaacgttgaagaacgtgcggttatttcattaaaagacgtcgacagcatctacaagatcccagcgctgctgcgctcacagggtttagatgacttagtggttaagcgttttggcttagaatgccgtgaagcggacttgtctgagtgggaaaacgtcatttaccaagaagccaatccaaacggcgaagtcgtgattggtatggtgggtaaatacatcgaactgccagacgcatacaagtcagtcaacgaagcattaaagcacgctggccttaaaaatcgcgtatctgtgactatcaagtatatcgattcacaaaccgtagaagcgaaaggcgatgaagttctgcaaggtttagacggtatcttagttccaggcggcttcggtgagcgcggtgtggaaggtaagattcaagcggctaaatttgcccgtgaaaacaacctgccatattttggtatctgtttaggtatgcaagtggcgctgattgaatttgcccgtaacgttgcaggcatggccgatgcacactcaaccgaattcaacaaagaaacgccattccctgtggttggcttaatcactgaatgggttgacgaagaaggtaacgttgaacaacgccatgaggcctctgacttaggtggcactatgcgtttaggtgcacagttatgtcacctgcttgaaggttcaaaagccgctcaagcatataaaggtaacagctgtgttgagcgtcaccgtcaccgttatgaggtgaacaacaagtacagagaacgtttagaacaagcgggtctggtatttagtggtttatcttctgaccgtaaactggttgagatgatcgagctgaaagatcacccttggtttgttgcgggtcaattccacccagaattcacttcgaccccacgcgatggtcatccattgttcgaaggtttcgttgctgccgcaagtgcacatcaaaaacgtgatctgaagaaataa

SEQ ID NO: 31593 - protein, 546 aa, Shewanella sp
MTTRYIFVTGGVVSSLGKGIAAASLAAILEARGLNVTIMKLDPYINVDPGTMSPTQHGEVFVTEDGAETDLDLGHYERFIRTKMNRRNNFTTGRIYEEVLRKERRGDYLGATIQVIPHITNAIKEKVIAGGEGHDVAIVEIGGTVGDIESLPFLESIRQLGVELGRDRTLFMHLTLVPFLGAAGEVKTKPTQHSVKELRSIGIAPDVLICRGDRAIPANERAKISLFCNVEERAVISLKDVDSIYKIPALLRSQGLDDLVVKRFGLECREADLSEWENVIYQEANPNGEVVIGMVGKYIELPDAYKSVNEALKHAGLKNRVSVTIKYIDSQTVEAKGDEVLQGLDGILVPGGFGERGVEGKIQAAKFARENNLPYFGICLGMQVALIEFARNVAGMADAHSTEFNKETPFPVVGLITEWVDEEGNVEQRHEASDLGGTMRLGAQLCHLLEGSKAAQAYKGNSCVERHRHRYEVNNKYRERLEQAGLVFSGLSSDRKLVEMIELKDHPWFVAGQFHPEFTSTPRDGHPLFEGFVAAASAHQKRDLKK

SEQ ID NO: 31594 - DNA, 1644 bp, Silicibacter pomeroyi
  CDS (1)..(1644): transl_table=11
atggcgcgtttcatcttcatcaccggcggtgtcgtttcttcgcttggcaaagggctggcctcggccgcattgggcgcattgctgcaggcgcgcggcttctcggtccgcctgcgcaagctcgacccctatctgaacgtcgatccgggcaccatgtcgccctttgaacatggcgaggtctttgtcaccgacgacggcgccgagaccgatctggaccttggccattacgaacgcttcaccggagtggcggcgcgcaagacggactcggtcagctctggccggatctattccaacgtgctggagaaggaacgccgcggcgactatctgggcaagaccattcaggtcattccccatgtcaccaacgagatcaaggacttcatctcgatcggcgaggacgaggtcgatttcatgctctgcgagatcggcggcacggtcggcgatatcgagggcctgcccttcttcgaggcgatccgccagttttcccaggacaagccgcgcggccagtgcatcttcatgcacctgacgctgctgccctatatcaaggccagcggcgagctgaagaccaagccgacccagcactcggtcaaggaactgcgctcgatcggtctggcccccgacatcctggtctgccgctccgaagggccgatcccgcagaaggaacgcgagaaactggcgctgttctgcaatgtgcgccccgacagcgtgatcgccgcgcaagatctgagcacgatctacgacgcgccgctggcctatcaccgcgaggggctggaccaggcggtgctggacgccttccagatcagcccggcgcccaagccggacctgaccaaatgggaggatgtgagcgaccgcgtccacaaccccgaaggcgaggtcaagatcgccatcgtcggcaaatacgtgcagctcgaagacgcctacaagtcgatcgccgaggcgctgacccatggcggcatggccaaccgggtcaaggtgcgcatcgaatgggtcgatgccgagatcttcgaaaaggaagaccccgccccccatctcgaaggcttccatgccattctagtgcccggcggctttggcgagcgcggcaccgaaggcaagatcaaggcggcgcaatatgcccgcgaacatcaggtgccctatctgggcatctgcctgggcatgcagatggcggtgatcgaggcggcgcgtaacgtggccggcatcgccggcgcgggctccgaagagttcgaccacgaggccggcaagaaacggttcgaaccggtggtctatcacctcaaggaatgggtgcagggcaattacaaggtcagccgcaaggtcgatgacgacaagggcggcaccatgcggctgggcgcctatgacgcggtcctcaaggaaggctccagggtcgccgaggtctatggcggcaccgcgatcgaggaacgccaccgccaccgctacgaggtggatataaaataccgcgagcagctggaaaaggcaggcctctgcttctcgggcatgtcgcccgacggtcgtctgcccgagatcgtcgaatggacggatcacccgtggttcatcggggtccagtaccatcccgaactgaaatccaaacccttcgacccgcacccgctgtttgccgatttcgtacgcgcggccaaggaaagctcgcgcctggtctga

SEQ ID NO: 31595 - protein, 547 aa, Silicibacter pomeroyi
MARFIFITGGVVSSLGKGLASAALGALLQARGFSVRLRKLDPYLNVDPGTMSPFEHGEVFVTDDGAETDLDLGHYERFTGVAARKTDSVSSGRIYSNVLEKERRGDYLGKTIQVIPHVTNEIKDFISIGEDEVDFMLCEIGGTVGDIEGLPFFEAIRQFSQDKPRGQCIFMHLTLLPYIKASGELKTKPTQHSVKELRSIGLAPDILVCRSEGPIPQKEREKLALFCNVRPDSVIAAQDLSTIYDAPLAYHREGLDQAVLDAFQISPAPKPDLTKWEDVSDRVHNPEGEVKIAIVGKYVQLEDAYKSIAEALTHGGMANRVKVRIEWVDAEIFEKEDPAPHLEGFHAILVPGGFGERGTEGKIKAAQYAREHQVPYLGICLGMQMAVIEAARNVAGIAGAGSEEFDHEAGKKRFEPVVYHLKEWVQGNYKVSRKVDDDKGGTMRLGAYDAVLKEGSRVAEVYGGTAIEERHRHRYEVDIKYREQLEKAGLCFSGMSPDGRLPEIVEWTDHPWFIGVQYHPELKSKPFDPHPLFADFVRAAKESSRLV

SEQ ID NO: 31596 - DNA, 1644 bp, Silicibacter sp
  CDS (1)..(1644): transl_table=11
atggcgcgtttcatctttattactggcggtgtcgtctcttctctgggcaagggactggcctctgctgcgctgggtgcgctgctgcaggcacggggctactccgtgcgcctgcgcaaactcgacccctatctgaacgtcgatccgggcaccatgagcccgtttgaacacggcgaggtctttgtgaccgacgacggggcagaaaccgacctcgatctgggccactacgagcgcttcaccggcgtgccagcgcgtaagaccgactcgatctcctccgggcggatctacaccaacgtgctcgagaaagagcgccgcggcgactacctcggcaaaacgatccaggtgattccgcatgtcaccaacgagatcaaggacttcatctccatcggagaggatgaggtcgatttcatgctctgcgagatcggcggcaccgtgggtgacatcgaggggctgcccttctttgaggccatccgccagttcagccaggacaagccgcgcggtcagtgtatcttcatgcacctgacgctgcttccctacatcaaggcctctggcgagttgaaaaccaaaccgacccagcactccgtgaaggagctgcgttccatcggtctggcccccgatattctggtctgccgctccgagggtccgatcccggtgaaagaacgcgaaaagctggcgctcttctgcaacgtgcgcgccgacagcgtgattgcggcgcaggatctgaaatccatctacgaagcgccgctggcctatcaccgcgaaggactcgatcaggcggttctggacgcctttggcatcgcccctgccccgcgcccgacgctggacacctgggaagacgtggccgaccgcatctacaaccccgagggcgaagtcaaagtcgccatcgtcggcaaatacacccagctggaagacgcctataaatccatcgccgaggcgctcacccatggtggcatggcgaaccgggtaaaggtgcgtatcgaatgggtcgatgcagagctcttcgacaaggaagacgcaacgccgtatctgcagggttttcacgcgatcctcgtgcccggcggctttggcgagcgcggcaccgaaggcaagatcaaggcggcgcaatatgcccgcgagcacaaggtgccctacctcggtatctgcctcggtatgcagatggccgtgatcgaagctgcccgcaacgtggccggcatcgaggaagcaggctccgaagagttcgaccatgaagcgggcaaaaagcgttttgagcccgttgtttaccacctcaaggaatgggtgcagggcaaccacaaggtgagccgcagcgccgatgacgacaaaggcggcaccatgcgtcttggcgcctatgatgcggcgcttaccgaaggttccaaagtggccgaggtctatggctccaacgcgattgaggagcgtcaccgccaccgctatgaggtggacatcaagtaccgcgagcaactcgaagcctgtggtctgaagttcactggcatgagcccggatggccgcctgcccgagatcgtggaatggaccgatcatccgtggtttatcggcgtgcagttccacccggaactcaagtccaagccctttgatccgcacccgctgttcaaggattttgtacgcgcggccaaggacacatcccgcttggtctaa

SEQ ID NO: 31597 - protein, 547 aa, Silicibacter sp
MARFIFITGGVVSSLGKGLASAALGALLQARGYSVRLRKLDPYLNVDPGTMSPFEHGEVFVTDDGAETDLDLGHYERFTGVPARKTDSISSGRIYTNVLEKERRGDYLGKTIQVIPHVTNEIKDFISIGEDEVDFMLCEIGGTVGDIEGLPFFEAIRQFSQDKPRGQCIFMHLTLLPYIKASGELKTKPTQHSVKELRSIGLAPDILVCRSEGPIPVKEREKLALFCNVRADSVIAAQDLKSIYEAPLAYHREGLDQAVLDAFGIAPAPRPTLDTWEDVADRIYNPEGEVKVAIVGKYTQLEDAYKSIAEALTHGGMANRVKVRIEWVDAELFDKEDATPYLQGFHAILVPGGFGERGTEGKIKAAQYAREHKVPYLGICLGMQMAVIEAARNVAGIEEAGSEEFDHEAGKKRFEPVVYHLKEWVQGNHKVSRSADDDKGGTMRLGAYDAALTEGSKVAEVYGSNAIEERHRHRYEVDIKYREQLEACGLKFTGMSPDGRLPEIVEWTDHPWFIGVQFHPELKSKPFDPHPLFKDFVRAAKDTSRLV

SEQ ID NO: 31598 - DNA, 1632 bp, Sphingopyxis alaskensis
  CDS (1)..(1632): transl_table=11
atggcgcggttcattttcattaccggcggcgtggtctcctcgcttggcaagggtttgatggcggccagcctcgctgccctcctgcaagcgcgtggctatcgtgtccgcatccgaaagttcgatccctatctgaacgtcgatccgggcacgatgtcgccctatcagcacggcgaagtctatgtgaccgatgacggagcggaaaccgacctcgacctgggccattatgaacgcttcaccggcgttgcggcgcggcagagcgacaatgtgacctcgggccgtatctatcagggcatcatcgccaaggaacgccgcggcgactatctcggcgcgacggtacaggttgtcccgcacgtcaccgacgcgatcaaggatttcgcccgcgccgaaaccgacgacctcgatttcgtgctgtgcgagatcggcggcaccgtcggcgatatcgaatcgctgccctttatcgaggcgatccgccagttgaagaatgaggtcggccgcgacaacgccatctcggtccacgtcacgctggtgccctatatcgccgccgcgggcgagttgaagacaaagccgacgcagcacagcgtgcgcgaactcgcctcgctcggcgtccagcccgacattctgctctgccgatgcgaaaagccgcttcccgacagcgaacgcgccaagatcgcgctgttctgcaatgtccgcaaggaagcggtgattcccgcgctcgacgccgacagcatctattcggtaccggtccagtatcatggcgagggtctggacagcgaagtgctgcgcgcattcggaatcctcgacgcgcccgcgcccgacctgacggcctggtatgacatcatggaccgcaagcagcatcccgagggcgaggtcacgatcggcgtcgtcggcaaatatgtctcgctgcccgatgcctataaatccctgaacgaggcgctggtccatggcggcatggcgcaccgggtcaaggtcaatatccgctggctcgacgccgaaatgttcgagcgcgacgaagacctggtcgccaatctcgaaccgctgcacggcatcctcgtccccggcggcttcggcgagcgcgggtcggagggcaagattgcgagcgtgcgtttcgcgcgcgagcggaatgtgccctttttcggcatctgcctggggatgcagatggcgtgcatcgaggcggcgcgcaatacgagcggcattgcgaatgcgtcgagtaccgaattcggtccgaccgacgaacccgtcgtcggcctgatcaccgaatggatgagcgccgaagggcttcagaaacgcggtgcgaacaccgatcttggcggcacgatgcgcctcggcgcctatgacgcgaaactttcgccgaacagccatgtcgccagcgtctatggcacgaacgagatcagcgagcgtcaccgccaccgctatgaggtcaacggggcctatcgcgagcggctcgaaaagggcgggctcgtcttttcaggcatgtcgcccgacggcatgctaccggaaatcgttgagcggccggaccatccgtggtttatcggggtgcaattccacccggaactcaaatccaagcccttcgacccgcatcccctgtttgcaggattcatcgaggcggcggtgaagcagagccggctggtctga

SEQ ID NO: 31599 - protein, 543 aa, Sphingopyxis alaskensis
MARFIFITGGVVSSLGKGLMAASLAALLQARGYRVRIRKFDPYLNVDPGTMSPYQHGEVYVTDDGAETDLDLGHYERFTGVAARQSDNVTSGRIYQGIIAKERRGDYLGATVQVVPHVTDAIKDFARAETDDLDFVLCEIGGTVGDIESLPFIEAIRQLKNEVGRDNAISVHVTLVPYIAAAGELKTKPTQHSVRELASLGVQPDILLCRCEKPLPDSERAKIALFCNVRKEAVIPALDADSIYSVPVQYHGEGLDSEVLRAFGILDAPAPDLTAWYDIMDRKQHPEGEVTIGVVGKYVSLPDAYKSLNEALVHGGMAHRVKVNIRWLDAEMFERDEDLVANLEPLHGILVPGGFGERGSEGKIASVRFARERNVPFFGICLGMQMACIEAARNTSGIANASSTEFGPTDEPVVGLITEWMSAEGLQKRGANTDLGGTMRLGAYDAKLSPNSHVASVYGTNEISERHRHRYEVNGAYRERLEKGGLVFSGMSPDGMLPEIVERPDHPWFIGVQFHPELKSKPFDPHPLFAGFIEAAVKQSRLV

SEQ ID NO: 31600 - DNA, 1608 bp, Spiroplasma citri
  CDS (1)..(1608): transl_table=4
atggcaaaatatatttttgtaactggtggagttgttagtggtttagggaaagggattacagcttcttcaattggtgttttattaaaagcaagtgggttaaatgtttttatgcaaaaatttgatccatatttaaatgttgatcctggaacaatgagcccttatcaacatggtgaagtttttgtaacaacagatggtgcagaaacagatttagatttaggacattatgaacgttttattgatgaaaatttaactaaagaatcaaatattacttcaggacgaatatataaaaatgtaattgaaaaagaacgtcgtggcgaatatgatggtggaacagttcaagttgttccacatgttacaaatgaaattaaaaagaaagtttatcatgctgcatcaacttcaaaagcagatattattattactgaaattggggggacagttggagatattgaatcgttaccttttattgaagcaattcgtcaagttcgaatggaacaaggacgagaaaatgttatttatatgcatgtttccttagttccatatattgcagcatcaaaagaatcaaagacaaagccaacccaacattcagtccgagaactattatcactggggattcaaccagatattgttgttgcccgcactgaacaagctctagatgataacgttcttgaaaaaattgctctattttgtaatatcgaaaaaagtaatgttttagtagctactgatgttgctagtattttatgaagtcataaaatgtatgaacaaaatgctcaaatagtaattagtaagttattaaatttaaaatcactaaaaactgatatgtcagaatgaaaacggtttgttgaaaaaattaatcagtctcaacaagtaattgaaattaaattagttggaaaatatattgaacttccagatgcttatttatcagttagtgaatcgttgcgaattgctggatatgaaaataaggttaaaattaaaattgattgaattaaagcagaagatgttaataaaaaaaatgatcaacaattattaaaaaatgccaaaggcattttagttcctggtggctttgatgaacgtggttttgaaggacgtggttttgaagggaaaattttagcatgccaatttgctcgtgaaaataacattccgttttttggaatttgttttggaatgcaagcagctgtaattgaatttgcccgtaatgtttgtcatattcaagatgctaattcttcagaattaacagaaacaaaaaatgcaattattgacattattcgtggaaaagataaaactgatgctttaggaggaacattacgcttaggtaattataaaacaacttttgttccaaacacattagcccataaattatatggcaaaaaatgaggctttagaacgtctcgtcatcgctatgaagttaataatgattatcgtgaacaattagcgcaagcagggctagtatttagtggcctttatgttgagaaaaacttagtagaagtcattgaaatccccaaataccctttttaccttgctgctcaatatcatcccgaatttacttctcgcccaaataaaccgaatccattatttaatggttttgtgcaagcagtaattaaaaataaataa

SEQ ID NO: 31601 - protein, 535 aa, Spiroplasma citri
MAKYIFVTGGVVSGLGKGITASSIGVLLKASGLNVFMQKFDPYLNVDPGTMSPYQHGEVFVTTDGAETDLDLGHYERFIDENLTKESNITSGRIYKNVIEKERRGEYDGGTVQVVPHVTNEIKKKVYHAASTSKADIIITEIGGTVGDIESLPFIEAIRQVRMEQGRENVIYMHVSLVPYIAASKESKTKPTQHSVRELLSLGIQPDIVVARTEQALDDNVLEKIALFCNIEKSNVLVATDVASILWSHKMYEQNAQIVISKLLNLKSLKTDMSEWKRFVEKINQSQQVIEIKLVGKYIELPDAYLSVSESLRIAGYENKVKIKIDWIKAEDVNKKNDQQLLKNAKGILVPGGFDERGFEGRGFEGKILACQFARENNIPFFGICFGMQAAVIEFARNVCHIQDANSSELTETKNAIIDIIRGKDKTDALGGTLRLGNYKTTFVPNTLAHKLYGKKWGFRTSRHRYEVNNDYREQLAQAGLVFSGLYVEKNLVEVIEIPKYPFYLAAQYHPEFTSRPNKPNPLFNGFVQAVIKNK

SEQ ID NO: 31602 - DNA, 1611 bp, Staphylococcus aureus
  CDS (1)..(1611): transl_table=11
atgacaaaatttatttttgtaacaggtggcgtagtttcatcattagggaagggtattacagcatcttctctaggtagattattaaaagatagaggtctaaatgtaacaattcaaaaattcgatccatacttaaatgttgacccaggtacaatgagtccttatcaacatggtgaagtattcgtaacggatgatggtgcagaaactgacctagacttaggacattacgaaagatttattgatattaatttaaacaagttttcaaatgtgacagccggtaaagtgtattcacacgtattgaaaaaagaacgtcgtggtgattacttaggcggaacagttcaagttattccgcatattacaaatgaaattaaagaacgtttattacttgcaggggaaagtacgaatgcagacgttgttatcactgaaattggcggtacaacaggtgatattgagtcattaccgtttattgaagcgattcgtcaaattcgtagcgatttaggtagagaaaatgttatgtatgttcactgtacattactgccttatattaaagctgctggagaaatgaaaacgaagccaacacaacatagtgttaaagaattacgaggcttaggtattcaaccagacttaatcgttgtaagaactgaatatgaaatgacacaagatttaaaagataaaattgcattattctgtgacattaataaagaaagtgttattgaatgtcgtgatgcagactctttatacgaaattccattacaattaagccaacaaaatatggatgatatcgttattaaacgtttacaattaaacgcgaaatatgaaacacagcttgatgaatggaaacagttgttagatatcgttaataatttagatggtaaaattacaattggtttagtaggtaaatatgttagcttacaagatgcatatttatcagttgttgaatcattgaaacatgctggatatccttttgccaaagatattgacattagatggattgattcaagtgaagtaacagatgaaaatgcagccgaataccttgcagatgtcgacggtattttagtaccaggtggatttggtttccgtgcaagtgaaggtaaaattagtgcaattaagtatgctagagaaaacaatgtaccattctttggtatttgtttaggaatgcaacttgcaacagttgaattttcaagaaacgtattaggccttgaaggcgcacattcagctgaattagacccagcaacaccatacccaattatagatttattaccagaacaaaaagatatcgaagatttaggtggtacattacgcttaggcttatattcatgttcaattaaagaaggcacattggcacaagatgtttatggtaaagcggaaattgaagaaagacatcgtcatcgttatgaatttaataatgactatagagaacaattagaagcaaatggtatggtgatttctggtacaagtccagatggacgtttagtagaaatggtagagattccgacaaatgatttctttattgcttgtcaattccacccagaattcttatctagaccaaatcgtccgcacccgatttttaaatcatttattgaagcttcattaaaatatcaacaaaataaataa

SEQ ID NO: 31603 - protein, 536 aa, Staphylococcus aureus
MTKFIFVTGGVVSSLGKGITASSLGRLLKDRGLNVTIQKFDPYLNVDPGTMSPYQHGEVFVTDDGAETDLDLGHYERFIDINLNKFSNVTAGKVYSHVLKKERRGDYLGGTVQVIPHITNEIKERLLLAGESTNADVVITEIGGTTGDIESLPFIEAIRQIRSDLGRENVMYVHCTLLPYIKAAGEMKTKPTQHSVKELRGLGIQPDLIVVRTEYEMTQDLKDKIALFCDINKESVIECRDADSLYEIPLQLSQQNMDDIVIKRLQLNAKYETQLDEWKQLLDIVNNLDGKITIGLVGKYVSLQDAYLSVVESLKHAGYPFAKDIDIRWIDSSEVTDENAAEYLADVDGILVPGGFGFRASEGKISAIKYARENNVPFFGICLGMQLATVEFSRNVLGLEGAHSAELDPATPYPIIDLLPEQKDIEDLGGTLRLGLYSCSIKEGTLAQDVYGKAEIEERHRHRYEFNNDYREQLEANGMVISGTSPDGRLVEMVEIPTNDFFIACQFHPEFLSRPNRPHPIFKSFIEASLKYQQNK

SEQ ID NO: 31604 - DNA, 1608 bp, Staphylococcus epidermidis
  CDS (1)..(1608): transl_table=11
atgacaaagtttatttttgtaacaggcggggttgtgtcatcattaggaaaaggaataacagccgcttctctaggaagattacttaaagatagaggacttaaagttacaatacaaaaattcgatccatatttaaatgtagacccaggcacaatgagtccgtatcaacatggtgaagtgttcgttacagacgatggtgctgagactgatttagacttaggacattatgaacgttttatagatattaatttaaataaatattcaaatgttactgccggaaaagtatattcacatgtgttgaaaaaagaacgccgtggtgattacttgggtggtactgtacaagttattccccatattacaaacgaaattaaagaaagattgctattagctggtgagagtactaatgcggatgttgtaattactgaaattggtggaacaacaggtgatatagagtctttacctttcttggaagccattcgtcaaattagaagcgacttaggtcgtgaaaatgtaatgtatgtacattgtactttgctaccatatattaaagctgctggggaaatgaaaacaaaacctacacagcacagtgttaaagaattacgaggtctaggtattcaacctgatttaatagtagtacgtacagaatacgaaatgacacaagatttgaaagacaaaatcgccctattttgtgatatcaaaaaggaaagtgttatagaatgtagagatgcagattctctttatgaaattccgttacaacttagtaagcaaaatatggacgacattgttattcaacgtttacaattaaatgccaagtatgaaacgcaattggatgagtggaaacatctattaaataccgttaataatttagatggtaaaattacaatcggtttagttggtaaatatgtgagcttacaagatgcttatctatcagttgttgaatcacttaagcatgctggttatccatttaaaaaagacgttgtggtaaaatggattgattcaagtgaggtcaatgatgataatgttgaggcttatttatccgacgttgatggtattttagttcctggtggatttggattcagagcaagtgaaggtaaaattgcagctattcgttatgcccgtgagaataacataccattctttggcatttgtctaggaatgcaattggcaactgttgaatttgcgcgtcatgttttaggctatgaaggtgcgcattcagcagaattagatccaagtacaccatatccaattatagatttattaccagaacaaaaagatattgaagatttaggtggaaccttaagacttggtctttatccttgccacattaaagaaggtacattggcagagaaaatttataataaaaacgatattgaagaacgtcatcgtcatagatatgaattcaataacgagtttagggaacaattagaaagtaacggtatggtattttcaggtacaagtccagatggtcgtttagtagaaattattgaaatacctaaaaatgatttctttattgcatgtcaattccatcctgaattcttatcaagacctaatcgtccacagcctatatttaaatcatttgtagaagcggcgttgaattaccaacaaaaataa

SEQ ID NO: 31605 - protein, 535 aa, Staphylococcus epidermidis
MTKFIFVTGGVVSSLGKGITAASLGRLLKDRGLKVTIQKFDPYLNVDPGTMSPYQHGEVFVTDDGAETDLDLGHYERFIDINLNKYSNVTAGKVYSHVLKKERRGDYLGGTVQVIPHITNEIKERLLLAGESTNADVVITEIGGTTGDIESLPFLEAIRQIRSDLGRENVMYVHCTLLPYIKAAGEMKTKPTQHSVKELRGLGIQPDLIVVRTEYEMTQDLKDKIALFCDIKKESVIECRDADSLYEIPLQLSKQNMDDIVIQRLQLNAKYETQLDEWKHLLNTVNNLDGKITIGLVGKYVSLQDAYLSVVESLKHAGYPFKKDVVVKWIDSSEVNDDNVEAYLSDVDGILVPGGFGFRASEGKIAAIRYARENNIPFFGICLGMQLATVEFARHVLGYEGAHSAELDPSTPYPIIDLLPEQKDIEDLGGTLRLGLYPCHIKEGTLAEKIYNKNDIEERHRHRYEFNNEFREQLESNGMVFSGTSPDGRLVEIIEIPKNDFFIACQFHPEFLSRPNRPQPIFKSFVEAALNYQQK

SEQ ID NO: 31606 - DNA, 1605 bp, Streptococcus agalactiae serotype V
  CDS (1)..(1605): transl_table=11
atgacaaagtatatttttgttacaggtggtgtggtctcttctattggtaaggggattgttgcagcaagtcttgggcgcttactaaaaaaccgtgggctaaaggtgacaattcaaaaatttgatccatatattaatattgatccagggacaatgagcccttatcaacatggagaagtttatgttacagatgatggtgcagaaactgaccttgaccttggacactacgagcgttttattgatattaacttaaacaaatattcaaatgttacaacgggtaagatttatagtgaagttcttaaaaaagaacgccgtggagaataccttggtgcaactgttcaagttatcccacacgttacagatgctttgaaagaaaaaatcaaacgtgctgcgacaactacagattcagatgttattattactgaagttggcggtactgttggagatattgagagccttccgtttttagaagcacttcgtcaaatgaaggcagatgttggttctgataatgttatgtacattcatacaacgttattaccatacctaaaggctgccggcgaaatgaaaacaaaaccgactcaacattctgttaaagagttacgtggcctaggtatccaacctaatatgcttgttatccgtacagagcaaccagcaggtcaaagtattaagaataaattggcacaattttgtgatgttgcaccagaggctgttatagagtcccttgacgttgaccatatttatcaaattccacttaacatgcaagctcaaaatatggatcaaattgtttgtgatcacttgaagcttgagacacctgctgctgatatgacagaatggtcagcaatggttgataaagtaatgaaccttgagaaaaaagttaaaattgcattggttggtaaatatgttgaattacctgatgcctacctttcagttgtggaagcccttaagcactcagggtacgtcaacgatgttgctattgatctaaaatgggtaaatgctgctgaagtgacagaagataatattaaagaacttgtcggagatgcagatggtatcatcgttcctggtggatttggccaaagaggtagtgagggtaaaattgaagcaattcgctatgcacgtgaaaatgatgttccaatgcttggtgtttgtctcggaatgcagctaacttgtgtcgaatttgcgcgtaatgttttaaaccttcatggagctaattcagcagagcttgaccctaaaacaccgttcccaatcattgatatcatgcgtgatcaaatcgatattgaagatatgggtggtacacttcgccttggtctatatccatgtaaattgaaatcaggttcaagagctgcggcagcttataataatcaagaagttgtccaacgtcgtcaccgtcaccgttatgaatttaatacaaaattccgtgagcaatttgaggctgctggatttgtcttctcaggggtatcaccggataatcgtttgatggaagttgttgagttaccagagaaaaaattctttgttgcagcacaataccatccagaattacaatcacgtcctaaccatgctgaagagctttacacagcttttgtaaccgcagcagttgaaaatatgaaataa

SEQ ID NO: 31607 - protein, 534 aa, Streptococcus agalactiae serotype V
MTKYIFVTGGVVSSIGKGIVAASLGRLLKNRGLKVTIQKFDPYINIDPGTMSPYQHGEVYVTDDGAETDLDLGHYERFIDINLNKYSNVTTGKIYSEVLKKERRGEYLGATVQVIPHVTDALKEKIKRAATTTDSDVIITEVGGTVGDIESLPFLEALRQMKADVGSDNVMYIHTTLLPYLKAAGEMKTKPTQHSVKELRGLGIQPNMLVIRTEQPAGQSIKNKLAQFCDVAPEAVIESLDVDHIYQIPLNMQAQNMDQIVCDHLKLETPAADMTEWSAMVDKVMNLEKKVKIALVGKYVELPDAYLSVVEALKHSGYVNDVAIDLKWVNAAEVTEDNIKELVGDADGIIVPGGFGQRGSEGKIEAIRYARENDVPMLGVCLGMQLTCVEFARNVLNLHGANSAELDPKTPFPIIDIMRDQIDIEDMGGTLRLGLYPCKLKSGSRAAAAYNNQEVVQRRHRHRYEFNTKFREQFEAAGFVFSGVSPDNRLMEVVELPEKKFFVAAQYHPELQSRPNHAEELYTAFVTAAVENMK

SEQ ID NO: 31608 - DNA, 1650 bp, Streptomyces avermitilis
  CDS (1)..(1650): transl_table=11
atgccgcccaaatccacgacgaccaagcacatcttcgtcaccgggggtgtcgcctcctcgctcggcaagggcctcaccgcctccagcctgggcatgctgctcaaagcgcgggggctgcgggtcgtgatgcagaagctcgacccctacctgaacgtcgacccgggcacgatgaacccgttccagcacggtgaggtgttcgtcaccaacgacggcgccgagaccgacctggacatcggccactacgagcgcttcctcgaccgtgacctggacggttcggccaacgtgaccaccgggcaggtgtactcgacggtcatcgccaaggagcggcgcggcgagtacctgggcgacaccgtgcaggtcatcccgcacatcaccaacgagatcaagcaccgcatccgccgcatggcgacggacgaggtggatgtcgtcatcaccgaggtcggcggcacggtcggcgacatcgagtcgctgccgttcctggagaccgtccgccaggtccgtcacgaggtcggccgggacaacgtcttcgtggtccacatctcgctcctcccgtacatcggcccctcgggtgagctgaagacgaagccgacccagcactcggtcgccgccctcaggaacatcggtattcagccagacgcgatcgttctgcgctgcgaccgcgaggtccccaccgcgatcaagcgcaagatctcgctgatgtgcgacgtcgacgaggccgccgtggtcgcctgccccgacgcccgctcgatctacgacattccgaagaccgtgcacggcgagggcctggacgcctatgtcgtccgcaagctggacctcccgttccgcgacgtggactggaccacctgggacgacctgctcgaccgcgtccacaagccggaccacgagatcaacctcgcgctggtcggcaagtacatcgacctgcccgacgcctacctctcggtcaccgaggcgctgcgcgcgggcggcttcgccaatcgcgcccgcgtgaagatcaagtgggtcacctcggacgactgcaagaccccggccggcgccgcggggcagctcggtgacgtcgacgcgatctgcatcccgggcggcttcggcgaccgcggtgtgtccggcaaggtgggcgcgatccagtacgcccgcgagcaccggattccgctgctcggcctctgcctgggcctgcagtgcatcgtgatcgaggcggcccggaacctggccgacatccccgacgcgaactcgacggagttcgactccgccaccggccaccccgtcatctccaccatggccgagcagctcgacatcgtggcgggcgagggcgacatgggcgggacgatgcgcctgggcatgtacccggccaagctcgccgagggctccatcgtgcgcgaggtgtacgacggcaaggagtacgtcgaggagcgccaccgccaccgctacgaggtgaacaacgcctaccgcgcggagctggagaagaaggccggtctgcagttctccggcacgtccccggacggcaagctcgtcgagtacgtcgagtacccgcgcgaggtgcacccctacctggtggcgacgcaggcgcacccggagctgcgctcgcgcccgacccgcccgcatccgctcttcgcgggcctggtgaaggccgctgtggagcgcaagacgggcaagtag

SEQ ID NO: 31609 - protein, 549 aa, Streptomyces avermitilis
MPPKSTTTKHIFVTGGVASSLGKGLTASSLGMLLKARGLRVVMQKLDPYLNVDPGTMNPFQHGEVFVTNDGAETDLDIGHYERFLDRDLDGSANVTTGQVYSTVIAKERRGEYLGDTVQVIPHITNEIKHRIRRMATDEVDVVITEVGGTVGDIESLPFLETVRQVRHEVGRDNVFVVHISLLPYIGPSGELKTKPTQHSVAALRNIGIQPDAIVLRCDREVPTAIKRKISLMCDVDEAAVVACPDARSIYDIPKTVHGEGLDAYVVRKLDLPFRDVDWTTWDDLLDRVHKPDHEINLALVGKYIDLPDAYLSVTEALRAGGFANRARVKIKWVTSDDCKTPAGAAGQLGDVDAICIPGGFGDRGVSGKVGAIQYAREHRIPLLGLCLGLQCIVIEAARNLADIPDANSTEFDSATGHPVISTMAEQLDIVAGEGDMGGTMRLGMYPAKLAEGSIVREVYDGKEYVEERHRHRYEVNNAYRAELEKKAGLQFSGTSPDGKLVEYVEYPREVHPYLVATQAHPELRSRPTRPHPLFAGLVKAAVERKTGK

SEQ ID NO: 31610 - DNA, 1650 bp, Streptomyces coelicolor
  CDS (1)..(1650): transl_table=11
atgccgcccaaatcctcgacgaccaagcacatcttcgtcaccgggggtgtcgcctcctcgctcggcaaggggctcaccgcctccagcctcggcatgctgctcaaggccaggggcctgcgcgtcgtgatgcagaagctcgacccgtacctgaacgtcgaccccggcacgatgaaccccttccagcacggtgaggtcttcgtcaccaacgacggcgccgagaccgacctggacatcggccactacgagcgcttcctcgaccgcgacctcgacggctcggccaacgtcaccaccggccaggtgtactccacggtgatcgccaaggagcggcgcggcgagtacctgggcgacaccgtccaggtcatcccgcacatcaccaacgagatcaagcaccgcatccgccgcatggcgacggacgaggtcgacgtcgtgatcaccgaggtcggcggcaccgtcggcgacatcgagtcgctgccgttcctggagaccgtccgccaggtccggcacgaggtcggccgcgacaacgtgttcgtcgtgcacatctcgctcctgccctacatcggcccctcgggcgagctgaagaccaagcccacccagcacagcgtcgccgccctgcgcaacatcggcatccagccggacgcgatcgtcctgcgctgcgaccgcgaggtcccgaccgcgatcaagcgcaagatctccctgatgtgcgacgtcgacgaggcggccgtggtggcctgccccgacgcccgctccatctacgacattccgaaggtcatccacaccgagggcctggatgcctacgtcgtccgcaggatggacctgccgttccgcgacgtggactggaccacctgggacgacctgctcgaccgggtccacaaccccgagcacgagatcgtcatggccctggtcggcaagtacatcgacctgcccgacgcctacctctcggtcaccgaggcgctgcgcgcgggcggcttcgccaacaaggcgcgggtgaagatcaagtgggtcacgtccgacgactgcaagaccccggccggcgccagggtccagctcggcgacgtcgacgcgatctgcatcccgggcggcttcggcgagcgcggtgtgaccggcaaggtgggcgcgatccagtacgcccgtgagaacgggatcccgctgctcggcctctgcctcggcctgcagtgcatcgtcgtcgaggccgcgcgcaacctggccggtgtcgcggacgccaactccaccgagttcgaccccgccaccgcccacccggtcgtctccaccatggccgagcagctggacatcgtggccggcgagggcgacatgggcggcaccatgcggctcggtatgtacccggcgaagctggccgagggctccatcgtgcgcgaggtctacgacggcaaggagtacgtcgaggagcggcaccgccaccgctacgaggtgaacaacgcctaccgcgcggagctggagaagaaggccggcatcgtcttctcgggcacctccccggacggcaagctcgtcgagtacgtcgagtacccgcgcgacgtccacccctacctggtcgccacgcaggcgcacccggagctgcgctcgcgcccgacccgcccgcacccgctcttcgccgggctggtcaaggccgcggtcgagcggaagacgtcgaagtaa

SEQ ID NO: 31611 - protein, 549 aa, Streptomyces coelicolor
MPPKSSTTKHIFVTGGVASSLGKGLTASSLGMLLKARGLRVVMQKLDPYLNVDPGTMNPFQHGEVFVTNDGAETDLDIGHYERFLDRDLDGSANVTTGQVYSTVIAKERRGEYLGDTVQVIPHITNEIKHRIRRMATDEVDVVITEVGGTVGDIESLPFLETVRQVRHEVGRDNVFVVHISLLPYIGPSGELKTKPTQHSVAALRNIGIQPDAIVLRCDREVPTAIKRKISLMCDVDEAAVVACPDARSIYDIPKVIHTEGLDAYVVRRMDLPFRDVDWTTWDDLLDRVHNPEHEIVMALVGKYIDLPDAYLSVTEALRAGGFANKARVKIKWVTSDDCKTPAGARVQLGDVDAICIPGGFGERGVTGKVGAIQYARENGIPLLGLCLGLQCIVVEAARNLAGVADANSTEFDPATAHPVVSTMAEQLDIVAGEGDMGGTMRLGMYPAKLAEGSIVREVYDGKEYVEERHRHRYEVNNAYRAELEKKAGIVFSGTSPDGKLVEYVEYPRDVHPYLVATQAHPELRSRPTRPHPLFAGLVKAAVERKTSK

SEQ ID NO: 31612 - DNA, 1611 bp, Streptococcus mutans
  CDS (1)..(1611): transl_table=11
atgacaaaatatatttttgtaacaggtggtgtcgtttcgtcaattggtaagggaattgttgctgcaagtcttggacgtcttttgaaaaatcgtgggcttaaagtaaccattcaaaaatttgatccgtatattaatattgatcctggaacaatgagtccttatcagcatggtgaagtttatgtgactgatgatggtgctgaaactgaccttgaccttggacattacgaacgtttcattgatattaatctgaataaatattcaaatgttacaacaggaaagatatatagcgaggttctgcgtaaagaacgtaaaggtgaatatcttggagcaactgttcaagttattccccatattacagatgctctaaaagaaaaaattaaacgtgcagctacaacaacagactcagatgttattatcactgaagttggtggtacggttggtgatattgaaagcttgcccttccttgaagcccttcgtcaaatgaaagctgatgtgggtgctgataatgtcatgtatattcatacgactttgcttccttatcttaaagctgcaggagaaatgaaaacaaaaccaacccaacactctgttaaagagctgcgtggtttgggaattcaacctaatatgcttgttattcggacagaacagccagccggacaaggtattaaaaataaattagctcaattctgtgatgttgctccagaagctgttattgaatcacttgatgtggatcatctttatcaaattccgttaaatcttcaagcacaaaatatggatcagattgtttgtgatcacttaaaactggatgtgcctgttgccgatatgaccgaatggtcagcaatggttgataaggttatgaatctcaagaaaaagactaagattgctctagttgggaaatatgtagaattgccagatgcttatttatcagtcgttgaagctcttaagcattcgggctatgttaatgatacagccattgatctcaattggattaatgctaatgaggtcactcctgaaacggttactgatttgctgggagatgctgatggtattattgttccgggtggatttggccatcgtggaacagaagggaaaatagaagctattcgttatgcgcgtgaaaacgatgtgcctatgctaggaatctgtcttggcatgcaattgacttgtgttgaatatgctcgtcatgtccttaaccttgaaggagctaattctgcggaattggatccagataccaaatatccagttattgatattatgcgcgatcagattgatattgaggatatgggaggaacgcttcgccttggcctttatccatgtaaattgaaatcaggcagcaaaacagcatcagcttatagcaatcaagaggtcgtacagcgccgtcaccgtcatcgttatgaatttaataatgcctttcgtcagcaatttgaggaggctggtttcgtattttcaggagtatcaccagataatcgcttggtagaagtggtggaattgtcagataaaaaattttttgttgcagctcaatatcatccagaattacagtctcgtccgaatcgtccggaagaactttatacagcttttattactgcagcggttgaaaacagtcaggcacattaa

SEQ ID NO: 31613 - protein, 536 aa, Streptococcus mutans
MTKYIFVTGGVVSSIGKGIVAASLGRLLKNRGLKVTIQKFDPYINIDPGTMSPYQHGEVYVTDDGAETDLDLGHYERFIDINLNKYSNVTTGKIYSEVLRKERKGEYLGATVQVIPHITDALKEKIKRAATTTDSDVIITEVGGTVGDIESLPFLEALRQMKADVGADNVMYIHTTLLPYLKAAGEMKTKPTQHSVKELRGLGIQPNMLVIRTEQPAGQGIKNKLAQFCDVAPEAVIESLDVDHLYQIPLNLQAQNMDQIVCDHLKLDVPVADMTEWSAMVDKVMNLKKKTKIALVGKYVELPDAYLSVVEALKHSGYVNDTAIDLNWINANEVTPETVTDLLGDADGIIVPGGFGHRGTEGKIEAIRYARENDVPMLGICLGMQLTCVEYARHVLNLEGANSAELDPDTKYPVIDIMRDQIDIEDMGGTLRLGLYPCKLKSGSKTASAYSNQEVVQRRHRHRYEFNNAFRQQFEEAGFVFSGVSPDNRLVEVVELSDKKFFVAAQYHPELQSRPNRPEELYTAFITAAVENSQAH

SEQ ID NO: 31614 - DNA, 1608 bp, Streptococcus pneumoniae
  CDS (1)..(1608): transl_table=11
atgtctacgaaatatatttttgtaactggtggtgtggtatcgtccattgggaaagggattgtggcagcgagtctaggccgtctcttgaaaaatcgtggtctcaaagtaaccattcaaaagtttgacccttatatcaatattgatccgggaaccatgagtccttaccagcacggggaagtttttgtgacagatgacggagctgagacagatttggacttgggtcactatgaacgtttcatcgatatcaatctcaacaaatattccaacgtgacaactgggaaaatttacagtgaagttcttcgtaaagaacgccgtggagaataccttggggcaactgttcaagtcattcctcatatcacagatgctttgaaagaaaaaatcaagcgtgccgctctaacgaccgactctgatgtcattatcacagaggttggtggaacagtaggagatatcgagtccttgccattcctagaggctcttcgtcagatgaaggcagatgtgggtgcggataatgtcatgtatatccatacaaccttgcttccttacctcaaggctgctggtgaaatgaaaaccaaaccaacccaacactctgtcaaagaattgcgtggcttgggaatccaaccaaatatgttggttattcgtacagaagagccagctggtcaaggaattaaaaataaactggcccagttctgtgatgtggcaccagaagccgttatcgaatcgttggatgttgaacacctttaccaaattccactgaacttgcaggcacaagggatggaccaaattgtttgtgatcatttgaaattagacgcaccagcagcggatatgacagaatggtcagccatggtggacaaggtcatgaacctcaagaaacaagttaagatttcccttgttggtaagtatgtggagttgcaagatgcctatatctcagtggtcgaagccttgaaacactctggctatgtcaatgatgcagaagttaaaatcaattgggtcaatgccaatgatgtgacagcagagaatgtagcagaactcttgtctgatgcggacgggatcatcgtaccaggtggttttggtcaacgtggtacagaagggaaaatccaagccatccgctatgcgcgtgaaaatgatgttccaatgttgggagtctgcttgggaatgcagttgacatgtatcgagtttgctcgtcacgttttaggtcttgaaggtgccaattctgcagagcttgcaccagaaacaaaataccctatcattgatatcatgcgtgatcagattgatattgaggatatgggtggaacccttcgtttgggactttatccgtctaagttgaaacgtggctctaaggctgctgctgcttatcacaatcaagaagtggtgcaacgccgtcaccgtcaccgttatgagtttaataatgccttccgtgagcagtttgaggcagcaggttttgtcttttcaggagtttctccagacaatcgtttggtagaaatcgtggaaattcctgaaaataaattctttgtagcttgtcagtatcaccctgaactgtcaagccgtccaaaccgaccagaagaactctacactgcctttgttactgcagcagttgagaacagcaattag

SEQ ID NO: 31615 - protein, 535 aa, Streptococcus pneumoniae
MSTKYIFVTGGVVSSIGKGIVAASLGRLLKNRGLKVTIQKFDPYINIDPGTMSPYQHGEVFVTDDGAETDLDLGHYERFIDINLNKYSNVTTGKIYSEVLRKERRGEYLGATVQVIPHITDALKEKIKRAALTTDSDVIITEVGGTVGDIESLPFLEALRQMKADVGADNVMYIHTTLLPYLKAAGEMKTKPTQHSVKELRGLGIQPNMLVIRTEEPAGQGIKNKLAQFCDVAPEAVIESLDVEHLYQIPLNLQAQGMDQIVCDHLKLDAPAADMTEWSAMVDKVMNLKKQVKISLVGKYVELQDAYISVVEALKHSGYVNDAEVKINWVNANDVTAENVAELLSDADGIIVPGGFGQRGTEGKIQAIRYARENDVPMLGVCLGMQLTCIEFARHVLGLEGANSAELAPETKYPIIDIMRDQIDIEDMGGTLRLGLYPSKLKRGSKAAAAYHNQEVVQRRHRHRYEFNNAFREQFEAAGFVFSGVSPDNRLVEIVEIPENKFFVACQYHPELSSRPNRPEELYTAFVTAAVENSN

SEQ ID NO: 31616 - DNA, 1608 bp, Streptococcus pneumoniae
  CDS (1)..(1608): transl_table=11
atgtctacgaaatatatttttgtaactggtggtgtggtatcgtctattgggaaagggattgtggcagcgagtctaggccgtctcttgaaaaatcgtggtctcaaagtaaccattcaaaagtttgacccttatatcaatattgatccgggaaccatgagtccttaccagcacggggaagtttttgtgacagatgacggagctgagacagatttggacttgggtcactatgaacgtttcatcgatatcaatctcaacaaatattccaacgtgacaactgggaaaatttacagtgaagttcttcgtaaagaacgccgtggagaataccttggggcaactgttcaagtcattcctcatatcacagatgctttgaaagaaaaaatcaagcgtgccgctctaacgaccgactctgatgtcattatcacagaggttggtggaacagtaggagatatcgagtccttgccattcctagaggctcttcgtcagatgaaggcagatgtgggtgcggataatgtcatgtatatccatacaaccttgcttccttacctcaaggctgctggtgaaatgaaaaccaaaccaacccaacactctgtcaaagaattgcgtggcttgggaatccaaccaaatatgttggttattcgtacagaagagccagctggtcaaggaattaaaaataaactggcccagttctgtgatgtggcaccagaagccgttatcgaatcgttggatgttgaacacctttaccaaattccactgaacttgcaggcacaagggatggaccaaattgtttgtgatcatttgaaattagacgcaccagcagcggatatgacagaatggtcagccatggtggacaaggtcatgaacctcaagaaacaagttaagatttcccttgttggtaagtatgtggagttgcaagatgcctatatctcagtggtcgaagccttgaaacactctggctatgtcaatgatgtagaagttaaaatcaattgggtcaatgccaatgatgtgacagcagagaatgtagcagaactcttgtctgatgcggacgggatcatcgtaccaggtggttttggtcaacgtggtacagaagggaaaatccaagccatccgctatgcgcgtgaaaatgatgttccaatgttgggagtctgcttgggaatgcagttgacatgtatcgagtttgctcgtcacgttttaggtcttgaaggtgccaattctgcagagcttgcaccagaaacaaaataccctatcattgatatcatgcgtgatcagattgatattgaggatatgggtggaacccttcgtttgggactttatccgtctaagttgaaacgtggctctaaggctgctgctgcttatcacaatcaagaagtggtgcaacgccgtcaccgtcaccgttatgagtttaataatgccttccgtgagcagtttgaggcagcaggttttgtcttttcaggagtttctccagacaatcgtttggtagaaatcgtggaaattcctgaaaataaattctttgtagcttgtcagtatcaccctgaactgtcaagccgtccaaaccgaccagaagaactctacactgcctttgttactgcagcggttgagaacagcaattag

SEQ ID NO: 31617 - protein, 535 aa, Streptococcus pneumoniae
MSTKYIFVTGGVVSSIGKGIVAASLGRLLKNRGLKVTIQKFDPYINIDPGTMSPYQHGEVFVTDDGAETDLDLGHYERFIDINLNKYSNVTTGKIYSEVLRKERRGEYLGATVQVIPHITDALKEKIKRAALTTDSDVIITEVGGTVGDIESLPFLEALRQMKADVGADNVMYIHTTLLPYLKAAGEMKTKPTQHSVKELRGLGIQPNMLVIRTEEPAGQGIKNKLAQFCDVAPEAVIESLDVEHLYQIPLNLQAQGMDQIVCDHLKLDAPAADMTEWSAMVDKVMNLKKQVKISLVGKYVELQDAYISVVEALKHSGYVNDVEVKINWVNANDVTAENVAELLSDADGIIVPGGFGQRGTEGKIQAIRYARENDVPMLGVCLGMQLTCIEFARHVLGLEGANSAELAPETKYPIIDIMRDQIDIEDMGGTLRLGLYPSKLKRGSKAAAAYHNQEVVQRRHRHRYEFNNAFREQFEAAGFVFSGVSPDNRLVEIVEIPENKFFVACQYHPELSSRPNRPEELYTAFVTAAVENSN

SEQ ID NO: 31618 - DNA, 1590 bp, Sulfolobus acidocaldarius
  CDS (1)..(1590): transl_table=11
ttgactaagtacattatagttacaggaggagttctatctagtgtgggaaagggtactatagttgcttcgataggttttctcttaaaatccagtggttataatgtaactgcgataaaagttgacccatatctgaatgtagatgcaggtacaatgaatccatatatgcacggcgaagtctttgtaacagatgatggagctgaaacagatctggatttagggcattatgaaaggtttattgggataaatacgacacgttataataatataactgcaggtagggtttactttgaggttataaggaaagaaagagaagggaagtatttaggacaaacagttcaaattatacctcatgtgacagacgaaataaagggattagttaagaaagcagttgatgatactaatgcggaaattgcaataatcgaaataggaggcactgtaggtgatatagagggtctgcctttcttggaagcggttagacaaatgaagctagaagaggaagagaaccttatgtttattcatgtagcactcgttgaatacttaagggttacaggcgaattaaagacaaagccattacagcatagtgtacaagagctgagaagaattggaattcagcctgacatgataatagcaagatccatattacctcttgatgaggaaacgaagaagaagattgcattatttaccaatgtaaaaccagattatatactatctaactacgatgtagagttaacttatgaagtccctttaattttagagaagcaaaatataacaaaaaagatatttaataaattaggattggaaccaaaagaaccgaaagttgctgaatggttagaatttgtggaaaatatgaagaacccttcaaaagaagttaaaatagctttagtaggaaaatatactaaacttaaggacagttacctcagcattaaagaagcaatttatcacgctgctgcaaaacttagagtaaagcccacattagtatgggtagagtcttcagacttagagaaatcggaagatgaaattaataaacttaaggacgttaacggtattattgttttacctggctttggagccagaggcgtggaaggaaaaatacaagccataaaatttgctagagaaaacaacataccatttcttggaatttgttttggaatgcaactagccattgtagaatatgctagaaacgtcttgggattaaaggaggctaatacgaccgaagtaaatccaaatacgaagtatcctattataactctcttggataatcaaaagaaaatagttcaggttggtggtaccatgagattaggagcccaaaaaattatactaaaggagggcactttagcatattctatatacaattctccacacatatatgagagacatagacatagatatgaggtgaaccctgaatatgttgatcttcttcagaaatacggtatgataatatccggtgtaagtgaaaatggattggttgagattatagaattgaaaaaccacaagttcttcctaggtactcaagcacatccagagtacaagagtagacctttatcaccttctcctgttttcctaaacttccttagtgtcgccagtgcttaa

SEQ ID NO: 31619 - protein, 529 aa, Sulfolobus acidocaldarius
MTKYIIVTGGVLSSVGKGTIVASIGFLLKSSGYNVTAIKVDPYLNVDAGTMNPYMHGEVFVTDDGAETDLDLGHYERFIGINTTRYNNITAGRVYFEVIRKEREGKYLGQTVQIIPHVTDEIKGLVKKAVDDTNAEIAIIEIGGTVGDIEGLPFLEAVRQMKLEEEENLMFIHVALVEYLRVTGELKTKPLQHSVQELRRIGIQPDMIIARSILPLDEETKKKIALFTNVKPDYILSNYDVELTYEVPLILEKQNITKKIFNKLGLEPKEPKVAEWLEFVENMKNPSKEVKIALVGKYTKLKDSYLSIKEAIYHAAAKLRVKPTLVWVESSDLEKSEDEINKLKDVNGIIVLPGFGARGVEGKIQAIKFARENNIPFLGICFGMQLAIVEYARNVLGLKEANTTEVNPNTKYPIITLLDNQKKIVQVGGTMRLGAQKIILKEGTLAYSIYNSPHIYERHRHRYEVNPEYVDLLQKYGMIISGVSENGLVEIIELKNHKFFLGTQAHPEYKSRPLSPSPVFLNFLSVASA

SEQ ID NO: 31620 - DNA, 1608 bp, Sulfolobus solfataricus
  CDS (1)..(1608): transl_table=11
gtgccaaacaagtacatagtcgttacaggtggagttttgtcaagtgttggtaaaggtacgttagttgcctctattggcatgctactcaaaagaagaggatataatgtaactgcagtaaaaatagatccatatattaatgtcgatgcaggtacaatgaatccttatatgcatggtgaagtatttgtaactgaggatggggccgagacagatttagatttaggtcattatgagagatttatggatgttaatatgacaaagtacaataatataacagcaggcaaggtatatttcgaggttataaaaaaggaaagagaaggtaaatatctaggtcaaaccgtacaaattattccccacgttacggatcagataaaggatatgataagatatgcgagtaagataaataacgcagaaattaccttagtagaaataggtggcacggtaggtgatatagaaagcttaccattcctagaagctgttaggcaacttaaactagaagaaggtgaggataatgttatttttgtgcatatagctttagtagaatatttgtctgtaactggagaactgaaaacgaaaccattgcagcatagtgtacaagaattaagaagaattggaatacaaccagatttcattgtaggtagagcaacactgcccttagatgatgaaaccagacgtaaaattgctctgtttactaacgttaaggtagatcatatagtttctagctacgatgtagaaacatcttatgaagtgcccattatcctagaaagccagaaattggtttctaagatacttagtaggcttaaattagaggatagacaagtagacttgacagattggataagctttgtcaataatataaaaggaattaatagcaaaaagactattaatatcgcattagttggaaaatatacaaaactaaaggatagttatattagtatcaaggaagcaatttatcatgcttcagcctatataggagtaaggcctaaacttatatggatagaatcaactgatctagaaagtgataccaagaatttaaatgagatcttaggaaatgtaaatggaataatagttttacctggatttggaagtagaggagctgaaggtaaaattaaggctataaagtacgctagagaacataatataccattcttgggtatatgcttcggttttcaattatctattgttgaatttgctagagatgttttaggtctgagtgaagccaattcaactgaaattaatccaaatactaaagatccggttatcacactgctagacgaacaaaaaaatgtaactcaacttggagggactatgagactaggggctcagaagattatattaaaagaaggaacgattgcctatcaactatatggtaaaaaggtcgtatatgaaaggcataggcatagatatgaagtaaatcctaaatatgtagatatactagaagatgcaggattagtagtttctggtatcagtgaaaatggattggttgaaattatagaattgccatctaataagttcttcgtagctacccaagctcatccagaattcaagagtaggccaacgaatccatctccgatatatttagggttcattagagctgttgctagtctttaa

SEQ ID NO: 31621 - protein, 535 aa, Sulfolobus solfataricus
MPNKYIVVTGGVLSSVGKGTLVASIGMLLKRRGYNVTAVKIDPYINVDAGTMNPYMHGEVFVTEDGAETDLDLGHYERFMDVNMTKYNNITAGKVYFEVIKKEREGKYLGQTVQIIPHVTDQIKDMIRYASKINNAEITLVEIGGTVGDIESLPFLEAVRQLKLEEGEDNVIFVHIALVEYLSVTGELKTKPLQHSVQELRRIGIQPDFIVGRATLPLDDETRRKIALFTNVKVDHIVSSYDVETSYEVPIILESQKLVSKILSRLKLEDRQVDLTDWISFVNNIKGINSKKTINIALVGKYTKLKDSYISIKEAIYHASAYIGVRPKLIWIESTDLESDTKNLNEILGNVNGIIVLPGFGSRGAEGKIKAIKYAREHNIPFLGICFGFQLSIVEFARDVLGLSEANSTEINPNTKDPVITLLDEQKNVTQLGGTMRLGAQKIILKEGTIAYQLYGKKVVYERHRHRYEVNPKYVDILEDAGLVVSGISENGLVEIIELPSNKFFVATQAHPEFKSRPTNPSPIYLGFIRAVASL

SEQ ID NO: 31622 - DNA, 1626 bp, Symbiobacterium thermophilum
  CDS (1)..(1626): transl_table=11
atggccaagttcattttcataaccggaggcgtggtttcaggtctcggaaagggcatcacggcggcgtccctcggccggctcatcaagagccgaggctacagggtcaccgcccttaaatttgatccttacctgaacgtggacccggggaccatgagcccgattcagcacggcgaggtcttcgtcaccgaggacggcggcgagtgcgacctggacgtgggccactatgagcggttcatggacgtgaacatgggcaagggcaacaacgtcaccaccggcaagatctactcctcggtcatcgccaaggagcgccggggcgactacctgggcggcaccgttcaggtcatcccgcacattaccaatgaaatcaagtcccacatccgccgggtggcggaggacagcgacgccgacgtgatcctggtggagatcggcggcaccgtgggcgacatcgaggggcagcccttcctggaggccatccgccagttcaagaacgaggtccccagcaaggacgacgttctcttcatccacgtgaccctggtgccgtacatcgcggcatcgggcgagctgaagaccaagccgacccagcactcggtgcgggagctgcgctccatcggcatccagcccgacgtcatcgtctgccggtccgaccgggagatccccaaggacctgcgggagaagatcgccctgttctgcgacgtgccgcccgaggccgtcatccccaacgaggacctcggctccctctacgaggtgccgctggccatggagaaggaggggctggcggagatcgtctgccgccggctggggctcgattcccgcacccccgacctggcggagtgggaggcgctggtgcagcgggccaagcacccggagcgcgaggtggagatcgccctggtgggcaagtacgtcgccctggaggacgcctacctctcggtggtggagtcgctgaaccacgccggcatccacaacaacgcccgggtgcggatccactgggtcgactcggagaagctggagaacggcatcaccccggaggcgctggaggcctgcctgggccgggcggacggcatcctggtgcccgggggcttcggctaccggggcatcgaggggaagatcaacgccatccgctacgcccgggagaagggcattccgttcttcggcatctgcatgggcatgcagtccgcggtgatcgaggcggcccggaacctgctggggctctccaaggccaactccaccgagttcgtgacggactgcaaggacccggtgatcgacatgatggcccagcagaagcaggtgaccgacctgggcggcaccatgcggctcggcgccttcccctgccggctgaagccgggctccaaggcgcacgccgcctacggcacggaggtcgtccacgagcggcaccggcaccgcttcgaggtcaacaacgcctacctggagcggctggaggccgtcgggctgaaggccgtgggcgtctggccggaagggaacctggtggaggtggtcgagatggagggccacccctggttcgtcggcgtgcagttccaccccgagttcaagagccggcccaaccggccgcacccgctgttccgggacttcatcaaggccgccctggagtaccgggcggggaagaagtag

SEQ ID NO: 31623 - protein, 541 aa, Symbiobacterium thermophilum
MAKFIFITGGVVSGLGKGITAASLGRLIKSRGYRVTALKFDPYLNVDPGTMSPIQHGEVFVTEDGGECDLDVGHYERFMDVNMGKGNNVTTGKIYSSVIAKERRGDYLGGTVQVIPHITNEIKSHIRRVAEDSDADVILVEIGGTVGDIEGQPFLEAIRQFKNEVPSKDDVLFIHVTLVPYIAASGELKTKPTQHSVRELRSIGIQPDVIVCRSDREIPKDLREKIALFCDVPPEAVIPNEDLGSLYEVPLAMEKEGLAEIVCRRLGLDSRTPDLAEWEALVQRAKHPEREVEIALVGKYVALEDAYLSVVESLNHAGIHNNARVRIHWVDSEKLENGITPEALEACLGRADGILVPGGFGYRGIEGKINAIRYAREKGIPFFGICMGMQSAVIEAARNLLGLSKANSTEFVTDCKDPVIDMMAQQKQVTDLGGTMRLGAFPCRLKPGSKAHAAYGTEVVHERHRHRFEVNNAYLERLEAVGLKAVGVWPEGNLVEVVEMEGHPWFVGVQFHPEFKSRPNRPHPLFRDFIKAALEYRAGKK

SEQ ID NO: 31624 - DNA, 1617 bp, Syntrophus aciditrophicus
  CDS (1)..(1617): transl_table=11
atgagaacaaaatatatctttattaccggaggcgtcctgtcatccctgggcaaaggactggctgcggcatccatagccgcggtactggagtgccgggggttacgggtgaccaatcagaagctggacccttacatcaatgtcgatcccggaacgatgagtccctttcagcacggcgaggtctttgtcactgatgacggcgccgaaaccgatctggacctgggccattatgagaggtttacctcaacgcgcatgggaaaaagcaacaacctgacgaccggccaggtttacttctcggtcatcaccaaggaacggcgcggggactatctcggcaaaaccgttcaggtgattccccatatcacgaacgagatcaaggattacatccgccagtcttcggaaggctttgacgtcgccctgatagaaatcggcggaaccgtgggcgatatcgaaagcctccccttcctggaggccatccgtcagttccgcaacgaagtgggcaaacagaacgccatcttcattcacctcacctgggtgcctttcatcaaaaccgccggagaagtaaaaaccaaacccacacagcacagcgtcaaggccctccgggaaatcggaattcagccggacatcctgctctgccggacggaagaattcctgtcggaagatatcaaagccaagatcgccctgttctgcaacgtggaagaggccgccgtctttacggcgaaggatgtgagctgcatctatgaagtgccgctgatctaccatcgggaagggctcgatcagaagatcgtcgatctgctcaacatctggacagggcaaccccatctggaagcctgggaaaatgtcgtgcagaagatcacgtcaccgtcttatgaggtcaatatcgccatcgtgggcaagtatgtgaaccttaccgattcctataaaagtctcaacgaagccctggtgcacggaggcatcggcaacgactgtcaggtcaacctgcgtttcgtggattcggaaaagattgaaaaagacgggctcaatcaccagttggaaaatgtggacggcatcctggttcccggcggattcggcaatcggggcattgaagggatgattcaggtcatccgctatgcacgggaaaacaaggtgccttttttcggcatctgtctggggatgcagatggccgttgtggaattcgcccgccacgtctgtgggctggaaaaggcgaacagctcggaattcgacgaaaacacccctcatccggtgatcgacctgctcccggagcagaaagccgttcaggaaatgggggcttccatgcgcctgggttcctacccctgccgcctgtccgatgcttctctggcctgtgaggcctatggcgaggtggaaatcggggagcgtcaccgccaccgctatgagttcaaccgggattatcaggaacgtctggaggcctgcggactgcgcatcacggggcgttcaccggacggccggctggttgaaatcgtggagatcaaggatcatccctggttcctcggctgtcagttccatccggaattcaaatcccggccgacggaacctcacccgcttttccagcgattcatcgaagccgcccttcgctaccgcaaaaaacgcgcggaggaccagtaa

SEQ ID NO: 31625 - protein, 538 aa, Syntrophus aciditrophicus
MRTKYIFITGGVLSSLGKGLAAASIAAVLECRGLRVTNQKLDPYINVDPGTMSPFQHGEVFVTDDGAETDLDLGHYERFTSTRMGKSNNLTTGQVYFSVITKERRGDYLGKTVQVIPHITNEIKDYIRQSSEGFDVALIEIGGTVGDIESLPFLEAIRQFRNEVGKQNAIFIHLTWVPFIKTAGEVKTKPTQHSVKALREIGIQPDILLCRTEEFLSEDIKAKIALFCNVEEAAVFTAKDVSCIYEVPLIYHREGLDQKIVDLLNIWTGQPHLEAWENVVQKITSPSYEVNIAIVGKYVNLTDSYKSLNEALVHGGIGNDCQVNLRFVDSEKIEKDGLNHQLENVDGILVPGGFGNRGIEGMIQVIRYARENKVPFFGICLGMQMAVVEFARHVCGLEKANSSEFDENTPHPVIDLLPEQKAVQEMGASMRLGSYPCRLSDASLACEAYGEVEIGERHRHRYEFNRDYQERLEACGLRITGRSPDGRLVEIVEIKDHPWFLGCQFHPEFKSRPTEPHPLFQRFIEAALRYRKKRAEDQ

SEQ ID NO: 31626 - DNA, 1632 bp, Synechococcus elongatus
  CDS (1)..(1632): transl_table=11
atgacgaaatatgtttttgtgaccggcggtgttgtctccagtattggtaagggaattgttgccgccagtctgggacggctgctgaaatcgcggcagtattctgtgtctattctcaagcttgatccctacatcaatgtcgatccgggcacgatgagtcccttccagcacggggaagtgtttgtgaccgacgatggggcggaaacggatttggacttggggcactacgagcgttttaccgatacacccatgtcccgcctcaatagcgtcacgacgggatccatttaccaagcagtgattaacaaagagcgacgcggtgactatatggggggaacagtgcaggtgatcccccacattacgaatgagattaaagaacgtattttacgggtggctaaggacaaaaaccccgatgtggtgattattgaaattgggggaaccgttggcgatattgagtcgctaccctttctagaggccatccgccagtttcgcacagaggtggggcggcaccatgtgctgtttatgcatgtgactttggtgccttggattccctcggcaggggaaatgaaaacaaaacccacccagcactcagtgaaggagttgcgctccattggtattcagccggatattctcatctgccgttgcgatcgccccctggtaccgggcattaaggaaaagctctcccaattctgtgatgtccctgtggaatgcgtcattccctcgccggatgcaaaaagcatctatgaagtgcccctgctgcttgagcgcgaaggccttgcgacccaagttctcaatctgttgaacctggaacaacggcagccggatctcagtcagtggcaagcccttgtggagcggctctacggttcccataggccgctggaggtggcgatcgtcggtaaatacgtacgcctcagtgatgcctatctttcggtggtagaagccctgcgccattcagcgatcgccctagaccaagagctgcgtatccgctgggtcaactccgaagaactggttgaaaatggtgttgaaactgccctcagcaacgttggagccatcgttgtgccgggaggctttggcattcggggggtcgaagggaaaattgctgccattcaatatgcccgtgagcagggaatcccctttttggggctgtgcttgggaatgcagtgtgccgtcattgagtgggcacgccatattgccggtttagaaaatgccaacagtgctgagttcgatgccaatacgccccacccagtgattcacctattgccggaacagcaggatattgtcgatttggggggaacaatgcgcttggggctgtatgcctgccgcctagccccccattcattggcggaaaaactctacggcgaaaccgtcatctacgagcgccaccgccatcgctatgagtttaacaatgcctatcgcaacctctttttggaaacgggctatcaaattacgggcacctctcccgatggccgcttggtagaaattattgagtatccagcgcaccccttctttattgcagtgcagtttcaccccgagtttcgttcccgtcccaatgcaccccatcctctcttttacggcttgctggccgccgccgctaaaaattctaatcgtgatcatccacagttagtccccagcttctag

SEQ ID NO: 31627 - protein, 543 aa, Synechococcus elongatus
MTKYVFVTGGVVSSIGKGIVAASLGRLLKSRQYSVSILKLDPYINVDPGTMSPFQHGEVFVTDDGAETDLDLGHYERFTDTPMSRLNSVTTGSIYQAVINKERRGDYMGGTVQVIPHITNEIKERILRVAKDKNPDVVIIEIGGTVGDIESLPFLEAIRQFRTEVGRHHVLFMHVTLVPWIPSAGEMKTKPTQHSVKELRSIGIQPDILICRCDRPLVPGIKEKLSQFCDVPVECVIPSPDAKSIYEVPLLLEREGLATQVLNLLNLEQRQPDLSQWQALVERLYGSHRPLEVAIVGKYVRLSDAYLSVVEALRHSAIALDQELRIRWVNSEELVENGVETALSNVGAIVVPGGFGIRGVEGKIAAIQYAREQGIPFLGLCLGMQCAVIEWARHIAGLENANSAEFDANTPHPVIHLLPEQQDIVDLGGTMRLGLYACRLAPHSLAEKLYGETVIYERHRHRYEFNNAYRNLFLETGYQITGTSPDGRLVEIIEYPAHPFFIAVQFHPEFRSRPNAPHPLFYGLLAAAAKNSNRDHPQLVPSF

SEQ ID NO: 31628 - DNA, 1641 bp, Synechococcus sp
  CDS (1)..(1641): transl_table=11
atgactaagttcatctttgtgaccggtggcgtggtttccagcatcggcaaaggaattgtggccgcgagtttggggcggctcctcaagtcgcggggctattcggtttcgattctcaaactcgacccctacatcaacgtcgaccccggcacgatgagcccctaccaacatggggaagtgtttgtgacggcggacggggcggaaacagacctcgaccttggacactacgagcgctttaccgacacaccgatgtcacgcctcaacagtgtcaccaccggctcgatctaccaggcggtgatcaacaaagaacggcggggtgactataacggtggcacggtgcaggtcattccgcatatcactgccgaaatccgcgatcgcattcaccgcgttgcccaagacacccatcctgatgtggtgattacagaaattggcggcacagtgggcgacattgaatccctgccctttttagaagcgattcgccaattccgtaaggatgtgggacgtcgcgatctcgcttacattcatgtcactttagtgccctggattccgtctgctggtgagatgaaaaccaagccgacgcagcactcggtcaaagagttgcgatcgattggcattcagcccgatattttggtctgtcgttgcgatcgcccgttgcaggccggcatgaaggaaaaaatgtcggagttctgcaatgtttcaccagaagcggtgatcacgtcgcaggatgccagctcgatctacgaagtgccgttgatgctggagcgcgaaggcttagcagagcaagtgctcgacattctgcaacttgagcagcggcaacccgatctgactcaatggcaacgctgggtgcatcagctccagaaccccagccgccgcgttgaagtggtgatcgtgggcaagtatgtgcgactgaatgacgcctatctctcggtcagtgagtctctgcgccatgcggcagctagtgctgatgctgatctccagctgcgctgggtcgatgcggaagatctcgaaaatggcgatccggcaacctatctagatggcgtggatggcatcgttgtccccggtggttttggggctcgtggggtagatggcaaagtcgccgcgattcaattcgcccgcgatcaccagattcctttcttgggcttgtgtctagggatgcaagcagcggtgattgactgggcacgtaatgtggcaggcttggacggtgctaacagtgccgaatttgacccagaaacgccccatcctgtcattgcgctactgcctgagcagcaggacgtggtcgacttaggcggcacgatgcgcttgggtctttgcccttgcaaaatccagtctggttccttggcacagcggctctatggcgaagacatcatctacgagcggcatcgtcatcgctacgagttcaataatgcttaccgcagtctcttcctcgaaagtggctactgtgtcagtggcacctcgcccgacagccacttggtggagattgtcgagcgtcctgatcatcccttctttattgcctgtcaattccacccagagtttgtctcgcgtccaaatcatccccacccgctcttccaaggcttgatcaaagcagcgttgggtagcgacctgactctggtggatcctgctcctctgcctgcggaaacggtttaa

SEQ ID NO: 31629 - protein, 546 aa, Synechococcus sp
MTKFIFVTGGVVSSIGKGIVAASLGRLLKSRGYSVSILKLDPYINVDPGTMSPYQHGEVFVTADGAETDLDLGHYERFTDTPMSRLNSVTTGSIYQAVINKERRGDYNGGTVQVIPHITAEIRDRIHRVAQDTHPDVVITEIGGTVGDIESLPFLEAIRQFRKDVGRRDLAYIHVTLVPWIPSAGEMKTKPTQHSVKELRSIGIQPDILVCRCDRPLQAGMKEKMSEFCNVSPEAVITSQDASSIYEVPLMLEREGLAEQVLDILQLEQRQPDLTQWQRWVHQLQNPSRRVEVVIVGKYVRLNDAYLSVSESLRHAAASADADLQLRWVDAEDLENGDPATYLDGVDGIVVPGGFGARGVDGKVAAIQFARDHQIPFLGLCLGMQAAVIDWARNVAGLDGANSAEFDPETPHPVIALLPEQQDVVDLGGTMRLGLCPCKIQSGSLAQRLYGEDIIYERHRHRYEFNNAYRSLFLESGYCVSGTSPDSHLVEIVERPDHPFFIACQFHPEFVSRPNHPHPLFQGLIKAALGSDLTLVDPAPLPAETV

SEQ ID NO: 31630 - DNA, 1635 bp, Synechococcus sp
  CDS (1)..(1635): transl_table=11
atggccaagttcgtcttcatcaccggtggtgtggtctccagcatcggcaaaggaatcgtggccgcaagcctgggacggctgctgaaatcaagggggtacaacgtctcgatcctgaagctggatccgtacctcaacgtggatcccggcacgatgagcccgattcagcacggggaggtgttcgtcaccgaggacggtgccgaaaccgatctggatctgggtcactacgagcgcttcacggacacagccatgtcgcgcctgaacagcgtgaccaccggctcgatctaccaggcggtgatcaacaaggaacggcggggtgactacaacggcggcacggtgcaggtgattccccacatcaccggtgagatccgcgaacgcatccaccgcgttgccgccaacagcaacgccgatgtggtgatcacagaaatcggcggcaccgtcggtgacatcgaatcgctgcccttcctggaagccatccgcgaattcagtggagacgttggacggaacgatctggcgtatatccacgtcacactgctgcccttcatcggcacctcgggcgaactcaagaccaagcccacccagcattcggtgaaggaactgcgctccatcggcatccaaccggatgtgctggtctgccgcagtgaccgcaccatcagcgaggagatgaagcggaagatcggagggttctgtggggtaccgacccgggccgtcatcccgtcccttgatgccgaaagtatttatgcagtgcccctgaccctggagcaggaagggctttgccgcgaagttctcgatgtgctggatctgaccgatcacgacagcgacatggcggcctggcaggagctggtgcacaaactccgcaaccccggcccggccgtcaaggtggccctggtaggcaaatacatccagctcaacgacgcctacctctccgtggtggaggcgctgcgccatgcctgtatcgcccaagacgcctcccttgatctgcattgggtctgcgcagagcagatcgaaagcgatggtgctcaggccctgctgaagggcatggatgccgtggtcgtgccgggaggtttcggcaaccggggcgtcgatggaaagatcgcggcgatccgctgggccagggaacagcgggtgccgttcctggggctgtgtctcggcatgcagaccgccgtgatcgagtgggcgcgcaaccaggccggcctgacggaagccaccagcgccgaactcgatgccgggacgccccatcccgtgattcacctgttgccggaacagcaggatgtggtggatctggggggcacgatgcgcctgggtgtctatccctgccgcatcgctccggacacgttggcccatcgtctgtatggggaccaagttgtctatgagcggcatcgccaccgctacgagttcaacaacgcctaccgaaacctgttcctagaatccgggtacgtggtgagcggcagctcacccgatggtcgcctggtggagttgatcgagctgaaaggccacccgttcttcaccgcctgccagtaccaccccgaatttctctcccgtccgggacggccccatcccctgttccaaggcttgattgaggcggcccagcaacggctgccctcctcgccggtggaggcgattcagacccagcgatga

SEQ ID NO: 31631 - protein, 544 aa, Synechococcus sp
MAKFVFITGGVVSSIGKGIVAASLGRLLKSRGYNVSILKLDPYLNVDPGTMSPIQHGEVFVTEDGAETDLDLGHYERFTDTAMSRLNSVTTGSIYQAVINKERRGDYNGGTVQVIPHITGEIRERIHRVAANSNADVVITEIGGTVGDIESLPFLEAIREFSGDVGRNDLAYIHVTLLPFIGTSGELKTKPTQHSVKELRSIGIQPDVLVCRSDRTISEEMKRKIGGFCGVPTRAVIPSLDAESIYAVPLTLEQEGLCREVLDVLDLTDHDSDMAAWQELVHKLRNPGPAVKVALVGKYIQLNDAYLSVVEALRHACIAQDASLDLHWVCAEQIESDGAQALLKGMDAVVVPGGFGNRGVDGKIAAIRWAREQRVPFLGLCLGMQTAVIEWARNQAGLTEATSAELDAGTPHPVIHLLPEQQDVVDLGGTMRLGVYPCRIAPDTLAHRLYGDQVVYERHRHRYEFNNAYRNLFLESGYVVSGSSPDGRLVELIELKGHPFFTACQYHPEFLSRPGRPHPLFQGLIEAAQQRLPSSPVEAIQTQR

SEQ ID NO: 31632 - DNA, 1674 bp, Synechococcus sp
  CDS (1)..(1674): transl_table=11
atggccaagttcgtgtttgtaaccggcggtgtggtctccagcatcggcaaaggaattgtggccgcgagcctcggtcgcttgctgaagtcgcggggctacagcgtttcaatcctgaagctggatccctacctgaatgtggacccaggaacgatgagcccgtttcagcacggggaggtgtttgtcactgaagacggtgcagaaaccgatctcgatcttggccactacgaacgcttcaccgacaccgccatgtcgcgcctgaacagcgtgaccaccggctcgatctatcaatccgtcattaacaaggagcgccgaggcagttacaacggcgggaccgttcaggtcatcccccatatcaccggtgaaatccgtgaccgcattcaccgtgtggcctccaacagcaatgccgatgttgtgattacagaaatcggcggaactgttggtgatattgagtcgttgcccttcctggaagccattcgagagttccgaggagatgtgggacgacaagatctggcttacatccacgtaaccctgctcccatttatcggcacttcgggagagctgaaaaccaagcccacccagcattcggtcaaagagctgcgctcgatcggaatccagccagatctgctcgtctgtcgtagtgatcgcgacatcaatgatgagctcaaacgcaaaatcggaggcttctgcggtgtgccccagcgagcggtcatcccctccttggacgccgacagcatctacgcagtaccgctcaccctcgaagacgaaggactgtgccgtgaagtcctcgacgtcttggacctcgaagatcacgacagtgacatggtggactgggcgcaactggtgcacaaactccgcaatcccggcccggcggtcaaagttgcgttagtgggcaagtacgtccaactgaatgacgcctacctctctgtcgtagaagcgctacgccacgcctgtttagcccaggatgcctccctggatctgcactgggtctgcgcagaagagattgaaaatcaaggcgctgatgtccttctcaaaggcatggacgccgttgtcgttccaggtggattcggcaaccgtggcgttgacggcaaagtggccgccatccgctgggcgagggagcagcgcgtgccattccttggcctttgcctaggaatgcagtgcgccgtcatcgagtgggctcgcaatctggcagggctcactgatgccacgagcgctgagctcgagccaggaaccacccatcctgtgatccatctccttcccgaacaacaagatgtggtggatctggggggcacaatgcgtcttggcgtctacccctgcagggtctcagcaggcagcctggcgtccaggctgtatggagaagaagtggtgtacgagcgccatcgccaccgcttcgaattcaacaacgcttaccgaaatctttttctcgaatctggctatgaaatcagcggaagctctcccgatggccggttggtggaactgatcgaacttcccgaacatcccttcttcaccgcctgccagtaccacccagaattcctatccagacctggccggccccatcccttatttcgaggtctgatcgaagcggctcaacaacgcctaccttgcagccccagcgaagccatgcgccaacaaaacaattcagcggctggatccagtcatcccagcctgcagccttga

SEQ ID NO: 31633 - protein, 557 aa, Synechococcus sp
MAKFVFVTGGVVSSIGKGIVAASLGRLLKSRGYSVSILKLDPYLNVDPGTMSPFQHGEVFVTEDGAETDLDLGHYERFTDTAMSRLNSVTTGSIYQSVINKERRGSYNGGTVQVIPHITGEIRDRIHRVASNSNADVVITEIGGTVGDIESLPFLEAIREFRGDVGRQDLAYIHVTLLPFIGTSGELKTKPTQHSVKELRSIGIQPDLLVCRSDRDINDELKRKIGGFCGVPQRAVIPSLDADSIYAVPLTLEDEGLCREVLDVLDLEDHDSDMVDWAQLVHKLRNPGPAVKVALVGKYVQLNDAYLSVVEALRHACLAQDASLDLHWVCAEEIENQGADVLLKGMDAVVVPGGFGNRGVDGKVAAIRWAREQRVPFLGLCLGMQCAVIEWARNLAGLTDATSAELEPGTTHPVIHLLPEQQDVVDLGGTMRLGVYPCRVSAGSLASRLYGEEVVYERHRHRFEFNNAYRNLFLESGYEISGSSPDGRLVELIELPEHPFFTACQYHPEFLSRPGRPHPLFRGLIEAAQQRLPCSPSEAMRQQNNSAAGSSHPSLQP

SEQ ID NO: 31634 - DNA, 1650 bp, Synechococcus sp
  CDS (1)..(1650): transl_table=11
atggccaaattcgtcttcatcaccggtggtgtggtgtccagcattggcaaggggatcgtggcggcaagcctcggccggctgctgaagtcgcggggctacaacgtttcgatcctcaagctggatccctacctgaatgtggatcccgggacgatgagcccgttccagcatggtgaggtctttgtcaccgaagacggcgccgaaaccgatctcgacctgggccattacgagcgcttcaccgacaccgcgatgtcacgtctgaacagcgtgaccaccggctcgatctaccaatcggtgattaacaaggaacgccgcggcgactacaacggcggcaccgttcaggtgattccccacatcaccggcgaaatccgcgagcgcatccaccgcgttgcatccaacagcaatgccgatgtggtgatcaccgaaatcggcggcaccgtcggtgacatcgaatcactgcccttccttgaagccatccgtgaattccgggaggacgtgggtcgcaacgatttggcctacatccacgtcaccctcctgcccttcatcggcacctccggcgaactaaaaaccaagccaacccagcactcagtcaaggagctgcgctccatcggcattcagcctgatgtgctcatctgccgcagtgatcgggacatcagcgacgatctcaagcggaaaattggcggcttctgcggcgtgcccactcgcgccgtcattccctccttggatgccgacagcatctatgccgtcccgctgatcctcgaacaggagggtctgtgccgtgaagttctggacgtgctgaacctgaccgaccacgacagcgacatggcggcatgggagcaactggtcaacaagctgcgcaaccccggcccgtctgtgaagattgccctggtgggcaagtacgtgcagctgaacgatgcctatctgtcggtcgtcgaagcgttgcagcatgcctgcattgcccaggatgcctccctcgacctgcactgggtctgcgcggaacagattgaagccgacggtgccgatacgctcctgcgcgggatggacgccgtggtcgtgcccggtggcttcggcaaccgtggcgtcgatggaaagattgcagcgattcgctgcgcccgggaacaacgcgtgcccttcctggggctttgccttgggatgcaaaccgctgtgatcgagtgggctcgcaaccaggccggcttaaccggtgccaccagtgctgaattggacgaaaacacaccgcatcccgtgattcacctcctgccggagcagcaggacgtggtagatctcggcggcacaatgcgtctgggggtctacccctgcaggattgcaccgggaaccctggcccaaaggctttacggggatgaggtggtctacgaacggcaccgccaccgctacgaattcaacaattcctatcgcaatctgttcctggaatccggatacgtggtgagcggcacgtccccggacggtcgcctggtggagttgatcgaactgaaagggcatcccttcttcacggcctgccagtaccacccagaattcctatcccgccctggacaaccccatcccttgttccggggattgatcgaggcagcccaacaacgtcttcccgattcgccggctgaggccctgcgtcaacagggggatattgcgattccatga

SEQ ID NO: 31635 - protein, 549 aa, Synechococcus sp
MAKFVFITGGVVSSIGKGIVAASLGRLLKSRGYNVSILKLDPYLNVDPGTMSPFQHGEVFVTEDGAETDLDLGHYERFTDTAMSRLNSVTTGSIYQSVINKERRGDYNGGTVQVIPHITGEIRERIHRVASNSNADVVITEIGGTVGDIESLPFLEAIREFREDVGRNDLAYIHVTLLPFIGTSGELKTKPTQHSVKELRSIGIQPDVLICRSDRDISDDLKRKIGGFCGVPTRAVIPSLDADSIYAVPLILEQEGLCREVLDVLNLTDHDSDMAAWEQLVNKLRNPGPSVKIALVGKYVQLNDAYLSVVEALQHACIAQDASLDLHWVCAEQIEADGADTLLRGMDAVVVPGGFGNRGVDGKIAAIRCAREQRVPFLGLCLGMQTAVIEWARNQAGLTGATSAELDENTPHPVIHLLPEQQDVVDLGGTMRLGVYPCRIAPGTLAQRLYGDEVVYERHRHRYEFNNSYRNLFLESGYVVSGTSPDGRLVELIELKGHPFFTACQYHPEFLSRPGQPHPLFRGLIEAAQQRLPDSPAEALRQQGDIAIP

SEQ ID NO: 31636 - DNA, 1659 bp, Synechocystis sp
  CDS (1)..(1659): transl_table=11
atgtcgaagtttgtttttgtgactgggggagtggtctccagcattggtaaaggcattgtggccgctagtctgggacggttactaaaatcccgccattattccgtttccattcttaagcttgatccttacatcaacgtggaccccggcaccatgagtccctttcagcatggggaggtgtttgtcactgaagacggagccgaaacagatttagatctgggacactacgagcgttttaccgatacttccatgtctcgcctcaacagcgttaccaccgggtccatttaccaagcagtgattaataaggaacgacgaggagcctacatggggggcactgtacaggttattccccacattaccaacgagattaaggaaagaattctccgggtggcccagaacacgaaccccgatgtggtaatcacagaaattggcggcaccgtgggagatatcgaatccctgccctttttggaagcgattcgccaattccgcaaagaggtgggtcgccataacgttatctacatgcacgttaccctcattccctggattcccgccgccaaggaaatgaaaaccaagcccacccaacactcggttaaggagttacgttccatcggtattcagccggatattttggtctgtcgttgcgatcgcccgttgcatccaggtatgaaggaaaagttatcggaattctgcgacgtgccggtggaatcggtgatcacctgtcaggatgccagcagtatttatgaagtgccgttaattttggaaaaggaagggttggcccaccagaccctagaactgctgagaatggaaaatcgatcgccagatttgtcccagtggcaatccctggtggaaaaaatgcagtccccccaccatgacatcaccgtggccctggtgggtaaatatgtccaactcagcgatgcctatctttccgtggtggaagctctgggccatgcggcgatcgccagtgacagcaaactccacctgcgttggatcagtgccgaggagattgaagcccaaggggcagccacctttctgaaagatgtggacggcgtgttagtgcccggcggttttggcattcggggggtggacggcaaagtccaggcgatcgaatatgccagggaaaatcaactgccctttttgggcctatgtttgggtatgcagtgctccgtcatcgaatgggctagaaatgtggccaaattaccggaagccaacagcgcggaatttgaaacggaaacccccaacccagtcattaaccttttgccagaacaacaggatgtggtggatctggggggaaccatgcggttaggactatatccctgtcgcattgccccagataccctggccttttccctgtatcaaaaggaagtggtgtacgaacggcaccgccaccgctatgagtttaataactcctaccgcacccaattcaccgatactggttttgtggtcagtggcacatcccccgacggccgcctagtggaaatcgttgaatatccccaccatccctttttcattgcctgccaatttcacccggaattccattcccgtcccaaccaagctcatcccctttttagcggctttattaatgcggtcttaaaacgtcgcaatgcccctgctaagatagcggttaactgccacaccgttaccgaagatcatgagccaagttaa

SEQ ID NO: 31637 - protein, 552 aa, Synechocystis sp
MSKFVFVTGGVVSSIGKGIVAASLGRLLKSRHYSVSILKLDPYINVDPGTMSPFQHGEVFVTEDGAETDLDLGHYERFTDTSMSRLNSVTTGSIYQAVINKERRGAYMGGTVQVIPHITNEIKERILRVAQNTNPDVVITEIGGTVGDIESLPFLEAIRQFRKEVGRHNVIYMHVTLIPWIPAAKEMKTKPTQHSVKELRSIGIQPDILVCRCDRPLHPGMKEKLSEFCDVPVESVITCQDASSIYEVPLILEKEGLAHQTLELLRMENRSPDLSQWQSLVEKMQSPHHDITVALVGKYVQLSDAYLSVVEALGHAAIASDSKLHLRWISAEEIEAQGAATFLKDVDGVLVPGGFGIRGVDGKVQAIEYARENQLPFLGLCLGMQCSVIEWARNVAKLPEANSAEFETETPNPVINLLPEQQDVVDLGGTMRLGLYPCRIAPDTLAFSLYQKEVVYERHRHRYEFNNSYRTQFTDTGFVVSGTSPDGRLVEIVEYPHHPFFIACQFHPEFHSRPNQAHPLFSGFINAVLKRRNAPAKIAVNCHTVTEDHEPS

SEQ ID NO: 31638 - DNA, 1638 bp, Thermoplasma acidophilum
  CDS (1)..(1638): transl_table=11
atgcagtacatagttgtgactggtggagttatctccggtcttggcaaaggtacaataacttcaagcattggtcacattctcaaggattcaggcataaaggtatctgcagtaaaaatcgacccttatataaattatgatgcgggtactatgaatccgtaccaacatggagaggtctttgttctggacgatggtggcgaggttgaccttgatcttggcaactatgagcgcttcatgaacataaatctgtcaagagacaacaatataacaaccggaaaggtgtatcttgaggtgatacagaaggagaggcatggagattaccttggaaagactgtgcagataataccgcacataaccgatgagataaagcgcaggatcagggaagtggcaaggaccagcggggcggatgttgttctcatagaggttggcggtaccgtcggtgacatagaatcgatgccgtttctagaggcgctgaggcagctcaagcgcgaggaacagaacgttgtcttcgcgcacgttacgcttgttccggagatagggccgaccatggagcagaaaacaaagccaacccagcacagcgtcaaggctctgagggaaataggaatacagcccgatataatatttgcaagatccaagcagaaactaacggaagagacaaaatccagaatatccctgttcaccgatgtgcccgtggaaggcataataagtgtaagcgacgttgaaaatgtgtacctacttccgcagatgatggttaatgagggccttataacaaggctgtcgaagcttctgaacatgaacatagagtacagagactcctggactagctacgccgaaaacataaggcaccccagggatcgcgtgaaggttgccatagttggcaagtacgttgatctccatgatgcatatataagccacaaggaggcgttctctcacgttacaggaaacacaggtattgccgtagacataatgtggatcgattcagagaaggtcaagaatgaccagagcgtgctcagcgaagccgatgcgatactcatacctggcggattcggctacaggggcgttgaagggaagatagctgccacgagatatgccatggagaacggcgttccatttctggggatatgccttggcttccaggtcgcagtcatagccgtcgccagatacgtgctcgggcttgacggggccaacagcacagagttcgacgaaaagacgaagtatccggtagttgacatactgccagagcagaggggagtcaaggacatgggtggaacgatgcgccttggatcgaagaaggttgtaataaagaagggtacgcttgcacacaggatatatggtgcagatgtgatatacgaaaggcacaggcacaggtatgaggtaaacccggattacatagatatgatcgagaaggcaggattcaagttctcggcaacggatgaggaaggcatcaggatggagatactagaaaggcccggcgatgaaagcttcatagcaacgcagtatcacagcgagttcaagtcaaggcctctggatccatcgaaggttcacctgcatctggtcgagcaggcattaatttttaagcacagaaggatgggggaaaatcatgaaggatacgctacagcagctagtagccaaggtcaatag

SEQ ID NO: 31639 - protein, 545 aa, Thermoplasma acidophilum
MQYIVVTGGVISGLGKGTITSSIGHILKDSGIKVSAVKIDPYINYDAGTMNPYQHGEVFVLDDGGEVDLDLGNYERFMNINLSRDNNITTGKVYLEVIQKERHGDYLGKTVQIIPHITDEIKRRIREVARTSGADVVLIEVGGTVGDIESMPFLEALRQLKREEQNVVFAHVTLVPEIGPTMEQKTKPTQHSVKALREIGIQPDIIFARSKQKLTEETKSRISLFTDVPVEGIISVSDVENVYLLPQMMVNEGLITRLSKLLNMNIEYRDSWTSYAENIRHPRDRVKVAIVGKYVDLHDAYISHKEAFSHVTGNTGIAVDIMWIDSEKVKNDQSVLSEADAILIPGGFGYRGVEGKIAATRYAMENGVPFLGICLGFQVAVIAVARYVLGLDGANSTEFDEKTKYPVVDILPEQRGVKDMGGTMRLGSKKVVIKKGTLAHRIYGADVIYERHRHRYEVNPDYIDMIEKAGFKFSATDEEGIRMEILERPGDESFIATQYHSEFKSRPLDPSKVHLHLVEQALIFKHRRMGENHEGYATAASSQGQ

SEQ ID NO: 31640 - DNA, 1575 bp, Thermotoga maritima
  CDS (1)..(1575): transl_table=11
atgaagaaatacgtgatcgtgacgggaggagtcctcagcggtattgggaagggaatattctcggcttccttagcgaggttgatgaaagaacacggtgtcgatgtgaacgtgttgaaaatcgatccttatctcaacgtggacgctggtaccatgaatcccaaccagcacggagaagtcttcgtcaccgaggatggctacgaggcggatctggacctcggtcactacgagagattccttggaagagacatgacgaggcagaacaacatgacagcggggcaggtgtaccttcgtgtcatagagaaggaaagacagggaaaataccttgggaacaccgtccagatcgtaccgcatctcactgaggagataaaagacagaataagggcgctcgaggcggaactcctcgtggtcgagataggaggtaccgttggagacatcgaaggggaagtctttctggaggctgtgagagaactccagatggaagaaggaaaggaaaacttccttttcgctcacgtcacgtacgttccttaccttcggacgaccaacgagttcaagacgaaacccactcaacaatccgttcagcttttgagaaggataggaatcacaccggatatggtcatcgtgaggagcgagtttcccctcgatgtccccagtatgaacaaggtggctcttttctccggtgttccacgcgattttgtgataaacctgcccgatacgaagaacgtgtatgaagttccagaaatactgagagatatgggtttgcacgagaagattgcttccaagttgaacgttgagctgaaaaaatccacgttcaactggtcctatcccaaagctttcaaaccctacaggatagcgctcgttggaaaatatcttggaacggacgacgcgtacaaaagcatcatagagtcggtctttttgacaggaatagaaaagcccaccgtggtggacagtcagatgctcgaagacatgaacgacgaagaagtaaagaaagtgctcgacgaatacgatgccctcatcatacccggtggattcggaagaagaggtgtagaaggcaagataaaagccataaagtacgcacgtgagaacaagaagcccatacttggaatatgtctcggtatgcagctcatggtcatagagttcgcacgcaacgtgttcggctacaaagaggccaattccaccgagttcgatccgaacacaccttatcctgttgtggatctcatggaggagcagaagagaatattgaagctcggtggtacgatgaggcttggagctcaaaaggtgaaaatttttccaaaaacgaaactctacgaagtttacggtggagttgaggaagtctacgaaaggcacaggcacagatacgaagccaacgaagaagcgtttccggagctgttcaaaaaacctggagaagaagggtacaagctcgtcgtgtccgcgaaatccgacttcatagaggccgttgagcttgaagatcatcctttctttgttggtgttcagtttcatcccgagtacaagagcaaagtgggagcaccgcacccgatttttgtctatttgagaaaagtcctggagggatcacaatga

SEQ ID NO: 31641 - protein, 524 aa, Thermotoga maritima
MKKYVIVTGGVLSGIGKGIFSASLARLMKEHGVDVNVLKIDPYLNVDAGTMNPNQHGEVFVTEDGYEADLDLGHYERFLGRDMTRQNNMTAGQVYLRVIEKERQGKYLGNTVQIVPHLTEEIKDRIRALEAELLVVEIGGTVGDIEGEVFLEAVRELQMEEGKENFLFAHVTYVPYLRTTNEFKTKPTQQSVQLLRRIGITPDMVIVRSEFPLDVPSMNKVALFSGVPRDFVINLPDTKNVYEVPEILRDMGLHEKIASKLNVELKKSTFNWSYPKAFKPYRIALVGKYLGTDDAYKSIIESVFLTGIEKPTVVDSQMLEDMNDEEVKKVLDEYDALIIPGGFGRRGVEGKIKAIKYARENKKPILGICLGMQLMVIEFARNVFGYKEANSTEFDPNTPYPVVDLMEEQKRILKLGGTMRLGAQKVKIFPKTKLYEVYGGVEEVYERHRHRYEANEEAFPELFKKPGEEGYKLVVSAKSDFIEAVELEDHPFFVGVQFHPEYKSKVGAPHPIFVYLRKVLEGSQ

SEQ ID NO: 31642 - DNA, 1653 bp, Thermus thermophilus
  CDS (1)..(1653): transl_table=11
gtgaacgggagcgccgacgcgggtcccaggcccagaaagtacgtctttatcacgggcggcgtggtttccagcctaggcaaggggatcctcacctcctccctcggggccctcctccgggcccgggggtaccgggtgacggccatcaagatagacccctacgtcaacgtggacgcggggacgatgcgcccctacgaacacggggaggtcttcgtcaccgcagacggggccgaaaccgacctggacatcggccactacgagcgcttcttggacatggacctctcccgggggaacaacctcaccacggggcaggtctacctctcggtgatccagaaggagcgccggggagagtacctctcccagacggtccaggtcatcccccacatcaccgacgagatcaaggaacggatccgcaaggtggccgaggagcagaaggcggagatcgtggtggtggaggtgggggggacggtgggggacattgagagcctccccttcctcgaggccatccgccagttccgctttgacgagggggaggggaacaccctctacctgcacctcaccctggtcccctacctggagaccagcgaggagttcaagaccaagcccacccagcactccgtggccaccctgcggggcgtggggatccagcccgacatcctggtcctccgctccgcccggcccgtgcccgaggaggtgcggaggaaggtcgccctcttcaccaacgtccgcccgggccacgtcttctccagccccaccgtggagcacctctacgaggtccccctgctcctggaggagcagggcctgggccgtgcggtggagcgggccttgggcctcgaggcggtgatccccaacctcgccttctggcaggaggcggtccgggtcctcaagcaccccgagcgcaccgtcaagatcgccatcgccgggaagtacgtgaagatgccggacgcctacctctccctcctggaggccttgcgccacgcggggatcaagaaccgggcccgggtggaggtgaagtgggtggacgcggaaagcctcgaggcggcggacctggacgaggccttccgggacgtctccggcatcctggtcccgggggggtttggcgtgcggggcattgagggcaaggtgcgggcggcccagtacgccagggagcggaaaatcccttacctcgggatctgcctcggcctccagatcgccgtgattgagtttgcccgcaacgtggcgggcctcaagggggcgaactccaccgagtttgacccctacaccccccacccggtgattgacctcatgcccgagcagctggaggtggagggcctaggggggaccatgcgccttggggactggcccatgcgcatcaagcccggcaccctcctccaccgcctttacggcaaggaggaggtgctggagcgccaccgccaccgctacgaggtgaaccccctctacgtggacgggctggagcgggcgggcctcgtggtttccgccaccaccccggggatgcggggccggggggcggggctcgtggaggccattgagctcaaggaccaccccttcttcctcggcctccagagccaccccgagttcaagagccgccccatgcgcccttccccgcccttcgtgggcttcgtggaggcggcgctggcctaccaggaaagggcctag

SEQ ID NO: 31643 - protein, 550 aa, Thermus thermophilus
MNGSADAGPRPRKYVFITGGVVSSLGKGILTSSLGALLRARGYRVTAIKIDPYVNVDAGTMRPYEHGEVFVTADGAETDLDIGHYERFLDMDLSRGNNLTTGQVYLSVIQKERRGEYLSQTVQVIPHITDEIKERIRKVAEEQKAEIVVVEVGGTVGDIESLPFLEAIRQFRFDEGEGNTLYLHLTLVPYLETSEEFKTKPTQHSVATLRGVGIQPDILVLRSARPVPEEVRRKVALFTNVRPGHVFSSPTVEHLYEVPLLLEEQGLGRAVERALGLEAVIPNLAFWQEAVRVLKHPERTVKIAIAGKYVKMPDAYLSLLEALRHAGIKNRARVEVKWVDAESLEAADLDEAFRDVSGILVPGGFGVRGIEGKVRAAQYARERKIPYLGICLGLQIAVIEFARNVAGLKGANSTEFDPYTPHPVIDLMPEQLEVEGLGGTMRLGDWPMRIKPGTLLHRLYGKEEVLERHRHRYEVNPLYVDGLERAGLVVSATTPGMRGRGAGLVEAIELKDHPFFLGLQSHPEFKSRPMRPSPPFVGFVEAALAYQERA

SEQ ID NO: 31644 - DNA, 1614 bp, Thermoanaerobacter tengcongensis
  CDS (1)..(1614): transl_table=11
atggcaaagtatatttttgtaacaggaggagtagtctcctctttaggtaaaggcataactgctgcatcattgggaaggctactaaaaagccgcgggctttctgttgctatgcagaaatttgacccgtatataaacatagaccctgggacaatgagcccttatcagcatggagaagtatttgtaacagaggacggagcagaaacggacctggatttggggcattatgaaagattcatagatgtaaatctgactaaaaacagcaatgtcactgcgggcaaaatatactggtctgttatcacaaaagaaagaaaaggagattatctcggcgctactgttcaggtaataccccacattactgatgaaataaaagaaagagtgtacagagtagcaaaagaaaaaaatgtagatgtggttataacagaaattggtggaacagtaggagacatagaaagccttcctttcttggaggcaataaggcaggtggctattgaacagggaagagaaaatgttatgttcattcacgtaacgcttgttccacatctgggcaacacaggtgaactgaaaacaaagcctacacagcacagcgtaaaagaattaaggtccataggtattcagccggacatgatagtctgtagaactgagcttccacttcctcaggaattgagagaaaaaattgctctattctgcaatgtaagtgtagaagcggtcattgagaatagagatgtagaatcgatctatcaagttcctctggaacttgaaaggcagaaagtagacgaatatgtgataaaaaggctgaatttaccccttgggcagtctgatttaaaagagtggagagaatacgttgaaaaagagaaaaatcctgaacatcaggtagaggtagcacttgtaggcaaatatgtcgacctacatgatgcctatataagcgttgtagaagctttaaaacatgcaggggtttatcacaaaacagctgtcaacatccgatgggttaatgcagaaaaagtaaatgacaaaacagttgatgaacttttaaaaggtgcagatggaatacttgttcccggcggctttggcgacagaggaatagaaggaaagataagggcaattcagtacgcaagggaaaataagattccctatctggggctgtgtcttggaatgcagtgtgcggtcatagaatttgcgagaaatgtggcagggcttaaaggggccaattccaccgaatttgaccccaatacccctcatccagtaattgacctcatgcccgaacaaaaagacatagatgaaaaaggcggcacaatgagactgggagtatacccttgtaaagtcattgaaggaacaaaggcatatgaagtatacaaagatgagctagtttatgaaaggcacaggcacaggtatgaatttaacaaccagtacagagagcttttaacctcaaaagggcttgtaatctcaggcctttctccagatgagaggcttgttgaaataatagagttaaaagaccatccttattttgtagcaacccaatttcatccagaattcaaatcaagacctttaaacccacaccctcttttcagagattttgtaaaggcaatgcttaacttaaaaataaataatgcagagtaa

SEQ ID NO: 31645 - protein, 537 aa, Thermoanaerobacter tengcongensis
MAKYIFVTGGVVSSLGKGITAASLGRLLKSRGLSVAMQKFDPYINIDPGTMSPYQHGEVFVTEDGAETDLDLGHYERFIDVNLTKNSNVTAGKIYWSVITKERKGDYLGATVQVIPHITDEIKERVYRVAKEKNVDVVITEIGGTVGDIESLPFLEAIRQVAIEQGRENVMFIHVTLVPHLGNTGELKTKPTQHSVKELRSIGIQPDMIVCRTELPLPQELREKIALFCNVSVEAVIENRDVESIYQVPLELERQKVDEYVIKRLNLPLGQSDLKEWREYVEKEKNPEHQVEVALVGKYVDLHDAYISVVEALKHAGVYHKTAVNIRWVNAEKVNDKTVDELLKGADGILVPGGFGDRGIEGKIRAIQYARENKIPYLGLCLGMQCAVIEFARNVAGLKGANSTEFDPNTPHPVIDLMPEQKDIDEKGGTMRLGVYPCKVIEGTKAYEVYKDELVYERHRHRYEFNNQYRELLTSKGLVISGLSPDERLVEIIELKDHPYFVATQFHPEFKSRPLNPHPLFRDFVKAMLNLKINNAE

SEQ ID NO: 31646 - DNA, 1623 bp, Thermoplasma volcanium
  CDS (1)..(1623): transl_table=11
atgcagtacatagttgtaactggtggtgtgatatcaggccttggaaaggggactataacctccagtattggtcatattttaaaagactcaggttttaaagtgtcttctgtgaaaatagatccatatataaattacgatgctggtacaatgaatccataccagcatggagaggtgtttgtccttgacgacgggagtgaggttgatctcgaccttgggaactacgaaagattcatggatataaacctaagttggaagaacaatattacgacgggaaaagtttacctagaagtaatagagaaggaaaggcatggcgattatctcggtaagacagttcaaataatcccccatataacggatgagataaaaaggaggatcagagacgttgctacttcaagtaaagcagatttcgttttgattgaggttgggggcactgtgggtgatatagagtctatgccattcctcgaagctgtaaggcagctaaaaagagaggagaacaatgtaatatttgcccacgtaacgcttgttccagagatagggccaacagaagaacagaagacaaagcctacgcagcacagcgtaaaggcgctgcgtgaaataggaatacaaccagacataatatttgcaaggtctaagaacagacttcttgaggagactaagaagaggatatccctctttacagacgtacctgaggggggcattataagtgtctatgacgttgaaaatgtatacctgctgcctgaggtcatggtaaatgaaggcttcatatcgtacctttcaaagctttccgggaaagagataaagtacagagacagctggaaggcctataccgaaaatataaagcatccaaaggacagagttaagatagcaatagttggcaagtatgtagatctgcatgatgcatacataagccacaaggaggctttctcccatgttaccggaaatacgggaatagctgtagacataaagtggctggattctgagaaggtaaaggacgaccaaagcatgcttagcgatgtggatgcaatccttatcccaggtggatttggctacagaggagtagaaggaaaaattgctgccacaagatttgcactggaaaaccacatcccgttcttgggaatttgccttggctttcaggttgcagtgatagaaatagctagagacattataggcttacagaatgcaaacagcacagaattcgatcctgcaacgaaatatcctgtaatagacatactgcctgagcagaaaggaataaaagatctgggcggcacgatgaggctaggcagcaagaaagtattgattaaagacggaactttagctaagagaatatacgggacagatacgatatatgaaaggcacaggcacagatacgaggtcaaccccaactacattagcataatagaaaaggctggttttgttttctctggtactgatgaagacgggataagaatggagattcttgagaagaagggagatgagagcttcatagcaacccagtatcacagtgagtttaaatcaaggccacttaatccttcacgagtacatctccatctagtacagcaggcattgatttataaaaaaaataaggatataggggaagcggtaaaacttcgatcttcagtttga

SEQ ID NO: 31647 - protein, 540 aa, Thermoplasma volcanium
MQYIVVTGGVISGLGKGTITSSIGHILKDSGFKVSSVKIDPYINYDAGTMNPYQHGEVFVLDDGSEVDLDLGNYERFMDINLSWKNNITTGKVYLEVIEKERHGDYLGKTVQIIPHITDEIKRRIRDVATSSKADFVLIEVGGTVGDIESMPFLEAVRQLKREENNVIFAHVTLVPEIGPTEEQKTKPTQHSVKALREIGIQPDIIFARSKNRLLEETKKRISLFTDVPEGGIISVYDVENVYLLPEVMVNEGFISYLSKLSGKEIKYRDSWKAYTENIKHPKDRVKIAIVGKYVDLHDAYISHKEAFSHVTGNTGIAVDIKWLDSEKVKDDQSMLSDVDAILIPGGFGYRGVEGKIAATRFALENHIPFLGICLGFQVAVIEIARDIIGLQNANSTEFDPATKYPVIDILPEQKGIKDLGGTMRLGSKKVLIKDGTLAKRIYGTDTIYERHRHRYEVNPNYISIIEKAGFVFSGTDEDGIRMEILEKKGDESFIATQYHSEFKSRPLNPSRVHLHLVQQALIYKKNKDIGEAVKLRSSV

SEQ ID NO: 31648 - DNA, 1641 bp, Thiobacillus denitrificans
  CDS (1)..(1641): transl_table=11
atgacgaagtatgtgtttgtcaccggtggggtggtttcttccctcgggaaagggatcgcctccgcttcactcgctgcgctgctcgaatcgcgcggcctccgtgtcaccctgttaaagctcgatccctacatcaacgtggatccgggcacgatgagcccgttccagcacggcgaagtgttcgtgaccgacgacggcgccgagaccgacctcgacctcggtcactacgagcgcttctcgagcgcgcgcatgagcaagcgcaacaacttcacgaccggacagatctacaagtcggtgatcgacaaggagcgccgcggcgactacctcggcggcaccgtgcaggtcattccgcacatcaccgacgagatcaagctctcgatccgcgagggcgcgaagggtgccgacgtcgcgctggtcgagatcggcggcacggtcggcgacatcgagtcgctgccgtttctcgaagcgatccgccagatgggtttcgaggacggcccggcgaatacctgcttcatccatctgacgctcttgccctatatcccgactgccggcgagctgaagaccaagccgacccagcactcggtcaaggagttgcgcgagatcggcatccagcccgacatcctgctgtgccgcgccgaccgcgagattccgctcgacgagcggcgcaagatcgcgctcttcaccaacgtgcgccccgaggccgtgatcgaggtgctcgacgccgattcgatctacaagattccggccatgctgcacgagcagatgctcgacgagatcgtctgccacaagctcaacatcctcgcgcgcgccgccgacctttcggtatggaagaggctcgtcgacgcactcgagcatcccgagcatacggtcaacatcgccttcgtcggcaagtacgtcgacctgaccgaatcctacaagtcgctgtccgaagcgatgatccatgccggcatgcacaccaaaagccgcgtcaagatccattacgtcgactccgagcagatcgagaaatccggcgtcgactgtctgcgcggcatggacgcgatcctcgtgcccggcggcttcggcaagcgcggcgtcgagggcaagatcgcggcgatccgctacgcgcgcgaaaatcgcgtgccgtatctgggcatctgcctcggcatgcagctcgccgtggtcgagttcgcgcgcgacgtcgccggcatggccgacgcgcagtcgaccgaattcgatccgactacgaaccatcccgtgatcggtctcatcaccgaatggctcgaccgcacgggtcaggtcgaaaagcgcagcgagcaatccgacctcggcggcacgatgcgcctgggcggccagccgtgcacgctcaagaacggcacgctggcccgcgagatctatggcgccgacagcatcgtcgagcggcatcgccatcgctacgaggtcaacaacacgctactgagcgaactcgaggccaagggtctcgtcgtcgcgggacgcgcgccgggtaccgagctgtgcgaaatggtcgagctgccgccggccgtccacccctggttcgtcggctgccagttccatccggaattcaccagcaacccgcgcaacggacacccgctgttcatctcgttcgtgagagccgcgctggcgcatcagcaaaaggactccgcatga

SEQ ID NO: 31649 - protein, 546 aa, Thiobacillus denitrificans
MTKYVFVTGGVVSSLGKGIASASLAALLESRGLRVTLLKLDPYINVDPGTMSPFQHGEVFVTDDGAETDLDLGHYERFSSARMSKRNNFTTGQIYKSVIDKERRGDYLGGTVQVIPHITDEIKLSIREGAKGADVALVEIGGTVGDIESLPFLEAIRQMGFEDGPANTCFIHLTLLPYIPTAGELKTKPTQHSVKELREIGIQPDILLCRADREIPLDERRKIALFTNVRPEAVIEVLDADSIYKIPAMLHEQMLDEIVCHKLNILARAADLSVWKRLVDALEHPEHTVNIAFVGKYVDLTESYKSLSEAMIHAGMHTKSRVKIHYVDSEQIEKSGVDCLRGMDAILVPGGFGKRGVEGKIAAIRYARENRVPYLGICLGMQLAVVEFARDVAGMADAQSTEFDPTTNHPVIGLITEWLDRTGQVEKRSEQSDLGGTMRLGGQPCTLKNGTLAREIYGADSIVERHRHRYEVNNTLLSELEAKGLVVAGRAPGTELCEMVELPPAVHPWFVGCQFHPEFTSNPRNGHPLFISFVRAALAHQQKDSA

SEQ ID NO: 31650 - DNA, 1611 bp, Treponema denticola
  CDS (1)..(1611): transl_table=11
atgaaatctaagtttatctttataacaggcggagttgtttcatctttaggcaagggcctaacggcagcttctataggaatgcttttaaaaagccgcggatattccgtagtcaatcaaaaattcgatccgtatttaaacgtagatccgggtaccatgaacccctaccagcacggtgaagtctttgttacggaagacgggggcgaaacagatctcgacctgggccactacgaaagatttaccgatgttcccctgcataaatttaacagtacctcagccggaaaagtctatctagccattttagacagagaaagagccggaggctataacggcggcaccgtacaagttgttcctcatgttaccgacgaaatccagtcccgaattctaggaacggctgaacaaacaggagccgactttgttatttccgaaataggcggcaccgtgggagatatagaagctctaccctttatcgaagctatccgccaaatccgctacactgtcggaaaagaaaactgcatgtttgttcacttaggccttttaccctatctaaaagaatgcggcgaaatcaaaacaaagccgatgcagcacagcgtaaaagagcttttaagtttcggtatccagccggacattctaatttgccgaagcgaaaaacgcctttcaaaatcgactcgagaaaaactaagccttttttcgaatattcctcaagatgcaataatcgaaaacttaactgcaaaatctatttacgaagttccgctgatgctggaagaagcaggccttggaaaagttttatgtaagcttttcaatattgaaaataaagagcctaatctggaagaatggaaaaaaatggttcaaacctactacaatcccgaaaaagaaataaccattgcccttgtaggaaaatatgtagagcttcccgatgcctatctcagcgttgcagaggccttaacggcagccggtatttaccataaaacctcaatcaaacttctttggattgactccaaaaaaatagaaactaaggaagatgctgctgcctttttaaaggatgcagacggaatcatagtgccgggaggtttcggcgacaggggcatcaacggaatgcttttaacggcccaatttgcccgcgaaaataaaattccgtatttcggaatctgcttaggtatgcagatttcggccatcgaatatgccttaaacgccctgcacatcgaagaagctaattcttccgaattcgataaaaatgctaaaaatcccgtcatagacctaatgcccgatcaaaaagatgtaaaaatcggcggcaccctccgcctaggcctatacagatgtatgatagcagaaggctctctcgcagaaaaggcctataaatcccacgaaatccaagaaaggcaccgtcacagatacgagttcaacaacctttacagagaaaaattcgataattcggatatgattttttcggggctaaatcctgaacgcaacttagtggaaatcgttgagctaaaaagccatccttggtttgtcgccgtacaattccatccggaatttgcctcaaggcccaacaagccccatcccctgtttagggattttatcaaggctgcagtcgacaacaaaatcaaccgatag

SEQ ID NO: 31651 - protein, 536 aa, Treponema denticola
MKSKFIFITGGVVSSLGKGLTAASIGMLLKSRGYSVVNQKFDPYLNVDPGTMNPYQHGEVFVTEDGGETDLDLGHYERFTDVPLHKFNSTSAGKVYLAILDRERAGGYNGGTVQVVPHVTDEIQSRILGTAEQTGADFVISEIGGTVGDIEALPFIEAIRQIRYTVGKENCMFVHLGLLPYLKECGEIKTKPMQHSVKELLSFGIQPDILICRSEKRLSKSTREKLSLFSNIPQDAIIENLTAKSIYEVPLMLEEAGLGKVLCKLFNIENKEPNLEEWKKMVQTYYNPEKEITIALVGKYVELPDAYLSVAEALTAAGIYHKTSIKLLWIDSKKIETKEDAAAFLKDADGIIVPGGFGDRGINGMLLTAQFARENKIPYFGICLGMQISAIEYALNALHIEEANSSEFDKNAKNPVIDLMPDQKDVKIGGTLRLGLYRCMIAEGSLAEKAYKSHEIQERHRHRYEFNNLYREKFDNSDMIFSGLNPERNLVEIVELKSHPWFVAVQFHPEFASRPNKPHPLFRDFIKAAVDNKINR

SEQ ID NO: 31652 - DNA, 1734 bp, Treponema pallidum
  CDS (1)..(1734): transl_table=11
atggatccggcttttatctttattacaggcggtgtagtttcctcgctgggcaagggtattgccgcaggtgccatcggacttttgcttaagagccggggtatatccgtggtgaatcaaaagtttgatccctacctgaatggggatcccggtaccatgaatccctatcagcacggggaggtgtttgtcacgcaagatggcggcgaaacggacctggatctgggccattacgagcgcttcacggacgtgccttcaagtagattcaatagcacgactgcggggagcgtgtaccgggctattttggaccgtgaacgcgcgggaggatacggaggtgctaccgtacaggttattcctcacgttacggatgaaatccaggcgcgaattcgcgccgctgctgctaccacgggggctcgggtggttatcaccgaaatcggtggtaccgtcggtgacatagagtcgcttccgttcatcgaggcgattcgtcaaatcaggcgtgttctggggaaggagcgctgtctttttattcatttgggtttagttccctacttacccagttgtggtgaaatgaaaaccaagccgctacagcacagcgtaaaggagctgctaggacttggtgtgcagccggatgtcatcctgtgccgcagcgagcgtcacatcacggatgcggtgcgcgaaaagctgagccttttttgcaatgttgagcggcgtgctattgtcgagaacgtgacggctcgttctatctatgaggtgccgctccttttggaagcagaagggctgggagcgctcttgtgtgagcgtttgcgtctttttgatacctgctgcggggggcaggtggcgcgtaatctcggtgcaggaggcgcgcagtcggctgtgttgggagcgggggggacggtccgtacagacggtggtctgcatcctgcagcagggcagggggcagagccagatcttacggcgtggcgcgcaatggtccgtgcactgtactatccgcggcgggagcttacggtggcgctggtgggtaagtatgtgtcgcttgcggacgcgtatttgagcgtgagcgaagcgttgacggcggcgggtatttgccatcgtgcgcgagtggacatgcgctggatagacgcagaggaaatctgcagcgtgcaggacgctgggcacgctcttgcggacgcagatgcgctggtaattccaggtggctttggcgtgcgggggattgaagggatgatctgtgcagtttcgcacgcgcgtgtgcagaacctgccctatcttggcatttgcttggggatgcagattgcagtcattgaatttgcgcgcaatgtactgttgctggcaagtgcacactctcgagaatttgcggtagacacccctcacccggttgttgatcttttgcccggttgtgtagataccccaacgggtggaagcctgcgtctgggacagtatcgctgtctgcttgcggaaggttcgcgcgcgcgtgcactgtacggtaggggggaggtctgggagcggcaccggcaccgctatgggttgaacgcggcgtatcgagcgcgctttgaggcgagcgcgttgcgtccggtgggagtggattcagactgtggcgcagtggaggtggtggagcacggggagcatccgtggtttttcggcgtgcagttccacccggaattttgttctcgaccgaaccgggctcaccctttgttccgggcgctggtggcggcgggcttggagcgaaaagacagtcgttcttga

SEQ ID NO: 31653 - protein, 577 aa, Treponema pallidum
MDPAFIFITGGVVSSLGKGIAAGAIGLLLKSRGISVVNQKFDPYLNGDPGTMNPYQHGEVFVTQDGGETDLDLGHYERFTDVPSSRFNSTTAGSVYRAILDRERAGGYGGATVQVIPHVTDEIQARIRAAAATTGARVVITEIGGTVGDIESLPFIEAIRQIRRVLGKERCLFIHLGLVPYLPSCGEMKTKPLQHSVKELLGLGVQPDVILCRSERHITDAVREKLSLFCNVERRAIVENVTARSIYEVPLLLEAEGLGALLCERLRLFDTCCGGQVARNLGAGGAQSAVLGAGGTVRTDGGLHPAAGQGAEPDLTAWRAMVRALYYPRRELTVALVGKYVSLADAYLSVSEALTAAGICHRARVDMRWIDAEEICSVQDAGHALADADALVIPGGFGVRGIEGMICAVSHARVQNLPYLGICLGMQIAVIEFARNVLLLASAHSREFAVDTPHPVVDLLPGCVDTPTGGSLRLGQYRCLLAEGSRARALYGRGEVWERHRHRYGLNAAYRARFEASALRPVGVDSDCGAVEVVEHGEHPWFFGVQFHPEFCSRPNRAHPLFRALVAAGLERKDSRS

SEQ ID NO: 31654 - DNA, 1716 bp, Trichodesmium erythraeum
  CDS (1)..(1716): transl_table=11
atgactaaatttgtattcataactggtggagtagtttccagtattggtaaaggaattgtcgcagcaagcttaggccgtttgctcaaatcacggggttattctgtttctattcttaaactagacccctatataaatgtagacccagggacaatgagtcccttccaacatggagaagtattcgttacagaagatggggcagaaactgacctagacctaggccactatgaacgattcacagatacctcaatgtctcgccttaatagtgttacccaaggttcgatctaccaggcagtaattaataaagaaaggcgaggggactatcagggaggaactgttcaggttattcctcatattaccaatgaaatcaaagaaagaatacatagagtagccaaaaatgctaatccagatgtggtaattacagaaatagggggaactgtaggagatatcgaatctcagccatttttagaagcaattcggcagtttcgcaaagatgtaagacggaataatgctttgtatatccatgtgacattagtgccttggattgcttctgcaggagaaatgaaaactaagccgactcaacactcagtcaaggagttacgttcaattggtatccagccagatattttggtctgtcgttgcgatcgcaaactgagtgaaggcctgaaagaaaaaatgtcggagttctgtgatgtacctgtagaatctgtaattacgtctcaagatgctcaaagtatttatgaagtacctttgatgttagaaacagaagggctagcagtacaagctctagaattattaaaaatggagcaacgtcaaccaaaccttagtcattggaaaactttggtcaatcgtctttatcatagagataagcaagatatacggactagccaaggtaaattatctattactgctactgtagaaattgccatagtaggtaaatatattcaactaagtgatgcttacctgtcagtggtagaagcattacgtcatgcagcgatcgctgttggtgtagatttaaatctgcatttggtaaatgctgaagatgtggagaccaagggagctaggacctacctggaaaaagctaatggaattattgttccgggtgggtttggcgtgagaggtattgatgggaaaatagctacagttgaatatgccagaataaataaaattccttttttgggattatgtctaggaatgcaatgtgcagtaattgagtgggcacgcaatatagcaaaattagatgctgcccatagttttgagtttgaccctcaaacaccaaatccggtgattaatttattaccagaacaacaagatgtagtagacttgggcggcactatgcgacttggactttatccatgccgtcttcaaggggatacattggcatttaaaacttatcagcaagaagtaatttatgaacgccatcgtcatcgatatgaatttaataatgcttaccgaaacttgttcaaagaaacaggatatattatcagtggaacttctccggatggtagactagtagaaattattgaacttcctgctcatcctttttttattgctactcaatttcatccagagtttcaatctcgacctagtactccccatcctctatttcataatttttttcaagcagctaattcacaagaaaaatgtgataatttatctgtgaataatactgaagaaaccccagacaatttagttagtaaaagttctattcctaattga

SEQ ID NO: 31655 - protein, 571 aa, Trichodesmium erythraeum
MTKFVFITGGVVSSIGKGIVAASLGRLLKSRGYSVSILKLDPYINVDPGTMSPFQHGEVFVTEDGAETDLDLGHYERFTDTSMSRLNSVTQGSIYQAVINKERRGDYQGGTVQVIPHITNEIKERIHRVAKNANPDVVITEIGGTVGDIESQPFLEAIRQFRKDVRRNNALYIHVTLVPWIASAGEMKTKPTQHSVKELRSIGIQPDILVCRCDRKLSEGLKEKMSEFCDVPVESVITSQDAQSIYEVPLMLETEGLAVQALELLKMEQRQPNLSHWKTLVNRLYHRDKQDIRTSQGKLSITATVEIAIVGKYIQLSDAYLSVVEALRHAAIAVGVDLNLHLVNAEDVETKGARTYLEKANGIIVPGGFGVRGIDGKIATVEYARINKIPFLGLCLGMQCAVIEWARNIAKLDAAHSFEFDPQTPNPVINLLPEQQDVVDLGGTMRLGLYPCRLQGDTLAFKTYQQEVIYERHRHRYEFNNAYRNLFKETGYIISGTSPDGRLVEIIELPAHPFFIATQFHPEFQSRPSTPHPLFHNFFQAANSQEKCDNLSVNNTEETPDNLVSKSSIPN

SEQ ID NO: 31656 - DNA, 1638 bp, Tropheryma whipplei
  CDS (1)..(1638): transl_table=11
gtgaacggcataaaacatatattcataacaggtggggttgtttcctcaataggtaaggggctaacagcagccagcttgggcagtctgctcacaatgcgtgggctaaaggtgtttataaaaaagctggatccgtatctgaatgttgatcctggcacgatgaatccgctgcagcatggtgaagtgtttataaccgaggatggcgcagaaaccgatcttgatgttgggcactacgaacggttcttggatgtggatctcgatagaacagcgaatgttacaacggggcaagtgtactccaaggtaatcactcttgaaagaaccggcagatatcttggcgaaactgtacaggttatacctcatataactgatgagataaagcgcaggatacgactcgcacctgatgatattgatgtcataataaccgaaatagggggcacggttggggatattgagtcccagccatttatcgaggcggccaggcagataaggcgcgaagttggcagagaaaactgctgttttatacatgtatcacttgtcccctttctcgagagtgcgggtgagcagaaaacaaaacccactcagcattcggttgctatattgagagccgcgggaattcaacccgatgcccttgtcttgcggagcgataagcccatttcaagtgccaatcagaaaaagatagcacttatgtgtgatgtcagtgctgttgtaaacgcggtcactgttccaaacatctatgaaataccttgtgttctaaatcaacacgggttagacaagtttgtaatcaagcacctcgaccttgaggcgggtgaaattgactggtcctattgggacgatgtgcttgatgcgatagagaacaatagaagtgaaatagagatagccattattggaaagtatacgggactgcccgacgcatacatttctgttattgaggcgcttagggctggcggattcgagagtaagacaaaggttaatataaagtgggttgactcagatgatgagaaccttgaggatcagctggaaaacatcaacggcgcttgtatccccggcggttttggaatacggggcatagaaggacttataaaagccatacggatttgccgcgaaagagaaattcctactctcggtatatgtctcgggatgcagtgcatggtgatagagtatgccagacatgttgttgggatgcatggcgcatcgtcaacggagtttaccgatgatactcagtggccagttgtaacaacaatgcttgaacaaagagatattcttattgacgatcagtttggcgggacaatgcgcctgggaagctaccgtgccgttctgagtgtcgggagtctagctgccagtttatatggcacaactgatatacacgagcggcataggcaccgctatgaggtaaataatggctatgcacagcgactggttgagcgtgggcttatagtctctgggcggaatacagagcaagacctgattgaatttattgagctcgaccgcaaggatcacccgttctacattggcacacaggcgcatccggaatgtaagtcgcgaccaaagaggccacacccgctgttcaagggccttgtggcagcggctttagctaggaaagaaatagcggaattcaattccggcaagacggtgcttcaatag

SEQ ID NO: 31657 - protein, 545 aa, Tropheryma whipplei
MNGIKHIFITGGVVSSIGKGLTAASLGSLLTMRGLKVFIKKLDPYLNVDPGTMNPLQHGEVFITEDGAETDLDVGHYERFLDVDLDRTANVTTGQVYSKVITLERTGRYLGETVQVIPHITDEIKRRIRLAPDDIDVIITEIGGTVGDIESQPFIEAARQIRREVGRENCCFIHVSLVPFLESAGEQKTKPTQHSVAILRAAGIQPDALVLRSDKPISSANQKKIALMCDVSAVVNAVTVPNIYEIPCVLNQHGLDKFVIKHLDLEAGEIDWSYWDDVLDAIENNRSEIEIAIIGKYTGLPDAYISVIEALRAGGFESKTKVNIKWVDSDDENLEDQLENINGACIPGGFGIRGIEGLIKAIRICREREIPTLGICLGMQCMVIEYARHVVGMHGASSTEFTDDTQWPVVTTMLEQRDILIDDQFGGTMRLGSYRAVLSVGSLAASLYGTTDIHERHRHRYEVNNGYAQRLVERGLIVSGRNTEQDLIEFIELDRKDHPFYIGTQAHPECKSRPKRPHPLFKGLVAAALARKEIAEFNSGKTVLQ

SEQ ID NO: 31658 - DNA, 1638 bp, Tropheryma whipplei
  CDS (1)..(1638): transl_table=11
gtgaacggcataaaacatatattcataacaggtggggttgtttcctcaataggtaaggggctaacagcagccagcttgggcagtctgctcacaatgcgtgggctaaaggtgtttataaaaaagctggatccgtatctgaatgttgatcctggcacgatgaatccgctgcagcatggtgaagtgtttataaccgaggatggcgcagaaaccgatcttgatgttgggcactacgaacggttcttggatgtggatctcgatagaacagcgaatgttacaacggggcaagtgtactccaaggtaatcactcttgaaagaaccggcagatatcttggcgaaactgtacaggttatacctcatataactgatgagataaagcgcaggatacgactcgcacctgatgatattgatgtcataataaccgaaatagggggcacggttggggatattgagtcccagccatttatcgaggcggccaggcagataaggcgcgaagttggcagagaaaactgctgttttatacatgtatcacttgtcccctttctcgagagtgcgggtgagcagaaaacaaaacccactcagcattcggttgctatattgagagccgcgggaattcaacccgatgcccttgtcttgcggagcgataagcccatttcaagtgccaatcagaaaaagatagcacttatgtgtgatgtcagtgctgttgtaaacgcggtcactgttccaaacatctatgaaataccttgtgttctaaatcaacacgggttagacaagtttgtaatcaagcacctcgaccttgaggcgggtgaaattgactggtcctattgggacgatgtgcttgatgcgatagagaacaatagaagtgaaatagagatagccattattggaaagtatacgggactgcccgacgcatacatttctgttattgaggcgcttagggctggcggattcgagagtaagacaaaggttaatataaagtgggttgactcagatgatgagaaccttgaggatcagctggaaaacatcaacggcgcttgtatccccggcggttttggaatacggggcatagaaggacttataaaagccatacggatttgccgcgaaagagaaattcctactctcggtatatgtctcgggatgcagtgcatggtgatagagtatgccagacatgttgttgggatgcatggcgcatcgtcaacggagtttaccgatgatactcagtggccagttgtaacaacaatgcttgaacaaagagatattcttattgacgatcagtttggcgggacaatgcgcctgggaagctaccgtgccgttctgagcatcgggagtctagctgccagtttatatggcacaactgatatacacgagcggcataggcaccgctatgaggtaaataatggctatgcacagcgactggttgagcgtgggcttatagtctctgggcggaatacagagcaagacctgattgaatttattgagctcgaccgcaaggatcacccgttctacattggcacacaggcgcatccggaatgtaagtcgcgaccaaagaggccacacccgctgttcaagggccttgtggcagcggctttagctaggaaagaaatagcggaattcaattccggcaagacggtgcttcaatag

SEQ ID NO: 31659 - protein, 545 aa, Tropheryma whipplei
MNGIKHIFITGGVVSSIGKGLTAASLGSLLTMRGLKVFIKKLDPYLNVDPGTMNPLQHGEVFITEDGAETDLDVGHYERFLDVDLDRTANVTTGQVYSKVITLERTGRYLGETVQVIPHITDEIKRRIRLAPDDIDVIITEIGGTVGDIESQPFIEAARQIRREVGRENCCFIHVSLVPFLESAGEQKTKPTQHSVAILRAAGIQPDALVLRSDKPISSANQKKIALMCDVSAVVNAVTVPNIYEIPCVLNQHGLDKFVIKHLDLEAGEIDWSYWDDVLDAIENNRSEIEIAIIGKYTGLPDAYISVIEALRAGGFESKTKVNIKWVDSDDENLEDQLENINGACIPGGFGIRGIEGLIKAIRICREREIPTLGICLGMQCMVIEYARHVVGMHGASSTEFTDDTQWPVVTTMLEQRDILIDDQFGGTMRLGSYRAVLSIGSLAASLYGTTDIHERHRHRYEVNNGYAQRLVERGLIVSGRNTEQDLIEFIELDRKDHPFYIGTQAHPECKSRPKRPHPLFKGLVAAALARKEIAEFNSGKTVLQ

SEQ ID NO: 31660 - DNA, 1629 bp, Ureaplasma parvum
  CDS (1)..(1629): transl_table=4
atggagattgatctaatgaaacatatacaaaaaacaaaatttatttttgtaactggtggtgtttattcatcattaggtaaaggggttagtgctagtagtattggtcgaattcttgttgaattaggatatagtgttgcaatgcaaaagcttgatccatatttaaatattgatcccacttatttatcaccattacaacatggagaagtatttgttacaaaagacggtaaagaagcagatttagatttaggtacttatgaacgttttattaatgctgatttaaataaatatgcgtcagtaacttcaggaaaaatttattatgaaattttaacaaaagagcgtgaaaatggttttgacggtaaaactgttcaaactattccacatgtcacatctgcagttattgattacattaaaaaaattaaagatagtttaaaaactgattttattattgttgaaattggaggaacaattggagatattgaatcgcttccatttattgaagctattagtcaatttaaaacaatttatggtgtaaataatgtaatgtttattcactgttcaccgcttatttatattgaaaaagtaggtgaattaaaaacaaaaccaactcaacatagcgttaagacgttacgttcattaggaattaatttagatttattgttattaagaactaatcaaaaattagatgaagtaacgattaaaaaattagcatgatcttgtggattagatattgatatgatttttgctgcttatgatgttgagtcagtttatttattaccaaatgttttgtttgagcaagggattcataaaactattttagatttttttagtctacctttaaaaaatgataatattaattcatgaatagattttactgataaaattacaacctttaaaaaacataatttagttataggtttagttggaaaatatgttgaattacccgatgcttataaatcagtattagcgagtttagaattagcagcaattgaattaaatattgatttaaagattaaatatattcaaccccaaaatttaaatgaaaacaacataaatgaagaactaaaaaaaataaatggtattgttattccaagtattgcaggttcaataaaaggctgaccaggagctttattagctgcatcttatgcaagaaaaaacaatattccatttttagctgtgggaactggcgttaatattggtattggtgaattcattaataatgtactaaaacttccaattgaatttattaatttaggcaatggtgattttagttttttaaaagacgctttcgttaaaaatgaaattgaaaattatcgaattggagagtattgttctaatattcaagctaacactataacaagccaaatttatctcaaacaaaatcaattgaacgagcgccatcgtcatcattttgaatttaacaatcattatattaataattattttttaaatcaaaattgaaaaattggagcaatttcagtggataataattatattgatgttttagaatacacaaaaaatcatttttatgttttaacaatttttaatccagaatatacatcaaaaccttcaaaggcaaatccttattttattaatttattaaagatgagtttaaaaataaaagaaagttag

SEQ ID NO: 31661 - protein, 542 aa, Ureaplasma parvum
MEIDLMKHIQKTKFIFVTGGVYSSLGKGVSASSIGRILVELGYSVAMQKLDPYLNIDPTYLSPLQHGEVFVTKDGKEADLDLGTYERFINADLNKYASVTSGKIYYEILTKERENGFDGKTVQTIPHVTSAVIDYIKKIKDSLKTDFIIVEIGGTIGDIESLPFIEAISQFKTIYGVNNVMFIHCSPLIYIEKVGELKTKPTQHSVKTLRSLGINLDLLLLRTNQKLDEVTIKKLAWSCGLDIDMIFAAYDVESVYLLPNVLFEQGIHKTILDFFSLPLKNDNINSWIDFTDKITTFKKHNLVIGLVGKYVELPDAYKSVLASLELAAIELNIDLKIKYIQPQNLNENNINEELKKINGIVIPSIAGSIKGWPGALLAASYARKNNIPFLAVGTGVNIGIGEFINNVLKLPIEFINLGNGDFSFLKDAFVKNEIENYRIGEYCSNIQANTITSQIYLKQNQLNERHRHHFEFNNHYINNYFLNQNWKIGAISVDNNYIDVLEYTKNHFYVLTIFNPEYTSKPSKANPYFINLLKMSLKIKES

SEQ ID NO: 31662 - DNA, 1638 bp, Vibrio cholerae
  CDS (1)..(1638): transl_table=11
atgacgacaaattatatttttgttactggcggggttgtatcctctctaggtaaaggtattgcagcagcatcccttgcagcgattcttgaagctcgtggtcttaaagtgaccatgatgaagcttgacccttacatcaacgttgatccgggcaccatgagcccaactcaacacggtgaagtgttcgttacggaagatggcgcagaaaccgacctagaccttggtcactacgagcgtttcattcgtaccaagatgaccaagcgcaacaactttaccgcaggtcgtgtttacgctgatgttctgcgcaaagagcgccgtggcgactacttaggtgccacgattcaggttattcctcatatcactaacgcgatcaaagatcgtgtgattgcgggctcagaaggccacgacatcgctatcgttgaagttggcggtactgtcggtgatatcgaatcactgccatttatggaagcgatccgtcagctcgcgatcgaagtgggccgtgagcacgctatgttcatgcatctgacgctggttccttacctagcggcagcgggcgaagtgaaaacaaagccaactcaacattcggtaaaagagctgctttctatcggtattcagccagacattctggtttgccgtagcgatcgtatgatcccagccaacgagcgtaagaaaattgctctgttctgtaacgtgcctgaaaaagccgttatctcaatgaaagacgtggattctatctacaagatcccacaactgatccgctctcaagggttggatgatttggtgtgtgcacgttttggcattaacgcgccagaagcggatctctctgaatgggaacaggtgatttacgaagaagcgaacccaaccggtgaagtgactatcggtatggttggtaagtacaccgaactgccagatgcttacaaatcggtcaacgaagccctgaaacacgccggtctgaagaaccgtctgagcgtgaccatcaaatacgtagattcacaagacgttgaaaccaaaggcaccgatgtgctcaatggtctggatgcgattttggtaccgggtggttttggcgatcgtggtatcgaaggcaaaatccgtgcagcgcaatatgcacgtgaaaacaaaattccttaccttggcatctgcttgggtatgcaagtggcactcattgaatacgcgcgcaatgtagcgggtatggaaggtgcacactcaaccgaattcaataaaaacaccaaataccctgtggttggtttgatcacggaatgggtagatggcgaaggcaatgtcgaagagcgtagcgagaaatcagatctgggcggtaccatgcgtctaggttcacagctatgccaccttgagaaaggcactaaagcgtacgagttgtacggtagcgcaaccattcatgagcgtcaccgccaccgttacgaagtcaacaacctgctgcgtcctcagattgaaaaagcaggtttgaaggtttctggtctgtcagcagataagaagctggttgaagtgattgagaaccctgctcacccatggtttgtggcagcgcagttccacccagagttcacctcaaccccacgcgatggtcaccctctgtttgctggctttgtaaaagcagcgggtcagttccaacgcggtgaattgaagtaa

SEQ ID NO: 31663 - protein, 545 aa, Vibrio cholerae
MTTNYIFVTGGVVSSLGKGIAAASLAAILEARGLKVTMMKLDPYINVDPGTMSPTQHGEVFVTEDGAETDLDLGHYERFIRTKMTKRNNFTAGRVYADVLRKERRGDYLGATIQVIPHITNAIKDRVIAGSEGHDIAIVEVGGTVGDIESLPFMEAIRQLAIEVGREHAMFMHLTLVPYLAAAGEVKTKPTQHSVKELLSIGIQPDILVCRSDRMIPANERKKIALFCNVPEKAVISMKDVDSIYKIPQLIRSQGLDDLVCARFGINAPEADLSEWEQVIYEEANPTGEVTIGMVGKYTELPDAYKSVNEALKHAGLKNRLSVTIKYVDSQDVETKGTDVLNGLDAILVPGGFGDRGIEGKIRAAQYARENKIPYLGICLGMQVALIEYARNVAGMEGAHSTEFNKNTKYPVVGLITEWVDGEGNVEERSEKSDLGGTMRLGSQLCHLEKGTKAYELYGSATIHERHRHRYEVNNLLRPQIEKAGLKVSGLSADKKLVEVIENPAHPWFVAAQFHPEFTSTPRDGHPLFAGFVKAAGQFQRGELK

SEQ ID NO: 31664 - DNA, 1641 bp, Vibrio parahaemolyticus
  CDS (1)..(1641): transl_table=11
atgacgacaaattacatttttgttactggcggggttgtatcctctctaggtaaaggtattgcagcagcatctcttgcagctattctagaagctcgtggtcttaaagtgactatgatgaagcttgacccttacatcaacgttgatccaggcacaatgagcccaactcagcacggtgaagtgtttgttacggaagatggcgcagagactgaccttgaccttggtcactacgagcgtttcatccgtaccaagatgaccaagcgtaacaacttcactgcaggtcgtgtttatgccgacgtacttcgtaaagaacgtcgtggtgactacctaggcgcaacaattcaagttatccctcatatcactaacgctatcaaagaccgcgtaattgcaggttctgaaggccacgatattgctatcgttgaagttggtggtacggtaggtgatatcgaatcgctaccatttatggaagcaatccgtcagctagcagtagaacttggccgtgaacgcgcaatgttcatgcatctaactcttgttccttacctagcagcagctggcgaagtgaaaactaaaccgactcagcactctgttaaagagctactgtctatcggtatccaaccagacatcctagtttgccgcagcgatcgcatgatcccagcgaacgagcgtaagaagattgcacttttctgtaacgttcctgagaaagcggtaatctcaatgaaggacgtagattcaatctacaagattcctcaacttgttaagtctcaaggtcttgatgacctagtgtgtactcgtttcggtattgatgcgccagaagctgacctttctgaatgggaacaggttatctacgaagaagcgaatccaacaggtgaagtaactatcggtatggtcggtaaatacatcgaactaccagatgcgtacaaatctgtgaacgaagcacttaagcacgcaggcttgaaaaaccgcctaaacgtaaccattaagtacgtagactctcaagacatcgaaactaaaggcgttgagcttctagaaggtctagacgctatcctagttccaggtggtttcggtgatcgtggtgttgaaggcaagatccgtgcggctcaatacgcacgtgaaaacaaagtgccttacctaggtatctgtctaggtatgcaagttgcacttatcgaatacgcgcgtaacgttgcgggtatggaaggtgcacactcaacagaatttaacaaagacacgaagtaccctgtggtaggtttgatcacagaatgggttgatgaaacaggtaacgtggaagagcgtactgaatcatctgatcttggcggtacgatgcgtctaggttctcagctatgtcacctagaaaaaggtacaaaagctcgtgaactgtacggtagcgcgacgatccatgaacgtcaccgtcaccgttacgaagtgaacaacgttcttcgtccacaaattgaaaaagcaggtcttaaagtgtcaggcctatctgcggacaagaagctagtggaaatgattgagaacccagctcacccatggtttgtagcggctcagttccaccctgaattcacatcgactcctcgcgatggtcacccattgtttgcaggtttcgttaaggctgcgggtcaatactcacgcggcgaattcgagaagtaa

SEQ ID NO: 31665 - protein, 546 aa, Vibrio parahaemolyticus
MTTNYIFVTGGVVSSLGKGIAAASLAAILEARGLKVTMMKLDPYINVDPGTMSPTQHGEVFVTEDGAETDLDLGHYERFIRTKMTKRNNFTAGRVYADVLRKERRGDYLGATIQVIPHITNAIKDRVIAGSEGHDIAIVEVGGTVGDIESLPFMEAIRQLAVELGRERAMFMHLTLVPYLAAAGEVKTKPTQHSVKELLSIGIQPDILVCRSDRMIPANERKKIALFCNVPEKAVISMKDVDSIYKIPQLVKSQGLDDLVCTRFGIDAPEADLSEWEQVIYEEANPTGEVTIGMVGKYIELPDAYKSVNEALKHAGLKNRLNVTIKYVDSQDIETKGVELLEGLDAILVPGGFGDRGVEGKIRAAQYARENKVPYLGICLGMQVALIEYARNVAGMEGAHSTEFNKDTKYPVVGLITEWVDETGNVEERTESSDLGGTMRLGSQLCHLEKGTKARELYGSATIHERHRHRYEVNNVLRPQIEKAGLKVSGLSADKKLVEMIENPAHPWFVAAQFHPEFTSTPRDGHPLFAGFVKAAGQYSRGEFEK

SEQ ID NO: 31666 - DNA, 1638 bp, Vibrio vulnificus
  CDS (1)..(1638): transl_table=11
atgacgacaaattacatttttgttactggcggggttgtatcctctctaggtaaaggtattgcagcagcatctcttgcagcgattttagaagctcgtggtcttaaagtgactatgatgaagcttgacccttacatcaacgttgatccaggcacaatgagcccaactcaacatggtgaagtgttcgttacagaagatggcgccgaaacagacctagaccttggtcactacgagcgtttcatccgcactaagatgactaagcgcaacaacttcactgcaggtcgtgtttactcagacgttctcgcgaaagagcgtcgcggtgactacctaggtgcaactatccaagttatccctcatatcacaaacgatatcaaagaccgcgtgatcaatggttctcaaggccacgacgttgcgatcgttgaagtgggtggtactgttggtgatatcgaatctctaccatttatggaagcgattcgtcagctagccgttgaaatcggccgtgaacgcgctatgttcatgcacctaacacttgttccttaccttgcagctgcaggcgaagtgaaaacaaaaccgactcagcactctgttaaagagctgctatcaatcggtatccaaccagatatcctagtttgccgctcagatcgcatgatcccagcgaacgagcgtaagaagattgcgctattctgtaacgttcctgagaaagcggtaatttccatgaaggacgtagactctatctacaagatccctcaactgatcaaatctcaaggtcttgatgatctcgtttgtgcacgttttggcattaatgcgccagaagcggatctgtctgaatgggaacaggtgatttacgaagaagcgaacccaactggtgaagttactatcggtatggtgggtaaatacatcgaactacctgatgcgtataaatcagtaaacgaagcgcttaaacatgcaggtttgaaaaatcgcttgagcgttaacattaaatatgtagactctcaggacgtagaaaccaaaggcgttgaagttctgcaagggcttgacgcaatccttgtacctggtggctttggcgaccgtggtatcgaaggcaagattcttgcagcgaaatacgctcgtgagaacaaggttccttacctaggtatttgcttaggtatgcaagtggcactgattgaatacgcgcgcaacgttgcgggtatggaaggtgcacattcaacagaatttaacaaagacaccaagtaccctgtggtaggtttgatcacggaatgggtagatagtgaaggtaacgttgaagaacgtactgaatcgtcaaatcttggtggtacgatgcgtctaggttcgcagctatgtcacctagcgaaaggcactaaagctcgtgagctatacggtagcgatacgatccatgaacgtcaccgccaccgttacgaagtgaacaataatcttcgtccacaaattgaaaaagcaggcctaaaagtatccggtctgtctgcggacaagaaactggttgagatgatcgaaaacccgaaccacccatggtttgtggctgctcagttccacccagagttcacttctacgccacgtgacggtcacccactgttctctggctttattaaagcagcgggtgaaaacgcgcgcggcgaactgaagtaa

SEQ ID NO: 31667 - protein, 545 aa, Vibrio vulnificus
MTTNYIFVTGGVVSSLGKGIAAASLAAILEARGLKVTMMKLDPYINVDPGTMSPTQHGEVFVTEDGAETDLDLGHYERFIRTKMTKRNNFTAGRVYSDVLAKERRGDYLGATIQVIPHITNDIKDRVINGSQGHDVAIVEVGGTVGDIESLPFMEAIRQLAVEIGRERAMFMHLTLVPYLAAAGEVKTKPTQHSVKELLSIGIQPDILVCRSDRMIPANERKKIALFCNVPEKAVISMKDVDSIYKIPQLIKSQGLDDLVCARFGINAPEADLSEWEQVIYEEANPTGEVTIGMVGKYIELPDAYKSVNEALKHAGLKNRLSVNIKYVDSQDVETKGVEVLQGLDAILVPGGFGDRGIEGKILAAKYARENKVPYLGICLGMQVALIEYARNVAGMEGAHSTEFNKDTKYPVVGLITEWVDSEGNVEERTESSNLGGTMRLGSQLCHLAKGTKARELYGSDTIHERHRHRYEVNNNLRPQIEKAGLKVSGLSADKKLVEMIENPNHPWFVAAQFHPEFTSTPRDGHPLFSGFIKAAGENARGELK

SEQ ID NO: 31668 - DNA, 1659 bp, Wigglesworthia glossinidia brevipalpis; identical to SEQ ID NO: 31060
  CDS (19)..(1659): transl_table=11

SEQ ID NO: 31669 - protein, 546 aa, Wigglesworthia glossinidia brevipalpis
MAKYYIFITGGVVSSLGKGITAASLGSVLESRNLKVTLMKLDPYINVNPGTISPIQHGEVFVTEDGAETDLDLGHYERFIKTKMSKKNSFTSGKIYSEVLKNERKGFYLGSTIQVIPHITNEIKKCIINAGKGFDILLVEIGGTVGDIESLPFLESIRQMSIEIGKNKILYIHLTLVPYLKISKEVKTKPTQHSVKELLSIGIQPDILICRSEKNVSKYEKSKIALFCNVPKQAVFSLKNTNSIYKIPILIKKQGLDSYVCDRFCIKRPEADLSKWKEVIYKQKNPLGNVNIGIIGKYTELPDSYRSLISALEHAGLKNRLMINIQLINSKKIESLGISCLKNLHAILIPGGFGYRGVEGKIIAAKYSREKKIPYFGICLGMQVALIEFARNVTGLSEANSTEFINNCKHPVIAKISEWNKSINYLNKSNISSNNYSTMRLGNQKCHLTKGSLAFKIYNNSIILERHRHRYEVNNIFIEKIKFSGLSVSGWAYYDNHKLVEIIEYSNHPWFVGSQFHPEFNSTPRNSHPLFISFVKAAFDFKNKNI

SEQ ID NO: 31670 - DNA, 1590 bp, Wolbachia pipientis wMel
  CDS (1)..(1590): transl_table=11
atgaaggaagctaaatttatctttgttacaggtggagttgtgtcatcgcttggtaaaggcttagttgcttcaagcgttggtgcgcttcttcaagctcacggttttaagatccgtatcagaaaacttgacccgtatctcaacattgatcctgggacaatgaacccaactcagcacggagaggtatttgtgaccgaggatggtgctgaaactgatttggatcttgggcattatgagcgttttactggaattaaagcaacaaaagatgacaatataacaactggtaagatatatcatgagttattgaagaaagagaggcgtggtgattatctgggcaaaactgtgcaagtcattcctcatgtgacagatttgatcaaatcgttcatttttaatggtacggaaggtttagattttgtaatatgtgaaataggcggaactgtaggtgacattgaaagccaaccatttttggaggctatacgtcaagttaactacacattaggaaaacaaagagttatccttattcacttaactttaataccatatcttgccgcagcgcaagaattaaagacaaaaccaacgcagcattcagttcgagagttaaattccgcggggttacaaccagatattatattatgccgcagtgagaaagaaattttcgataatcaaagagagaaaatagctaagctttgcaatgtttctttatccaatgtgatacctgcccctgatgtgagtcatatatatgagttaccggtgttgtatagccaatgtgggcttgatacgcaaattttggagcactttcatttaagtaagccaaaaccaagcttgactgaatgggatcaaatagtgcattccataaggcacccaacacaggaagttactgtatctatagtgggaaaatacaccgaattccctgatgcatacaaatcactggttgaagcattaaatcatggtgcaattagtaataaagtcaaagtaaagataaattgggttaactcaagagagaaggaagaaaaacctataggagagaaattacagaattctcatgcaatccttgttccaggggggtttggtgatgacggagtagagggtaaaatattagcaataaattatgcccgtacaaataatatcccatttttcggaatttgccttggtatgcagcttgcaattattgaatttgctcgtaatgttgttaagcttgaagatgcacactctgaagaatttcgtaactgtaaacatccaatcgttaagttagctggcgatcaagatgacgatcttggtggaaccatgagacttggggcatacaaatgtaatataaatgcaaactctaaaatgatggatgcatatagtaacactactatttcagaaagacacaggcatagatacataatcaattcagattataaagatgatttggaaaaaaatgggctgctatgcagtggcatatcagaagatggaacgtgcatagaggcagtggagttagagagtcatccgtggtttattggtgtgcagtttcatccagaatttcaatcaaagccgttttctcctcatcctcttttcgtgtcgttcgttaaagcagcaattgataagaaataa

SEQ ID NO: 31671 - protein, 529 aa, Wolbachia pipientis wMel
MKEAKFIFVTGGVVSSLGKGLVASSVGALLQAHGFKIRIRKLDPYLNIDPGTMNPTQHGEVFVTEDGAETDLDLGHYERFTGIKATKDDNITTGKIYHELLKKERRGDYLGKTVQVIPHVTDLIKSFIFNGTEGLDFVICEIGGTVGDIESQPFLEAIRQVNYTLGKQRVILIHLTLIPYLAAAQELKTKPTQHSVRELNSAGLQPDIILCRSEKEIFDNQREKIAKLCNVSLSNVIPAPDVSHIYELPVLYSQCGLDTQILEHFHLSKPKPSLTEWDQIVHSIRHPTQEVTVSIVGKYTEFPDAYKSLVEALNHGAISNKVKVKINWVNSREKEEKPIGEKLQNSHAILVPGGFGDDGVEGKILAINYARTNNIPFFGICLGMQLAIIEFARNVVKLEDAHSEEFRNCKHPIVKLAGDQDDDLGGTMRLGAYKCNINANSKMMDAYSNTTISERHRHRYIINSDYKDDLEKNGLLCSGISEDGTCIEAVELESHPWFIGVQFHPEFQSKPFSPHPLFVSFVKAAIDKK

SEQ ID NO: 31672 - DNA, 1659 bp, Wolinella succinogenes
  CDS (1)..(1659): transl_table=11
atgtcagaatccaagaaaaatccggaaacgaagtatatatttgtcacgggcggggtcttgagctctcttggcaagggtatcacctcctcttcggtggctacactccttaagcactctggattcaatgtcggaatcttgaagatcgatccctatattaacgtcgatcctgggacgatgagtccttttgagcacggagaggttttcgtcacttacgatggcgctgagactgaccttgatattggccattatgagcgattcttgaacaccaacttctcttctaagcataacttcaccacgggtcaggtctatctttcggtcattgagagagagcgtcgcggaggctatcttggtaagacgattcaggtgattccccatatcgtggatgagatcaagcatcgcgtgagattggcaggagaaggcaaagagtttttggtggtggagcttgggggcaccgtgggggatatcgagggacttccctttttggaggcaatgcgtgaaatgaagcatgagcttgggctagagcgtgtcattagtgttcatgtgacgcttattccgctcattaaggccgcgggcgagctcaagaccaagcctacccagcactccgttcaagagctgcgccgtatcggaattacgcctcaaatcatcatcgcgcgctcagagaagcctctgcccaaagagctcaaaaagaagctctcgcttggctgcgatgtcgattatgattcagtgattgtggctgaagatgcacccaccatttatcaagtgccactcaacttcatgaaagaggatattctcactccgattgccagacggtttaatatgcctaagatcgagcctaagatggaagagtggaatcgcctcgtgaagcagattcttgctcccaaagatgaagtaacgatcgcttttgtgggtaaatatttgagcctcaaagagtcatacaaatctttgattgaagcgctcacccatgcaggagccaatcttgacaccaaggttaatatcaaatggtgtgacagtgaagagattgagagctcaggggtcgagcctctgcgctatgtggatgggattctcgtccccggaggatttggcgagcgaggggtgaagggaaaaatggaagcgattcgttttgcgagggagaataaaatccccttccttggaatctgtctagggatgcagctggcgatgatcgaatttgcccgaaatgttttaggaattgctgaggccaactccatggaatttgatcctcaaactcctgagcctatcatctatctgattgaggatttcatcgatcagcagggcaacaagcaggtgcgtacccacacttcgcctatgggcggcactatgcggcttggagagtatgagtgtggactcaaagagggcagtcagaccaaagccgcctatcaaggagaatccctcatcaaagagcgacaccgccaccgctacgaggctaatcccaagtatcgagagcgaatcgagcaggcgggcttgattgtgagtggagaatcagagggcttgattgaggcgttggagctggtggatcacccttggtttattggagtgcaattccaccccgaattcacctctaggctacaaaatcccaaccctgtgattttgacctttattcaaaagagtctggagttgaaaaaagttgaccgggatagctaa

SEQ ID NO: 31673 - protein, 552 aa, Wolinella succinogenes
MSESKKNPETKYIFVTGGVLSSLGKGITSSSVATLLKHSGFNVGILKIDPYINVDPGTMSPFEHGEVFVTYDGAETDLDIGHYERFLNTNFSSKHNFTTGQVYLSVIERERRGGYLGKTIQVIPHIVDEIKHRVRLAGEGKEFLVVELGGTVGDIEGLPFLEAMREMKHELGLERVISVHVTLIPLIKAAGELKTKPTQHSVQELRRIGITPQIIIARSEKPLPKELKKKLSLGCDVDYDSVIVAEDAPTIYQVPLNFMKEDILTPIARRFNMPKIEPKMEEWNRLVKQILAPKDEVTIAFVGKYLSLKESYKSLIEALTHAGANLDTKVNIKWCDSEEIESSGVEPLRYVDGILVPGGFGERGVKGKMEAIRFARENKIPFLGICLGMQLAMIEFARNVLGIAEANSMEFDPQTPEPIIYLIEDFIDQQGNKQVRTHTSPMGGTMRLGEYECGLKEGSQTKAAYQGESLIKERHRHRYEANPKYRERIEQAGLIVSGESEGLIEALELVDHPWFIGVQFHPEFTSRLQNPNPVILTFIQKSLELKKVDRDS

SEQ ID NO: 31674 - DNA, 1665 bp, Xanthomonas axonopodis pv
  CDS (1)..(1665): transl_table=11
atgacccccctgattttcgttaccggcggcgtagtgtcctcgctaggcaagggcattgccgccgcttcgcttgcgtccattcttgaagcgcgtggcctgaaggtcacgatgatgaagctggacccgtatatcaacgtagacccgggcacgatgagcccgttccagcatggcgaggtctacgtcaccgacgacggtgccgaaaccgacctggatttgggccactacgagcgttatgtgcgcacgcgcctgtcgcgcaagaactcggtgaccaccggccgcatctacgagaacgtcatccgcaaggagcgtcgcggcgattatctgggcgccaccgtgcaggtgattccgcatatcaccgacgaaatccgtcgctgcatcgacgaggccacggccgggttcgatgtcgcgttgatcgaaatcggcggcaccgtcggcgacatcgaatcgctgccgttcctggaggcgatccgccaggtgcgcaccgagcgcggcgccgaaaaggcaatgttcatgcatctgacgctggtgccgtacatcgcggcagccggcgagttgaagaccaagccgacccagcattcggtcaaggaactgcgctcgatcggcatccagccggacgtgctgctgtgccggtccgagcaggcggtgccggattcggaacgccgcaagattgcgctgttcaccaatgtctccgagcgtgcggtgatcagttgcccggatatcgacgtgctgtacggcatgccgctggagttgctgcgccagggactggacgaattggtcatcgaccaattcaagctgcgcgacaaggtggctgcagcggatctgtcggagtgggcggccgtggtggacgcggtcaagcatccgctggacgaggtcaacatcgccgtggtcggcaagtacgtcgatcaccaggatgcctacaagtccgtggccgaagcgctgcgtcacggcggcctgcgtcagcgcaccaaggtcaacctgaagtggctggaagcgcaggatcttgagggcagcgacatgtctgccttgcaggacatcgacggcatcctggtgccgggcggtttcggcgatcgcggtttcgaaggcaaggtgcagacctccaagttcgcgcgtgagcagaaggtaccgtatttcggtatctgctacggcatgcaggcggccgtggtggactatgcccgccacgtcgccgacctggatgcggccaacagcaccgagaacgatcgccagtcgccgcacccggtgatcggcctgatcaccgaatggcgcaccgccaccggtgaagtggaaaagcgcgacgaaaaatccgacctgggcggcaccatgcgcctgggcctgcaggagcaacgcctgaagcccggcacgctggcgcgcgaggtgtacggcaaggacgttgtggccgagcggcatcgtcaccgttacgagttcaacaaccgctatcgcacccagctggaagacgccgggctggtgatctccggcaagtcgatggacgacaccctggtggaagtggtggagctgccgcgcgacacgcacccgtggttcttggcctgccaggcgcatccggaattcctgtccaccccgcgcgacggccatccgctgttcatcggcttcgtgcgtgcggcgcgcgagaagaaggccggcgggaagttgttgaaggaagcgcgcgcgtga

SEQ ID NO: 31675 - protein, 554 aa, Xanthomonas axonopodis pv
MTPLIFVTGGVVSSLGKGIAAASLASILEARGLKVTMMKLDPYINVDPGTMSPFQHGEVYVTDDGAETDLDLGHYERYVRTRLSRKNSVTTGRIYENVIRKERRGDYLGATVQVIPHITDEIRRCIDEATAGFDVALIEIGGTVGDIESLPFLEAIRQVRTERGAEKAMFMHLTLVPYIAAAGELKTKPTQHSVKELRSIGIQPDVLLCRSEQAVPDSERRKIALFTNVSERAVISCPDIDVLYGMPLELLRQGLDELVIDQFKLRDKVAAADLSEWAAVVDAVKHPLDEVNIAVVGKYVDHQDAYKSVAEALRHGGLRQRTKVNLKWLEAQDLEGSDMSALQDIDGILVPGGFGDRGFEGKVQTSKFAREQKVPYFGICYGMQAAVVDYARHVADLDAANSTENDRQSPHPVIGLITEWRTATGEVEKRDEKSDLGGTMRLGLQEQRLKPGTLAREVYGKDVVAERHRHRYEFNNRYRTQLEDAGLVISGKSMDDTLVEVVELPRDTHPWFLACQAHPEFLSTPRDGHPLFIGFVRAAREKKAGGKLLKEARA

SEQ ID NO: 31676 - DNA, 1665 bp, Xylella fastidiosa
  CDS (1)..(1665): transl_table=11
atgactcctcttatttttgttactggtggtgttgtttcttcccttggcaagggcatcgcggcggcttcccttgcgtccatccttgaagcgcgtggtttgaaggtgacgatggtgaagttggatccttacatcaacgtggatcctgggacgatgagtccgttccaacatggtgaggtttatgtcactgacgatggtgctgagactgatctggatttgggccattacgagcgttttgtacgcacgcggttgtcgcgtaacaattcagtcactactggcaggatttaccagaatgtgatttgcaaagagcgccgcggtgactatctcggtgcgaccgtacaggtgatccctcacattaccgacgagattcgccgttgcattgatgaggctacagcaagctttgatgtggcgttggtggagattggcggtactgtcggggatatcgagtcgctgcctttcttggaggcgatccgtcaagtgcggattgagcgtggtgcggagaggacgatgttcatgcacttgacgctggtgccgtatattgccgctgctggggaactcaagacaaaaccgacgcagcattctgtcaaagagctgcgttcgatcggcattcagccggatgtgttgttgtgtcgttccgagcaggtgattccggattcagagcgacgcaaaattgcattgtttaccaatgtttccgaacgggcagtgattggctgtcccgatattgacgtgttgtatgggatgcctttggagctgcgtcgccagggtcttgatgaaattgtgattgatcagttcaaactaagcggaacagcgagcttggctgatttgtccgaatgggaggatgtggtcgacgcgattaagcatcctctggatgaagtcactatcgctgttgtcggcaagtacgtcgattatcaggatgcctataagtccgtgggtgaggcacttaagcatggtggcctgcgtcagcgtactaaggtcaatctgaagtgggttgaggctcaggatttggaggggagcgatatgggtgcccttaaagacattgacggtattttggtgccggggggattcggtgatcgtggttttgaggggaaggtgctcgcctccaggtacgcgcgtgagcagcgggtgccgtatttcggtatttgctatggcatgcaggcggcggtggtggattacgcgcgccatgttgccgggcttgagggtgctaacagtactgagaatgatcgccagtcgcctcaccctgtcattgctttgattaccgagtggcggaccacaacaggtgaggttgagcgtcgtgatgagaagtccgatctgggcggtacgatgcgtcttggtttgcaggagcagcgtctcaaggcagggacactggtgcgtgagttgtatggaagggatgtggttggtgagcgtcatcggcatcgttacgaatttaataatcgctaccggactcagttggaggatgccggtttggtgatcgctgctaaatcgatggacgacactttggtggagatgatcgagttaccacgtgagatgcatccttggtttctggcgtgccaggcgcatcctgagttcttgtcgactccacgggatggtcatccgctctttattggttttgtgaaggcggcgcgcgcgcgcaaggctggaggcaaattgctcagggaagtctgcgtttga

SEQ ID NO: 31677 - protein, 554 aa, Xylella fastidiosa
MTPLIFVTGGVVSSLGKGIAAASLASILEARGLKVTMVKLDPYINVDPGTMSPFQHGEVYVTDDGAETDLDLGHYERFVRTRLSRNNSVTTGRIYQNVICKERRGDYLGATVQVIPHITDEIRRCIDEATASFDVALVEIGGTVGDIESLPFLEAIRQVRIERGAERTMFMHLTLVPYIAAAGELKTKPTQHSVKELRSIGIQPDVLLCRSEQVIPDSERRKIALFTNVSERAVIGCPDIDVLYGMPLELRRQGLDEIVIDQFKLSGTASLADLSEWEDVVDAIKHPLDEVTIAVVGKYVDYQDAYKSVGEALKHGGLRQRTKVNLKWVEAQDLEGSDMGALKDIDGILVPGGFGDRGFEGKVLASRYAREQRVPYFGICYGMQAAVVDYARHVAGLEGANSTENDRQSPHPVIALITEWRTTTGEVERRDEKSDLGGTMRLGLQEQRLKAGTLVRELYGRDVVGERHRHRYEFNNRYRTQLEDAGLVIAAKSMDDTLVEMIELPREMHPWFLACQAHPEFLSTPRDGHPLFIGFVKAARARKAGGKLLREVCV

SEQ ID NO: 31678 - DNA, 1665 bp, Xylella fastidiosa
  CDS (1)..(1665): transl_table=11
atgactcctcttatttttgttactggcggtgttgtttcttcccttggcaagggcatcgcggcggcttcccttgcgtccatccttgaagcacgtggtttgaaggtgacgatggtgaagttggatccttacatcaacgtggatcctgggacgatgagtccgttccaacatggtgaggtttatgtcactgacgatggtgctgagactgatctggatttgggccattacgagcgttttgtacgcacgcggttgtcgcgtaaaaattcggtcactactggtaggatttaccagaatgtgatttgcaaggagcgccgcggtgactatctcggtgcgaccgtacaggtgatccctcacattaccgacgagattcgccgctgcattgatgaggctacagcaagctttgatgtggcgttggtggagattggcggtactgtcggggatattgaatcgctccctttcttggaggcgatccgtcaagtgcggattgagcgtggtgcggagaggacgatgttcatgcacttgacgctggtgccgtatattgccgctgctggggaactcaagacaaaaccgacgcagcattctgtcaaagagctgcgttcgatcggtattcagccggatgtgttgttgtgtcgttccgagcaggtgattccggattcagagcgtcgcaaaattgcattgtttaccaacgtttccgagcgggcagtgattggctgtcctgatattgacgtgttgtatgggatgcctttggagctgcgtcgccagggtcttgatgaaattgtgattgatcagttcaaactaagcggaacagcgagtttggctgatttgtccgaatgggaggatgtggtcgacgcgattaagcatcctctggatgaagtcactatcgctgttgtcggcaagtacgtcgattatcaggatgcctataagtccgtgggtgaggcactcaagcatggtggcctgcgtcaacgtactaaggtcaatctgaagtgggttgaggctcaggacttggaggggagcgatatggctgctcttaaagacattgacggtattttggtgccggggggattcggtgatcgtggttttgaggggaaggtgctcgcctccaggtacgcgcgtgagcagcgggtgccgtatttcggcatttgctatggtatgcaggcggcggtggtggattacgcgcgccatgttgccgggcttgagggtgccaatagtactgagaatgatcgccagtcgtctcaccctgtcattgctttgattaccgagtggcggaccacaacaggtgaggtcgagcgtcgtgatgagaagtccgatctaggcggtacgatgcgtcttggtttgcaggagcaacgtctcaaggcagggacactggcgcgcgagttgtatggaagggatgtggttggtgagcgtcatcggcatcgttacgaatttaataatcgctaccggactcagttggaggatgctggtttggtgatcgctgctaaatcaatggacgacaccttggtggagatgatcgagttaccacgtgagatgcatccttggtttctggcgtgccaggcgcatcctgagttcttgtcgactccacgggatggtcatccgctctttattggttttgtgaaggcgtcgcgcgcgcgcaaggctggaggcaaattgctcagggaagtctgcgtttga

SEQ ID NO: 31679 - protein, 554 aa, Xylella fastidiosa
MTPLIFVTGGVVSSLGKGIAAASLASILEARGLKVTMVKLDPYINVDPGTMSPFQHGEVYVTDDGAETDLDLGHYERFVRTRLSRKNSVTTGRIYQNVICKERRGDYLGATVQVIPHITDEIRRCIDEATASFDVALVEIGGTVGDIESLPFLEAIRQVRIERGAERTMFMHLTLVPYIAAAGELKTKPTQHSVKELRSIGIQPDVLLCRSEQVIPDSERRKIALFTNVSERAVIGCPDIDVLYGMPLELRRQGLDEIVIDQFKLSGTASLADLSEWEDVVDAIKHPLDEVTIAVVGKYVDYQDAYKSVGEALKHGGLRQRTKVNLKWVEAQDLEGSDMAALKDIDGILVPGGFGDRGFEGKVLASRYAREQRVPYFGICYGMQAAVVDYARHVAGLEGANSTENDRQSSHPVIALITEWRTTTGEVERRDEKSDLGGTMRLGLQEQRLKAGTLARELYGRDVVGERHRHRYEFNNRYRTQLEDAGLVIAAKSMDDTLVEMIELPREMHPWFLACQAHPEFLSTPRDGHPLFIGFVKASRARKAGGKLLREVCV

SEQ ID NO: 31680 - DNA, 1635 bp, Zymomonas mobilis
  CDS (1)..(1635): transl_table=11
atggcgcggtttatatttatcaccggcggtgtggtgtcatcccttggcaaaggtctgatggcggccagtttagctgctttgttacaggaacgaggctttagagtccgtatccgtaaattcgatccttatcttaatgtcgatcctggcacgatgagcccctatcagcatggtgaagtttatgtcaccgatgatggtgctgaaacggatcttgatcttggacattacgaaagattttccggcgtaccttctcgtcgttctgataatatcacctctggacgtatttatcagaatatcatcgccaaagaacggcgcggcgactatttaggggcaacggttcaggtcatcccacatgtcaccgatgcgatcaaagatttcgcacgtgacgatacagatgatcttgattttgtcttatgtgaaatcggtggcacggtcggggatattgaatccttgcctttcatcgaagccatccggcaattaaaaaatgacctcggtcggggtaatgtggtttttgtgcatcttaccttggtgccttacatcgcagcagctggagagttaaagaccaaaccgacacagcatagtgtccgtgatctgaccagctttggtatccaacccgatgttttggtttgtcgaactgaacatcctttaccggatagcgaaagatcaaaaatcgctcttttctgtaatgtcccgaaagaagcggttattccggctttggatgctaaaagcatttatgatgtgccgctgcattatcatgcagaaggtctggataaagctgttttgtcagcttttggcctcaatattgagacgccccttgatctgcatcgctggaaagaaatttccgatcgtctggcgaacccagaaggcgaagtgaccattggtgttgtcggaaaatatgtcggcttacaggatgcctataaatctttgcatgaagccttggttcatggcggcattgccaatcgggtaaaggtcaatattgtttggcttgatgctgaaatgtttgaaggcaataatcccgaagctgcagaagccctttcctctctccatgctattttggttccgggcggattcggagaacgcggatcagaaggtaaaattgcggctgtcaaatttgctcgcgaacacaaagtgcctttctttggtatttgtctcggtatgcagatggcttgcatcgaaggcgcgcggaataccgctggtcttaaaaaggcctccagtagtgaatttggtccgtcggaagaaccggttatcggcctgattaccgaatgggaacgcgatggcgaacgcgaagagcgtgcggcggatggtgaccttggtggaacaatgcgtttgggtgcctatcctgccgttttaaaagcaggcagccaggttgccgaaatttataatagtcgggaaattactgaacggcatcgtcatcgttacgaagtcaatattcattataaagagcctttggaaaaaggcggtttggtcttttcaggtatgtcacctgatggattgcttcctgaaattgtggagcggccagatcatccatggtttattggtgttcaattccatccggaattaaaatccaaaccttttgatccgcatcctctcttttctgattttgttgcagcggccttgaaacaaagccgtctggtttaa

SEQ ID NO: 31681 - protein, 544 aa, Zymomonas mobilis
MARFIFITGGVVSSLGKGLMAASLAALLQERGFRVRIRKFDPYLNVDPGTMSPYQHGEVYVTDDGAETDLDLGHYERFSGVPSRRSDNITSGRIYQNIIAKERRGDYLGATVQVIPHVTDAIKDFARDDTDDLDFVLCEIGGTVGDIESLPFIEAIRQLKNDLGRGNVVFVHLTLVPYIAAAGELKTKPTQHSVRDLTSFGIQPDVLVCRTEHPLPDSERSKIALFCNVPKEAVIPALDAKSIYDVPLHYHAEGLDKAVLSAFGLNIETPLDLHRWKEISDRLANPEGEVTIGVVGKYVGLQDAYKSLHEALVHGGIANRVKVNIVWLDAEMFEGNNPEAAEALSSLHAILVPGGFGERGSEGKIAAVKFAREHKVPFFGICLGMQMACIEGARNTAGLKKASSSEFGPSEEPVIGLITEWERDGEREERAADGDLGGTMRLGAYPAVLKAGSQVAEIYNSREITERHRHRYEVNIHYKEPLEKGGLVFSGMSPDGLLPEIVERPDHPWFIGVQFHPELKSKPFDPHPLFSDFVAAALKQSRLV

SEQ ID NO: 31682 - DNA, 1740 bp, Saccharomyces cerevisiae
  CDS (1)..(1740)
atgaagtacgttgttgtttcaggtggtgtcatttcgggtatcggtaaaggtgttcttgcatcttcaactggtatgctaatgaaaaccctcggtttaaaggttacgtcaattaaaattgacccttatatgaacattgatgcaggtactatgtctcctttggaacatggtgaatgtttcgtgcttgacgacggtggtgaaacagatttggacttgggtaactacgagagataccttggagttactttgactaaagatcataacattactactggtaaaatatactcgcacgttattgctaaggaaagaaaaggtgactatttaggcaaaaccgtgcaaattgtccctcatttgaccaacgctatccaagattggattgagcgcgtggccaaaattcctgtagatgacaccggtatggaaccagatgtttgtatcattgaattgggtgggacagttggtgacattgaaagtgctccttttgtggaggcactaagacaattccaatttaaagttggaaaggaaaattttgccttgatacacgtttctctagttcctgtcatccacggtgaacaaaaaactaagccaactcaagctgccatcaaaggtttgaggtctcttggtttagttccagatatgatcgcctgtagatgtagtgaaactttggataaaccaacaatcgataagattgccatgttttgtcatgtggggcctgaacaggtggttaacgttcacgatgttaattctacttatcacgtcccattgttgctactggaacaaaagatgattgattacttacacgccagattaaagttagatgaaatatcacttacagaagaagaaaaacaaagaggcctggaattattgtctaaatggaaggccacaacaggtaacttcgatgaatccatggaaacagtgaagattgctttggttgggaaatacaccaacttgaaagattcttatctatcagtgataaaagcattggaacattcatccatgaagtgtcgtcgtaagttagacattaaatgggtggaagctactgatttggaacctgaagcacaagaaagcaacaaaactaaatttcatgaagcatggaacatggtcagtaccgcagacggtatcttaatccccggtggttttggtgttagaggtactgaaggtatggttttggctgctagatgggctcgtgaaaatcacattccattcttaggggtttgcctgggtttacaaattgccaccattgaatttacacgtagtgtgttgggaagaaaagacagtcattcggcagaattttatccagacattgatgaaaaaaatcacgttgtcgttttcatgcctgaaattgacaaggaaaccatggggggctcaatgagattaggtttgagaccaacatttttccaaaatgaaactgaatggagtcaaatcaagaagttatacggtgacgtctccgaagtccatgaaagacaccgtcaccgttacgaaatcaatccaaagatggttgatgaattggaaaacaacgggttgatctttgtaggtaaggacgacactggaaagcgttgtgagattttggaattaaagaatcacccatactatattgctactcaatatcacccagaatacacatcaaaggtcttagatccatccaaaccatttttgggtttagttgctgcttccgctggtatccttcaagatgtcattgaaggtaagtacgatcttgaggccggcgaaaacaaattcaacttttaa

SEQ ID NO: 31683 - protein, 579 aa, Saccharomyces cerevisiae
MKYVVVSGGVISGIGKGVLASSTGMLMKTLGLKVTSIKIDPYMNIDAGTMSPLEHGECFVLDDGGETDLDLGNYERYLGVTLTKDHNITTGKIYSHVIAKERKGDYLGKTVQIVPHLTNAIQDWIERVAKIPVDDTGMEPDVCIIELGGTVGDIESAPFVEALRQFQFKVGKENFALIHVSLVPVIHGEQKTKPTQAAIKGLRSLGLVPDMIACRCSETLDKPTIDKIAMFCHVGPEQVVNVHDVNSTYHVPLLLLEQKMIDYLHARLKLDEISLTEEEKQRGLELLSKWKATTGNFDESMETVKIALVGKYTNLKDSYLSVIKALEHSSMKCRRKLDIKWVEATDLEPEAQESNKTKFHEAWNMVSTADGILIPGGFGVRGTEGMVLAARWARENHIPFLGVCLGLQIATIEFTRSVLGRKDSHSAEFYPDIDEKNHVVVFMPEIDKETMGGSMRLGLRPTFFQNETEWSQIKKLYGDVSEVHERHRHRYEINPKMVDELENNGLIFVGKDDTGKRCEILELKNHPYYIATQYHPEYTSKVLDPSKPFLGLVAASAGILQDVIEGKYDLEAGENKFNF

SEQ ID NO: 31684 - DNA, 1734 bp, Saccharomyces cerevisiae
  CDS (1)..(1734)
atgaaatacgttgttgtttctggtggtgttatctcaggtattggtaagggtgttttagcgtcctctacagggatgctactgaaaaccctcggcctaaaggttacttccatcaagattgacccatatatgaatattgacgccgggacgatgtctcccttggaacatggtgagtgttttgtacttgatgatggtggggaaacggacttggatctcggtaattacgagcggtacctcggtattaccttaagcagggaccacaacatcaccaccggtaagatatactcccagctaatttccagagaaaggagaggtgattatttaggtaagacagttcaaattgttcctcatttgactaacgcaattcaggattggattcaacgtgtttcaaaaattccagtggatgacacaggattagaaccagacgtctgtatcatcgagttaggtggtacggtcggtgacattgagagtgcccctttcgtggaagcattacgacaatttcagttcgaagttggaagagagaatttcgccctgatccatgtttcacttgtgcccgtcattcatggtgaacagaagacgaaacccacccaagcagcaatcaaagatttaaggctattagggcttattcccgatatgattgcctgcagatgcagcgaagaacttaacaggagcactattgacaagattgccatgttttgccatgtggggccggagcaagtggtcaacgttcatgatgttaactccacgtaccacgttcccttattgctgctaaagcaacatatgatcgactacctccattcaaggttgaaattaggtgaagtgcctctaaccttggaagacaaggaaagagggtctcaattattgactaactgggaaaacatgaccaaaaacctagatgattctgatgatgttgtcaagattgctcttgtgggaaaatacactaatttgaaggattcctacctatctgtgaccaaatccttagaacacgcaagcatgaagtgccgtcgtcagctagaaatcctctgggtagaggcaagtaacctagagcccgaaactcaagaggtggacaagaacaagttccacgattcatggaataagctcagttccgccgacggaattttggttcctggtggatttggcacgagaggtattgaaggtatgattcttgctgccaaatgggcccgtgaatccggtgttccctttcttggtgtctgtcttggattacaagttgccgctatcgagttcgcccgcaatgtgataggccgcccaaacagcagttctacagaatttttggacgagacactactagctcctgaagacccaagtagtcatatacatgccgagatcgacaaggaacacatgggtggcacgatgagattgggtttgaggcctaccattttccaaccgaactcagaatggagcaacataaggaagctttatggtgaagttaatgaggtgcatgagagacatcgtcatcgctatgagataaacccgaaaatagtgaatgatatggagtctcgtggctttatttttgttggtaaggacgagacgggccagcgttgcgaaatattcgaattgaaaggccatccatactacgtgggcactcaataccatccagagtatacatcgaaggtgctggaaccatcaagaccgttttgggggcttgtggcgcagctccggcacacttgtgaagtgatcaaggacataaatctaagcgagggaaatgaaaatgaatga

SEQ ID NO: 31685 - protein, 577 aa, Saccharomyces cerevisiae
MKYVVVSGGVISGIGKGVLASSTGMLLKTLGLKVTSIKIDPYMNIDAGTMSPLEHGECFVLDDGGETDLDLGNYERYLGITLSRDHNITTGKIYSQLISRERRGDYLGKTVQIVPHLTNAIQDWIQRVSKIPVDDTGLEPDVCIIELGGTVGDIESAPFVEALRQFQFEVGRENFALIHVSLVPVIHGEQKTKPTQAAIKDLRLLGLIPDMIACRCSEELNRSTIDKIAMFCHVGPEQVVNVHDVNSTYHVPLLLLKQHMIDYLHSRLKLGEVPLTLEDKERGSQLLTNWENMTKNLDDSDDVVKIALVGKYTNLKDSYLSVTKSLEHASMKCRRQLEILWVEASNLEPETQEVDKNKFHDSWNKLSSADGILVPGGFGTRGIEGMILAAKWARESGVPFLGVCLGLQVAAIEFARNVIGRPNSSSTEFLDETLLAPEDPSSHIHAEIDKEHMGGTMRLGLRPTIFQPNSEWSNIRKLYGEVNEVHERHRHRYEINPKIVNDMESRGFIFVGKDETGQRCEIFELKGHPYYVGTQYHPEYTSKVLEPSRPFWGLVAQLRHTCEVIKDINLSEGNENE

SEQ ID NO: 31686 - DNA, 1818 bp, Oryza sativa
  CDS (1)..(1818)
atgaagtacgtgctggtgaccggcggggtggtgagcgggctcgggaagggcgtcacggcgagcagcatcggcgtcgtcctcaagtcgtgcgggctccgcattacctccatcaagatcgatccttaccttaacacagatgctgggaccatgtccccgttcgaacatggtgaggtttttgtgcttgatgatggtggcgaggtggacttggatcttgggaattacgagaggtttcttgacattaaactaaccagggacaataatataaccacaggaaagatctaccagtccgttcttgaaaaggaaaggaagggggaatacttgggaaagactgttcaggttgtcccgcatatcacaaatgccatacaagagtggattgagcgtgtcgcaatggtacctgtagatggcaaggagggaccagctgatgtttgtgtgatagaacttgggggtactataggggatattgaatctatgccatttatcgaagctttgggccaattctcatatcgtgttggtcctggtaacttttgtttggtgcatgttagtcttgttccagttctgaatgttgttggtgaacagaaaactaagccgactcaacatagtgtccgtggattaaggggtcttgggctcacaccaaatattttagcctgtcgcagtactaaggaactggaagaaaatgtgaaggagaaactctctcagttctgccatgtaccggcagctaacattgtcactctgtatgatgtttccaacatttggcgtattcctttgttgctacgggaccaaaaggcacatgaagccattcttaaagtgctgaaccttgatagctttgctcgggggccaaagttggatgaatgggtcgcaagagctacgttatttgatgcacttcaggatactgtgaggattgctatggttgggaagtatactggtctatctgattcatacctctctgtgttgaaggcactcttgcatgcttctgttgattgccgcaggaagcttcttgttgattgggttgcttctactgatctcgaagactccactgccattgaggcgcctgatgcttataaagcagcatgggatttactgaagggtgccaatggtgttttagtacctggtggctttggagatagaggtattcaagggaagattttggctgccaagtatgcccgtgaaaacaatgtaccatatcttggcatatgccttggaatgcaacttgctgtggttgaatttgctcgaagtgtcatgaatctccctgaagcaaacagcacagaatttgatcccaatgccaagaccccatgtgttatttttatgcctgagggttctaaaacacatatgggtggcacgatgcgcctaggatcaaggaggacatttttcgaggttgctgattgcaagtctgctaaattgtatggcaatgtcagttatgtagatgagaggcatcggcacagatatgaggtgaatccagatatggtgccagagtttgaaaatgctggacttcagtttgttgggaaagatgagactggaaggagaatggagataattgaaatccccaatcaccgatattttgttggtgcacaattccatcctgaattcaagtcaagaccttcaaaaccgtctccactctttgtcggactaattgctgcctcatctgggcaactggatagattgctgcaaggcagctgcaatggccacgtggtttctactaaacattctctgagcaatggtgcttacacatctacagtacaccaaaatgggcacgcaaagaagcttgccaatggtctttccaatggaacatattatcccaatggaaatggcgtgcatgcctag

SEQ ID NO: 31687 - protein, 605 aa, Oryza sativa
MKYVLVTGGVVSGLGKGVTASSIGVVLKSCGLRITSIKIDPYLNTDAGTMSPFEHGEVFVLDDGGEVDLDLGNYERFLDIKLTRDNNITTGKIYQSVLEKERKGEYLGKTVQVVPHITNAIQEWIERVAMVPVDGKEGPADVCVIELGGTIGDIESMPFIEALGQFSYRVGPGNFCLVHVSLVPVLNVVGEQKTKPTQHSVRGLRGLGLTPNILACRSTKELEENVKEKLSQFCHVPAANIVTLYDVSNIWRIPLLLRDQKAHEAILKVLNLDSFARGPKLDEWVARATLFDALQDTVRIAMVGKYTGLSDSYLSVLKALLHASVDCRRKLLVDWVASTDLEDSTAIEAPDAYKAAWDLLKGANGVLVPGGFGDRGIQGKILAAKYARENNVPYLGICLGMQLAVVEFARSVMNLPEANSTEFDPNAKTPCVIFMPEGSKTHMGGTMRLGSRRTFFEVADCKSAKLYGNVSYVDERHRHRYEVNPDMVPEFENAGLQFVGKDETGRRMEIIEIPNHRYFVGAQFHPEFKSRPSKPSPLFVGLIAASSGQLDRLLQGSCNGHVVSTKHSLSNGAYTSTVHQNGHAKKLANGLSNGTYYPNGNGVHA

SEQ ID NO: 31688 - DNA, 1809 bp, Oryza sativa
  CDS (1)..(1809)
atgaagtacgtgctggtgacaggaggggtggtgagcggcctcggcaagggcgtgaccgcgagcagcatcggcgtcgtgctcaaggcctgcgggctccgcgtcaccaccatcaagattgacccatacctcaacactgatgctggaaccatgtctccgttcgagcatggtgaggtcttcgttttggacgatggtggagaggtggacttggaccttggaaattacgaacgttttctggacatcaaattgacccgtgataacaacataaccacgggaaaaatatatcagtcagtcattaacaaagaaaggagaggagactacttggggaaaaccattcaggttgtgccacatattacagatgaaattcaagattggattgaacgtgtagcgatgaatccggtcgatggtaaagaaggacctcctgatgtttgtgtcatagaacttggtggcaccataggggatattgaatcaatgccctttattgaagcattaggtcaattttcctaccgtgttggacctggaaacttctgtctggtccatgtcagtcttgttccagttttaaatgtagttggtgaacagaaaactaaacctacccagcatagtgttcgtgggctaagaggccttggattggcacctgacattttagcatgtcgcagtaccgagccactggaagaaaacgtgaaagcaaagctctcacaattttgtcacgttccagtctcaagtattattaatctccatgacgttacaaacatttggcacatccccttgttgctaagggaccaaagggcccatgaagctattctgaaagttctagaccttcaatttgtcggtaaagtaccacgagaacccaagttggttgaatggaccgaaagagccagcaagtttgacaagttgaaggctacggttaagattgcgatggttggaaaatatactgggctgtccgattcctacctgtctgttctaaaggcacttttgcatgcatcggttgctatgggaagaaagcttgtagtggagtgggttccttcctgtgatcttgaagattctgcagccaaagagacccctgaagcccataaaaaagcatggaagctactcaagggtgcagagggtatacttgtccctggaggctttggagatagaggtgttcagggaaaaattcttgctgcaaaatatgcacgagaaaataatgttccttatctcggcatttgcttgggtatgcaaattgcagtgattgattttgcctgttctatcatgaaattaccgggtgcaaatagcacagagtttgacccagatacaatgtcaccctgcgtcattttcatgccagagggttccaaaacccatatgggggcaactatgcggcttggatcaaggagaacatatttccatgccactgcatgcaaatctgcaaagctgtatggtaatgctagattcgtagacgaaagacatcgacacagatatgaggtaaatcctgaaatggtaccagagtttgagaaggccggactttcatttgttggcaaggatgagagtggaagacgcatggagattattgaactacccagtcataaatttttcattggagtacagttccatcctgaattcaagtcaagaccagggaagccatctccacttttcttaggattaatagcagcagcatctggacaactagaaactttgctccaaccaagttccaacattgtcaatccaaatcctatgcccagatttcccattcccaaaaagacgatttaccatgccaagaagccactggacagcttggtaaacggatactttgcaaatggcaacgtcatccacacttga

SEQ ID NO: 31689 - protein, 602 aa, Oryza sativa
MKYVLVTGGVVSGLGKGVTASSIGVVLKACGLRVTTIKIDPYLNTDAGTMSPFEHGEVFVLDDGGEVDLDLGNYERFLDIKLTRDNNITTGKIYQSVINKERRGDYLGKTIQVVPHITDEIQDWIERVAMNPVDGKEGPPDVCVIELGGTIGDIESMPFIEALGQFSYRVGPGNFCLVHVSLVPVLNVVGEQKTKPTQHSVRGLRGLGLAPDILACRSTEPLEENVKAKLSQFCHVPVSSIINLHDVTNIWHIPLLLRDQRAHEAILKVLDLQFVGKVPREPKLVEWTERASKFDKLKATVKIAMVGKYTGLSDSYLSVLKALLHASVAMGRKLVVEWVPSCDLEDSAAKETPEAHKKAWKLLKGAEGILVPGGFGDRGVQGKILAAKYARENNVPYLGICLGMQIAVIDFACSIMKLPGANSTEFDPDTMSPCVIFMPEGSKTHMGATMRLGSRRTYFHATACKSAKLYGNARFVDERHRHRYEVNPEMVPEFEKAGLSFVGKDESGRRMEIIELPSHKFFIGVQFHPEFKSRPGKPSPLFLGLIAAASGQLETLLQPSSNIVNPNPMPRFPIPKKTIYHAKKPLDSLVNGYFANGNVIHT

SEQ ID NO: 31690 - DNA, 1662 bp, Oryza sativa
  CDS (1)..(1662)
atgaagtacgtgctggtgacaggaggggtggtgagcggcctcggcaagggcgtgaccgcgagcagcatcggcgtcgtgctcaaggcctgcgggctccgcgtcaccaccatcaagattgacccatacctcaacactgatgctggaaccatgtctccgttcgagcatggtgaggtcttcgttttggacgatggtggagaggtggacttggaccttggaaattacgaacgttttctggacatcaaattgacccgtgataacaacataaccacgggaaaaatatatcagtcagtcattaacaaagaaaggagaggagactacttggggaaaaccattcaggttgtgccacatattacagatgaaattcaagattggattgaacgtgtagcgatgaatccggtcgatggtaaagaaggacctcctgatgtttgtgtcatagaacttggtggcaccataggggatattgaatcaatgccctttattgaagcattaggtcaattttcctaccgtgttggacctggaaacttctgtctggtccatgtcagtcttgttccagttttaaatgtagttggtgaacagaaaactaaacctacccagcatagtgttcgtgggctaagaggccttggattggcacctgacattttagcatgtcgcagtaccgagccactggaagaaaacgtgaaagcaaagctctcacaattttgtcacgttccagtctcaagtattattaatctccatgacgttacaaacatttggcacatccccttgttgctaagggaccaaagggcccatgaagctattctgaaagttctagaccttcaatttgtcggtaaagtaccacgagaacccaagttggttgaatggaccgaaagagccagcaagtttgacaagttgaaggctacggttaagattgcgatggttggaaaatatactgggctgtccgattcctacctgtctgttctaaaggcacttttgcatgcatcggttgctatgggaagaaagcttgtagtggagtgggttccttcctgtgatcttgaagattctgcagccaaagagacccctgaagcccataaaaaagcatggaagctactcaagggtgcagagggtatacttgtccctggaggctttggagatagaggtgttcagggaaaaattcttgctgcaaaatatgcacgagaaaataatgttccttatctcggcatttgcttgggtatgcaaattgcagtgattgattttgcctgttctatcatgaaattaccgggtgcaaatagcacagagtttgacccagatacaatgtcaccctgcgtcattttcatgccagagggttccaaaacccatatgggggcaactatgcggcttggatcaaggagaacatatttccatgccactgcatgcaaatctgcaaagctgtatggtaatgctagattcgtagacgaaagacatcgacacagatatgaggtaaatcctgaaatggtaccagagtttgagaaggccggactttcatttgttggcaaggatgagagtggaagacgcatggagattattgaactacccagtcataaatttttcattggagtacagttccatcctgaattcaagtcaagaccagggaagccatctccacttttcttaggtaatgcagttttactcagacaaatattctga

SEQ ID NO: 31691 - protein, 553 aa, Oryza sativa
MKYVLVTGGVVSGLGKGVTASSIGVVLKACGLRVTTIKIDPYLNTDAGTMSPFEHGEVFVLDDGGEVDLDLGNYERFLDIKLTRDNNITTGKIYQSVINKERRGDYLGKTIQVVPHITDEIQDWIERVAMNPVDGKEGPPDVCVIELGGTIGDIESMPFIEALGQFSYRVGPGNFCLVHVSLVPVLNVVGEQKTKPTQHSVRGLRGLGLAPDILACRSTEPLEENVKAKLSQFCHVPVSSIINLHDVTNIWHIPLLLRDQRAHEAILKVLDLQFVGKVPREPKLVEWTERASKFDKLKATVKIAMVGKYTGLSDSYLSVLKALLHASVAMGRKLVVEWVPSCDLEDSAAKETPEAHKKAWKLLKGAEGILVPGGFGDRGVQGKILAAKYARENNVPYLGICLGMQIAVIDFACSIMKLPGANSTEFDPDTMSPCVIFMPEGSKTHMGATMRLGSRRTYFHATACKSAKLYGNARFVDERHRHRYEVNPEMVPEFEKAGLSFVGKDESGRRMEIIELPSHKFFIGVQFHPEFKSRPGKPSPLFLGNAVLLRQIF

SEQ ID NO: 31692 - DNA, 1827 bp, Oryza sativa
  CDS (1)..(1827)
atgaagtacgtgctggtgacgggcggggtggtgagcggcctcgggaagggggtgacggcgagcagcatcggcgtcgtgctcaaggactgcggcctccgcgtcacctccatcaagatcgatccttacctcaacaccgatgctggaaccatgtctccattcgagcacggtgaagtgtttgttttggacgatggtggtgaggtggacttggaccttggaaattatgagcgatttctggacatcaagttgactcgtgacaacaatataaccacgggaaagatctatcaggctgttattgacaaggaacgaagaggagactacttgggaaaaactgttcaggttgtaccacacattacggatgaaatacaggagtggattgaacgtgtggcaatgaatccagttgatggcacagatgagccagctgatgtttgtgtaatagaacttggtggcactataggggatattgaatcaatgccttttattgaagcattaggtcaattttcataccgcgtaggggctggaaacttttgcctagttcatgtcagtcttgtaccagttctaaatgtagttggtgaacagaaaaccaaacctacccaacatagtgtccgtggactaagaggacttggactgatacctgatattttagcatgtcgcagtactcagccacttgaagaaaatgtgaaagtgaaactcgcacaattttgccacgttccgatctcaaatattgtcaatcttcacgatgttaccaacatctggcacatccctttgttgcttagggaccagaaggctcatgaatctattctgaaagttttagatcttcaatgtgtgggaaaagtgcctcgagcacctaagctgactgaatggactgaaagagccagcaaattcgacaaactgaaaactcctgttaggattgccatggttggaaagtatactggcctatcagactcctacttgtcagttttgaaggctcttctgcatgcatcggttgctttggacagaaaacttgtggtggattgggttccttcctgtgatcttgaagattctgcagccacagagactcctgatgcatatgaaaaagcttgggatctactaaagggtgcacatggtgtactagttccaggaggctttggagatagaggggtccagggaaaaattcttgctgcaaaatatgcgcgagaaaacaatgttccatatcttggtatttgcctgggcatgcaaattgcagtgatcgaattcgcccgctctgtcatgaagttgcgtggtgctaatagtacagagtttgatccagctacaacgacgccatgtgttattttcatgccggagggctctaaaacccatatgggggcaacaatgcgccttggatcaaggaggaccttcttccaggccaatacatgcaaatcagctaagctgtatggcaatgcaagctatgtagatgaaaggcaccgccaccgatatgaggtgaatcctgaaatggttccagaatttgagaaggcaggtctctcttttgttggcagggatgaaagcgggacacgcatggagataattgagctaccaactcataggttttttgttggcgcacaatttcatcctgaattcaagtcaagacctggaaagccatccccacttttcatgggattaatagcagcttcatcaggacagcttgaccatttacttcagcaatcttgcggcgttgtcagctcgccagtcagacgtggcaactactgcaacggagccacgaaacaacagaagctataccaaaatggacatgtcaagaacggcctggtgaacggctgctactatgcaaacggcaacagcattcttcatacttag

SEQ ID NO: 31693 - protein, 608 aa, Oryza sativa
MKYVLVTGGVVSGLGKGVTASSIGVVLKDCGLRVTSIKIDPYLNTDAGTMSPFEHGEVFVLDDGGEVDLDLGNYERFLDIKLTRDNNITTGKIYQAVIDKERRGDYLGKTVQVVPHITDEIQEWIERVAMNPVDGTDEPADVCVIELGGTIGDIESMPFIEALGQFSYRVGAGNFCLVHVSLVPVLNVVGEQKTKPTQHSVRGLRGLGLIPDILACRSTQPLEENVKVKLAQFCHVPISNIVNLHDVTNIWHIPLLLRDQKAHESILKVLDLQCVGKVPRAPKLTEWTERASKFDKLKTPVRIAMVGKYTGLSDSYLSVLKALLHASVALDRKLVVDWVPSCDLEDSAATETPDAYEKAWDLLKGAHGVLVPGGFGDRGVQGKILAAKYARENNVPYLGICLGMQIAVIEFARSVMKLRGANSTEFDPATTTPCVIFMPEGSKTHMGATMRLGSRRTFFQANTCKSAKLYGNASYVDERHRHRYEVNPEMVPEFEKAGLSFVGRDESGTRMEIIELPTHRFFVGAQFHPEFKSRPGKPSPLFMGLIAASSGQLDHLLQQSCGVVSSPVRRGNYCNGATKQQKLYQNGHVKNGLVNGCYYANGNSILHT

SEQ ID NO: 31694 - DNA, 1815 bp, Oryza sativa
  CDS (1)..(1815)
atgaagtacgtgctggtgacgggcggggtggtgagcggcctcgggaagggggtgacggcgagcagcatcggcgtcgtgctcaaggactgcggcctccgcgtcacctccatcaagatcgatccttacctcaacaccgatgctggaaccatgtctccattcgagcacggtgaagtgtttgttttggacgatggtggtgaggtggacttggaccttggaaattatgagcgatttctggacatcaagttgactcgtgacaacaatataaccacgggaaagatctatcaggctgttattgacaaggaacgaagaggagactacttgggaaaaactgttcaggttgtaccacacattacggatgaaatacaggagtggattgaacgtgtggcaatgaatccagttgatggcacagatgagccagctgatgtttgtgtaatagaacttggtggcactataggggatattgaatcaatgccttttattgaagcattaggtcaattttcataccgcgtaggggctggaaacttttgcctagttcatgtcagtcttgtaccagttctaaatgtagttggtgaacagaaaaccaaacctacccaacatagtgtccgtggactaagaggacttggactgatacctgatattttagcatgtcgcagtactcagccacttgaagaaaatgtgaaagtgaaactcgcacaattttgccacgttccgatctcaaatattgtcaatcttcacgatgttaccaacatctggcacatccctttgttgcttagggaccagaaggctcatgaatctattctgaaagttttagatcttcaatgtgtgggaaaagtgcctcgagcacctaagctgactgaatggactgaaagagccagcaaattcgacaaactgaaaactcctgttaggattgccatggttggaaagtatactggcctatcagactcctacttgtcagttttgaaggctcttctgcatgcatcggttgctttggacagaaaacttgtggtggattgggttccttcctgtgatcttgaagattctgcagccacagagactcctgatgcatatgaaaaagcttgggatctactaaagggtgcacatggtgtactagttccaggaggctttggagatagaggggtccagggaaaaattcttgctgcaaaatatgcgcgagaaaacaatgttccatatcttggtatttgcctgggcatgcaaattgcagtgatcgaattcgcccgctctgtcatgaagttgcgtggtgctaatagtacagagtttgatccagctacaacgacgccatgtgttattttcatgccggagggctctaaaacccatatgggggcaacaatgcgccttggatcaaggaggaccttcttccaggccaatacatgcaaatcagctaagctgtatggcaatgcaagctatgtagatgaaaggcaccgccaccgatatgaggtgaatcctgaaatggttccagaatttgagaaggcaggtctctcttttgttggcagggatgaaagcgggacacgcatggagataattgagctaccaactcataggttttttgttggcgcacaatttcatcctgaattcaagtcaagacctggaaagccatccccacttttcatggcttcatcaggacagcttgaccatttacttcagcaatcttgcggcgttgtcagctcgccagtcagacgtggcaactactgcaacggagccacgaaacaacagaagctataccaaaatggacatgtcaagaacggcctggtgaacggctgctactatgcaaacggcaacagcattcttcatacttag

SEQ ID NO: 31695 - protein, 604 aa, Oryza sativa
MKYVLVTGGVVSGLGKGVTASSIGVVLKDCGLRVTSIKIDPYLNTDAGTMSPFEHGEVFVLDDGGEVDLDLGNYERFLDIKLTRDNNITTGKIYQAVIDKERRGDYLGKTVQVVPHITDEIQEWIERVAMNPVDGTDEPADVCVIELGGTIGDIESMPFIEALGQFSYRVGAGNFCLVHVSLVPVLNVVGEQKTKPTQHSVRGLRGLGLIPDILACRSTQPLEENVKVKLAQFCHVPISNIVNLHDVTNIWHIPLLLRDQKAHESILKVLDLQCVGKVPRAPKLTEWTERASKFDKLKTPVRIAMVGKYTGLSDSYLSVLKALLHASVALDRKLVVDWVPSCDLEDSAATETPDAYEKAWDLLKGAHGVLVPGGFGDRGVQGKILAAKYARENNVPYLGICLGMQIAVIEFARSVMKLRGANSTEFDPATTTPCVIFMPEGSKTHMGATMRLGSRRTFFQANTCKSAKLYGNASYVDERHRHRYEVNPEMVPEFEKAGLSFVGRDESGTRMEIIELPTHRFFVGAQFHPEFKSRPGKPSPLFMASSGQLDHLLQQSCGVVSSPVRRGNYCNGATKQQKLYQNGHVKNGLVNGCYYANGNSILHT

SEQ ID NO: 31696 - DNA, 1746 bp, Oryza sativa
  CDS (1)..(1746)
atggcggagcccggggaggatgcggcagcggcagcggcggcggcgtcgaccaagtacgtgctcatcaccggcggcgtcgtcagcgggctcgggaagggggtcacggccagcagcgtcggcgtcgtcctcaaggcctgcggcctccgcgtcacctgcatcaagatcgatccatatttaaacacagatgctggtacaatgtctccttttgagcatggtgaggtctttgtgcttgacgatggtggagaggttgacttggatttagggaattatgagcgtttcttggatgttactctgacaagggataacaacattacaactggaaagatatatcagtctgtcattgagaaggagaggaagggtgactatcttggaaagacggtccaggttgttcctcatgtaactgatgaaattaaacagtggatacagtcagtatcttctgttcctgtggatgggcagactcgtccagctgatgtttgtgtcattgaattgggaggcactgtaggtgatattgaatcaatgccattcattgaagctctgcgccagttgtcattttctcttggtaaggacaatttctgcctcatacatgtgagccttgttccggtattgggtgtagttggtgagcagaaaactaagccaacacaacacagtgtacgagaactaagggccttgggtctgactcctgatcttctagcatgccgatccgcacagccactaataggatctgtcaaggagaaactttcacaattttgtcatgtaccggttgagaatatacttaacatccatgatgttccaaacttgtggcatgttccacttattcttagaaaccaaaaggttcacgaggctataatcaaacaacttaaccttggaaggtctgctggaccccctgagttacgagattggacacagatggctgagtcatatgatgacctcaaaaactctgttaaaatcgctttggttgggaaatatactaatctgaccgattcctacttatcagtggtgaaggctcttctacatgcgagtgttgcatgttcattgaaaccttctatccagtggattgcagcttcagatcttgaagatgcaactgcaacaagtgcaccagatgcccatgctaaagcttgggaaactcttaagggttcctcttgcattttgataccaggaggattcggggatcgtggaatatctgggatgatattggctgcaaaatatgctcgtgagaataaagttccataccttggcatttgcttgggaatgcagatatcagtgattgagatgtccagaaatgttcttggcctaaaggatgcagacagtgaagagttcaactcagaaacaccatttcgtgtggttatgtacatgcctgaggtttcaaaaacgcacatgggaaatacaatgaggttgggttgccgaagaacgttctttcgcaggacagattgtcttacatcaaaactatatgggagccctgagcatgtagatgagcgtcatcgtcacagatatgaggtgaacccttctttcgttgctatgcttgaaaacgctggccttcattttgttggttgcgatgaaagtggaaagaggatggaggttgtagagctacaagaccacccattttacataggtgttcaattccatccagaatttaagtcaaggcctcggagaccttcacctccatttactggtctaatattggcagcagctgaatacatgggaacacctgcaaataactcaaatggacatgttggaacatctgagtaa

SEQ ID NO: 31697 - protein, 581 aa, Oryza sativa
MAEPGEDAAAAAAAASTKYVLITGGVVSGLGKGVTASSVGVVLKACGLRVTCIKIDPYLNTDAGTMSPFEHGEVFVLDDGGEVDLDLGNYERFLDVTLTRDNNITTGKIYQSVIEKERKGDYLGKTVQVVPHVTDEIKQWIQSVSSVPVDGQTRPADVCVIELGGTVGDIESMPFIEALRQLSFSLGKDNFCLIHVSLVPVLGVVGEQKTKPTQHSVRELRALGLTPDLLACRSAQPLIGSVKEKLSQFCHVPVENILNIHDVPNLWHVPLILRNQKVHEAIIKQLNLGRSAGPPELRDWTQMAESYDDLKNSVKIALVGKYTNLTDSYLSVVKALLHASVACSLKPSIQWIAASDLEDATATSAPDAHAKAWETLKGSSCILIPGGFGDRGISGMILAAKYARENKVPYLGICLGMQISVIEMSRNVLGLKDADSEEFNSETPFRVVMYMPEVSKTHMGNTMRLGCRRTFFRRTDCLTSKLYGSPEHVDERHRHRYEVNPSFVAMLENAGLHFVGCDESGKRMEVVELQDHPFYIGVQFHPEFKSRPRRPSPPFTGLILAAAEYMGTPANNSNGHVGTSE

SEQ ID NO: 31698 - DNA, 1827 bp, Zea mays
  CDS (1)..(1827)
atgaagtacgtccttgtcaccggcggggtggtgagcggcctgggcaagggcgtcacggccagcagcatcggcgtcgtcctcaaggcgtgcggcttccgcattacgtccattaagatcgatccttaccttaacaccgatgctgggactatgtctccattcgaacatggtgaagtgtttgtgctggatgatggtggcgaggtggacttggatcttggtaattacgagaggtttctggacattaaacttactcgggacaataacataaccaccggaaagatctatcagtctgtaattgacaaggagaggaaaggggaatacttgggaaagactgtccaggttgtgccacacatcacaaatgccatacaggagtggattgagcgtgttgctatgataccagttgatggcatggagggacctgctgatgtctgtgtgatagaattggggggcactataggtgatattgaatccatgccatttatagaagctttgggtcagttctcttatcgtgttggtcctggcaacttctgcctggtgcatgtcagtctagttccagttttgaatgttgttggtgaacagaaaacaaagccaacccagcatagtgtacgtggtttgaggggactcgggctcactccaaatattttagcttgccgcagtactaaggaattagaggatagtgtgaaggagaaactctcccagttttgccatgtgccggcagcaaatattatcactttgtatgatgtttccaatatctggcgcattcctttgttgctttgtgaccaaaaggctcatgaggctatccttaaagttctgaatctggaaagggtggatagcattgcccgagagccgaagttagacgaatgggttgcaagagctgctatatttgatacccttcatgacactgtgaggattgctatggttgggaagtacactggcttatcagattcatacctctctgtgttgaaagccctcttgcatgcatctgttgattgccgtaggaaacttgttgttgattgggttgcttcgacggatcttgaggattccacagcaattgaggcacccgatgcatataaaacatcatggaatttattgaagggggcagatggaattttggtacctggtggctttggtgacagaggtgttcaagggaaaattttggctgctaagtatgcccgggaaaagaatgtcccatatcttggtatatgtcttgggatgcagattgctgtcgtggagtatgcccgtcatgttatgaatttcactgatgccaacagcactgaatttgatccaaataccaagaccccttgtgttatttttatgcctgagggttccaaaacacatatgggtgcaacaatgcgcttaggatcaaggaggacatttttcaagattgctgattgcaagtcttctaaattgtatggcaatgtcacttatgttgatgaaaggcaccggcacagatatgaggtgaaccctgatatggttccagagttcgaaaaagctgggcttcagtttgttggcaaagatgatactggaaggaggatggagatgattgaaatacacaaccaccgatattttgttggcgcacaattccatcctgagttcaagtcaagaccttcaaaaccttctcccctatttgtgggactaattgcagctgcatctgggcagttggatagggtgctgcaagaccgctgcaatggtcatgttggttcagctaaacatgttctgagcaatggctcatatacatccgcagtacaccaaaatgggaacccaaagaagctcaccaatggtctctcaaacggaacatactatgccaatggcaatggtgtgcatgcttag

SEQ ID NO: 31699 - protein, 608 aa, Zea mays
MKYVLVTGGVVSGLGKGVTASSIGVVLKACGFRITSIKIDPYLNTDAGTMSPFEHGEVFVLDDGGEVDLDLGNYERFLDIKLTRDNNITTGKIYQSVIDKERKGEYLGKTVQVVPHITNAIQEWIERVAMIPVDGMEGPADVCVIELGGTIGDIESMPFIEALGQFSYRVGPGNFCLVHVSLVPVLNVVGEQKTKPTQHSVRGLRGLGLTPNILACRSTKELEDSVKEKLSQFCHVPAANIITLYDVSNIWRIPLLLCDQKAHEAILKVLNLERVDSIAREPKLDEWVARAAIFDTLHDTVRIAMVGKYTGLSDSYLSVLKALLHASVDCRRKLVVDWVASTDLEDSTAIEAPDAYKTSWNLLKGADGILVPGGFGDRGVQGKILAAKYAREKNVPYLGICLGMQIAVVEYARHVMNFTDANSTEFDPNTKTPCVIFMPEGSKTHMGATMRLGSRRTFFKIADCKSSKLYGNVTYVDERHRHRYEVNPDMVPEFEKAGLQFVGKDDTGRRMEMIEIHNHRYFVGAQFHPEFKSRPSKPSPLFVGLIAAASGQLDRVLQDRCNGHVGSAKHVLSNGSYTSAVHQNGNPKKLTNGLSNGTYYANGNGVHA

SEQ ID NO: 31700 - DNA, 1827 bp, Zea mays
  CDS (1)..(1827)
atgaagtacgtccttgtcaccggcggggtagtgagcggcctgggcaagggcgttacagccagcagcatcggcgtcgtcctgaaggcgtgcggcctccgcattacgtccattaagattgatccttatcttaacactgatgctgggactatgtctccattcgaacatggtgaagtgttcgtactggatgatggtggcgaggtggacttggatcttggtaattacgagagatttttggacattaaacttactcgggacaataatataaccactggaaagatctatcagtctgtaattgacaaggagaggaaaggggaatatttgggaaagactgtccaggttgtgccacacatcacaaatgccatacaggagtggatcgagcgtgttgctaagataccagttgatggcaaggagggacctgctgatgtctgtgtgatagaattggggggcactataggtgatattgaatctatgccatttattgaagctttgggtcagttctcttatcgtgttggtcctggcaacttctgcctggtgcacgtcagtctagttccagttttgaatgttgttggtgaacagaaaacaaagccaacccagcatagtgtacgtggtttgaggggactcgggctcaccccaaatattttagcttgtcgcagtactaaggaattagaggaaaatgtgaaggagaaactctcccagttttgccatgttccggcagcaaatattatcactttgtatgatgtttccaatatctggcgcattcctttgttgctacatgaacaaaaggctcatgaggctattcttaaagttctgaatctggaaaggatggacagcattgcccgagagccaaagttagacgaatggattgcaagagctactatatttgatacccttcatgacactgtgaggattgctatggttgggaagtacactggcttatcagattcatacctctctgtgttgaaagccctcttgcatgcatctgttgattgccgtaggaaacttgttgttgattgggttgcttcgacggatcttgaggattccacagcaattgaggcacccgatgcatataaaacatcatggaatttattgaagggggcagatggaattttggtacctggtggctttggtgacagaggtgttcaagggaaaattttggctgctaagtatgcccgggaaaagaatgtcccatatcttggtatatgtcttgggatgcagattgctgtcgtggagtatgcccgtcatgttatgaatttcactgatgccaacagcactgaatttgatccaaataccaagaccccttgtgttatttttatgcctgagggttccaaaacacatatgggtgcaacaatgcgcttaggatcaaggaggacatttttcaagattgctgattgcaagtcttctaaattgtatggcaatgtcacttatgttgatgaaaggcaccggcacagatatgaggtgaaccctgatatggttccagagttcgaaaatgctggacttcagtttgttggcaaagatgatactggaaggaggatggagattatcgaaatacccaaccaccgatattttgttggcgcacaattccatcctgagttcaagtcaagaccttcaaaaccttctcccctatttgtggggctaattgcggctgcatctggacagttggatagggtcctgcaagaccgctgcactggtcatgctgtttcagagaaacatgttctgagcaacggctcatatacacccgcaatacaccaaaatgggcacccaaagaagctcccaaatggtctatcaaacggaacatactatggcaatggcaatggcgtgcatgcttag

SEQ ID NO: 31701 - protein, 608 aa, Zea mays
MKYVLVTGGVVSGLGKGVTASSIGVVLKACGLRITSIKIDPYLNTDAGTMSPFEHGEVFVLDDGGEVDLDLGNYERFLDIKLTRDNNITTGKIYQSVIDKERKGEYLGKTVQVVPHITNAIQEWIERVAKIPVDGKEGPADVCVIELGGTIGDIESMPFIEALGQFSYRVGPGNFCLVHVSLVPVLNVVGEQKTKPTQHSVRGLRGLGLTPNILACRSTKELEENVKEKLSQFCHVPAANIITLYDVSNIWRIPLLLHEQKAHEAILKVLNLERMDSIAREPKLDEWIARATIFDTLHDTVRIAMVGKYTGLSDSYLSVLKALLHASVDCRRKLVVDWVASTDLEDSTAIEAPDAYKTSWNLLKGADGILVPGGFGDRGVQGKILAAKYAREKNVPYLGICLGMQIAVVEYARHVMNFTDANSTEFDPNTKTPCVIFMPEGSKTHMGATMRLGSRRTFFKIADCKSSKLYGNVTYVDERHRHRYEVNPDMVPEFENAGLQFVGKDDTGRRMEIIEIPNHRYFVGAQFHPEFKSRPSKPSPLFVGLIAAASGQLDRVLQDRCTGHAVSEKHVLSNGSYTPAIHQNGHPKKLPNGLSNGTYYGNGNGVHA

SEQ ID NO: 31702 - DNA, 1812 bp, Zea mays
  CDS (1)..(1812)
atgaagtacgtgctggtgaccggaggggtggtgagcgggctcggcaagggcgtgacggccagcagcatcggcgtcgtgctcaaggcctgcggcctccgcgtcaccaccctccagatcgatccatacctcaccaccgatgctggaaccatgtcgccgttccagcacggggaggttttcgttttggacgatggcggagaggtggacttggaccttggaaactacgaacgttttctggacatcaaattgacccgcgacaacaatataaccacgggaaagatcttccaggctgtcattaacaaggagaggagaggcgactacctagggaagaccgtccaggtagtgccgcacatcacggatgagatacaggactggatcgaacgcgtcgcggtggtcccagtggacggcaaggaagggcctcctgacgtctgcgtcatcgagctcgggggcactataggggatatcgagtcaatgcctttcattgaagcgttaggtcaattctcgtaccgtgttggacctggaaacttctgtctcgttcatgtcagtcttgttccggttctaaatgtagtcggtgaacagaaaactaagcctacacagcacagtgttcgagggcttagagggcttgggttagcgccggatgttttagcatgtcgcagtactgagccattggaggaacatgtgaaggccaagctttcacagttttgccatgtcccggtctcaaatatagtgaacctccatgacgtgacaaacatctggcacatccccttgctgctaagggaccagaaggcccatgaagcgattctgaaggttttagacctccagtatgatggaaaggtgcctcgggaacctgagctaacaaagtggactaaaagagccaccaagtttgacaagttgaagactccggtcaagattgccatggttggaaaatacactggcctgtcggattcctacctgtctgtcataaaggctcttttgcatgcatcggttgctatggaaagaaaacttgtagtcgagtgggttccttcctgcgacctggaagattcttcagctaaagagacccctgaagcccataaaaaagcatggaaattgctgaagggcgcagatggcgtactcgtccctggagggtttggggacaggggagtccagggcaaaatcctcgccgcgaaatacgcacgcgagaacaacgttccttatcttggcatctgcctgggaatgcaaatcgcggtgatcgagtttgcccgctcggtgatgaagctacgaggtgccaatagcacggagttcgatccagctacgacgtcaccctgtgtcatcttcatgccagagggctcaaaaacccaaatgggagccacgatgaggcttgggtcgaggaggacctatttccatgtcagtggctgcaaatctgcgaagctgtacggcaacgccagctctgtagatgaaagacatcgccacagatacgaggtgaaccctgacatggtcccagactttgagaaggccgggcttcagttcgtgggcaaagatgagagtgggaaacgcatggggatcgttgagcttccctctcacaagttcttcatcggtgcacagttccatcctgaattcaagtcgagaccagggaagccatctccgcttttcttagggctgatagccgcggcgtctgggcagctagaaccattgcttcagcgcagcaatccgacaacgaaagcatgttcgatcagtaaagtcccgaaactgaaactgtaccccactgggcctgtgaataatccactgaacagcttggtgaacgggtactacccaaatggcactgggatccacacctag

SEQ ID NO: 31703 - protein, 603 aa, Zea mays
MKYVLVTGGVVSGLGKGVTASSIGVVLKACGLRVTTLQIDPYLTTDAGTMSPFQHGEVFVLDDGGEVDLDLGNYERFLDIKLTRDNNITTGKIFQAVINKERRGDYLGKTVQVVPHITDEIQDWIERVAVVPVDGKEGPPDVCVIELGGTIGDIESMPFIEALGQFSYRVGPGNFCLVHVSLVPVLNVVGEQKTKPTQHSVRGLRGLGLAPDVLACRSTEPLEEHVKAKLSQFCHVPVSNIVNLHDVTNIWHIPLLLRDQKAHEAILKVLDLQYDGKVPREPELTKWTKRATKFDKLKTPVKIAMVGKYTGLSDSYLSVIKALLHASVAMERKLVVEWVPSCDLEDSSAKETPEAHKKAWKLLKGADGVLVPGGFGDRGVQGKILAAKYARENNVPYLGICLGMQIAVIEFARSVMKLRGANSTEFDPATTSPCVIFMPEGSKTQMGATMRLGSRRTYFHVSGCKSAKLYGNASSVDERHRHRYEVNPDMVPDFEKAGLQFVGKDESGKRMGIVELPSHKFFIGAQFHPEFKSRPGKPSPLFLGLIAAASGQLEPLLQRSNPTTKACSISKVPKLKLYPTGPVNNPLNSLVNGYYPNGTGIHT

SEQ ID NO: 31704 - DNA, 1830 bp, Zea mays
  CDS (1)..(1830)
atgaagtacgtgctggtgaccggcggcgtggtgagcgggctcgggaagggcgtgacggccagcagcatcggggtcgtgctcaaggcctgcggcctccgcgtcacgtctatcaagatcgatccatacctcaacaccgatgccggaaccatgtccccattcgagcacggcgaagtgtttgttttggacgatggtggtgaggtggacttggaccttggaaactatgagagatttctggacatcaagttgactcgtgacaacaacataaccacggggaagatataccagtctgttattgacaaggaacgtagaggagattacctaggaaaaactgttcaggtcgtgccacacatcacagatgaaatacaagattggattcaacgtgtggcaatgaatccagttgatgacaccgaagagccagctgatgtttgtgtcatagaacttggtgggactataggggacattgaatcaatgcctttcatagaagcactaggccaattttcataccgtgtagggcctggaaacttttgcttggtgcatgttagtcttgtaccagttctaaatgtagttggtgagcagaaaacaaagcccacccaacatagtgttcgcggacttcgaggacttggactcatgcctgatattttggcatgtcgcagtacacagccacttgaagaacacgtgaaagtgaagctcgcacaattttgtcatgtcccgataccaaatatcattaatctccatgatgtcaccaacatttggcacattcctttgttgctcagagatcagaaggcccatgaagctattttgaaggtgttagaccttcagtgcgcgagtaaagttgctcgagaaccccaattgtctgaatggactgaaagagtcagcagatgtgacagattgaaatctccggttaggattgcaatggttggaaagtatactggcctgtcagactcctacctatctgttataaaggctcctttgcatgcgtcggttgctttggacaggaaacttgtggtggactgggttccttcctgtgatcttgaagattctacagcaaaagagactcctgacgcctatgaaaaggcatgggagtcgttgaagggtgcagatggtgtgttggtgccaggaggttttggagacagaggagtccaagggaaaattctggctgcaaaatacgcgcgagaaaacaacgttccatatcttggcatttgcttgggcatgcaaattgcagtgattgagtttgcacgctctgtcatgaagttgcacggtgctaacagcacagagtttgatccaaccacaaaaacaccatgtgttgttttcatgccagaggggtccaaaactcatatgggagcaacaatgcgccttggttcaaggaggacctttttccaggccactaactgcaaatctgctaaactgtacggcaatgcttgctacgttgacgaaagacaccgccacagatacgaggtgaatcctgacatggtcccagaatttgagaaggcagggctttctttcgttggcagggatgagagtggcgaacgcatggagattatcgaactaccaactcataggtttttcgtcggagcacagtttcaccctgaattcaagtcaaggcccggcaagccatctccgcttttcttaggattggtagcagcgtcatcaggccagcttgaccacttgctccaacgtggccttaccagttcagcaggcagagacatctgcggcaaagggggagcgcagaaaccaaaagcttgccagaacgggcatgtcatgaagccactgaatggcctggtgcacgggcactattcagcgactcgctgcaatggcgtcattcccatctag

SEQ ID NO: 31705 - protein, 609 aa, Zea mays
MKYVLVTGGVVSGLGKGVTASSIGVVLKACGLRVTSIKIDPYLNTDAGTMSPFEHGEVFVLDDGGEVDLDLGNYERFLDIKLTRDNNITTGKIYQSVIDKERRGDYLGKTVQVVPHITDEIQDWIQRVAMNPVDDTEEPADVCVIELGGTIGDIESMPFIEALGQFSYRVGPGNFCLVHVSLVPVLNVVGEQKTKPTQHSVRGLRGLGLMPDILACRSTQPLEEHVKVKLAQFCHVPIPNIINLHDVTNIWHIPLLLRDQKAHEAILKVLDLQCASKVAREPQLSEWTERVSRCDRLKSPVRIAMVGKYTGLSDSYLSVIKAPLHASVALDRKLVVDWVPSCDLEDSTAKETPDAYEKAWESLKGADGVLVPGGFGDRGVQGKILAAKYARENNVPYLGICLGMQIAVIEFARSVMKLHGANSTEFDPTTKTPCVVFMPEGSKTHMGATMRLGSRRTFFQATNCKSAKLYGNACYVDERHRHRYEVNPDMVPEFEKAGLSFVGRDESGERMEIIELPTHRFFVGAQFHPEFKSRPGKPSPLFLGLVAASSGQLDHLLQRGLTSSAGRDICGKGGAQKPKACQNGHVMKPLNGLVHGHYSATRCNGVIPI

SEQ ID NO: 31706 - DNA, 21 bp, Artificial sequence
  primer
atgacgcgctacatcttcgtc

SEQ ID NO: 31707 - DNA, 21 bp, Artificial sequence
  primer
tcaggccttccgggctttctg

SEQ ID NO: 31708 - protein, 678 aa, Artificial sequence
  consensus sequence
  Variant (2)..(2): Xaa in position 2 is any amino acid
  Variant (7)..(7): Xaa in position 7 is any amino acid
  Variant (9)..(10): Xaa in position 9 to 10 is any amino acid
  Variant (14)..(17): Xaa in position 14 to 17 is any amino acid
  Variant (19)..(22): Xaa in position 19 to 22 is any amino acid
  Variant (24)..(25): Xaa in position 24 to 25 is any amino acid
  Variant (26)..(26): Xaa in position 26 is any or no amino acid
  Variant (28)..(29): Xaa in position 28 to 29 is any amino acid
  Variant (31)..(33): Xaa in position 31 to 33 is any amino acid
  Variant (35)..(35): Xaa in position 35 is any amino acid
  Variant (39)..(39): Xaa in position 39 is any amino acid
  Variant (41)..(41): Xaa in position 41 is any amino acid
  Variant (43)..(43): Xaa in position 43 is any amino acid
  Variant (47)..(47): Xaa in position 47 is any amino acid
  Variant (49)..(50): Xaa in position 49 to 50 is any amino acid
  Variant (58)..(58): Xaa in position 58 is any amino acid
  Variant (61)..(61): Xaa in position 61 is any amino acid
  Variant (74)..(82): Xaa in position 74 to 82 is any amino acid
  Variant (83)..(83): Xaa in position 83 is any or no amino acid
  Variant (85)..(85): Xaa in position 85 is any amino acid
  Variant (87)..(87): Xaa in position 87 is any amino acid
  Variant (89)..(90): Xaa in position 89 to 90 is any amino acid
  Variant (92)..(93): Xaa in position 92 to 93 is any amino acid
  Variant (95)..(96): Xaa in position 95 to 96 is any amino acid
  Variant (100)..(100): Xaa in position 100 is any amino acid
  Variant (102)..(102): Xaa in position 102 is any amino acid
  Variant (106)..(106): Xaa in position 106 is any amino acid
  Variant (114)..(114): Xaa in position 114 is any amino acid
  Variant (116)..(117): Xaa in position 116 to 117 is any amino acid
  Variant (119)..(127): Xaa in position 119 to 127 is any amino acid
  Variant (128)..(141): Xaa in position 128 to 141 is any or no amino acid
  Variant (143)..(143): Xaa in position 143 is any amino acid
  Variant (144)..(146): Xaa in position 144 to 146 is any or no amino acid
  Variant (148)..(148): Xaa in position 148 is any amino acid
  Variant (158)..(158): Xaa in position 158 is any amino acid
  Variant (161)..(161): Xaa in position 161 is any amino acid
  Variant (164)..(164): Xaa in position 164 is any amino acid
  Variant (167)..(176): Xaa in position 167 to 176 is any amino acid
  Variant (177)..(180): Xaa in position 177 to 180 is any or no amino acid
  Variant (182)..(183): Xaa in position 182 to 183 is any amino acid
  Variant (185)..(185): Xaa in position 185 is any amino acid
  Variant (187)..(189): Xaa in position 187 to 189 is any amino acid
  Variant (190)..(191): Xaa in position 190 to 191 is any or no amino acid
  Variant (194)..(194): Xaa in position 194 is any amino acid
  Variant (204)..(205): Xaa in position 204 to 205 is any amino acid
  Variant (207)..(209): Xaa in position 207 to 209 is any amino acid
  Variant (211)..(212): Xaa in position 211 to 212 is any amino acid
  Variant (214)..(218): Xaa in position 214 to 218 is any amino acid
  Variant (220)..(230): Xaa in position 220 to 230 is any amino acid
  Variant (231)..(231): Xaa in position 231 is any or no amino acid
  Variant (233)..(235): Xaa in position 233 to 235 is any amino acid
  Variant (237)..(238): Xaa in position 237 to 238 is any amino acid
  Variant (240)..(241): Xaa in position 240 to 241 is any amino acid
  Variant (242)..(243): Xaa in position 242 to 243 is any or no amino acid
  Variant (245)..(248): Xaa in position 245 to 248 is any amino acid
  Variant (250)..(253): Xaa in position 250 to 253 is any amino acid
  Variant (254)..(254): Xaa in position 254 is any or no amino acid
  Variant (256)..(257): Xaa in position 256 to 257 is any amino acid
  Variant (259)..(281): Xaa in position 259 to 281 is any amino acid
  Variant (282)..(325): Xaa in position 282 to 325 is any or no amino acid
  Variant (327)..(338): Xaa in position 327 to 338 is any amino acid
  Variant (339)..(355): Xaa in position 339 to 355 is any or no amino acid
  Variant (357)..(358): Xaa in position 357 to 358 is any amino acid
  Variant (363)..(363): Xaa in position 363 is any amino acid
  Variant (364)..(364): Xaa in position 364 is any or no amino acid
  Variant (366)..(366): Xaa in position 366 is any amino acid
  Variant (368)..(368): Xaa in position 368 is any amino acid
  Variant (370)..(370): Xaa in position 370 is any amino acid
  Variant (372)..(373): Xaa in position 372 to 373 is any amino acid
  Variant (377)..(377): Xaa in position 377 is any amino acid
  Variant (379)..(409): Xaa in position 379 to 409 is any amino acid
  Variant (410)..(425): Xaa in position 410 to 425 is any or no amino acid
  Variant (432)..(432): Xaa in position 432 is any amino acid
  Variant (433)..(433): Xaa in position 433 is any or no amino acid
  Variant (436)..(437): Xaa in position 436 to 437 is any amino acid
  Variant (439)..(443): Xaa in position 439 to 443 is any amino acid
  Variant (445)..(446): Xaa in position 445 to 446 is any amino acid
  Variant (448)..(450): Xaa in position 448 to 450 is any amino acid
  Variant (454)..(456): Xaa in position 454 to 456 is any amino acid
  Variant (458)..(459): Xaa in position 458 to 459 is any amino acid
  Variant (461)..(461): Xaa in position 461 is any amino acid
  Variant (467)..(467): Xaa in position 467 is any amino acid
  Variant (469)..(470): Xaa in position 469 to 470 is any amino acid
  Variant (472)..(472): Xaa in position 472 is any amino acid
  Variant (475)..(480): Xaa in position 475 to 480 is any amino acid
  Variant (481)..(481): Xaa in position 481 is any or no amino acid
  Variant (483)..(483): Xaa in position 483 is any amino acid
  Variant (485)..(485): Xaa in position 485 is any amino acid
  Variant (487)..(506): Xaa in position 487 to 506 is any amino acid
  Variant (507)..(559): Xaa in position 507 to 559 is any or no amino acid
  Variant (566)..(576): Xaa in position 566 to 576 is any amino acid
  Variant (577)..(581): Xaa in position 577 to 581 is any or no amino acid
  Variant (583)..(587): Xaa in position 583 to 587 is any amino acid
  Variant (588)..(592): Xaa in position 588 to 592 is any or no amino acid
  Variant (601)..(601): Xaa in position 601 is any amino acid
  Variant (603)..(611): Xaa in position 603 to 611 is any amino acid
  Variant (612)..(613): Xaa in position 612 to 613 is any or no amino acid
  Variant (615)..(617): Xaa in position 615 to 617 is any amino acid
  Variant (618)..(622): Xaa in position 618 to 622 is any or no amino acid
  Variant (624)..(629): Xaa in position 624 to 629 is any amino acid
  Variant (630)..(636): Xaa in position 630 to 636 is any or no amino acid
  Variant (638)..(639): Xaa in position 638 to 639 is any amino acid
  Variant (641)..(643): Xaa in position 641 to 643 is any amino acid
  Variant (644)..(648): Xaa in position 644 to 648 is any or no amino acid
  Variant (650)..(651): Xaa in position 650 to 651 is any amino acid
  Variant (653)..(655): Xaa in position 653 to 655 is any amino acid
  Variant (657)..(657): Xaa in position 657 is any amino acid
  Variant (661)..(662): Xaa in position 661 to 662 is any amino acid
  Variant (664)..(664): Xaa in position 664 is any amino acid
  Variant (666)..(669): Xaa in position 666 to 669 is any amino acid
  Variant (673)..(673): Xaa in position 673 is any amino acid
  Variant (674)..(677): Xaa in position 674 to 677 is any or no amino acid
FXTGGVXSXXGKGXXXXSXXXXLXXXGXXVXXXKXDPYXNXDXGTMXPXXHGEVFVTXDGXETDLDLGHYERFXXXXXXXXXXNXTXGXXYXXVXXKERXGXYLGXTVQVIPHXTXXIXXXXXXXXXXXXXXXXXXXXXXXDXXXXEXGGTVGDIESXPFXEAXRQXXXXXXXXXXXXXXHXXLXPXXXXXGEXKTKPTQHSVXXLXXXGXXPXXXXXRXXXXXXXXXXXXKXXXFXXVXXXXVXXXXDXXXXXYXXPXXXXXXXXXXXXXXXXXXXXXXXXXXXXXXXXXXXXXXXXXXXXXXXXXXXXXXXXXXXXXXXXXXXWXXXXXXXXXXXXXXXXXXXXXXXXXXXXXIXXVGKYXXLXDXYXSXXEALXHXXXXXXXXXXXXXXXXXXXXXXXXXXXXXXXXXXXXXXXXXXXXXXXVPGGFGXXRGXXGXXXXXKXXAXXXAREXXXPXXGXCLGMQXAXXEXARXXXXXXXAXSXEXXXXXXXXXXXXXXXXXXXXXXXXXXXXXXXXXXXXXXXXXXXXXXXXXXXXXXXXXXXXXXXXXXXXXXXXXGTMRLGXXXXXXXXXXXXXXXXYXXXXXXXXXXERHRHRYEXNXXXXXXXXXXXGXXXXXXXXGXXXXXXXXXXXXXEXXEXXXXXXXXHXXFXXXQXHPEXXSXPXXXXPLFXXXXXA

SEQ ID NO: 31709 - protein, 52 aa, Artificial sequence
  protein pattern
  Variant (2)..(11): Xaa in position 2 to 11 is any amino acid
  Variant (12)..(12): Xaa in position 12 is any or no amino acid
  Variant (14)..(14): Xaa in position 14 is any amino acid
  Variant (18)..(18): Xaa in position 18 is Ile or Leu
  Variant (20)..(20): Xaa in position 20 is any amino acid
  Variant (22)..(22): Xaa in position 22 is Ala or Pro
  Variant (26)..(26): Xaa in position 26 is Ala, Asn or Ser
  Variant (28)..(29): Xaa in position 28 to 29 is any amino acid
  Variant (34)..(34): Xaa in position 34 is Phe or Tyr
  Variant (36)..(37): Xaa in position 36 to 37 is any amino acid
  Variant (40)..(40): Xaa in position 40 is any amino acid
  Variant (42)..(42): Xaa in position 42 is Ala, Cys, Thr or Val
  Variant (46)..(46): Xaa in position 46 is Ile, Leu, Met or Val
  Variant (48)..(48): Xaa in position 48 is any amino acid
LXXXXXXXXXXXKXDPYXNXDXGTMXPXXHGEVXVXXDGXEXDLDXGXYERF

SEQ ID NO: 31710 - protein, 40 aa, Artificial sequence
  protein pattern
  Variant (6)..(6): Xaa in position 6 is any or no amino acid
  Variant (8)..(8): Xaa in position 8 is any or no amino acid
  Variant (10)..(11): Xaa in position 10 to 11 is any amino acid
  Variant (13)..(13): Xaa in position 13 is any amino acid
  Variant (14)..(14): Xaa in position 14 is Ile, Leu, Met or Val
  Variant (15)..(15): Xaa in position 15 is any amino acid
  Variant (16)..(16): Xaa in position 16 is Ala, Ser, Thr or Val
  Variant (17)..(19): Xaa in position 17 to 19 is any amino acid
  Variant (22)..(25): Xaa in position 22 to 25 is any amino acid
  Variant (27)..(27): Xaa in position 27 is any amino acid
  Variant (28)..(28): Xaa in position 28 is Phe or Leu
  Variant (30)..(30): Xaa in position 30 is Ile, Leu or Val
  Variant (32)..(32): Xaa in position 32 is any amino acid
  Variant (34)..(34): Xaa in position 34 is Phe, Leu or Met
  Variant (36)..(38): Xaa in position 36 to 38 is any amino acid
  Variant (39)..(39): Xaa in position 39 is Ile, Leu, Met or Val
  Variant (40)..(40): Xaa in position 40 is Asp, Glu, Ser or Thr
PGGFGXRXGXXGXXXXXXXARXXXXPXXGXCXGXQXXXXX

SEQ ID NO: 31711 - protein, 39 aa, Artificial sequence
  protein pattern
  Variant (2)..(3): Xaa in position 2 to 3 is any amino acid
  Variant (4)..(6): Xaa in position 4 to 6 is any or no amino acid
  Variant (8)..(8): Xaa in position 8 is any or no amino acid
  Variant (10)..(10): Xaa in position 10 is any amino acid
  Variant (11)..(11): Xaa in position 11 is Ile or Val
  Variant (13)..(14): Xaa in position 13 to 14 is any amino acid
  Variant (15)..(15): Xaa in position 15 is Ile, Leu or Val
  Variant (16)..(16): Xaa in position 16 is Ile, Leu or Met
  Variant (17)..(18): Xaa in position 17 to 18 is any amino acid
  Variant (21)..(21): Xaa in position 21 is any amino acid
  Variant (23)..(23): Xaa in position 23 is any amino acid
  Variant (25)..(25): Xaa in position 25 is any amino acid
  Variant (27)..(27): Xaa in position 27 is any amino acid
  Variant (29)..(29): Xaa in position 29 is Ile or Val
  Variant (31)..(31): Xaa in position 31 is Ile, Leu, Met or Val
  Variant (32)..(32): Xaa in position 32 is Ile or Val
  Variant (35)..(35): Xaa in position 35 is Ile, Leu or Val
  Variant (37)..(38): Xaa in position 37 to 38 is any amino acid
  Variant (39)..(39): Xaa in position 39 is Ile or Leu
NXXXXXTXGXXYXXXXXXERXGXYXGXTXQXXPHXTXXX

SEQ ID NO: 31712 - protein, 28 aa, Artificial sequence
  protein pattern
  Variant (2)..(2): Xaa in position 2 is any amino acid
  Variant (12)..(13): Xaa in position 12 to 13 is any amino acid
  Variant (15)..(17): Xaa in position 15 to 17 is any amino acid
  Variant (19)..(19): Xaa in position 19 is Ile, Leu or Val
  Variant (20)..(20): Xaa in position 20 is any amino acid
  Variant (22)..(23): Xaa in position 22 to 23 is any amino acid
  Variant (24)..(24): Xaa in position 24 is Ile, Leu or Val
  Variant (25)..(26): Xaa in position 25 to 26 is any amino acid
  Variant (28)..(28): Xaa in position 28 is Ala, Cys, Gly, Ser or Thr
EXKTKPTQHSVXXLXXXGXXPXXXXXRX

SEQ ID NO: 31713 - protein, 23 aa, Artificial sequence
  protein pattern
  Variant (2)..(4): Xaa in position 2 to 4 is any amino acid
  Variant (5)..(6): Xaa in position 5 to 6 is any or no amino acid
  Variant (8)..(8): Xaa in position 8 is any amino acid
  Variant (12)..(13): Xaa in position 12 to 13 is any amino acid
  Variant (15)..(15): Xaa in position 15 is any amino acid
  Variant (17)..(18): Xaa in position 17 to 18 is any amino acid
  Variant (19)..(19): Xaa in position 19 is Ala, Gly, Pro or Ser
  Variant (20)..(20): Xaa in position 20 is any amino acid
  Variant (21)..(21): Xaa in position 21 is Ala, Gly, Pro or Ser
  Variant (22)..(22): Xaa in position 22 is Ile, Leu, Pro or Val
FXXXXXQXHPEXXSXPXXXXXXF

SEQ ID NO: 31714 - protein, 13 aa, Artificial sequence
  protein pattern
  Variant (2)..(2): Xaa in position 2 is Ile, Leu or Val
  Variant (7)..(7): Xaa in position 7 is any amino acid
  Variant (9)..(9): Xaa in position 9 is Gly or Ser
  Variant (10)..(10): Xaa in position 10 is Ile, Leu or Val
FXTGGVXSXXGKG

SEQ ID NO: 31715 - protein, 10 aa, Artificial sequence
  protein pattern
  Variant (9)..(9): Xaa in position 9 is any amino acid
ERHRHRYEXN

SEQ ID NO: 31716 - protein, 13 aa, Artificial sequence
  protein pattern
  Variant (4)..(4): Xaa in position 4 is Leu or Met
  Variant (8)..(10): Xaa in position 8 to 10 is any amino acid
  Variant (11)..(11): Xaa in position 11 is Ala, Cys, Thr or Val
  Variant (12)..(12): Xaa in position 12 is any amino acid
  Variant (13)..(13): Xaa in position 13 is Phe, Ile, Leu or Val
GGTXRLGXXXXXX

SEQ ID NO: 31717 - DNA, 771 bp, Azotobacter vinelandii
  CDS (1)..(771): transl_table=11
atgaaagcagtgattctggccggtggcctgggtacccgtatttcagaagaaacgtatttgcgcccaaaacctatgatcgaaatcggtggcaagccaattctgtggcacattatgaagatgtactctgcgcatgatgtgaatgagtttgtaatttgctgtggttataagggatatatcatcaaggagtatttcgccaactattttctacatatgtccgatgttaccttcgatatggcggataactacatggaggtgcatgagcgaaaagcggagccttggcgggtaacgctagtggatactggtgagaacacaatgaccggtggacgcttaaaacgtgtgggtaaatatcttgagaacgatgaggccttctgttttacctatggcgatggtgtagcggacgtgaatattgcagccgcaatttctttccataaagcacatggcaggctcgcgacggtaacggccgtgcaaccacctggtcgttatggcgcgttgcaactggatggcaagcgcgttgcgggctttacagaaaagccccgcggcgatggtggcctgatcaatggaggcttttttgtgctttcgcccaaagtcctctctttgattgccgatgactccagcgcctgggaggacataccactgatgcatttagccgagcagggagaactgatggccttcgagcacagcggcttttggcagcctatggacactctacgcgagaagaatctgctggaggccatgtgggcatcaggtggagcgccatggaaacaatggtga

SEQ ID NO: 31718 - protein, 256 aa, Azotobacter vinelandii
MKAVILAGGLGTRISEETYLRPKPMIEIGGKPILWHIMKMYSAHDVNEFVICCGYKGYIIKEYFANYFLHMSDVTFDMADNYMEVHERKAEPWRVTLVDTGENTMTGGRLKRVGKYLENDEAFCFTYGDGVADVNIAAAISFHKAHGRLATVTAVQPPGRYGALQLDGKRVAGFTEKPRGDGGLINGGFFVLSPKVLSLIADDSSAWEDIPLMHLAEQGELMAFEHSGFWQPMDTLREKNLLEAMWASGGAPWKQW

SEQ ID NO: 31719 - DNA, 825 bp, Kineococcus radiotolerans SRS30216
  CDS (1)..(825): transl_table=11
atgaccgacgtcagcaatccgcaaacccccgtctccgagatccccgtcgtcatcctctgcggaggcatggggacccggctgcgcgaggccagcgagaagctgcccaagccgctggtcgacatcggcggtcgcccgatcctgtggcacatcatgaagctgtacagctcctacggcttccggaagttcgtcctgtgcctgggctacaagagcgacctcatcaagcgctacttcctcgactaccggatcaacgccggcgacttcacgctgaacctgtccagccaggacaacccgaccttccacaccaacggggtgcaggaggactgggagatcacgttcgtcgagaccgggctcaccaccgcgaccgcggcccgcatcaagcgcgtcgagcagcacctgaccgccgacaagttcgtcctcacctacggcgacggcctcggcgacgtcgacatcctcaagacgctggccgaccacgaggccggcggccgcctggccaccgtgaccgcggtgcacccgagctcgcgctacggcgagatgcacgtcaccggcgacaccgtcaccgagttcaacgagaagccgacgctggccgacggctgggtcaacggcgggttcttcgtcttcgaccgcgcgttcgcggacaagtacctcgaggacgacccggacatgatgctcgagcagaagccgctgcagaccgtcgcccgcgacggccagctcacggtctcccagcacgaggggtactggctgggcatggacaccttccgcgagtggaccgagttcaacaagctctgggactccggcaaggccccgtggaagacctgggaagactga

SEQ ID NO: 31720 - protein, 274 aa, Kineococcus radiotolerans SRS30216
MTDVSNPQTPVSEIPVVILCGGMGTRLREASEKLPKPLVDIGGRPILWHIMKLYSSYGFRKFVLCLGYKSDLIKRYFLDYRINAGDFTLNLSSQDNPTFHTNGVQEDWEITFVETGLTTATAARIKRVEQHLTADKFVLTYGDGLGDVDILKTLADHEAGGRLATVTAVHPSSRYGEMHVTGDTVTEFNEKPTLADGWVNGGFFVFDRAFADKYLEDDPDMMLEQKPLQTVARDGQLTVSQHEGYWLGMDTFREWTEFNKLWDSGKAPWKTWED

SEQ ID NO: 31721 - DNA, 1086 bp, Arabidopsis thaliana
  CDS (1)..(1086)
atgaaggcactcattcttgttggaggcttcggcactcgcttgagaccattgactctcagtttcccaaagccccttgttgattttgctaataaacccatgatccttcatcagatagaggctcttaaggcagttggagttgatgaagtggttttggccatcaattatcagccagaggtgatgctgaacttcttgaaggactttgagaccaagctggaaatcaaaatcacttgctcacaagagaccgagccactaggtaccgctggtcctctggctctagcgagagacaaattgcttgatggatctggagagcccttctttgttcttaacagtgatgtgattagtgagtaccctcttaaagaaatgcttgagtttcacaaatctcacggtggggaagcctccataatggtaacaaaggtggatgaaccgtcgaaatatggagtggttgttatggaagaaagcactggaagagtggagaagtttgtggaaaagccaaaactgtatgtaggtaacaagatcaacgctgggatttatcttctgaacccatctgttcttgataagattgagctaagaccgacttcaatcgaaaaagagactttccctaagattgcagcagcgcaagggctctatgctatggtgctaccagggttttggatggacattgggcaaccccgtgactacataacgggtttgagactctacttagactcccttaggaagaaatctcctgccaaattaaccagtgggccacacatagttgggaatgttcttgttgacgaaaccgctacaattggggaaggatgtttgattggaccagacgttgccattggtccaggctgcattgttgagtcaggagtcagactctcccgatgcacggtcatgcgtggagtccgcatcaagaagcatgcgtgtatctcgagcagtatcatcgggtggcactcaacggttggtcaatgggccaggatcgagaacatgacgatcctcggtgaggatgttcatgtgagcgatgagatctatagcaatggaggagttgttttgccacacaaggagatcaaatcaaacatcttgaagccagagatagtgatgtga

SEQ ID NO: 31722 - protein, 361 aa, Arabidopsis thaliana
MKALILVGGFGTRLRPLTLSFPKPLVDFANKPMILHQIEALKAVGVDEVVLAINYQPEVMLNFLKDFETKLEIKITCSQETEPLGTAGPLALARDKLLDGSGEPFFVLNSDVISEYPLKEMLEFHKSHGGEASIMVTKVDEPSKYGVVVMEESTGRVEKFVEKPKLYVGNKINAGIYLLNPSVLDKIELRPTSIEKETFPKIAAAQGLYAMVLPGFWMDIGQPRDYITGLRLYLDSLRKKSPAKLTSGPHIVGNVLVDETATIGEGCLIGPDVAIGPGCIVESGVRLSRCTVMRGVRIKKHACISSSIIGWHSTVGQWARIENMTILGEDVHVSDEIYSNGGVVLPHKEIKSNILKPEIVM

SEQ ID NO: 31723 - DNA, 1095 bp, Arabidopsis thaliana
  CDS (1)..(1095)
atgaaagctcttattcttgttggaggttttggcactcgcttgagaccattgactctcagtctcccaaagccgcttgtcgatttcgctaataaacctatgattctacatcagatagaggcactaaaggcaattggagtggatgaagtcgtcttggccattaactacgagccagagcaactgctagtgatgtccaaattctcaaacgacgttgaggcaactctcgggatcaagatcacctgctcacaagagactgagcctttaggtacagctggtcctttggctttagccagggacaaactggttgatggctctggccaaccattctttgtccttaacagcgatgttattagcgactacccgcttgaagagatgattgcttttcacaatgctcatggaggagaggcctctataatggtgacaaaggtagatgagccttcgaaatatggagttgttgttatggaagaagccacagggagagtggaaagattcgtcgaaaaaccgaaactatttgttggtaacaagatcaatgctgggatttatcttctaaatccttcagttcttgatcggattgagctaagaccaacatcaatagagaaagagatcttccctcaaatcgcagaagcggaaaagctctatgcaatgctacttcccggattctggatggacattggtcaaccacgagactacattactggtctaagactttacttagactctctgaggaagaaatctccttcaaagttagccactggtccacacattttgggaaatgttcttgtggatgaaaccgcagagattggtgaaggatgtttgattggccctaacgttgctataggccctggctgtgttgttgagtccggggttagactatcgcactgcacggtaatgcgtggggtacacgtgaagagatatgcgtgtatctcgagtagtatcattgggtggcactcgacggtcggacaatgggctcgggtcgagaacatgtccatacttgggaaaaatgtttacgtgtgcgatgagatatattgtaatggaggggttgtgttgcataacaaagagatcaaatcagacatcttgaaaccagatatagtgatgtga

SEQ ID NO: 31724 - protein, 364 aa, Arabidopsis thaliana
MKALILVGGFGTRLRPLTLSLPKPLVDFANKPMILHQIEALKAIGVDEVVLAINYEPEQLLVMSKFSNDVEATLGIKITCSQETEPLGTAGPLALARDKLVDGSGQPFFVLNSDVISDYPLEEMIAFHNAHGGEASIMVTKVDEPSKYGVVVMEEATGRVERFVEKPKLFVGNKINAGIYLLNPSVLDRIELRPTSIEKEIFPQIAEAEKLYAMLLPGFWMDIGQPRDYITGLRLYLDSLRKKSPSKLATGPHILGNVLVDETAEIGEGCLIGPNVAIGPGCVVESGVRLSHCTVMRGVHVKRYACISSSIIGWHSTVGQWARVENMSILGKNVYVCDEIYCNGGVVLHNKEIKSDILKPDIVM

SEQ ID NO: 31725 - DNA, 750 bp, Bacillus halodurans C-125
  CDS (1)..(750): transl_table=11
atgaaaggggtaattctagcaggagggcgaggcacgcgtttaaagccattaacggatcaaataccgaaaccgatgcttccgatagctggtgtgccgtgcttggcccatgggctcgcccaccttgctgcccatgggattcgtgatatcgtcatgctcgtccattatctgaatcatcaaatgaaagcatattttcaagatggctccaagtacggtatgcgaatcacgtatgttcaagaagacgcccctctcggaacagctgggagcttgaaagcagcggagcgttatttagatgaaccatttgtcgtgatgagcggcgatgtgttaactacgatttcaatacaggaggccatcgttttccataagcgtcaaaacagtcttatgacaatgttgacgaagcgggtgaaaaacggacaaaactatggcgttgttcaaaccggtccaaaccatcgagtagttgcgtttcgagaaaagcctacggaagacaagacaagagaggttttggtgaatacgggtttgtacgtcatggacccttttgttctctcttacattccaaaaggcagtgccgttgatctaggaaaagacgtcatcccataccttgtagacaggaagctggatatatttgctttagaagggggcggctattggcgagacattggctcgtttcatgattatttacaggcaaataacgatgtaaatagtggaagcgttccttcgtttgtaggacgaccgtcgcttctttctcgtgattag

SEQ ID NO: 31726 - protein, 249 aa, Bacillus halodurans C-125
MKGVILAGGRGTRLKPLTDQIPKPMLPIAGVPCLAHGLAHLAAHGIRDIVMLVHYLNHQMKAYFQDGSKYGMRITYVQEDAPLGTAGSLKAAERYLDEPFVVMSGDVLTTISIQEAIVFHKRQNSLMTMLTKRVKNGQNYGVVQTGPNHRVVAFREKPTEDKTREVLVNTGLYVMDPFVLSYIPKGSAVDLGKDVIPYLVDRKLDIFALEGGGYWRDIGSFHDYLQANNDVNSGSVPSFVGRPSLLSRD

SEQ ID NO: 31727 - DNA, 765 bp, Bacillus subtilis subsp. subtilis str. 168
  CDS (1)..(765): transl_table=11
atgaaagcggtcattctctgcggcggaaaaggaacgagaatgagtgaagtcacgaatgacattcctaaaccgctcgccatgataggcggcaaaccgattctatggcatattatgaaaatttatcagtactacggagtaaacgagtttattctgcttttgggctataaaggagaaaaaatcaaggaatactttctcgactatgaatggaagcacaacagcctgacactcgacagctctacgggagaggtacagatgctggggcagcctgaaacgtggaaaattacgtttttggagactggggtagatacgctgacagccggaagaatcttgcaggcgaaagactatatcggtgatgaaacatttctgctcacctatggagacgggctggccaatatcaatcttttccatctcatcagctatcatcagacaaaaggtgctgccgcgactgtcaccggcattgacaaagtctcgcagtttggcaccttgacagttgaggatggcatggcgaaaacattttctgagaagacatcaagtgatggaatcatcaacggcggattcttcgttcttagtccaaaggttttcgattatttgccgaaggacgggaacacgatgttcgaagatgaaccgctgaagaaccttgccaaagatggggagcttgctgtgtaccgccattacggattttggacggccatcgatacgtataaaaatctcttagaagtcaacaaaatgtggaatcaaggacaacaagtatggaaggtatggtga

SEQ ID NO: 31728 - protein, 254 aa, Bacillus subtilis subsp. subtilis str. 168
MKAVILCGGKGTRMSEVTNDIPKPLAMIGGKPILWHIMKIYQYYGVNEFILLLGYKGEKIKEYFLDYEWKHNSLTLDSSTGEVQMLGQPETWKITFLETGVDTLTAGRILQAKDYIGDETFLLTYGDGLANINLFHLISYHQTKGAAATVTGIDKVSQFGTLTVEDGMAKTFSEKTSSDGIINGGFFVLSPKVFDYLPKDGNTMFEDEPLKNLAKDGELAVYRHYGFWTAIDTYKNLLEVNKMWNQGQQVWKVW

SEQ ID NO: 31729 - DNA, 768 bp, Sinorhizobium meliloti 1021
  CDS (1)..(768): transl_table=11
atgaaggtggtcattctcgccggcggatacggcacccgcatttcggaggagagccacctcaggccgaagcctatgatcgagatcggcgggcgcccgatcctctggcacatcatgaagatctacagccattacggcttttcggatttcgttatctgcctcggctatcgcggctacatgatcaaggagtacttctccaactacgttctgcattcctccgacgtcaccttcgacatggcgacgggcgaaacagcctatcacacgaagagtgccgaaccctggcgggtgacgctggtcgatacgggaccggaatccatgaccggcggccgcctgaagcgtgtcgccggctatctcggcgataccttctgcctgacctatggcgacggcgtcgccgatgtcgacgttcgcgcgctcaccgaattccatttgcgtcacggccgcgaggcgacggtgacgagcgtcgtgccgccggggcgctatggtgcgctcgccaccgaagccgggcaggtcatgagctttaccgaaaagccggccggcgacaacggccgtatcaatggcggcttcttcgttctcaatcgctccgtgctcgaccgcatcgcgggggatgacgtcgccttcgaaagcgcgccgctcgagggcctggcgcgcgaccggcagctgatggcattcccgcatgacggtttctggcgcccgatggacacgctgcgcgacaagacccagctcgaggaactctggcagcaaaaccgcgcgccctggaagatctgggcatga

SEQ ID NO: 31730 - protein, 255 aa, Sinorhizobium meliloti 1021
MKVVILAGGYGTRISEESHLRPKPMIEIGGRPILWHIMKIYSHYGFSDFVICLGYRGYMIKEYFSNYVLHSSDVTFDMATGETAYHTKSAEPWRVTLVDTGPESMTGGRLKRVAGYLGDTFCLTYGDGVADVDVRALTEFHLRHGREATVTSVVPPGRYGALATEAGQVMSFTEKPAGDNGRINGGFFVLNRSVLDRIAGDDVAFESAPLEGLARDRQLMAFPHDGFWRPMDTLRDKTQLEELWQQNRAPWKIWA

SEQ ID NO: 31731 - DNA, 771 bp, Synechocystis sp. PCC 6803
  CDS (1)..(771): transl_table=11
atgaaagctgtaattcttgccggtggcttggggactagaatttccgaagaaactcatcttcgacctaagccgatgattgacattggcgggcgacccattctctggcacatccttaaactctattctgcctacggtgtaaatgattttattatttgctgtggttataaaggctatgttattaaggaatattttgccaattattttctacatatgtccgatgtaacctttgacatggtttccaatgaaatgattgtccatcagagaaaggcagagccatggaaagtgaccttagtggataccggggaaaattcccttacagggggaagattaaagcggattaaaacttttattgaaaatgacaatgctttttgttttacctatggtgatggtttggcaaatattaatattcaagaattaattgcttttcatcaaagtcatggtaggttggctacggtcacagcagttgtgccccccggtcgatacggcgcactgaaattagaaaactctaaggttttcgggtttacggaaaagcctcccggtgatggcggtctaattaacggcggtttctttgttttatctccccgttgcttggattttattgggggggatatggatagttgggagggtgagcccctaactgaattgtctggtaagggggagttgatggcatttgagcataggggtttttggcaaccaatggatactttacgggataagaatcatctagaagagttgtggcaatctggtcaggctccttggaaggtatggtaa

SEQ ID NO: 31732 - protein, 256 aa, Synechocystis sp. PCC 6803
MKAVILAGGLGTRISEETHLRPKPMIDIGGRPILWHILKLYSAYGVNDFIICCGYKGYVIKEYFANYFLHMSDVTFDMVSNEMIVHQRKAEPWKVTLVDTGENSLTGGRLKRIKTFIENDNAFCFTYGDGLANINIQELIAFHQSHGRLATVTAVVPPGRYGALKLENSKVFGFTEKPPGDGGLINGGFFVLSPRCLDFIGGDMDSWEGEPLTELSGKGELMAFEHRGFWQPMDTLRDKNHLEELWQSGQAPWKVW

SEQ ID NO: 31733 - DNA, 774 bp, Salmonella enterica subsp. enterica serovar Typhi str. CT18
  CDS (1)..(774): transl_table=11
atgaaagcggtcatcctggctggtggacttggtaccagattaagtgaagaaacaattgtaaaaccaaaaccgatggtagaaattggtggcaagcctattctttggcacattatgaaaatgtattctgtgcatggtatcaaggattttattatctgctgtggttataaaggatatgtgattaaagaatattttgcgaactacttccttcacatgtcagatgtaacattccatatggctgaaaaccgtatggaagttcaccataaacgtgttgaaccatggaatgtcacattggttgatacgggtgattcttcaatgactggtggtcgtctgaaacgtgttgctgaatacgtaaaagatgacgaggctttcctgtttacttatggtgatggcgttgccgaccttgatatcaaagcgactatcgatttccataaggctcacggtaagaaagcgaccttaacagctacttttccaccaggacgctttggcgcattagatatccaagctggtcaggtccggtcattccaggaaaagccgaaaggcgatggggcaatgatcaatggtggtttctttgtgttgaatccatcggttatcgatctcatcgataacgatgcaacaacctgggaacaagagccattaatgacattggcacaacagggggagttaatggcttttgaacacccaggtttctggcagccgatggataccctacgtgataaagtttacctcgaagggctgtgggaaaaaggtaaagctccgtggaaaacctgggagtaa

SEQ ID NO: 31734 - protein, 257 aa, Salmonella enterica subsp. enterica serovar Typhi str. CT18
MKAVILAGGLGTRLSEETIVKPKPMVEIGGKPILWHIMKMYSVHGIKDFIICCGYKGYVIKEYFANYFLHMSDVTFHMAENRMEVHHKRVEPWNVTLVDTGDSSMTGGRLKRVAEYVKDDEAFLFTYGDGVADLDIKATIDFHKAHGKKATLTATFPPGRFGALDIQAGQVRSFQEKPKGDGAMINGGFFVLNPSVIDLIDNDATTWEQEPLMTLAQQGELMAFEHPGFWQPMDTLRDKVYLEGLWEKGKAPWKTWE

SEQ ID NO: 31735 - DNA, 774 bp, Nostoc sp. PCC 7120
  CDS (1)..(774): transl_table=11
atgaaagcggtgattttggctggagggcttggtacacgcctcagtgaagaaaccagtatcaagcctaagccgatggtagaaattggtggtaaaccaattctttggcacatcatgaaaacttattctagccacggcattaatgattttattatttgttgtggttacaaaggttacgtgattaaggagtattttgctaactacttcttacatatgtctgatgtaacttttgatatgcgttttaaccagatgaatatccattctggttacgctgaaccttggcgagtaactttggtcaacacaggcgataatactatgactggtggacgcttaaaacgtgtccgcgaacatcttgggaatgatactttttgttttacttatggtgacggtgtatgtgatattaatatcaccgaattaattaagtttcatcgagaacaaaagagtttagcaaccctgacagcagtccaaccagcaggacgtttcggggcaatttccctgggatacgaacaaactaaaataaccagtttccgggaaaagcccgaaggtgatggtgcttggattaacggtggttattttatcttagaaccagaagtcatagatttaattgctgatgatgctaccgtttgggaaaaagaaccactagaaaagctagcagatatggaggaattatctgcttttaaacacaatggtttttggcaaccaatggatacattgcgtgataaaaactatctagaggagttatggaaaaataaccaagctccttggaaagtgtggtaa

SEQ ID NO: 31736 - protein, 257 aa, Nostoc sp. PCC 7120
MKAVILAGGLGTRLSEETSIKPKPMVEIGGKPILWHIMKTYSSHGINDFIICCGYKGYVIKEYFANYFLHMSDVTFDMRFNQMNIHSGYAEPWRVTLVNTGDNTMTGGRLKRVREHLGNDTFCFTYGDGVCDINITELIKFHREQKSLATLTAVQPAGRFGAISLGYEQTKITSFREKPEGDGAWINGGYFILEPEVIDLIADDATVWEKEPLEKLADMEELSAFKHNGFWQPMDTLRDKNYLEELWKNNQAPWKVW

SEQ ID NO: 31737 - DNA, 1038 bp, Encephalitozoon cuniculi GB-M1
  CDS (1)..(1038)
atggtccatgccaaggagcaagtcaaagcagttattctcgtaggcggatatggaacaaggctgaggccgctaacatatacagttccaaagcctcttgtaccttttgcaaacaaacccattcttaggcaccagatcgaagccttggtcaaagtaggcatcaaggagataatcctggcactcaactattattccgagttcataataagggaggttcgagactactcaaacgagcttggcatcagcatcgtctactccaaggaacaggagcctcttggaacagcaggtcctctggcgcttgccaagaagtatctcgagggccacaccttctttgtgctcaactcagacataacatgcagatttcctctggcagagatgctttccttccactactcgcacggaagggagggaaccattctttccacaaatgtggacgatccgagcaggtatggcatcattatcactgaggaaagcacaagtcttgtgaggtcttttctcgaaaagcccaaagatgcggtgtctaatagagtaaatgcagggatatacatactcaacccctctgtgctagacagaatagagctgagggagtgctcaattgagagggagatctttccgcggatggccgaggaacatcagctccaggtctttgatcttaaggggttctggatggacataggccagcctgcagattatatcaagggccaaggaatgtatctgaggcattgccaagaggcaggcattgacaaccagttagacgcaaaaatgttttctatcgaggacaatgtcgtgataggaagaaacgtgaggatcggaagaaatgtcacaatctcgaacagtgctatcttcgacaatgtggagataggtgacaacgtagtaataagggacagcattgtggggtggaacacaaagatcgaggacaatgctaccgtaagcacctgctgtgtgctgggatatgcaacaaccgttgaaagattctccaccctaagctctgtcaagacgctgcctactaggcctgcattcgagccgttcgaaggcatctaa

SEQ ID NO: 31738 - protein, 345 aa, Encephalitozoon cuniculi GB-M1
MVHAKEQVKAVILVGGYGTRLRPLTYTVPKPLVPFANKPILRHQIEALVKVGIKEIILALNYYSEFIIREVRDYSNELGISIVYSKEQEPLGTAGPLALAKKYLEGHTFFVLNSDITCRFPLAEMLSFHYSHGREGTILSTNVDDPSRYGIIITEESTSLVRSFLEKPKDAVSNRVNAGIYILNPSVLDRIELRECSIEREIFPRMAEEHQLQVFDLKGFWMDIGQPADYIKGQGMYLRHCQEAGIDNQLDAKMFSIEDNVVIGRNVRIGRNVTISNSAIFDNVEIGDNVVIRDSIVGWNTKIEDNATVSTCCVLGYATTVERFSTLSSVKTLPTRPAFEPFEGI

SEQ ID NO: 31739 - DNA, 738 bp, Streptomyces coelicolor A3(2)
  CDS (1)..(738): transl_table=11
atgaccgatccgaacgccgcgtcccgccgccccgttcaagccgtcgtcctggccggcgggcagggttcccggctgcgcccctacaccgacgaccggcccaagccgatggtcgagatcccgggcaccgggaccccgatcatcggccatcagctcgcctggctcgccgaggagggcgtcaccgacgtcgtcgtctcctgcggtcatctggccgaggtgctccagaagtggctggagagcgccgatctgccgctctccgtcaccaccgtcgtggagaccgagccgctgggccgaggcggcggcctccggtacgccgccgcccacctcccgcacccggaccggtcctggtacgccaccaacggcgacatctggacccggttctcgctgcgcgacatggccgacttccacgccgagcgtgacgccgtcgcgaccctcgccctggcccgcccgcggctgccgtggggcgccgtgcagacggacggcttcgggcacatcaccgacttcatcgaggcaccgccgtcgaccttcgagatcaacgcgggcgtctacgtcttctcccccgagttcgccgcgatgctcccggagcgcggcgaccacgagcgcaccaccttcccccggctggcccgtgaacaccggctggccggcttcccgatcccgcagggctcctactggcgggcgatcgacaccgcgaaggacctgacggaggcggcccgggagctggcggccctgtccggccgctga

SEQ ID NO: 31740 - protein, 245 aa, Streptomyces coelicolor A3(2)
MTDPNAASRRPVQAVVLAGGQGSRLRPYTDDRPKPMVEIPGTGTPIIGHQLAWLAEEGVTDVVVSCGHLAEVLQKWLESADLPLSVTTVVETEPLGRGGGLRYAAAHLPHPDRSWYATNGDIWTRFSLRDMADFHAERDAVATLALARPRLPWGAVQTDGFGHITDFIEAPPSTFEINAGVYVFSPEFAAMLPERGDHERTTFPRLAREHRLAGFPIPQGSYWRAIDTAKDLTEAARELAALSGR

SEQ ID NO: 31741 - DNA, 774 bp, Xanthomonas campestris pv. campestris str. ATCC 33913
  CDS (1)..(774): transl_table=11
atgaaggcagtgattctggctggcggcctggggacgcgcatctccgaggagaccgccattcgccccaagcccatggtggagatcggcggcaagccgatcctctggcacatcatgaaaatctatgcgtatcacggcatcaacgagttcgtggtgtgcctgggatatcgcggtgaggtgatcaaggatttcttcatgaattaccacatgcgcgaatcggatgtgacctgcgatctgggcagcaacaccaccaccttgcacaacacccgcgccgaaccgtggcgggtgacgctggtggacaccggtgcgcagaccatgaccggcggccgcctacgccgtgtacgcgagcacctgcacggcgatgacgccttttgcatgacctacggcgatggcgtggccgacatcgatattggcgccgccatcgcgctgcatcggcgcgaaggccgtttggcgacggtgagcgcggtgcaaccgccgggccggttcggggcgctgcgcgtggaaggcgaacaggtcaccggcttccgcgaaaagccgctcgatggcgatggcctgatcaacggcggtttcttcgtgctcgacccgcgcgtcatcgacgtgatcgaaggtgatgccacggtgtgggagaacagcccgctggaaaccctggtcgaccgcggcgaactgagcgtgtaccggcacgagggcttctggcagccgatggacaccctgcgcgaccgcaattatctcgaaaccctctggtcatccaatcgggcgccctggcgcgtctgggagtaa

SEQ ID NO: 31742 - protein, 257 aa, Xanthomonas campestris pv. campestris str. ATCC 33913
MKAVILAGGLGTRISEETAIRPKPMVEIGGKPILWHIMKIYAYHGINEFVVCLGYRGEVIKDFFMNYHMRESDVTCDLGSNTTTLHNTRAEPWRVTLVDTGAQTMTGGRLRRVREHLHGDDAFCMTYGDGVADIDIGAAIALHRREGRLATVSAVQPPGRFGALRVEGEQVTGFREKPLDGDGLINGGFFVLDPRVIDVIEGDATVWENSPLETLVDRGELSVYRHEGFWQPMDTLRDRNYLETLWSSNRAPWRVWE

SEQ ID NO: 31743 - DNA, 771 bp, Bradyrhizobium japonicum USDA 110
  CDS (1)..(771): transl_table=11
atgaaggccgtgattctggcaggtggcttcgggactcgcatcaccgaagagagccacatcaagccgaaacccatgatcgagatcggcggcaagccgatcctgtggcacatcatgaagatcttctcgtcgcacggtatcgacgaattcatcatctgctgtggctacaagtcctacgtcatcaaggaatatttcgctaactacttcctccatatggcggacgtcaccttcgacctcgccaacaatgcgatggaagtgcacaacaagttcgccgagcactggaaggtgacgttggttgacaccggcctcaacaccatgaccggcggccgtctcaagcgcgtcagggactatgtcggcaacgagacgttctgcatgacctatggcgacggcctcgcggacgtcgatatcggcgcgctacgcgaatttcatcgcgcccacggccgccatgcgacggtcaccgccatccagccgccggcgcgtttcggtgcgctcgacatcggcgacgacgtggtccggcatttcgaggagaaaccgcggggcgacggtcgctggatcaacggcggcttcttcgtgctggagccggcgatcttcgactatctcggggacgacgccacaatctgggagcaggagccgctgaagcgcctgtcgcaggacggacagctcgcggcctaccgccacaccggcttctgggaagcgatggacacgctgcgggacaagctgcatctcgaacaactctgggacagcgggcaggcgccgtggaagcactggccatga

SEQ ID NO: 31744 - protein, 256 aa, Bradyrhizobium japonicum USDA 110
MKAVILAGGFGTRITEESHIKPKPMIEIGGKPILWHIMKIFSSHGIDEFIICCGYKSYVIKEYFANYFLHMADVTFDLANNAMEVHNKFAEHWKVTLVDTGLNTMTGGRLKRVRDYVGNETFCMTYGDGLADVDIGALREFHRAHGRHATVTAIQPPARFGALDIGDDVVRHFEEKPRGDGRWINGGFFVLEPAIFDYLGDDATIWEQEPLKRLSQDGQLAAYRHTGFWEAMDTLRDKLHLEQLWDSGQAPWKHWP

SEQ ID NO: 31745 - DNA, 774 bp, Bacteroides thetaiotaomicron VPI-5482
  CDS (1)..(774): transl_table=11
atgaaagctgtgatattagcaggcgggtatggtactcggttaagtgaggcaactaatctgattcctaagccaatggtggaaattggaggaaaacccattctatggcatataatgaagatatatagctattatggaataaatgattttattatttgctgtggttataaacaatatgttataaaagagtatttctcaaattattttcgacataactcggatctaactgtggatttgtcaacaaatagtatacaaattcatgataatcattctgaacattggaaagtaacgatggtggatactggtttgaatacaatgacaggtggtcgcattaaacgtgtacagaaatacattggtaatgaggctttttgccttacttatggtgatggagttgcagatattaatattgcagatacgattgatcaacataaaaaatcaggtaaagctctttctatgacagcttatcaacctggtggacgattgggagtgttggatatactggatgatggaactttagattcttttgtcgagaagcctcaagaaagtggtacttggattaatgcaggttttttcatttgtgagcctttcatttttaatatgttgaagggagacatggaaatgtttgaaaaagaaccaatgcaacgtttagtagcacagaaacaagtacatgtgtataaacacacaggcttttggaagccgatggatacacttcgtgataatgcagaactaaatgcaatgtgggataagagaaatgctccttggcaaatttggaaataa

SEQ ID NO: 31746 - protein, 257 aa, Bacteroides thetaiotaomicron VPI-5482
MKAVILAGGYGTRLSEATNLIPKPMVEIGGKPILWHIMKIYSYYGINDFIICCGYKQYVIKEYFSNYFRHNSDLTVDLSTNSIQIHDNHSEHWKVTMVDTGLNTMTGGRIKRVQKYIGNEAFCLTYGDGVADINIADTIDQHKKSGKALSMTAYQPGGRLGVLDILDDGTLDSFVEKPQESGTWINAGFFICEPFIFNMLKGDMEMFEKEPMQRLVAQKQVHVYKHTGFWKPMDTLRDNAELNAMWDKRNAPWQIWK

SEQ ID NO: 31747 - DNA, 732 bp, Streptomyces avermitilis MA-4680
  CDS (1)..(732): transl_table=11
atgaccgatccgaacgccgcgtcgcgtcccgttcaagccgttgtcctggccggtgggcagggctcccgactgcgcccgtacaccgacgaccggcccaagccgatggtcgagatcccgggcaccgggaccccgatcatcggccatcagctcacctggctcgccgaagagggcgtgaccgacgtggtggtcagctgcgggcatctcgccgacgtcctccagaagtggctggacgcggccgacctgcccctgaacgtcacgacggtcgtcgaaacggaaccgctcggccgcggcggcggcctcaagtacgccgccgcgcatctcccgcacccggacaagccgtggttcgcgacgaacggtgacatctggacccgtttctcgctgcgcgacatggcggacttccacaccgagcgcgacgcggtggcgaccctcgcgctggcccgcccccgcatcccgtggggcgccgtcaagacggacggcttcggccgcgtgacggacttcatcgaggccccgccgacgacgtacgagatcaacgcgggcgtctacgtcttctccgccgagttcgccggcatgctcccggagcgcggcgaccacgagcgcaccacgttcccccgcctggcccgcgaacgcctgctggccggcttcccgatcccgcagggcgcgtactggcgcgccatcgacacggcgaaggacctgacggaggcggcaaaggaactggcgtccctgggccgctga

SEQ ID NO: 31748 - protein, 243 aa, Streptomyces avermitilis MA-4680
MTDPNAASRPVQAVVLAGGQGSRLRPYTDDRPKPMVEIPGTGTPIIGHQLTWLAEEGVTDVVVSCGHLADVLQKWLDAADLPLNVTTVVETEPLGRGGGLKYAAAHLPHPDKPWFATNGDIWTRFSLRDMADFHTERDAVATLALARPRIPWGAVKTDGFGRVTDFIEAPPTTYEINAGVYVFSAEFAGMLPERGDHERTTFPRLARERLLAGFPIPQGAYWRAIDTAKDLTEAAKELASLGR

SEQ ID NO: 31749 - DNA, 768 bp, Bacillus cereus ATCC 14579
  CDS (1)..(768): transl_table=11
atgaaagctgttattcttgctggtgggtacggtacaagaattggggaagaaacacatttaaaaccgaaacctatgattgaaattggaacaaaacccattctatggcacattatgagtttgtatagtcattacgggattactgagtttattatttgcttaggctataaaggatatgcaattaaagagttctttctaaattacaacttacacatgtctgatttcacaatacagttaaacgataatacaattactagccattctcatcgtgtagaaccatggaaagttacactaatcgatactggtgtaaataccgaaacgggtggccgagtgaaaaagattcaaaattatgtcggagacgaacctttctgcctcacttatggtgatggattaagtaatgtaaatataaaagaacttattacattccataaaaaacatggaaaattggctactgttactgccgtacaacctcctggtagatttggttctctcatattagataaacagtctgtaacatcttttcaagaaaaaccattaggtgatggcggatggattaacggtggatttttcgttttaaatcctgaagttttcaattacattagtggagataagtctgtttttgaaacagacactttagttcagttagtaaacaaaaatgaattggccgcatatcaacattctggtttttggcatccgatggatacattgcgcgataaaaataaattagtcgagctatgggaaagtaatagcgctccgtggaaggtttggtaa

SEQ ID NO: 31750 - protein, 255 aa, Bacillus cereus ATCC 14579
MKAVILAGGYGTRIGEETHLKPKPMIEIGTKPILWHIMSLYSHYGITEFIICLGYKGYAIKEFFLNYNLHMSDFTIQLNDNTITSHSHRVEPWKVTLIDTGVNTETGGRVKKIQNYVGDEPFCLTYGDGLSNVNIKELITFHKKHGKLATVTAVQPPGRFGSLILDKQSVTSFQEKPLGDGGWINGGFFVLNPEVFNYISGDKSVFETDTLVQLVNKNELAAYQHSGFWHPMDTLRDKNKLVELWESNSAPWKVW

SEQ ID NO: 31751 - DNA, 768 bp, Prochlorococcus marinus subsp. pastoris str. CCMP1986
  CDS (1)..(768): transl_table=11
atgaaagccgttatacttgctggtggattaggtacgagactttcagaggaaacaacaattaaacctaagccaatgattgaaattggtggactaccaattttatggcatatcatgaaaatttatagttgttatggcatcaaagaatttataatttgttgtggttataagggatatttaataaaggaatattttgcaaattattatcttcattcaagagactttactgtagatcttcaaaagaattctattactacccataatgtggattctgaagattggaaggtcactcttgtagatacgggtaaagatactttgactggaggaaggcttgcaagagtaaaagaatatattgggaatgaaactttctgcttcacatatggagatggtttggctgatgtaaatataagtaaactaatagatttccattttaaaaaaggaagaaaagcgacgcttacagcagttcagccccctggaaggtttggttctttagcttttgaaagaggtagagttctagggtttaatgagaaaccaaaaggtgatggtaactggattaacggcggtttttttgtgcttcaacctgaaacaatagattttatagaaaacgacttttgttcatgggaacaaaagccaatgcaaaaacttgcagagttaaatcaactatctgcatttcaccacagcggtttttggcagccaatggatactttaagagataagatggttttgcaagatttatgggaatctaataaagcgccttggaaaatttggtag

SEQ ID NO: 31752 - protein, 255 aa, Prochlorococcus marinus subsp. pastoris str. CCMP1986
MKAVILAGGLGTRLSEETTIKPKPMIEIGGLPILWHIMKIYSCYGIKEFIICCGYKGYLIKEYFANYYLHSRDFTVDLQKNSITTHNVDSEDWKVTLVDTGKDTLTGGRLARVKEYIGNETFCFTYGDGLADVNISKLIDFHFKKGRKATLTAVQPPGRFGSLAFERGRVLGFNEKPKGDGNWINGGFFVLQPETIDFIENDFCSWEQKPMQKLAELNQLSAFHHSGFWQPMDTLRDKMVLQDLWESNKAPWKIW

SEQ ID NO: 31753 - DNA, 771 bp, Chromobacterium violaceum ATCC 12472
  CDS (1)..(771): transl_table=11
atgaaagccgtgattttggctggtggtcttggcacgcgcatcagcgaagagtcccatcttcgtcccaaaccgatgatcgagatcggcggcaagcccatcatctggcatatcctgaaaatctactccgcacacggcatcaatgatttcatcatctgcctgggctacaagggatatgtgatcaaggaatacttcgccaactatttcctccacacttccgacgtcacgctggatctgagcaacaaccagatgttcgtgcacgagcgccatgccgagccgtggcgggtgaccctggtcgacaccggggaaagcacccagaccggcggccggctggggcgggtgcgcaggcatctggagaacgagcaggacttctgcttcacctacggcgacggggtcagcgacatcgacatcaccgccgccgtcgcttaccaccgcagccagggcgtggaagccaccgtcaccgcggtgcatccgcccggccgcttcggcgcgctggagatccgcgacgagcgcgtcgaattcttcaaggaaaagccgcgcggcgacggcggcatgatcaacggcggcttcttcgtgctgaacccgtcggtgctggacctgatagacagcgacgactgcgtctgggaatccgagccgctggaaacgctggccagccgcggacagctggccgcttacgaacacagcggtttctggcagccgatggacacgctgcgcgacaagaccctgctcgaggagttgtggcagagcggggaggcgccgtggaagctgtggtga

SEQ ID NO: 31754 - protein, 256 aa, Chromobacterium violaceum ATCC 12472
MKAVILAGGLGTRISEESHLRPKPMIEIGGKPIIWHILKIYSAHGINDFIICLGYKGYVIKEYFANYFLHTSDVTLDLSNNQMFVHERHAEPWRVTLVDTGESTQTGGRLGRVRRHLENEQDFCFTYGDGVSDIDITAAVAYHRSQGVEATVTAVHPPGRFGALEIRDERVEFFKEKPRGDGGMINGGFFVLNPSVLDLIDSDDCVWESEPLETLASRGQLAAYEHSGFWQPMDTLRDKTLLEELWQSGEAPWKLW

SEQ ID NO: 31755 - DNA, 816 bp, Gloeobacter violaceus PCC 7421
  CDS (1)..(816): transl_table=11
atgaaagttgtactgttttgcggcggtctgggcacgcgcatccgcgactactcagaaagcatccccaaacccctggtgaccatcggctaccggccgatcctctggcatgtcatgaagtactacgcccactacggccaccgcgacttcatcctctgcctgggctacaaagccgacgccatcaaaaactactttctcaactacgacgaatgtctttccaacgacttcaccctctcggagggcgggcgcaagctgcaactttccaacagcgacatccacgactggaacatcaccttcgtcgataccggcttcaatgccaacatcggccagcgcctgatggccatcgaaccctacctggagggggacaagtacttcctggccaactacagcgacggcctcaccaacctgcatctgcccgacttgatcgctttttctcagcgccaggagcgcatcgccacgttcttgagcgtcaaaccgagccagagttttcacctggtcgccatggacgaacagggactggtgcgcgatatctgcgacacccgccgctcggatgtctggattaacggcggctacttcgtcttcaagcgccagatttttgattacatgcgctacggggaggaattggtctgcgaaccgttccgccgtctcatcgccgcgcaggaattgctcacctacccctaccagggcttctgggcctgcatggacaccttcaaagaaaagcagcagctcgacgaactgtacgcccgccaggaagcgccctgggaggtctggcgccaggggcgggtgctgccgctgatgccccaggttgcggtgggttaa

SEQ ID NO: 31756 - protein, 271 aa, Gloeobacter violaceus PCC 7421
MKVVLFCGGLGTRIRDYSESIPKPLVTIGYRPILWHVMKYYAHYGHRDFILCLGYKADAIKNYFLNYDECLSNDFTLSEGGRKLQLSNSDIHDWNITFVDTGFNANIGQRLMAIEPYLEGDKYFLANYSDGLTNLHLPDLIAFSQRQERIATFLSVKPSQSFHLVAMDEQGLVRDICDTRRSDVWINGGYFVFKRQIFDYMRYGEELVCEPFRRLIAAQELLTYPYQGFWACMDTFKEKQQLDELYARQEAPWEVWRQGRVLPLMPQVAVG

SEQ ID NO: 31757 - DNA, 774 bp, Gloeobacter violaceus PCC 7421
  CDS (1)..(774): transl_table=11
atgaaagcagtgttgctggcgggcgggctaggcacccgcctgagcgaagagacccagatcaagcccaagcccatggtcgaggtcggcaaccggcccatgctctggcacatcatgaaaatctattcggcccacggcatcaacgatttcatcatctgctgcggctaccgcgggcacgtcatcaaagagtatttcgccaactattttttgtacgaatcggatgtcaccttcgacattcgctataaccacatggaagtgcactgccgcaacgccgagccctggcgcgtcaccctcgtcgacaccggcgagcattcaatgaccggcggccggttgcgccgcgtgcgcgagcacatcggcagtcaaactttttgctttacctacggcgacggcgtcgccaacgtcgatatcggcgcggtgctcgccctgcacaaagcgagcggcaccctggccacgatgacggtcacccggcctccgggccgcttcggggcggtccgcctgccgcaggatcagaccctggtctccagtttccaggagaaacccgacggcgacggcgcctatatcaacggcggctattttgtgctggagccggaggtcatcgactatattgcagacgacacgaccgtctgggagcaggagccgctcgccaaactggcgcacctggggcaactttcggcttaccgtcacgacggcttctggcaaccgatggacaccctgcgcgacaagcggttgctcgaagatctgtggaattccggcaaagcgccgtggaaggtgtggtga

SEQ ID NO: 31758 - protein, 257 aa, Gloeobacter violaceus PCC 7421
MKAVLLAGGLGTRLSEETQIKPKPMVEVGNRPMLWHIMKIYSAHGINDFIICCGYRGHVIKEYFANYFLYESDVTFDIRYNHMEVHCRNAEPWRVTLVDTGEHSMTGGRLRRVREHIGSQTFCFTYGDGVANVDIGAVLALHKASGTLATMTVTRPPGRFGAVRLPQDQTLVSSFQEKPDGDGAYINGGYFVLEPEVIDYIADDTTVWEQEPLAKLAHLGQLSAYRHDGFWQPMDTLRDKRLLEDLWNSGKAPWKVW

SEQ ID NO: 31759 - DNA, 768 bp, Rhodopseudomonas palustris CGA009
  CDS (1)..(768): transl_table=11
atgaaggtagtgcttctggcaggcggcctcggaacgagaatctccgaggaatcggcattgcgccccaaacccatgattgagatcggcgggagaccgatactctggcacatcatgaagatttatctagcccacggattgcgagatttcgtgatctgctgcggctataaaggctacatgatcaaggaatacttcgctaattactcgctccacatgtctgacattaccatcgacatggaaaacgagtcgatcgagattcatcggaagaagaccgagccgtggcgggtaacgctcgtcgataccggtgaagccacccaaacgggcgggcggctcaagcggatagccgattatatcgatggcgacttctgcctgacttatggtgacggagttggatcgatcaacatcactgagctccttatgtttcaccgcagccatggaaagcccgccacgatgactgccacgcagccgccgggtcgcttcggcgcgctgcaactcaatggaaagtcggtcacgtcgttcctggaaaagccgaccggagacggcggttggatcaacggtggtttcttcgtactttctcctaaggtgctcgatcgcattgacggggacatgactatctgggagcgcgaaccgctcgagagtctagcgcagaacggcgaactccaagcctatttccatagcggcttctggcaacccatggatacgctacgggacaagaatcatctcgaaaatttgtggcaatctggtagggcgccgtggaaaatgtgggaatga

SEQ ID NO: 31760 - protein, 255 aa, Rhodopseudomonas palustris CGA009
MKVVLLAGGLGTRISEESALRPKPMIEIGGRPILWHIMKIYLAHGLRDFVICCGYKGYMIKEYFANYSLHMSDITIDMENESIEIHRKKTEPWRVTLVDTGEATQTGGRLKRIADYIDGDFCLTYGDGVGSINITELLMFHRSHGKPATMTATQPPGRFGALQLNGKSVTSFLEKPTGDGGWINGGFFVLSPKVLDRIDGDMTIWEREPLESLAQNGELQAYFHSGFWQPMDTLRDKNHLENLWQSGRAPWKMWE

SEQ ID NO: 31761 - DNA, 768 bp, Bacillus cereus ATCC 10987
  CDS (1)..(768): transl_table=11
atgaaagctgttattcttgctggtggatacgggacaaggattggggaggaaacacatttaaagccgaaacctatgattgaaattggaacaaaacctattctatggcacattatgagtttgtatagccattacggtattactgaatttattatttgcttaggctataaaggatatgcgattaaagaattctttctaaactacaacttacacatgtcagatttcacgatacatttaagagataatacaattactagccattctcatcgtgtagaaccgtggaaagttacactaatcgatactggtgtaaataccgaaacgggaggacgagtgaaaagaattcaaaattttgttggagacgaacctttctgcctcacttatggtgatggattaagtaacgtaaatataaaagaacttattgcatttcataaaaaacatggaaaaatggcaactgttaccgccgtacaacctcctggtagattcggttctctcatattagataaacagtctgtaacatcttttcaagagaagccactcggggatggcggatgggttaacggtggatttttcgttttaaaccctgaagttttcaattacattagtggagataagtctgtttttgaaacagacactttagttcagttagtaaacaaaaacgaactatcagcatatcaacatactggtttttggcatccgatggatacattgcgcgataaaaataaattagtcgagctatgggaaagtaataacgctccgtggaaggtttggtaa

SEQ ID NO: 31762 - protein, 255 aa, Bacillus cereus ATCC 10987
MKAVILAGGYGTRIGEETHLKPKPMIEIGTKPILWHIMSLYSHYGITEFIICLGYKGYAIKEFFLNYNLHMSDFTIHLRDNTITSHSHRVEPWKVTLIDTGVNTETGGRVKRIQNFVGDEPFCLTYGDGLSNVNIKELIAFHKKHGKMATVTAVQPPGRFGSLILDKQSVTSFQEKPLGDGGWVNGGFFVLNPEVFNYISGDKSVFETDTLVQLVNKNELSAYQHTGFWHPMDTLRDKNKLVELWESNNAPWKVW

SEQ ID NO: 31763 - DNA, 1080 bp, Nasonia vitripennis
  CDS (1)..(1080)
atgcgtgctcttattcttgttggaggatatggtacacgattgcgaccattgacacttagccgacctaaaccgcttgttgaatttgcaaataaacccatgctatttcatcaaattgaagcattggtgcagattaatgtaaccgaagtgattttagctgtatcttatagagctgaagagatggaaaaagaactttgcgaaaaagctgaaaagttaggtgtaactctaattttttctcatgaatcgcaacctctaggaacagctggacctcttgctttagctagagaaattttgtcttcagatgatagtccattttttgttttaaattctgatataatttgtgattttcctttcaagcaacttttgcagtttcataaaaatcacggcaaagaaggtactattgtagtaaccaaggttgaagaaccttccaagtatggtgttgtcgtctgcaatgatgatggcaaaattaatagttttattgaaaaacctgtagaatttgtatccaacaaaattaatgcaggaatgtacatttttaatccaagcatattaaaaaggatagatttacgccctatgagtattgagaaagaagtattcccagctatggccaaacaatgtcaattatatgcaatggaactagagggttactggatggatgttggtcagccaaaagattttctgacaggtatggggatgtatctggattctctaaagcaaaagacacctgaaaaattgtacaatggaccaggtgtagtaggaaatgttttgattgattctacagcaatcataggaaaagattgcagaatcgggccaaatgtaacaattggtcctggagttacactctctgatggatgttgtgtcaaaagaactaccatcttgaaggatgccattattaaagaacattcttggcttgataagtgtattattggctggaaaagtgttgtaggacgttgggtcagaatggagaatacaactgtacttggagaggacgttattgtgaaagatgagctgtatattaatggaggacaagtattaccgcacaaaagcattgctgcatctgtgacagaaccacaaataattatgtaa

SEQ ID NO: 31764 - protein, 359 aa, Nasonia vitripennis
MRALILVGGYGTRLRPLTLSRPKPLVEFANKPMLFHQIEALVQINVTEVILAVSYRAEEMEKELCEKAEKLGVTLIFSHESQPLGTAGPLALAREILSSDDSPFFVLNSDIICDFPFKQLLQFHKNHGKEGTIVVTKVEEPSKYGVVVCNDDGKINSFIEKPVEFVSNKINAGMYIFNPSILKRIDLRPMSIEKEVFPAMAKQCQLYAMELEGYWMDVGQPKDFLTGMGMYLDSLKQKTPEKLYNGPGVVGNVLIDSTAIIGKDCRIGPNVTIGPGVTLSDGCCVKRTTILKDAIIKEHSWLDKCIIGWKSVVGRWVRMENTTVLGEDVIVKDELYINGGQVLPHKSIAASVTEPQIIM

SEQ ID NO: 31765 - DNA, 1092 bp, Magnaporthe grisea 70-15
  CDS (1)..(1092)
atgaaggccataattctcgtcggcggcttcggtaaattctgccccaaaaccctgactcttcccaagcccttggtcgagttcgccaacaagcccatgattctgcaccagatcgaggccttgtccgctgccggtgtcacagatgtcgtcctcgccgtcaactaccgccctgagatcatggagaaggctcttgctgagtactctaagaaattcaacatcaacattaccttctccgtcgagacggagcccctaggcaccgccggtcctttgaagctggccgagaagacgcttctcaaggatgacactcccttcttcgtcctgaacgccgatgtcacttgcgagtacccgtttaagcagctggccgacttccacaaggcacacggtgacgagggcaccatcgttgtcaccaaggtcgaggagccctccaagtatggtgtcgtcgttcacaagcccaaccacccgtcgcgtattgaccgcttcgtcgagaagccggtccagttcgttggaaaccgcatcaacgccggtatctacattctgaacacatctgttctctcgagaatcgagctgcgccctacctcgattgagcaggagactttcccggccatggtccgcgatgcccagctgcactctttcgacctcgagggattctggatggacgttggtcagcctaaggacttcattgctggtacctgtttgtatctctcatcgctcgccaagaggaacagcaagcttctcaccccaacatctgagccctttgtccacggcggcaatgtcttgatagacccaaccgcaaagattggcgcaaactgccgtatcgggcccaacgttaccattggccccaacgtcgtggtcggcgatggtgtcaggcttcagcgctgcgtactcctgcgtgactccaaggtcaaggaccacgcctggatcaagagcaccatcgtcggctggaacagcacagttggcaggtgggcgcgcctggagaacgttaccgtcttgggtgatgatgttacgattggcgacgagatctacgtcaacggtggcagcatcctgccgcacaagagcatcaaggccaacgtcgatgttcccgccattattatgtaa

SEQ ID NO: 31766 - protein, 363 aa, Magnaporthe grisea 70-15
MKAIILVGGFGKFCPKTLTLPKPLVEFANKPMILHQIEALSAAGVTDVVLAVNYRPEIMEKALAEYSKKFNINITFSVETEPLGTAGPLKLAEKTLLKDDTPFFVLNADVTCEYPFKQLADFHKAHGDEGTIVVTKVEEPSKYGVVVHKPNHPSRIDRFVEKPVQFVGNRINAGIYILNTSVLSRIELRPTSIEQETFPAMVRDAQLHSFDLEGFWMDVGQPKDFIAGTCLYLSSLAKRNSKLLTPTSEPFVHGGNVLIDPTAKIGANCRIGPNVTIGPNVVVGDGVRLQRCVLLRDSKVKDHAWIKSTIVGWNSTVGRWARLENVTVLGDDVTIGDEIYVNGGSILPHKSIKANVDVPAIIM

SEQ ID NO: 31767 - DNA, 1080 bp, Apis mellifera
  CDS (1)..(1080)
atgagagctgtaattcttgttggtggatatggaactagattaagacccttaacattaagtcgaccaaaaccattagtagaatttgctaataaaccaatgcttttacatcaaatagaagctctggtagagacaaatgtgacagaagtaatattagctgtatcttatcgggcagaagaaatggaaagagatttgagcgaagaagttaaaaaattaggagttcatttgattttttcacacgaaccagaaccacttggcactgcaggaccacttgcacttgtacatgatctattgtgttcaggagatgaaccattttttgttttaaattctgatattatttgtgattttccatttatgcaacttttagaatttcataaaagtcatggtaaagaaggtactataattgtaactaaagtagaagaaccatcaaagtatggtgtagtagtatatagagatgatggaaaaatagaaaattttatagaaaagccacaagaatttatttcaaataaaattaatgcaggcatgtatattttgaatccaagtgtcttaaaaagaatagaattgaagccaacaagtatagaaaaagaaatttttccgaatatggctcgtgatggagaattatatgcaatggaactaacaggattctggatggatgttggacaaccaaaagattttcttaaaggaatgagcatgtacctgacatctctaagacaaaagtctccagcaaaattatattctggtccaggagtagtaggaaatgtcttaatagatgaaacagcaaagattggcaaagattgtagaataggaccaaatgttacaattggtcctggtgttattttatccgatggttgttgcattaaaagaagtactattcttaaggcagctataataaaagaacacgcatggctggatgggtgcattgtgggctggaaaagtgttgtaggacgttgggtacgaatggaaggtactacagtacttggtgaagatgtaattgttaaggatgaattatatattaatggtggtcaagttttacctcacaagaatatttccagttctgtaccagaaccacaaataatcatgtga

SEQ ID NO: 31768 - protein, 359 aa, Apis mellifera
MRAVILVGGYGTRLRPLTLSRPKPLVEFANKPMLLHQIEALVETNVTEVILAVSYRAEEMERDLSEEVKKLGVHLIFSHEPEPLGTAGPLALVHDLLCSGDEPFFVLNSDIICDFPFMQLLEFHKSHGKEGTIIVTKVEEPSKYGVVVYRDDGKIENFIEKPQEFISNKINAGMYILNPSVLKRIELKPTSIEKEIFPNMARDGELYAMELTGFWMDVGQPKDFLKGMSMYLTSLRQKSPAKLYSGPGVVGNVLIDETAKIGKDCRIGPNVTIGPGVILSDGCCIKRSTILKAAIIKEHAWLDGCIVGWKSVVGRWVRMEGTTVLGEDVIVKDELYINGGQVLPHKNISSSVPEPQIIM

SEQ ID NO: 31769 - DNA, 1086 bp, Candida glabrata CBS 138
  CDS (1)..(1086)
atgaagggtttaattctagttggtggttacggtaccagattgagacctttgactttgactgtcccaaagccattggttgagttcggtaacagaccaatgatcttgcaccagattgaagctttggccaacgctggtgtcaccgatatcgtcttggctgtcaactacagaccagaagtcatggttgagactttgcaaaagtacgagaaggagtatggtgtcagcatcactttctccgtcgaaaccgagccattgggtaccgctggtccattgaagttggccgagaaggttttaaagaaggacaactctccattcttcgttctaaactccgatgtcatctgtgaatacccattcaaggaattggctgacttccacaaggcccacggtggtaagggtaccattgtcgctaccaaggtcgacgaaccatccaagtacggtgtcatcgtccatgacattgccactccaaacttgatcgacagattcgtcgagaagccaaaggaattcgttggtaacagaatcaacgctggtttgtacatcttgaacccagaagtcattgacttgatcgaaatgaagccaacctctatcgaaaccgagactttcccaatccttgttgaacaaaagtccttgtactccttcgacttggaaggtttctggatggatgtcggtcaaccaaaggatttcttgtccggtaccgttctatacttgaactctgtctccaagaagaacccagaaaagttgaccaagggtgacaacattgtcggtaacgttatggttgacccatctgccaagattgctgcctctgctaaggtcggtccagatgtagttatcggtccaaacgtcactatcggtgaaggtgtcagaatcaccagatccgttgtcctttccgactccagtattcaagaccactccctagtaaagtccaccattgtcggctggaagtctactgttggtaagtggtgtcgtttggaaggtgtcactgttttgggtgacgacgttgttgtcaaggatgaagtttacgttaacggtggtaaggtcttgcctcacaagtccatctctgctaacgttccaagtgaagccattattatgtaa

SEQ ID NO: 31770 - protein, 361 aa, Candida glabrata CBS 138
MKGLILVGGYGTRLRPLTLTVPKPLVEFGNRPMILHQIEALANAGVTDIVLAVNYRPEVMVETLQKYEKEYGVSITFSVETEPLGTAGPLKLAEKVLKKDNSPFFVLNSDVICEYPFKELADFHKAHGGKGTIVATKVDEPSKYGVIVHDIATPNLIDRFVEKPKEFVGNRINAGLYILNPEVIDLIEMKPTSIETETFPILVEQKSLYSFDLEGFWMDVGQPKDFLSGTVLYLNSVSKKNPEKLTKGDNIVGNVMVDPSAKIAASAKVGPDVVIGPNVTIGEGVRITRSVVLSDSSIQDHSLVKSTIVGWKSTVGKWCRLEGVTVLGDDVVVKDEVYVNGGKVLPHKSISANVPSEAIIM

SEQ ID NO: 31771 - DNA, 774 bp, Prochlorococcus marinus str. MIT 9515
  CDS (1)..(774): transl_table=11
ttgaaagctataattcttgctggaggaatgggtactaggttaagtgaagagactctcataaagccaaagcccatgattgagataggaagtagacctatactttggcacataatgaagatatacagtttttatggtattaatgaattcataatatgttgtggatataagggctttcaaataaagcaatactttgccaactattggattaatgaaaatgatattacttgtcatattgatcagaaaaaaattgaaattcatgaaacaaaaactgaatcttggaaagttacacttatcgatacaggtgaatctactgaaactggtggccgattaaaaagaattgcaaaatatctcaatgacgaagatgtttgtatgacttatggtgatggtttatcagatgtgaatatctctgaacttattaaatttcactttgctcataatttaccggctactataacctctgttagacctcaagcaagattcggagcattaaaaattggggctgatggtactaccgtagaaaaattcaacgaaaaaccaattagtgaaggtgggagaataaatggaggattttttattttaaattcaagggtttttgatgaaatagattcagacgaaacaaaatgggagcaagagcctcttgttaaattggcacaacaaaagaaactaaaagcatttactcataatggattttggcatcctatggatacattaagagataagaattatctaaatacattatggaatgaaaatagagcaccttggaaaatatggtaa

SEQ ID NO: 31772 - protein, 257 aa, Prochlorococcus marinus str. MIT 9515
MKAIILAGGMGTRLSEETLIKPKPMIEIGSRPILWHIMKIYSFYGINEFIICCGYKGFQIKQYFANYWINENDITCHIDQKKIEIHETKTESWKVTLIDTGESTETGGRLKRIAKYLNDEDVCMTYGDGLSDVNISELIKFHFAHNLPATITSVRPQARFGALKIGADGTTVEKFNEKPISEGGRINGGFFILNSRVFDEIDSDETKWEQEPLVKLAQQKKLKAFTHNGFWHPMDTLRDKNYLNTLWNENRAPWKIW

SEQ ID NO: 31773 - DNA, 768 bp, Prochlorococcus marinus str. MIT 9303
  CDS (1)..(768): transl_table=11
atgaaggccgttattcttgctggtgggctcggtacgaggatttcagaggagactcacctcaagccaaagccgatgattgaggtcggaggccgcccaattctttggcatattctaaagatttattcgcagcatggcatcaatgatttcgtgatttgctgtggatacaaaggttatgtgattaaagaatactttgctaattactttcttcatagtagtgatgtcacctttgatatgagcacgaatcaaatggaagtgcatcagcagaatgctgagccttggaaagtcacccttgttgatactggagaatcaactctcaccggcggtcgtttgcgcagggttgcttcttatttagatggcggacctttttgctttacatacggtgatggagttgctgatgtggatttaacggccttgattgcatttcatcgcaatgagggtcgctgggccacacttaccgctgtgcagcctcctggtcgcttcggatcgcttgcttttgaaagggggcgggtgctggggtttgaggagaagccacagggtgatggatcttggattaatggtggcttttttgttctggagccagaggttttggacacgatcaatggcgacgaaagcgtgtgggagagggattgcttgccagctatcgcttctgcagaccaactcaatgcatttcagcaccatggcttctggcaacccatggataccctgcgcgatcgtcagctgcttgaagaactctggaaggatgatcgcgccccatggaaaacatggtga

SEQ ID NO: 31774 - protein, 255 aa, Prochlorococcus marinus str. MIT 9303
MKAVILAGGLGTRISEETHLKPKPMIEVGGRPILWHILKIYSQHGINDFVICCGYKGYVIKEYFANYFLHSSDVTFDMSTNQMEVHQQNAEPWKVTLVDTGESTLTGGRLRRVASYLDGGPFCFTYGDGVADVDLTALIAFHRNEGRWATLTAVQPPGRFGSLAFERGRVLGFEEKPQGDGSWINGGFFVLEPEVLDTINGDESVWERDCLPAIASADQLNAFQHHGFWQPMDTLRDRQLLEELWKDDRAPWKTW

SEQ ID NO: 31775 - DNA, 780 bp, Clostridium thermocellum ATCC 27405
  CDS (1)..(780): transl_table=11
ttgaaagttgtcatattggcaggaggaatgggaactcgcatcagtgaagaaagtcatttgaaaccaaagccaatgatagaaatcggagaagctcctattctatggcacatcatgaaatactattcatattatggctataatgattttatcatttgttgcggttacaaaggatttttaataaaggagtatttcgcaaactattatttgcatctatctgatgtcacctttgatttttcccggcaaaacaacatgattattcataataatattgccgaaccctggaaggttacgttggtagataccgggttatgtactcaaaccggagcccgtattaaaagaattcagaagtatattggaaatgaaagcttcatgcttacctacggagacgggctaagcgatgtgcctctcaatgaattggtaaactttcatagaaagcacggaaaagtattgaccatgactgcaatacaacccggcggacgattcggagtgctatcttttggagaggatgactatacaatcgagaagtttagtgaaaaagcaaaagaacacggcggttgggtcaacggcggattcatggtagcggaacctgagatttttgagtatttggattacagagatgatttggtatttgaacaggaaccaatgcataaactggcatccggcggacagttggcagcatacaagcactttggcttctggcaatgtatggataccatgagggataaaataatgttggaacgtttatggagctcaaattcagcaccgtggaaagtatggtaa

SEQ ID NO: 31776 - protein, 259 aa, Clostridium thermocellum ATCC 27405
MKVVILAGGMGTRISEESHLKPKPMIEIGEAPILWHIMKYYSYYGYNDFIICCGYKGFLIKEYFANYYLHLSDVTFDFSRQNNMIIHNNIAEPWKVTLVDTGLCTQTGARIKRIQKYIGNESFMLTYGDGLSDVPLNELVNFHRKHGKVLTMTAIQPGGRFGVLSFGEDDYTIEKFSEKAKEHGGWVNGGFMVAEPEIFEYLDYRDDLVFEQEPMHKLASGGQLAAYKHFGFWQCMDTMRDKIMLERLWSSNSAPWKVW

SEQ ID NO: 31777 - DNA, 762 bp, Herminiimonas arsenicoxydans
  CDS (1)..(762): transl_table=11
atgaaagttatcttacttgccggcggctttggtactcgattggcagaatacactgatgtaattccaaaaccgatggtgccgattggcggcaagccgattctttggcacatcatgcagacctatgcgcgatttggacacaaggatttttatgtggcattgggttacaaggccgaggtcattaaagagtactttcttaattatcgagcgctcaatgccgactttacgatagaccttgcttctggaggtgttacttcactacaggttgatccggtggactggcgggtgactttggtaaatacgggcgaggcatccatgacaggtggacgcgtcaagcgtatgcggtcattgatcggcaacgagacctgtatgctgacctatggtgatggcgtcgccgatattgatttggatgcattgctggcatttcatcggagccacggcaagatggttaccgtatctgctgttcgtccagcagcacgttttggggagctggatcttgatggcgcacgtgtcgagagctttcaggaaaaacctcagttgcaggagggttggattaatggtggttacttcatatttgaaccagcattctttgacatgatagcaggggatagtactttgctggaaagagaacctttggagcaggcaaccaaggctggtgagttgatggcttatcgccatgatggtttctggcattgcatggataccaagcgagatcatgagctgctggagtcactgtgggccaaaggtgctccttgggtgcgatag

SEQ ID NO: 31778 - protein, 253 aa, Herminiimonas arsenicoxydans
MKVILLAGGFGTRLAEYTDVIPKPMVPIGGKPILWHIMQTYARFGHKDFYVALGYKAEVIKEYFLNYRALNADFTIDLASGGVTSLQVDPVDWRVTLVNTGEASMTGGRVKRMRSLIGNETCMLTYGDGVADIDLDALLAFHRSHGKMVTVSAVRPAARFGELDLDGARVESFQEKPQLQEGWINGGYFIFEPAFFDMIAGDSTLLEREPLEQATKAGELMAYRHDGFWHCMDTKRDHELLESLWAKGAPWVR

SEQ ID NO: 31779 - DNA, 798 bp, Bradyrhizobium sp. ORS278
  CDS (1)..(798): transl_table=11
atgaaggtcgtcttgttctgtgggggactggggacgcggatccgggaatattccgagagcgttccgaagccgatgattccgatcggccaccagccgatcctttggcacgtgatgcagtattacagccagtacggccaccgcgacttcgtgctctgcctcggctacaaggccaacgtcgtcaaggactacttcctgaattacaatcaggccgctacgaccgactgcacgatctcgcaattcggcaagaagatcgagctcctgggcgagcgcccggccgactggcgggtgtcgctggtcgacactgggatctggcgcaacatcggtcagcgcctgagggccgtccggcatctcgtcgagggcgaggagatctttctcgccaattacagcgacggcctgaccgatgcgccgctgcccgacatgatcgaccgcttcaagcgcagcggcaagatcggctgcttcatcgccatccatccgccgatcagcttccatctggccgagttcgacgacgacggcacggtcggccgcatggccgcgagcaatgattccaacatctggatcaacggcggctacttcatcttccgcaaggagatcttcgattacatcgaggagggcgacgagctcgtggtgcagccgttcaagcggctgatcgatcgtggcctgctgatggcctatcgctacgaaggcttctggcgggccatggatacgctccgggaccgccaggtgctcgaggagatgatcgagcgcggcgatacgccctggcatctcggcgcgaaccttcccgccgtggtgaacggatga

SEQ ID NO: 31780 - protein, 265 aa, Bradyrhizobium sp. ORS278
MKVVLFCGGLGTRIREYSESVPKPMIPIGHQPILWHVMQYYSQYGHRDFVLCLGYKANVVKDYFLNYNQAATTDCTISQFGKKIELLGERPADWRVSLVDTGIWRNIGQRLRAVRHLVEGEEIFLANYSDGLTDAPLPDMIDRFKRSGKIGCFIAIHPPISFHLAEFDDDGTVGRMAASNDSNIWINGGYFIFRKEIFDYIEEGDELVVQPFKRLIDRGLLMAYRYEGFWRAMDTLRDRQVLEEMIERGDTPWHLGANLPAVVNG

SEQ ID NO: 31781 - DNA, 768 bp, Leptospira interrogans serovar Copenhageni str. Fiocruz L1-130
  CDS (1)..(768): transl_table=11
atgaaaactgtaatactctgtggaggactaggaactcgtttgagcgaggagactacggtgaaaccgaagccgatggtggaaattgccgggaagccaatactatggcatattatgaaaatttatgaatatcatggattcggaaagtttcttttagctttgggttataaaggagaagtgatcaaagattactttttaaactaccacgcgagaatgagcgacctcactgtaagtctaaaatccggtattatagaatattctaatccgacagcggaagattgggaagttgatttagtggatactggcgctttaactatgacggggggaaggttgttacgactcaaagaccagctttcaaaagaaactttcatggtcacctatggagatggtgttgcgaatgttgatataaagaaactcgtaagttttcacaaatctcacggaaaactggcgactgtaactgcggttcgtcctccggttcgatttggagagttatctatttctggagatcaagttattcagttccaagaaaaaccgcaagctgaagaaggttggattaatggaggcttttttgtttttgaaccggaagttctaaattacatccaagacgaatctacgatgttagaacggtctcctttagaaactcttgcaaaggctggtcaattgatggcgtttcatcacgccgggtattggcagtgtatggatactcttcgagataaacatactttggaagaactctggaaccaaaataaagcgccttggaaatttaattaa

SEQ ID NO: 31782 - protein, 255 aa, Leptospira interrogans serovar Copenhageni str. Fiocruz L1-130
MKTVILCGGLGTRLSEETTVKPKPMVEIAGKPILWHIMKIYEYHGFGKFLLALGYKGEVIKDYFLNYHARMSDLTVSLKSGIIEYSNPTAEDWEVDLVDTGALTMTGGRLLRLKDQLSKETFMVTYGDGVANVDIKKLVSFHKSHGKLATVTAVRPPVRFGELSISGDQVIQFQEKPQAEEGWINGGFFVFEPEVLNYIQDESTMLERSPLETLAKAGQLMAFHHAGYWQCMDTLRDKHTLEELWNQNKAPWKFN

SEQ ID NO: 31783 - DNA, 780 bp, Desulfovibrio vulgaris subsp. vulgaris str. Hildenborough
  CDS (1)..(780): transl_table=11
atgaaagtcatcatcatgtgcggcggcaagggaacccgcctccgcgaagagaccgagttcaaaccgaagcccatggtcgagattggcggtcgccccgtcctgtggcacatcatgaatatctacgcccgcgccgggtacaaggacttcgtcctgcccctcggctacaagggcgaggtcatcaagcaatatttctacgactaccggatgcgtaacagcgacttcaccgtcgacctcgccaccggtgacgtgcgcacccacgagacgggctgctgcaccgactggcgcgtgaccctgtccgacaccgggcaggagacgctgaagggcgcacgcatcaagcgcatcgccaagcacatcgacaccgaccgcttcatggtcacctacggcgacggcgtgtcggacatcgacatcgccaagctcgtggagttccacaagaagtccggcaagattggcacgttcacgggtgtgcgcatgccctcgcgcttcggcgcggtgcagaccgacgagaacggcaacatcctgtcgtggcaggagaagccggtactcaacgagtacatcaactgcggcttcttcgtgttcaagcgcgagtttctcgactacctcgatgaagaggagtcgtgcgacctcgagaagcagccgctggaacgtctggccgccgaagggcagctttcgatgtacccgcacgagggcttctggcagtgcatggacaccctgcgcgactaccagaagctgaacgccatgtgggacaagggcgacgcgccctgggcccgcgggtggaaatag

SEQ ID NO: 31784 - protein, 259 aa, Desulfovibrio vulgaris subsp. vulgaris str. Hildenborough
MKVIIMCGGKGTRLREETEFKPKPMVEIGGRPVLWHIMNIYARAGYKDFVLPLGYKGEVIKQYFYDYRMRNSDFTVDLATGDVRTHETGCCTDWRVTLSDTGQETLKGARIKRIAKHIDTDRFMVTYGDGVSDIDIAKLVEFHKKSGKIGTFTGVRMPSRFGAVQTDENGNILSWQEKPVLNEYINCGFFVFKREFLDYLDEEESCDLEKQPLERLAAEGQLSMYPHEGFWQCMDTLRDYQKLNAMWDKGDAPWARGWK

SEQ ID NO: 31785 - DNA, 774 bp, Erwinia carotovora subsp. atroseptica SCRI1043
  CDS (1)..(774): transl_table=11
atgaaagcggtgatacttgcaggtgggttaggtaccagactgagtgaagaaacggttactaaacctaagcccatggttgaaattggtgggaaacctattttatggcatatcatgaaaatgtattcttatcatggcataaatgaatttattatatgctgtgggtataagggatacgttattaaagagtattttgcgaattatttcctacacatgtctgatattaccttcaatatgaaggataatgaaatgacggtgcttcaaaaacgcgcagaaccttggaaagttacgcttgtagatacaggcgaacactccatgaccggaggtcgtctacgccgcgttgctgaatatgttaaagatgacgagtgtttttgctttacctacggcgacggtgtctgtgggatcgatattcaagatacgattgccttccataagcgtcatggcaaacttgccacattaactgcgacgttaccacctggtcgtttcggagctctggaattatctcagggacaggtgaaaagttttaaagaaaagccaaaaggcgatggcgccttgattaatggcggtttctttgttctgtcacctaaggtgttggatttgattgatggtgacagcagcgtttgggaacaatcaccgctgatgactctggccgcgcagggcgaattgatggcttatgagtacacgggtttctggcagccaatggatacgttgagagacaaaatgcttcttgatgaactttggcaaaatggtgaagctccttggaaaaaatgggagtaa

SEQ ID NO: 31786 - protein, 257 aa, Erwinia carotovora subsp. atroseptica SCRI1043
MKAVILAGGLGTRLSEETVTKPKPMVEIGGKPILWHIMKMYSYHGINEFIICCGYKGYVIKEYFANYFLHMSDITFNMKDNEMTVLQKRAEPWKVTLVDTGEHSMTGGRLRRVAEYVKDDECFCFTYGDGVCGIDIQDTIAFHKRHGKLATLTATLPPGRFGALELSQGQVKSFKEKPKGDGALINGGFFVLSPKVLDLIDGDSSVWEQSPLMTLAAQGELMAYEYTGFWQPMDTLRDKMLLDELWQNGEAPWKKWE

SEQ ID NO: 31787 - DNA, 786 bp, Yersinia pseudotuberculosis IP 32953
  CDS (1)..(786): transl_table=11
atggagattcaagtgaaagcagtcattttggccggaggccttggaacccgtcttagtgaagagaccgtagtaaaaccaaaaccaatggtagagattggtgggaagcctattctctggcatattatgaaactttactcttcttatggcatcaatgatttcgttatttgctgtggttataaaggctatgtcattaaagaatattttgcgaattactttatgcacatgtcggatattaccttctgcatgcgtgataatgaaatgatagtacaccaaaagcgagtcgaaccctggaatgtcacgttagtagacaccggcgaagattctatgaccggtggccgactgaggcgtgtaaaagattacgtcaaagacgatgaggctttctgtttcacctatggtgatggtgtgagtgacgtcaatattgctgaattaattgcattccataagagccacggcaagcaagccacattaacggcaacctatcccccaggccgttttggtgcgctggatattaaagataaacaagtacgtagttttaaagaaaaaccaaaaggcgatggcgcattgatcaacggcggttattttgttttgtcgcctaaagttatcgatctgatcgatggtgataagtctacttgggagcaggaacctttaatgacattagctgcgcagggggagttgatggcgtttgaacatgccggtttctggcagccaatggatacgttgcgtgacaagatttatctgcatgaactatgggaagaaggcagggcaccttggaaggtatgggaataa

SEQ ID NO: 31788 - protein, 261 aa, Yersinia pseudotuberculosis IP 32953
MEIQVKAVILAGGLGTRLSEETVVKPKPMVEIGGKPILWHIMKLYSSYGINDFVICCGYKGYVIKEYFANYFMHMSDITFCMRDNEMIVHQKRVEPWNVTLVDTGEDSMTGGRLRRVKDYVKDDEAFCFTYGDGVSDVNIAELIAFHKSHGKQATLTATYPPGRFGALDIKDKQVRSFKEKPKGDGALINGGYFVLSPKVIDLIDGDKSTWEQEPLMTLAAQGELMAFEHAGFWQPMDTLRDKIYLHELWEEGRAPWKVWE

SEQ ID NO: 31789 - DNA, 996 bp, Thermococcus kodakarensis KOD1
  CDS (1)..(996): transl_table=11
atgaaagccgtcataatggccggtggctacgccaccaggctctggccaatcacaaaagatgtccccaaggccctgctgccggtgggggacaggacgatacttgaccacatattggagaaggtcgcagaaaccggccttgaaacatatatctccaccaacaggttcttcgagagcagattcaggccctttgccgaaaaatggggtgtcaaactcatagttgaggacacactccacgaggaagagaagctcggaacgataggcgcgctgaagaagataatcgaagaaataggccttgacgattatttgatcatcgctggggacaacctcttctccttctcgctccaggacttcctcaagcgatacgatgaaaagcccctgatagcggtctatgacgttggtaacccagagctcgccaagaggtacggcgttgtgctcctagagggggacagggttgttgacttcgaggagaagccggctgtacctaagtccacgctgataagcaccggcgtctacgccctccccagggatgttatggctctcattgatgaataccttgcaaacggccacagagacgcaccgggctacttcctcagctggctcctgaagaagggaatcgagataagggcctaccgcttctcagagttttggtacgacattggttcagcagacagttatcttgaagccctcaagactctactcaaagagagccacatcgaggagatccagataagcccctactctaagataatcccacctgtggtcataaagagggggacgaagatactgggccgttccataatcgggccctacgcgtacattggggaggactgcgtcatagagaactcggacgtaagcgattcaatagtttttaggggcactatactcaagaacgcgacgatatggcgctcaataatagacgaaaagtgcgagataaggaacctcgagcttaagaagagcttggtcggaggacatgcgaagatacagaggggggattag

SEQ ID NO: 31790 - protein, 331 aa, Thermococcus kodakarensis KOD1
MKAVIMAGGYATRLWPITKDVPKALLPVGDRTILDHILEKVAETGLETYISTNRFFESRFRPFAEKWGVKLIVEDTLHEEEKLGTIGALKKIIEEIGLDDYLIIAGDNLFSFSLQDFLKRYDEKPLIAVYDVGNPELAKRYGVVLLEGDRVVDFEEKPAVPKSTLISTGVYALPRDVMALIDEYLANGHRDAPGYFLSWLLKKGIEIRAYRFSEFWYDIGSADSYLEALKTLLKESHIEEIQISPYSKIIPPVVIKRGTKILGRSIIGPYAYIGEDCVIENSDVSDSIVFRGTILKNATIWRSIIDEKCEIRNLELKKSLVGGHAKIQRGD

SEQ ID NO: 31791 - DNA, 777 bp, Bacteroides fragilis NCTC 9343
  CDS (1)..(777): transl_table=11
atgaaagctgtaattcttgccggtggctttggttctcgcttgagtgaagcaaccaatttgattcctaagccgatggtagaaattggtggtaaacccatcctttggcatataatgaaaatttatagtcattatggaatcaatgaatttgttatttgttgtggttataaacaatatgtaatcaaagaatactttgctaattactttagacacaattgcgatatgacagttgatttgtctaataatactacaactattcatgataatcattcagagaactggaaagtgactatggttgataccggtttaaatactatgactggtggtcgtatcaaacgagttcaaaaatatattggaaatgaacgctttttattaacttatggggatggggtggctgatctgaatataactgatacaattcagtcacacgaagctgcaggaggaatcctttctctaacagcttataaaccaggaggaaaatttggtgctctgcaaatagatttagctacggataaagtactttcttttcaagaaaaacctgacggagatcgtaactgggttaatgccggttactttgtttgcgaaccagaagtatttgactatataaaggacggtgattctacgatatttgaacgtcaaccattggagtctatctctaaagacggtaagatgcatgcttttagacatactggcttctggaagccaatggatacactcagagataatacagaattaaatgatatgtgggataatgggaaagctccctggaaagtatggtag

SEQ ID NO: 31792 - protein, 258 aa, Bacteroides fragilis NCTC 9343
MKAVILAGGFGSRLSEATNLIPKPMVEIGGKPILWHIMKIYSHYGINEFVICCGYKQYVIKEYFANYFRHNCDMTVDLSNNTTTIHDNHSENWKVTMVDTGLNTMTGGRIKRVQKYIGNERFLLTYGDGVADLNITDTIQSHEAAGGILSLTAYKPGGKFGALQIDLATDKVLSFQEKPDGDRNWVNAGYFVCEPEVFDYIKDGDSTIFERQPLESISKDGKMHAFRHTGFWKPMDTLRDNTELNDMWDNGKAPWKVW

SEQ ID NO: 31793 - DNA, 774 bp, Pseudomonas fluorescens Pf-5
  CDS (1)..(774): transl_table=11
atgaaagcagttattttggccggtggcctgggaactcgtttaagtgaagaaaccagtgtccgtccaaagcccatggtggaaattggtggaaaaccaattctttggcacatcatgaaaatgtactcatctcatggaatcaatgatttcatcatttgctgtggttataagggatatgtaatcaaggagtacttcgctaactattttctgcacatgtcagacatcaccttcaacatgcgtgacaacgcaatggaagtccacgacaaacgggccgagccctggaatgtgacgcttattgatacaggtgatgactccatgactggggggcgtctgcgtcgagtggctgattacgtaaaaaatgaagaatcgttctgcttcacttatggcgacggtgtcagcgatctggacatcagagcatcaattgactttcacaaaagacatggcaaggccgccaccttgactgcaaccttcccccctggtcgcttcggtgcgctggacataaaaaaaggccaggttcttaacttcaaggaaaaaccaaagggcgatggagccatgatcaatggtggcttctttatcctgacccctaaagtgctcgactacttgaccgatgacagcaccacttgggaacaagaacctcttatgaggcttgccgaagaaggcgagctgatggctttcgagcatcctggcttttggcaacccatggatactctgcgggacaagcacttgctggaagaactctggcagtcgggccaggccccatggaaaagttgggactga

SEQ ID NO: 31794 - protein, 257 aa, Pseudomonas fluorescens Pf-5
MKAVILAGGLGTRLSEETSVRPKPMVEIGGKPILWHIMKMYSSHGINDFIICCGYKGYVIKEYFANYFLHMSDITFNMRDNAMEVHDKRAEPWNVTLIDTGDDSMTGGRLRRVADYVKNEESFCFTYGDGVSDLDIRASIDFHKRHGKAATLTATFPPGRFGALDIKKGQVLNFKEKPKGDGAMINGGFFILTPKVLDYLTDDSTTWEQEPLMRLAEEGELMAFEHPGFWQPMDTLRDKHLLEELWQSGQAPWKSWD

SEQ ID NO: 31795 - DNA, 768 bp, Pseudomonas syringae pv. phaseolicola 1448A
  CDS (1)..(768): transl_table=11
atgaaagctgtaattttggccggtggcttgggaactcgcatcgcggaagagtcggacaccaaaccgaaaccaatggtagagataggcggcaagcccctgctttggcacatcatgcgctcatacgctaatcacggtatcaaggattttgtcatctgcctgggctacaaaggctatgtgatcaaggagtttttctccaactactacaatcacatgtcggacatgacgattgatcttgcaaccggggatcaaaagattctgaacagccaggccgaagactggcggattacgttagtcgataccggagctgaaaccatgaccggcgggcgcctcaagcgcgtggctccgtatctgaacaatgaaaccttttgcctcacgtatggcgatggcctttcagacattgatatcagtgcagaagttgcgtttcaccgtcagcatggaaaactggcgacggtggctgccgtgcagcctcctgggcgtttcggcgtgctcaacatagatgccgagaacaatgtgtccagcttttctgaaaagcctgccgatgaaattggctggatcaatggcggattcttcgtcctcgagccagaggtcatcaagtatatcgacggcgacagcatctcctgggaacgcgagccgctgactaatcttgccaaagacggcaacctctgcgcctttcagcatcatggcttctggcagccctgtgacaccttgcgcgacaagcgcgaactggaagcgttgtgggcgaccaacaatgccccttggcggatttga

SEQ ID NO: 31796 - protein, 255 aa, Pseudomonas syringae pv. phaseolicola 1448A
MKAVILAGGLGTRIAEESDTKPKPMVEIGGKPLLWHIMRSYANHGIKDFVICLGYKGYVIKEFFSNYYNHMSDMTIDLATGDQKILNSQAEDWRITLVDTGAETMTGGRLKRVAPYLNNETFCLTYGDGLSDIDISAEVAFHRQHGKLATVAAVQPPGRFGVLNIDAENNVSSFSEKPADEIGWINGGFFVLEPEVIKYIDGDSISWEREPLTNLAKDGNLCAFQHHGFWQPCDTLRDKRELEALWATNNAPWRI

SEQ ID NO: 31797 - DNA, 774 bp, Dechloromonas aromatica RCB
  CDS (1)..(774): transl_table=11
ttgaaagtagtcatactctgcggcggccttggaacccggttgtcggaagaaacccaggtccgtcccaagcccatggtcgacgttggcgaccgccccattctgtcgcacatcatgcagatctacagccggcacggcttcaatgaattcgtactcgcgctgggctacaagggtgaggtgatcaaggactatttcctcaattaccatgcccgccaaagcgaccttactatccagctcaaaagtggcaacgtggaatacacccgtcccaccgcggaagactggatggttaccctggtcgacaccgggcaggccacccagaccggcggtcggttgctgcgtctgcgcccgcaggtagagccgactggcactttcatgctgacctatggcgacggtgtggccaacatcaatgtcaaagacctgctggcgttccatcgctcccatggcaggctcgccacggtgaccgccgtgcgtccgccggctcgcttcggcgacttgcgcatcgaaaacgaacgcgtcatgcagttcgaggaaaagccccaagccggcgaaggctggatcaatggcggattcttcgtgttcgagccgtctgtattcgattatcttggcgacgactcgacgatcctggaaagatcgcccctggaaagactggccgccgatggtcagttgatggcataccgccattcgggctattggcagtccatggacacgctgcgcgacaagcatgcgctggaacagctatgggccagcggcaatgcaccctggagaagcgatcaatga

SEQ ID NO: 31798 - protein, 257 aa, Dechloromonas aromatica RCB
MKVVILCGGLGTRLSEETQVRPKPMVDVGDRPILSHIMQIYSRHGFNEFVLALGYKGEVIKDYFLNYHARQSDLTIQLKSGNVEYTRPTAEDWMVTLVDTGQATQTGGRLLRLRPQVEPTGTFMLTYGDGVANINVKDLLAFHRSHGRLATVTAVRPPARFGDLRIENERVMQFEEKPQAGEGWINGGFFVFEPSVFDYLGDDSTILERSPLERLAADGQLMAYRHSGYWQSMDTLRDKHALEQLWASGNAPWRSDQ

SEQ ID NO: 31799 - DNA, 759 bp, Thiobacillus denitrificans ATCC 25259
  CDS (1)..(759): transl_table=11
gtgatattggcaggcgggctgggaacccgtttaagcgaagaaacgggcgtgcgccccaagcctatggtcgaggtcggcggcaagccgatcctatggcacatcatgaagctgtattcgcactatgggatcgatgaattcatcgtctgcctaggctacaaaggctacatgatcaaggagtatttcgcgaactactttctccatatgtcggacatcactttcgacatgtccaggaacgagatgcaggtgcatcagaacaacgcggagccgtggcgggtgaccttggtggacacgggggacgtcacccaaacgggagggcggctccggcgcgtccgggaatatctgggggacgacgatttctgcatgacctacggcgatggcgtcggcgatgtggagatcgacaagctgatggcgtttcatcgcgcgcacggctgcctcgctacggtgactgccacgcagcctccgggccggttcggcgcgctcgatctcgatggcagcagcgtaatgagcttttgcgagaagccgcatggtgacggcagttggatcaacggcggcttcttcgtgctgtcgccgaaggtgatcgactatatcagcggcgattcgacgctctgggagcgggagccgctcgaaaggctggcgagcgagaagcagctccgggcttattttcatcacggcttctggcagccgatggacaccctgcgcgacaagcaacatttggaatcgctttggcaggagggcaaggcgccgtggaagatatggtga

SEQ ID NO: 31800 - protein, 252 aa, Thiobacillus denitrificans ATCC 25259
MILAGGLGTRLSEETGVRPKPMVEVGGKPILWHIMKLYSHYGIDEFIVCLGYKGYMIKEYFANYFLHMSDITFDMSRNEMQVHQNNAEPWRVTLVDTGDVTQTGGRLRRVREYLGDDDFCMTYGDGVGDVEIDKLMAFHRAHGCLATVTATQPPGRFGALDLDGSSVMSFCEKPHGDGSWINGGFFVLSPKVIDYISGDSTLWEREPLERLASEKQLRAYFHHGFWQPMDTLRDKQHLESLWQEGKAPWKIW

SEQ ID NO: 31801 - DNA, 774 bp, Anabaena variabilis ATCC 29413
  CDS (1)..(774): transl_table=11
atgaaagcggtgattttggctggagggcttggtacacgcctcagtgaagaaaccagtatcaagcctaagccgatggtagaaattggtggtaagccaattctttggcacatcatgaaaacttattctgcccacggcattaatgattttattatttgttgtggttacaaaggttacgtgattaaggagtattttgctaactacttcttacatatgtctgatgtaacttttgatatgcgttttaaccaaatgaatgtccattctggttacgctgaaccttggcgtgtcacattggtaaacacaggtgatcatactatgactggtggacgcttaaagcgtgtccgcgaacatctgggtaatgatactttttgttttacctatggtgacggtgtatgtgatattaatatcaccgaattaattaagtttcatcaagaacaaaagagtttagcaaccctgacagcagtccaaccagcagggcgtttcggcgcaatttctctgggatacgaacaaactaaaataactagtttccgggaaaagcccgaaggtgatggtgcttggattaacggtggttattttatcttagaaccagaagttatagatttaattgctgatgatgctaccgtttgggagaaagaaccactagaaaagttagcagatatggaagaattatctgcttttaaacacagtggtttttggcaaccaatggatacattgcgcgataaaaactatctagaggagttatggaagaataaccaagctccttggaaggtttggtaa

SEQ ID NO: 31802 - protein, 257 aa, Anabaena variabilis ATCC 29413
MKAVILAGGLGTRLSEETSIKPKPMVEIGGKPILWHIMKTYSAHGINDFIICCGYKGYVIKEYFANYFLHMSDVTFDMRFNQMNVHSGYAEPWRVTLVNTGDHTMTGGRLKRVREHLGNDTFCFTYGDGVCDINITELIKFHQEQKSLATLTAVQPAGRFGAISLGYEQTKITSFREKPEGDGAWINGGYFILEPEVIDLIADDATVWEKEPLEKLADMEELSAFKHSGFWQPMDTLRDKNYLEELWKNNQAPWKVW

SEQ ID NO: 31803 - DNA, 774 bp, Pseudomonas fluorescens PfO-1
  CDS (1)..(774): transl_table=11
atgaaggcagttattttggcgggtggcctgggcacgcgcatcagtgaagagtcgcacctcaagccgaaaccgatgatcgagatcggtggcaagccaattctctggcacatcatgaaacagtattccgcccacgggattcatgacttcgtgatttgccttggctacaagggctacgcgatcaaggacttcttcgccaactacttcctgcacacctccgacgtgacgttcgacatgcgtgaaaatcgcatggacgttcaccagaactacagcgaaccgtggcgcgtgacgctgatcgacaccggcgaggaaaccatgaccggtggtcgtctgcgccgcgccgcacgctatctggaaaacgaacaagccttctgcttcacctatggcgacggcgtctccgacctgaatatcagctcgctggtggatttccacctgactcacggcaagttggcgacagtcaccgccgtacaaccgccgggccgctatggcgcgctggatcgtgacggcgaccgggttctcggtttcacggaaaaaccgcgcggtgacggtggctggatcaacggtggtttctttgtgctctcgcccaaggttttgccgctgatcgaaggcgacgaaacctcgtgggagtccggcccgctcgacggtctggccgagcgcggcgagttgatggcgtaccagcacgaaggcttctggcagccaatggacaccttgcgtgacaagaaccacctcgaagccttgtggcagagcggggaggccccatggaagcaatgggactga

SEQ ID NO: 31804 - protein, 257 aa, Pseudomonas fluorescens PfO-1
MKAVILAGGLGTRISEESHLKPKPMIEIGGKPILWHIMKQYSAHGIHDFVICLGYKGYAIKDFFANYFLHTSDVTFDMRENRMDVHQNYSEPWRVTLIDTGEETMTGGRLRRAARYLENEQAFCFTYGDGVSDLNISSLVDFHLTHGKLATVTAVQPPGRYGALDRDGDRVLGFTEKPRGDGGWINGGFFVLSPKVLPLIEGDETSWESGPLDGLAERGELMAYQHEGFWQPMDTLRDKNHLEALWQSGEAPWKQWD

SEQ ID NO: 31805 - DNA, 774 bp, Rhodobacter sphaeroides 2.4.1
  CDS (1)..(774): transl_table=11
atgaaggccgtattgcttgcgggtggctatggaacgcggttgagcgaggagacgggcatcgtcccgaaacccctcgtcgagatcggcggtcggccgatcctgtggcacatcatgaagatctacgccgcgcacgggatcaccgatttcgtgatctgctgcggctacaagggtcacatgatcaaggattatttcctgagctacttccaccgcaacagcgacatcacgatcgacgtccgctcgaaccagatcgagctgcaccgtcccgtgtccgagccgtggcgcgtgacgatggtcgataccgggctcgagaccatgaccggcgggcggatcaagcgcatccgcgagcatatcggcgacgaaaccttctgcctgacctatggcgacggtgtctcggacatcgacatcggcagcctcgtggccttccacaaggagcagggcgtggcaggcaccgtcaccgccgtgcgactgcccggccgcttcggcgcgctcgacctgtcggaaggcacgcgggtcaaccggctgcgcgagaagagcatgatggacggccagaccatcaacggcggcttcttcgtcctcgaaccttcggtcttcgactatatcgacggcgatgccacggtctgggaggaagagccgctgcagggcctcgtccgcgacggccagctcgcggtctaccgccacgaaggcttctggcagaacatggacacgctgcgcgacaagacgctgctgcagggtctgtgggagaagggcaaggccccctggaagatctgggactga

SEQ ID NO: 31806 - protein, 257 aa, Rhodobacter sphaeroides 2.4.1
MKAVLLAGGYGTRLSEETGIVPKPLVEIGGRPILWHIMKIYAAHGITDFVICCGYKGHMIKDYFLSYFHRNSDITIDVRSNQIELHRPVSEPWRVTMVDTGLETMTGGRIKRIREHIGDETFCLTYGDGVSDIDIGSLVAFHKEQGVAGTVTAVRLPGRFGALDLSEGTRVNRLREKSMMDGQTINGGFFVLEPSVFDYIDGDATVWEEEPLQGLVRDGQLAVYRHEGFWQNMDTLRDKTLLQGLWEKGKAPWKIWD

SEQ ID NO: 31807 - DNA, 792 bp, Desulfovibrio desulfuricans G20
  CDS (1)..(792): transl_table=11
atgaaagtcatcatcatgtgcggcggcaaaggaacccgcctgcgcgaagaaacgggaacacgccccaagcccatgctggacatcggcggacgccccattctgtggcacatcatggatatatacgcccggcagggcttcaaggacttcatcctgccgctgggttacaaaggcgacatgatcaagcagtatttctgggaatacaaaatacgcaactccgatttcaccatagatcttgcctccggcaacatgaccacacacaacagctgccccaccgactggcgcgtaaccatgtgcgacaccggacaggacaccatgaagggcgcacgcatcagtcaggtggcgcgccacattgacacgcagcggttcatggtgacctacggcgacggtgtggctgacattgatctgcacgccctgctggatttccatatccgttcaggcaacacgggcacattcacgggagtgcgcatgccttcgcgcttcggggccgtacagactgacgagcagggcaacattctgtcatggcaggaaaaacctgtactcaacgaatacatcaactgcggctttttcgtctttgaacgcgagtttctgaactacctttccgatgatccgtcctgcgaccttgaaaaagaaccgcttgagcgtcttgccgcagaaggcagactgggcatgtacccccatgacggcttctggcattgcatggacaccctgcgcgactataacgacctgaacgccatgtggaacagcggcagcgcaccgtgggccgcaacagcaggaggctccgatgtttgctga

SEQ ID NO: 31808 - protein, 263 aa, Desulfovibrio desulfuricans G20
MKVIIMCGGKGTRLREETGTRPKPMLDIGGRPILWHIMDIYARQGFKDFILPLGYKGDMIKQYFWEYKIRNSDFTIDLASGNMTTHNSCPTDWRVTMCDTGQDTMKGARISQVARHIDTQRFMVTYGDGVADIDLHALLDFHIRSGNTGTFTGVRMPSRFGAVQTDEQGNILSWQEKPVLNEYINCGFFVFEREFLNYLSDDPSCDLEKEPLERLAAEGRLGMYPHDGFWHCMDTLRDYNDLNAMWNSGSAPWAATAGGSDVC

SEQ ID NO: 31809 - DNA, 774 bp, Synechococcus elongatus PCC 7942
  CDS (1)..(774): transl_table=11
atgaaagctgtaattttggcaggtggtcttggtacaagactaagtgaagagactcacctaagacctaagccaatggtagaagttggtggcaaaccaattctttggcatatccttaaaatctatagtcattttggcattcaggaatttattatttgctgtggttataagggctatttaattaaagattattttgccaactattttttgtataccagtgatgtaacatttcatatggatattgataaccatatggaagttcatcaccgaaaaagcgagccgtggaaagttacgcttgtagatactggcgagatgagtcagacaggagggcggttaggccgagttcgccattatctaaatgacgaaaccttctgttttacctatggagatggtgttgcagatgtcaatattcatgcacttgttcaacaccatcaaaaggcagaatgtcaggcaacactaactgctgtccagcctcctggccgttacggtgccctgagtctggaaggtgatacggtattgcagttccaagagaaacctgagggtgataacgcttggattaatggtggcttcttcgtacttgaacccaatgttttggacttgattgcagacgatagctgtagctgggagggagaaattttgcctcaacttgctgctgctggtcagctctctgcttatcggcaccgaggtttttggcagccaatggataccttgagagaccggactcgtttagaggagctatgggctaataatcaggccccctggaagctttgggaatga

SEQ ID NO: 31810 - protein, 257 aa, Synechococcus elongatus PCC 7942
MKAVILAGGLGTRLSEETHLRPKPMVEVGGKPILWHILKIYSHFGIQEFIICCGYKGYLIKDYFANYFLYTSDVTFHMDIDNHMEVHHRKSEPWKVTLVDTGEMSQTGGRLGRVRHYLNDETFCFTYGDGVADVNIHALVQHHQKAECQATLTAVQPPGRYGALSLEGDTVLQFQEKPEGDNAWINGGFFVLEPNVLDLIADDSCSWEGEILPQLAAAGQLSAYRHRGFWQPMDTLRDRTRLEELWANNQAPWKLWE

SEQ ID NO: 31811 - DNA, 777 bp, Burkholderia thailandensis E264
  CDS (1)..(777): transl_table=11
gtgaaggctgtgattctcgcaggcggattcggcacgcgattcaccgaagaaacgatttcccggccgaagccgatgatcgagatcggcggcaagccgattctctggcacatcctgaagctgtattcgcaccacggcatcaacgaattcatcatctgctgcggctaccggggctatgtcatcaaggagtacttcgcgaactacttcctgcacatgtcggacgtgacgttcgatgtgcagaagaacagcatggaagtccactatcgctattcggagccgtggcgcgtgacgctcgtcgacaccggcgaggcgacgatgacgggcgggcgaatccggcgcgtgcgccagtacgtggaaggcgacgacgtgttttgcctcacatacggagacgggctgtgcgacgtcgatctcggccgcctgatcgcgtttcaccgcgagcacggcggcaaggcgacgcttaccgcggtgcatccgccggcgcgattcggcgtgctcgatatcggtgccgatcggcaggtcgtcgatttcacggagaagccccggatcgacggcgggatgatcaacggcggattcttcgtgctgtccccgtcggtcatcgatctgatcgacggcgatgcgaccgtctgggaacgcgagcctctcgagcggctcgcgcgagccaacgaactcaaggcgtatccgcacgacggcttctggcaatgcatggacacgctgcgcgacaagctgctgctcgacagcatgtgggcgaccggcaccgcgccgtggaagaaatggagctga

SEQ ID NO: 31812 - protein, 258 aa, Burkholderia thailandensis E264
MKAVILAGGFGTRFTEETISRPKPMIEIGGKPILWHILKLYSHHGINEFIICCGYRGYVIKEYFANYFLHMSDVTFDVQKNSMEVHYRYSEPWRVTLVDTGEATMTGGRIRRVRQYVEGDDVFCLTYGDGLCDVDLGRLIAFHREHGGKATLTAVHPPARFGVLDIGADRQVVDFTEKPRIDGGMINGGFFVLSPSVIDLIDGDATVWEREPLERLARANELKAYPHDGFWQCMDTLRDKLLLDSMWATGTAPWKKWS

SEQ ID NO: 31813 - DNA, 789 bp, Syntrophus aciditrophicus SB
  CDS (1)..(789): transl_table=11
atgactgaaaacattcaaacagtcatcctttgcggcggtgtgggaacaaggcttcgcgaagaaacggagttccgtccgaaaccaatggtcaatatcggttcacatcccatcctctggcatatcatgaagtattattcacaattcggacataaggactttattcttgcccttgggtataaaggcgagatgatcaagaattatttctgtcattatgagctgatgaacaatgacgtcactatagagttggggcagcctgaaagaacctgtatccattatgcccacgatgaagccggctggaagataaccctggctgataccggcgagaaaacactcaaaggggcgcgcttgaaaaaggtggaaagatatatcaggggtgacatgttcatgatgacatacggtgacggcattgccgatgtggatataaacgaactgctggcattccataaagcgcatgggaaaatggcaaccgtcaccgggatcaatcctgcctcccgcttcggcgagcttaaaatagacggtgatcgtgtcgaggctttccgtgaaaagcctcggaatggaaatggcctgatcaatggaggattccttgtattcaacagggaaatcttcaattacctgaccacggatgattcctgcgatcttgaaatcggccctttggaacagattgccagggaggggcaactgatggtgtacaaacatagaggtttctgggcttgcatggataccctccgcgacatggaatatctcaacaggatatggaatgccggcgaggccaggtggaagatctggtaa

SEQ ID NO: 31814 - protein, 262 aa, Syntrophus aciditrophicus SB
MTENIQTVILCGGVGTRLREETEFRPKPMVNIGSHPILWHIMKYYSQFGHKDFILALGYKGEMIKNYFCHYELMNNDVTIELGQPERTCIHYAHDEAGWKITLADTGEKTLKGARLKKVERYIRGDMFMMTYGDGIADVDINELLAFHKAHGKMATVTGINPASRFGELKIDGDRVEAFREKPRNGNGLINGGFLVFNREIFNYLTTDDSCDLEIGPLEQIAREGQLMVYKHRGFWACMDTLRDMEYLNRIWNAGEARWKIW

SEQ ID NO: 31815 - DNA, 774 bp, Frankia sp. CcI3
  CDS (1)..(774): transl_table=11
atgaaggtcggtattcttgccggcggtctgggcagccggttggcggaggagacggtcatcaaacccaaaccgatgatcgagatcggcaaccggccgatcatctggcacatcatgaagtactacgctcacttccagttcaccgattttacgatcgccctggggtataaaggcgaatatatcaaacgctggctggtggactacgcggcgctgaccagcgatctcacggtgtcgcttcggcagagcgctgtggagcggcacgggggtacctcggaggattggcgggtaaatctggtcgacaccggtcagaataccgccaccggcggtcgtatcaggcgactcgcgccctggctcggtgacgcggggacgttcatgttgacctggggggacggcgtagcggacatcgatctcaacgcgttgcgcgacttccaccgctcgcatggcaggatcgccacgctgaccgccgtgcggccacccgcccggttcggtcacctcgagctggccggggaccagattgtggagttctcggagaaaccacaggccggtgagggctggatcaacggtgccttcttcgtcctggaaccgcaggtcttcgactacattgccggcgacgacacccagttcgagaaggagccccttgagaggctcgccaaggacggtcagctcatggcgtatcggcatggcggcttctggcagtgcatggacacggtacgcgaccgcaaactcctgcagtcactgtgggatggtggctgtgcgccctggaaggtatgggactga

SEQ ID NO: 31816 - protein, 257 aa, Frankia sp. CcI3
MKVGILAGGLGSRLAEETVIKPKPMIEIGNRPIIWHIMKYYAHFQFTDFTIALGYKGEYIKRWLVDYAALTSDLTVSLRQSAVERHGGTSEDWRVNLVDTGQNTATGGRIRRLAPWLGDAGTFMLTWGDGVADIDLNALRDFHRSHGRIATLTAVRPPARFGHLELAGDQIVEFSEKPQAGEGWINGAFFVLEPQVFDYIAGDDTQFEKEPLERLAKDGQLMAYRHGGFWQCMDTVRDRKLLQSLWDGGCAPWKVWD

SEQ ID NO: 31817 - DNA, 855 bp, Frankia sp. CcI3
  CDS (1)..(855): transl_table=11
atgagcacgggagacgcaacagccttgagcatcgagatcgcccagaccagcgagattcccgacgtggcggacatccccgtcgtgatcctgtgcggcgggatgggaacccggctgcgggaagccagcgagaaactacccaagccgctggtggacatcggcggcaagccggtgctgtggcacatcatgaagacctacgagcactatggcttccgtaagttcgtgctctgcctcggctacaagagcgatctgatcaagaactacttcctcgcctaccgtgcgcaggtcgccgacttcaccctcacgctctccgacgaccacaccccccagttccacaacaccgtgggcgacgaggcgtgggaggtgaccttcgccgagacgggcctactcaccggaaccggagcccggctgcgccgggtcgcccagtacctgaccggcccgcggttcatgctgacctacggcgacggcgtgggtgccgtcgatgtcggcgcggtgctcgccgaccacctggcgtcggggcggatcgggacggtcaccggcgtccggccgtcgagtcgctacggcgagctgaccacggacggcaacgccgtcaccctcttcgccgagaagccgccgcagaccggctgggtgagcgggggatacttcgtcttcgagcgcgagttcatcgacaagtacctcgacgacgacccggcgctgctgctggagcgtcacccgctgcagcagctggcccgggacagcgagctgaccctgcacactcacgacgggttctggatgggtatggacacgttccgcgactggaccgagctgaaccagctctgggattccggtgccgcgccctggcgtgtctgggccggctga

SEQ ID NO: 31818 - protein, 284 aa, Frankia sp. CcI3
MSTGDATALSIEIAQTSEIPDVADIPVVILCGGMGTRLREASEKLPKPLVDIGGKPVLWHIMKTYEHYGFRKFVLCLGYKSDLIKNYFLAYRAQVADFTLTLSDDHTPQFHNTVGDEAWEVTFAETGLLTGTGARLRRVAQYLTGPRFMLTYGDGVGAVDVGAVLADHLASGRIGTVTGVRPSSRYGELTTDGNAVTLFAEKPPQTGWVSGGYFVFEREFIDKYLDDDPALLLERHPLQQLARDSELTLHTHDGFWMGMDTFRDWTELNQLWDSGAAPWRVWAG

SEQ ID NO: 31819 - DNA, 774 bp, Methanococcoides burtonii DSM 6242
  CDS (1)..(774): transl_table=11
atgaaaaccgtaattttagcaggtggattgggtactcgtttagctgaatataccgatatcagacctaaaccaatggtagagattggaggacaacctatcctttggcatattatgaacctttatgcccattatggaaacaaggatttctttgttgcattgggatataaaggggaagttatcaaagagtatttcctaaattactattctctgaaatcagattttacagtaaacctaggaaatggtgatgtggattgtcttgagaaaaagactgtagactggaatgtcacattagtcgatacgggtttaaattcaatgaccggtggtagaataaaacgattaaaagaatacattgaagatgatacttttatggtaacatatggagatggggtttccaacgttaatatcgaaaaacttatagaattccataaaacccatggaaaaatggctaccgttacagctgtacacccttctgcaagatttggagaacttgttatctctgacaaaaacgaagtcatttcattcaaagaaaaaccacagacaaaccaaggatggataaatggagggttctttgtatttgaacccgagtttttggattatattggatcagattctactgttcttgaagaagatccactcgagaccattgcaaagaaaggggaattaatgtcataccgtcacgatggattctggcagtgcatggatactgtacgggatagaaatgtactggaagagctctggcaaagagaaaatgccccatggaaggtttggaagtaa

SEQ ID NO: 31820 - protein, 257 aa, Methanococcoides burtonii DSM 6242
MKTVILAGGLGTRLAEYTDIRPKPMVEIGGQPILWHIMNLYAHYGNKDFFVALGYKGEVIKEYFLNYYSLKSDFTVNLGNGDVDCLEKKTVDWNVTLVDTGLNSMTGGRIKRLKEYIEDDTFMVTYGDGVSNVNIEKLIEFHKTHGKMATVTAVHPSARFGELVISDKNEVISFKEKPQTNQGWINGGFFVFEPEFLDYIGSDSTVLEEDPLETIAKKGELMSYRHDGFWQCMDTVRDRNVLEELWQRENAPWKVWK

SEQ ID NO: 31821 - DNA, 777 bp, Acidobacteria bacterium Ellin345
  CDS (1)..(777): transl_table=11
atgaaagtggttgtgctttgcggcggacttggcacgcggttgcgcgaggaaaccgagtttcgccccaagccgatggtggagatcggcggccgtccgatcctgtggcacattatgaagggctatgccgcttcgggcttccgagagtttgtactctgcctgggttacaagggatcggcgatcaaagagtacttcctgaactacgaggcgatgaacaacgacttcacgatcaacctcgggcgccactccaaacttgagttcatgaacggccacgccgagcaggatttccaggtgacgctggccgacaccgggctgaacacgatgaccggtggccgggtgaagcggatccagaagtacatcaccgacgacaccttcatgatgacttatggcgacggtgtcgcggacgtgaacattcccaagctgctggagttccataaatcgcacggcaagctcgcgacggtgaccgcggtcaccccgaattcgcgctttggcattgtggacatgagcagcgaaggcaaagtgatgaagttcatcgagaagccgcgtaccgatgggcgggccaatgccgggttcttcgtcctgaaccgcaaggtcttcgactacatctccggcgacgattgcaccttcgagcgcgaaccgatggaacgtctggctgccgacggccagttgatggcgtacaagcacgacggcttcttctacgccatggacacctatcgcgaatacgagttcctgaacgacctgtgggccaaagggcaggcgccgtggaaggtttggcaatga

SEQ ID NO: 31822 - protein, 258 aa, Acidobacteria bacterium Ellin345
MKVVVLCGGLGTRLREETEFRPKPMVEIGGRPILWHIMKGYAASGFREFVLCLGYKGSAIKEYFLNYEAMNNDFTINLGRHSKLEFMNGHAEQDFQVTLADTGLNTMTGGRVKRIQKYITDDTFMMTYGDGVADVNIPKLLEFHKSHGKLATVTAVTPNSRFGIVDMSSEGKVMKFIEKPRTDGRANAGFFVLNRKVFDYISGDDCTFEREPMERLAADGQLMAYKHDGFFYAMDTYREYEFLNDLWAKGQAPWKVWQ

SEQ ID NO: 31823 - DNA, 777 bp, Trichodesmium erythraeum IMS101
  CDS (1)..(777): transl_table=11
atgaaagtagttattctagcgggtggtattggtactcgtctgagagaagaaactgaatatcgtcctaaaccattggtggaagtgggaggatatcccattatttggcacataatgaagctttatgcccattatggctttttagattttattatttgtttgggctataagggcaatttaattaaagattattttcttaattacgaagccataaataatgacttcactattaatttaggtcgttctcagaaaattacttatcacaaagcctataatgaacaggattttcgggttactttggtcaataccggtctggaaactatgacgggggggcgagtggttaaggtcaaaccatatattgatgaagatttatttatggtgacttatggggatggtctggcagatgttaatattagaaatttggtggaatttcacaagggtcatggaaaaatggctacgactactacggtgcaacccctttctcgttacggggttttagatgttgacagggaagctagggttttaaagtttggggagaagattaaagatgataaaatggtcagcgctggtttttttgtttttgaccgtcgggtttttgactatttatctggggataattgcgttttagaaaaagacccattagaaaagttggcgacagaaggtcaattaatgggttattatcattctggtttcttttacgccatggatacttttaaggaatatcaagagttaaataagatgtggaagttgggtcaagcgccttggaagatttgggaatga

SEQ ID NO: 31824 - protein, 258 aa, Trichodesmium erythraeum IMS101
MKVVILAGGIGTRLREETEYRPKPLVEVGGYPIIWHIMKLYAHYGFLDFIICLGYKGNLIKDYFLNYEAINNDFTINLGRSQKITYHKAYNEQDFRVTLVNTGLETMTGGRVVKVKPYIDEDLFMVTYGDGLADVNIRNLVEFHKGHGKMATTTTVQPLSRYGVLDVDREARVLKFGEKIKDDKMVSAGFFVFDRRVFDYLSGDNCVLEKDPLEKLATEGQLMGYYHSGFFYAMDTFKEYQELNKMWKLGQAPWKIWE

SEQ ID NO: 31825 - DNA, 774 bp, Rhizobium leguminosarum bv. viciae 3841
  CDS (1)..(774): transl_table=11
atgaaagtcgtaattctcgccggtggccttggctctcgtcttgccgaggagaccagtatccgacccaagcctctggtcgaaatcggcggcatgccgatcctctggcacatcatgagcatctacgcccatcacgggctcaatgatttcatcatctgcgccggctataagggctatttgatcaaggaatatttcgtaaaccttgttctgcaccacaacgacatcaccgtcgacctcgcctccaacagcatcaactaccacggcggcacacgaccgaactggcgcgtgaccgtggtcgataccggcatgtattcgatgaccggcggccgtctcgggcgcattcgcgaccatcttacgccaggcgaacccttctgcatgacctatggcgacggcgtcggcgacatcgatatcgccgccgaggtcgcgttccatcgcagccatggcctcaaggcgacgatgtgcgcggtaaccccgcccggacgttacggcgccactaatatcgaggggcagttcatcacctccttcgtggagaaaccgaggggtgacggccagcgtatcaatggcggcttcttcgtgctcgatccttcggtggtcgatctcattcccagcgacgacacgatctgggaagccgggccgctggaatggctcgccgccaacaaccagctcgccgccttcaagcatgacggtttctggcagccgatggacacgctgcgcgagcgcaaccagctcgaggagctctggagttccggaaaggcaccgtggaagctatgggcctga

SEQ ID NO: 31826 - protein, 257 aa, Rhizobium leguminosarum bv. viciae 3841
MKVVILAGGLGSRLAEETSIRPKPLVEIGGMPILWHIMSIYAHHGLNDFIICAGYKGYLIKEYFVNLVLHHNDITVDLASNSINYHGGTRPNWRVTVVDTGMYSMTGGRLGRIRDHLTPGEPFCMTYGDGVGDIDIAAEVAFHRSHGLKATMCAVTPPGRYGATNIEGQFITSFVEKPRGDGQRINGGFFVLDPSVVDLIPSDDTIWEAGPLEWLAANNQLAAFKHDGFWQPMDTLRERNQLEELWSSGKAPWKLWA

SEQ ID NO: 31827 - DNA, 777 bp, Solibacter usitatus Ellin6076
  CDS (1)..(777): transl_table=11
gtgaaagtcgtaatcctgtgcggtggtctgggtacgcgtttgcgtgaggagacggaatttcgccccaagcccatggtggaggtgggcggccgtcccatcctctggcacatcatgaagagttatgcccactatggccaccgggagttcgtcctctgcctcgggtaccgcggaaattccatcaaagagtatttcttgaattacgaggcgatgaacaacgacttctccatccaactcggggaaaagtcgcgcatccgctatcatggcttgcacgcggagcaggaattcaccgtcaccctggccgataccggcgccgattgcatgaccggcggccgcatccgcaaaatccagcgctacattgatgacgataccttcctgatgacctatggcgacggtctgatcgacgtcaacatcggcagcgtcgtggagtatcacaagagccacggccgcatcgccacggtgaccaccgtgcccccgatttcccgcttcggcgtcatcgatctcggcgagaacgattgcgtcagcagcttcaacgaaaagccaaaaaccgacggctggatgaacgccggttacttcgtgctcaacacttcggtcttcgactacctcggcggcgacgagtgcatctttgagcgcgaacccctggagcgcctcgcccgtgaccgccagctgatggcctaccgccacgacggatttttttacgccatggatactttccgcgaatatcagcaccttaacgaactctggagcaagggcgccgctccctggcgggtgtgggcgtga

SEQ ID NO: 31828 - protein, 258 aa, Solibacter usitatus Ellin6076
MKVVILCGGLGTRLREETEFRPKPMVEVGGRPILWHIMKSYAHYGHREFVLCLGYRGNSIKEYFLNYEAMNNDFSIQLGEKSRIRYHGLHAEQEFTVTLADTGADCMTGGRIRKIQRYIDDDTFLMTYGDGLIDVNIGSVVEYHKSHGRIATVTTVPPISRFGVIDLGENDCVSSFNEKPKTDGWMNAGYFVLNTSVFDYLGGDECIFEREPLERLARDRQLMAYRHDGFFYAMDTFREYQHLNELWSKGAAPWRVWA

SEQ ID NO: 31829 - DNA, 801 bp, Mycobacterium smegmatis str. MC2 155
  CDS (1)..(801): transl_table=11
atgaaggtcgttctgttctgcggtggatacggcatgcggatgcgcaacggtccgggtgatgccgtaccgaagccgatgcagatggtcggcccgcgaccgctcatctggcacgtgatgcgctactacgcacacttcggccacaaagagttcatcctgtgcctcggttacggtgccgaccacatcaagaactacttcctgacctaccaggaggccgcatcgaacgatttcgtgatgagcggtggtcaggtccaattgatgcattcggacatcagcgactggacgatctcgttcgtcgacacgggtctcgaatctccgatcggtgaacgtctgcgccgggtacgtgattatctcgacggcgacgagtacttcctggccaactatgccgatgtgctgacggacgccccgttggaccacatgatcgccgagttccacctatccggtgccgtcgcatcgatgatggtggtgcctcctcagtcgtcattccactgcgtcgaggtctccgaggcaggcgaggtcaaggagatcatcgcggtctctgaattgaccatctgggagaacggcgggtttttcgttctgtcccaggggattttcgatcttctgccgcccggcggcgacctcgtggcagatgtgtgcgggacgcttgccggacagggcaagctgttcggataccggtaccaaggtttctggaagcctgctgacaccttcaaggaacgcgctgaactcgaggcccggtatcacgacggtgaccgcccgtggatgctgtgggaaaagtcggtgcgcgcggtgcccgaggcatcatga

SEQ ID NO: 31830 - protein, 266 aa, Mycobacterium smegmatis str. MC2 155
MKVVLFCGGYGMRMRNGPGDAVPKPMQMVGPRPLIWHVMRYYAHFGHKEFILCLGYGADHIKNYFLTYQEAASNDFVMSGGQVQLMHSDISDWTISFVDTGLESPIGERLRRVRDYLDGDEYFLANYADVLTDAPLDHMIAEFHLSGAVASMMVVPPQSSFHCVEVSEAGEVKEIIAVSELTIWENGGFFVLSQGIFDLLPPGGDLVADVCGTLAGQGKLFGYRYQGFWKPADTFKERAELEARYHDGDRPWMLWEKSVRAVPEAS

SEQ ID NO: 31831 - DNA, 774 bp, Nostoc punctiforme PCC 73102
  CDS (1)..(774): transl_table=11
atgaaagcggtgattttggctggagggcttggtacacgcctcagtgaagaaactagtatcagacccaagccgatggttgagattggtggtaagccaattctctggcacataatgaagacttactccgcccacggcattaatgacttcataatttgttgcggttacaaaggttacataattaaggagtattttgctaactacttcttacacatgtcagatgttacctttgatatgcgattcaaccagatgaacgtgcattctggttatgcagaaccctggcgtgttaccttagtcaatacgggtgataataccatgacaggcggacgcttaaagcgaatcagggaacatcttggtaatgagaccttttgctttacttatggtgatggtgtaagtaatattaatatcaccgagctagtgaagtttcataaagagcaaaatacattaggaacactcacagcggttcaaccagccggacgttttggagccatttccttgggatatgagcaaactaaaattaccagctttcgggaaaaacctgaaggtgatggagcttggattaatggcggttattttgtgttagaaccagaagtaatcaatttgattgctgatgactctacagtatgggagcaagagccattagaaaagttagctgatatggaacaactatctgctttcaaacatgatggtttttggcaaccaatggatactttacgcgataaaaactatctagaggggctatggaaaagcagtcaggctccttggaaggcatggtaa

SEQ ID NO: 31832 - protein, 257 aa, Nostoc punctiforme PCC 73102
MKAVILAGGLGTRLSEETSIRPKPMVEIGGKPILWHIMKTYSAHGINDFIICCGYKGYIIKEYFANYFLHMSDVTFDMRFNQMNVHSGYAEPWRVTLVNTGDNTMTGGRLKRIREHLGNETFCFTYGDGVSNINITELVKFHKEQNTLGTLTAVQPAGRFGAISLGYEQTKITSFREKPEGDGAWINGGYFVLEPEVINLIADDSTVWEQEPLEKLADMEQLSAFKHDGFWQPMDTLRDKNYLEGLWKSSQAPWKAW

SEQ ID NO: 31833 - DNA, 792 bp, Fusobacterium nucleatum subsp. vincentii ATCC 49256
  CDS (1)..(792): transl_table=11
atgattaaggaggaactttttatgaaagttgtaatattagctggggggtttggaacaagaataagtgaggaatctcatctaaaaccaaaaccaatgatagaaataggggggaaaccaattttatggcatattatgaaattattttcatattatggatttaatgaatttattatttgttgtggatataaacaagaaataataaaaaaatatttcgcagattattatttgtataactctgatataacatttgatttcacagataaaaataataagatagtacatgcaaacgtagcagaaccatggaaagtaacattggtagatactggtttaaatacaatgacaggtggaagaattaaacgtataaaggattatgttggcaatgaaccattttttatgacatatggagatggagtttctgatattaatatcaaagaattattaaaattccatcaagctcatggaaagattgcaacattaacaggatataatccaggacaaagatttggagtattagatcttgatggaaacaaaataaaaagttttagagaaaaatcagacagtgatggtaatttaattaatgcaggatatatgctgttaaatccagaaatatttgattatattcaaggagattcaactatttttgaaagagaacctttagagaaggctgcagaagatgataatttattctgttataggcatagtggattttggcaatgtatggacacaaaaagagatatggatcatttgaatgaaatgtgggaaaagaaagaagctccatggaaggtatggtaa

SEQ ID NO: 31834 - protein, 263 aa, Fusobacterium nucleatum subsp. vincentii ATCC 49256
MIKEELFMKVVILAGGFGTRISEESHLKPKPMIEIGGKPILWHIMKLFSYYGFNEFIICCGYKQEIIKKYFADYYLYNSDITFDFTDKNNKIVHANVAEPWKVTLVDTGLNTMTGGRIKRIKDYVGNEPFFMTYGDGVSDINIKELLKFHQAHGKIATLTGYNPGQRFGVLDLDGNKIKSFREKSDSDGNLINAGYMLLNPEIFDYIQGDSTIFEREPLEKAAEDDNLFCYRHSGFWQCMDTKRDMDHLNEMWEKKEAPWKVW

SEQ ID NO: 31835 - DNA, 768 bp, Bacillus cereus G9241
  CDS (1)..(768): transl_table=11
atgaaagctgttattcttgctggtggatatgggacaaggattggggaagaaacacatttaaaaccgaaacctatgattgaaattggaacaaagcctattttatggcacattatgagtttgtatagccattacggcattacagagtttattatttgcttagggtataaaggatatgcaattaaagagttctttctaaattacaacttacacatgtcagatttcacgatacatttaaaggataatacaattactagccattctcatcgtgtagaaccgtggaaagttacactaatcgatactggtgtaaatacagaaacgggaggacgagtgaaaaaaattcaaaattttgttggagacgaacctttctgcctcacttatggcgatggattaagtaacgtaaatataaaagaacttattgcatttcataaaaagcatggaaaaatggcaactgttaccgccgtacaacctcctggtagattcggttctctcatattagataaacagtctgtaacatcctttcaagagaagccacttggggatggcggatgggttaacggtggatttttcgttttaaatcctgaagttttcaattacattagtggagataagtctgtttttgaaacagacactttagttcagttagtaaacaaaaatgaactatcagcatatcaacatactggtttttggcatccgatggatacattgcgcgataaaaataaattagtcgagctatgggaaagtaataacgctccgtggaaggtttggtaa

SEQ ID NO: 31836 - protein, 255 aa, Bacillus cereus G9241
MKAVILAGGYGTRIGEETHLKPKPMIEIGTKPILWHIMSLYSHYGITEFIICLGYKGYAIKEFFLNYNLHMSDFTIHLKDNTITSHSHRVEPWKVTLIDTGVNTETGGRVKKIQNFVGDEPFCLTYGDGLSNVNIKELIAFHKKHGKMATVTAVQPPGRFGSLILDKQSVTSFQEKPLGDGGWVNGGFFVLNPEVFNYISGDKSVFETDTLVQLVNKNELSAYQHTGFWHPMDTLRDKNKLVELWESNNAPWKVW

SEQ ID NO: 31837 - DNA, 762 bp, Prochlorococcus marinus str. MIT 9211
  CDS (1)..(762): transl_table=11
atgaaagtagtaattttagcaggcggttatggcactaggctctccgaatatactgctgttataccaaaacctatgatcagaattggtgataagccaattattgaacatataatgaatatatactcaaaatatggcttgaatgatttctatctagctctgggttataaagctgagatcataaaagattatttttataactaccaaatcctagactctgactttaaagttgatcttgctagtggagctgtagtcccttaccaaaggcattcaccaaattggtcagtcagcctaatagacactggtaaagacacaatgactggggggagagtcttaaggctaaagaagtatattaataacgagacatttttattaacttatggcgatgctgtaagcgatatagatatcaatgaaacaataaaatttcataagtcacatggcaggttggttactgtcacaggggtgaggccgacagctaggtttggagaactaaatatatcaaaaacaaatcaagttactagctttagggaaaagcctcaacttgaagaaggatggattaacggtggattttttgtaatagaacctgagttcctggattatatttcaggagattcaacaatcctagagaaagaaccattagaaagagctgcaaaagactcgcagttgatggcttacttacatcaaggctactggcaatgcgtagatacaaaaagagataaggatatgcttgataagttaataagtgaaggttctaaaatatggtaa

SEQ ID NO: 31838 - protein, 253 aa, Prochlorococcus marinus str. MIT 9211
MKVVILAGGYGTRLSEYTAVIPKPMIRIGDKPIIEHIMNIYSKYGLNDFYLALGYKAEIIKDYFYNYQILDSDFKVDLASGAVVPYQRHSPNWSVSLIDTGKDTMTGGRVLRLKKYINNETFLLTYGDAVSDIDINETIKFHKSHGRLVTVTGVRPTARFGELNISKTNQVTSFREKPQLEEGWINGGFFVIEPEFLDYISGDSTILEKEPLERAAKDSQLMAYLHQGYWQCVDTKRDKDMLDKLISEGSKIW

SEQ ID NO: 31839 - DNA, 777 bp, Desulfitobacterium hafniense DCB-2
  CDS (1)..(777): transl_table=11
atgaaggttgttattcttgccggtggatatgggacccgcattagtgaggagtctcatctaaaacccaagcccatgattgagattggagaacgtcctatcttatggcatattatgaaactatattcccgctatcggtttaacgattttgttatctgcttaggttataaagggcatatgattaaagagtattttgctaactattttttacatggttcggatgttacgtttgatttggccaacaataccacctgcactcattccagtgccgaagtggaaccgtggaaggtcacactggctaataccggcctggatacccagaccggcggccggcttaaacggattaagaaatatattggcgaagagacatttctgtttacctatggtgatggagtcgctgatattaatatcgaggaactggttgctttccataaatcccacggcaagctggccacggtgacggctgttcagcccagcggccggtatggggtactggggctgaatgaggatgccagtgttctggagtttatcgaaaagcccaagaccttggatgcctggattaacggtggttttttcgtcttagagccggaagtctttgactatattgacggtgatgggactgcttttgaaggggaaccccttaccaaactggccgaagccgggcaaattatggcctaccatcatagtggcttttggcggtgtatggatacgcaaagagatagggttatcctggaaaatttatgggcgagcggtcaagcgccttggaaggtatggatgtag

SEQ ID NO: 31840 - protein, 258 aa, Desulfitobacterium hafniense DCB-2
MKVVILAGGYGTRISEESHLKPKPMIEIGERPILWHIMKLYSRYRFNDFVICLGYKGHMIKEYFANYFLHGSDVTFDLANNTTCTHSSAEVEPWKVTLANTGLDTQTGGRLKRIKKYIGEETFLFTYGDGVADINIEELVAFHKSHGKLATVTAVQPSGRYGVLGLNEDASVLEFIEKPKTLDAWINGGFFVLEPEVFDYIDGDGTAFEGEPLTKLAEAGQIMAYHHSGFWRCMDTQRDRVILENLWASGQAPWKVWM

SEQ ID NO: 31841 - DNA, 777 bp, Candidatus Desulfococcus oleovorans Hxd3
  CDS (1)..(777): transl_table=11
atgaaagttctggttcttgcgggcgggctgggcacccgtatcagtgaagagaccgatgtccggcccaagcccatggtggagatcggcggcaaacccatcctgtggcatatcatgaaaatctattcccattacggtttcaatgattttctggtgctgctcgggtacaggggatatgtgatcaaggaatattttgccaactattttcttcaccaaagcgacgtcacctttgacctgaaaaacaaccggatggagattcacaacaatgcctgtgaaccctggaaggtaacccttctggataccggcaccaacaccatgaccggtggccgaatcctgcgggcaaaaacctttgtcgaaaacgaaccctttatgctgacatacggagacggcgtggccgacattgatcttcatgctttagtaaattttcatcaatcgcatgggaaagccctgaccatgacatcggttcaaccggaagggcgattcggggctgtagattccgatgacaacgggctgattgaggagttccacgaaaagcccagaggagacggggcctggatcaacggcgggttctttgtctgccagccaaaagtgttggattacatcaaagacggggacaaaagcgtgtttgaacgtgcgccccttgaaactctggcaaaagaccggcagctgtatgcttataaacaccatggattctggaaatgcatggatacgcttcgcgacaagatatatctgaaccagttatgggaaaacaatcaggccgaatggaagacctggaaatga

SEQ ID NO: 31842 - protein, 258 aa, Candidatus Desulfococcus oleovorans Hxd3
MKVLVLAGGLGTRISEETDVRPKPMVEIGGKPILWHIMKIYSHYGFNDFLVLLGYRGYVIKEYFANYFLHQSDVTFDLKNNRMEIHNNACEPWKVTLLDTGTNTMTGGRILRAKTFVENEPFMLTYGDGVADIDLHALVNFHQSHGKALTMTSVQPEGRFGAVDSDDNGLIEEFHEKPRGDGAWINGGFFVCQPKVLDYIKDGDKSVFERAPLETLAKDRQLYAYKHHGFWKCMDTLRDKIYLNQLWENNQAEWKTWK

SEQ ID NO: 31843 - DNA, 1086 bp, Malpighia glabra
  CDS (1)..(1086)
atgaaggcattgattcttgttggtggatttggaacacgtttgaggccgctgactctcagctttccaaagccacttgttgagttcgctaacaaaccaatgatcctgcatcagatagaggctcttaaggcgattggggtaactgaagtagttttggctattaattatcaaccagaggtgatgttgaacttcttgaaggactttgagaaaaagcttgatattaagatcacatgctcacaagaaactgaaccccttggcactgctggacctttagctcttgccagggacaaactgattgatgaatcgggagagccatttttcgtcctgaacagtgatgttatcagcgagtacccactcaaggaaatgattgaattccataaaaaccatggaggagaagcttccataatggttaccaaggttgatgagccatcaaaatatggtgttgtggttatggaagagtctactgggagagttgagagattcgttgaaaaaccaaaaatttttgtgggcaacaagataaatgctgggatttatctgttgaacccctctgttcttgatcgaattgaactcaggcctacctcaattgagaaagaggttttcccaaaaattgctgcagataatagcctttacgcaatggtccttccagggttctggatggatattggacaaccaaaagattacatcactggcctgagactgtatctggattctctacggaagaagtcctcaactaagttggctacgggttccaacgtcgtggggaacgttttggttgatgagacagctaagattggagagggatgcttgattggacctgatgttgcaatcggtccaggctgtgttgtcgagtcgggagttagactctctcgctgcactgtgatgcgtggagtccgcatcaagaagcatgcttgcgtatctagcagcatcatcggttggcattccacagttggccaatgggcacgtgttgaaaacatgaccatcctcggagaagacgttcacctctgcgacgaagtctacagcaatggaggagtggtcttgccacacaaagagatcaagtcgagcatcataaagccggagatagtcatgtga

SEQ ID NO: 31844 - protein, 361 aa, Malpighia glabra
MKALILVGGFGTRLRPLTLSFPKPLVEFANKPMILHQIEALKAIGVTEVVLAINYQPEVMLNFLKDFEKKLDIKITCSQETEPLGTAGPLALARDKLIDESGEPFFVLNSDVISEYPLKEMIEFHKNHGGEASIMVTKVDEPSKYGVVVMEESTGRVERFVEKPKIFVGNKINAGIYLLNPSVLDRIELRPTSIEKEVFPKIAADNSLYAMVLPGFWMDIGQPKDYITGLRLYLDSLRKKSSTKLATGSNVVGNVLVDETAKIGEGCLIGPDVAIGPGCVVESGVRLSRCTVMRGVRIKKHACVSSSIIGWHSTVGQWARVENMTILGEDVHLCDEVYSNGGVVLPHKEIKSSIIKPEIVM

SEQ ID NO: 31845 - DNA, 1086 bp, Pinus taeda
  CDS (1)..(1086)
atgaaggccctcatattggtcggtggtttcggaaccaggctgcgccctttgacactaagtgtccctaagcctctggttgactttgcaaataagccaatgattttgcatcagattgaagcactcaaagccatcggcgttgatgaagttgtgctagctattaactatcagcctgaggttatgctgagcttcttgaaggcgtttgaaacgaaacttgggattaagattacctgttctcaggaaacagagcccatgggcactgctgggcctttagctcttgcaagggacaaactgatagatggatctggggagccattttttgttctcaacagtgatgtcatcagtgaatacccattaaagcaaatggttgatttccatacaaaacatggaggagaggcatccatcatggtgaccaaggttgatgaaccatcaaagtatggtgttgttattcttgacgaggagacgggaaaggtagagaagttcgttgagaaacccaaggtctttgttggtaacaagatcaatgcaggaatctaccttctgaaccccagtgttttggaccgaattgagctgaaacccacatccattgaaaaagaagtgttcccaaaaattgcacaagagaaacagctctatgctatggttttacctggtttctggatggatattgggcaacccagagactatatttcaggcctaaggctctacttagattctcttcgaagaaacacctcggacaaattagcaactggggttaacattgttggaaatgtgattgttgacagcactgcacagatcggtgagggttgcttgattgggccagatgtggccattggcccaggttgtgtgattgaggcaggagtcagactgtcacggtgcaccattatgcgtggagtgcgcatcaagaaacacgcttgtgtgtctggaagtatcattggttggcactctactgttggtcaatgggctcgcgttgaaaacatgacaatattgggggaggatgtccatgtttctgatgaggtatacaccaatggaggtgtggtccttcctcataaagaaatcaaatccagcattctcaagccagaaattgtcatgtga

SEQ ID NO: 31846 - protein, 361 aa, Pinus taeda
MKALILVGGFGTRLRPLTLSVPKPLVDFANKPMILHQIEALKAIGVDEVVLAINYQPEVMLSFLKAFETKLGIKITCSQETEPMGTAGPLALARDKLIDGSGEPFFVLNSDVISEYPLKQMVDFHTKHGGEASIMVTKVDEPSKYGVVILDEETGKVEKFVEKPKVFVGNKINAGIYLLNPSVLDRIELKPTSIEKEVFPKIAQEKQLYAMVLPGFWMDIGQPRDYISGLRLYLDSLRRNTSDKLATGVNIVGNVIVDSTAQIGEGCLIGPDVAIGPGCVIEAGVRLSRCTIMRGVRIKKHACVSGSIIGWHSTVGQWARVENMTILGEDVHVSDEVYTNGGVVLPHKEIKSSILKPEIVM

SEQ ID NO: 31847 - DNA, 1086 bp, Pinus taeda
  CDS (1)..(1086)
atgaaggcactcattttggttggtgggttcgggacccgtctgcgtcccctcactctcagcgttcccaagcccctcgtcgacttcgctaataagcctatgattttgcatcagatcgaagctctgaaagcaattggagttgatgaagttgttttggccattaattaccagcctgaggtgatgctgagctttttgaaggagtttgaagcaaaggttgggattaagatcacatgctcacaggagactgaaccaatgggcaccgctgggcctttggcccttgccagggacaagctggatgatgggtctgctgagcccttctttgtactcaacagtgatgtcatctgtgagtaccctttgaagcagatgcttgaatttcacaaaaagcatgggggagaggcctcaattatggtcacgaaggtggatgagccatcaaagtatggtgtggttattcttgatgaagaaactggtcgagtagacagatttgtggagaagcctaagatctttgttggaaacaagatcaatgcagggatttatcttctgaatcccagtgttctgaatatgattgagctgagacccacttcaattgaaaaagaggtattcccaaaaatagccacaaagaagcagctctattccatgatattgcccggattctggatggatatagggcaaccaaaggattatatttcaggactaaggctttacttagactccctgagaagaaatttacccaagaaattgtcatttggtgctcacattattggaaatgtgatagtagatgagactgctcagattggggaagggtgcttaattgggccagatgttgcaatcggtcctgggtgcgtgattgaggcaggggtgaggttgtctcgctgcacggtcatgaggggagttaggattaaaaagcatgcttgtgtttctgggagcatcattggttggcattgtactgttgggcaatgggccagagtggaaaacatgaccgttctaggggaggatgtgcatgtttgtgatgaggtatatagcaatgggggtgtggtgcttccccataaggaaatcaaatccagcatcaccaagccagaaattgtcatgtga

SEQ ID NO: 31848 - protein, 361 aa, Pinus taeda
MKALILVGGFGTRLRPLTLSVPKPLVDFANKPMILHQIEALKAIGVDEVVLAINYQPEVMLSFLKEFEAKVGIKITCSQETEPMGTAGPLALARDKLDDGSAEPFFVLNSDVICEYPLKQMLEFHKKHGGEASIMVTKVDEPSKYGVVILDEETGRVDRFVEKPKIFVGNKINAGIYLLNPSVLNMIELRPTSIEKEVFPKIATKKQLYSMILPGFWMDIGQPKDYISGLRLYLDSLRRNLPKKLSFGAHIIGNVIVDETAQIGEGCLIGPDVAIGPGCVIEAGVRLSRCTVMRGVRIKKHACVSGSIIGWHCTVGQWARVENMTVLGEDVHVCDEVYSNGGVVLPHKEIKSSITKPEIVM

SEQ ID NO: 31849 - DNA, 837 bp, Vibrio anguillarum
  CDS (1)..(837): transl_table=11
atgcatttttctcagatgcattcacacccgcaaagtagtttaatagttagttggagtcatataatgaaagtagtcattttagctggtggtttaggtacacgcttaagtgaagagacatcagtgaaaccaaagccaatggttgaaattggtggtaagcccatcttatggcatatcatgaagcaatattctgctcacggtattaacgatttcattatttgttgtggttataaggggtatatcattaaggagtattttgctaattatttcttacatatgtctgatgttacctttgacatgaaagaaaataaaatggaagtgcatcataagagagcagaaccttggaccgtaacattagttgatactggtgataactcaatgactggtggccggttagctcgtgttgctgattatgtaaaagatgaggaagctttctgttttacttatggtgatggcgtcagtgatatagatattactaagtcaatagagtttcaccaagcgcatggtaaacaagctacattgacagcaacatttccgccaggtcgttttggagctctagatattacttcaggtaaggtggataactttaaagaaaagcctcgtggtgatggtgctatgattaatggcggtttttttgttctttcgccaagagtattgcagcttatcgacagtgatagttgcatttgggaacagtaccctctgaatagattagcagatgatggtgagttaatggcctatgagcacaatggtttttggcaaccaatggatacattgcgagataagctatacctagatgaattatggcaagctggtaaagcgccttggaaaatttgggagtaa

SEQ ID NO: 31850 - protein, 278 aa, Vibrio anguillarum
MHFSQMHSHPQSSLIVSWSHIMKVVILAGGLGTRLSEETSVKPKPMVEIGGKPILWHIMKQYSAHGINDFIICCGYKGYIIKEYFANYFLHMSDVTFDMKENKMEVHHKRAEPWTVTLVDTGDNSMTGGRLARVADYVKDEEAFCFTYGDGVSDIDITKSIEFHQAHGKQATLTATFPPGRFGALDITSGKVDNFKEKPRGDGAMINGGFFVLSPRVLQLIDSDSCIWEQYPLNRLADDGELMAYEHNGFWQPMDTLRDKLYLDELWQAGKAPWKIWE

SEQ ID NO: 31851 - DNA, 777 bp, Spirochaeta aurantia
  CDS (1)..(777): transl_table=11
atgaaagtagttcttctggccggcggttacgggactcgactcgcagaggaaaccgacatcaagcccaagcccatggtggacatcggtggccgaccgatcctttggcacatcatgaagctctacagccactttggtttcaacgacttcattgtttgtctcggttacaagggctacgtcatcaaggagtacttcgccaactacttccttcacatggccgacgtcaccttcgacatgtccacgaacgtgatgacggtccaccggcagaaggccgaaccttggaaggtgactcttgtcgatacggggcccaacaccatgaccggaggacgaatcaagcgggtccgagattatgtgggtaacgagactttcatggtgacctacggtgatggtctttccagtcagaacttgaacgagctggtggcgttccatcaaagtgaaggtcggttcgggaccatgacgacggtgcaaccttctggccgcttcggcgccgtcgacatcggcgagtcgaacagaattaacgcgttcatcgagaaaccccggggcgacggcgcttggatcaacgcggggttcttcgtcttcgagccccaaatattcgactacatcgacggcgattcgaccattctggagcgcgatcccttagaacggctcgcccgagatgggcagctttcggctttcaagcacacggggttctggaagcccatggacactctgcgcgagaagcacgagttcgaagagctctggcgcgacggcaaggcgccctggaggctgtggaatgactga

SEQ ID NO: 31852 - protein, 258 aa, Spirochaeta aurantia
MKVVLLAGGYGTRLAEETDIKPKPMVDIGGRPILWHIMKLYSHFGFNDFIVCLGYKGYVIKEYFANYFLHMADVTFDMSTNVMTVHRQKAEPWKVTLVDTGPNTMTGGRIKRVRDYVGNETFMVTYGDGLSSQNLNELVAFHQSEGRFGTMTTVQPSGRFGAVDIGESNRINAFIEKPRGDGAWINAGFFVFEPQIFDYIDGDSTILERDPLERLARDGQLSAFKHTGFWKPMDTLREKHEFEELWRDGKAPWRLWND

SEQ ID NO: 31853 - DNA, 1086 bp, Solanum lycopersicum
  CDS (1)..(1086)
atgaaggcacttatccttgttggagggttcggtactcggctcaggccactcaccctcagcgtcccaaagccacttgtcgaatttgctaacaaacctatgattttgcatcagatcgaggctctcaaggctgttggagtaaccgaagttgtactggctattaactaccaacctgaggtgatgctgaacttcttgaaagaatttgaggcaagccttggaatcaagatcacctgttctcaagaaactgaaccacttggcactgctggtcctcttgctttggctagagataagctgatagatgactctggtgaaccattttttgttcttaacagtgatgttatcagtgaatatccatttaaggagatgattcaattccacaaatcccatggtggtgaggcttctttgatggtgaccaacctggatgagccttctaaatatggtgttgtcgtcatggaagaatccacagggcaagtagagagatttgtggagaagccaaagttatttgttggcaacaagatcaacgctggattttacctactgaacccttctgtcctagacagaattcaattacccccaacatctattgagaaagaggtttttccgaaaattgcagcagagaagaaactgtatgcaatggtgctacctggattttggatggacgttggccaaccaagagattacattactggcctcagactctatctggattctttaaagaaacactcttcacctaaattggcttcaggaccacacattgtcggaaatgtcatagtggatgaatctgctaagatcggagagggttgtttgataggaccagatgttgcaattggttctggttgtgtgattgagtctggagttagactctcccgttgcactgtgatgcgaggagtccgcatcaagaaacatgcatgcatctcaggtagcatcattggttggcactctactgttggacaatgggctcgtgttgagaacatgaccattctcggagaagatgttcatgtttgtgatgaaatttacagcaatggtggtgtagttttgccccacaaggagatcaaatccagcatattgaaacctgaaatcgtgatgtga

SEQ ID NO: 31854 - protein, 361 aa, Solanum lycopersicum
MKALILVGGFGTRLRPLTLSVPKPLVEFANKPMILHQIEALKAVGVTEVVLAINYQPEVMLNFLKEFEASLGIKITCSQETEPLGTAGPLALARDKLIDDSGEPFFVLNSDVISEYPFKEMIQFHKSHGGEASLMVTNLDEPSKYGVVVMEESTGQVERFVEKPKLFVGNKINAGFYLLNPSVLDRIQLPPTSIEKEVFPKIAAEKKLYAMVLPGFWMDVGQPRDYITGLRLYLDSLKKHSSPKLASGPHIVGNVIVDESAKIGEGCLIGPDVAIGSGCVIESGVRLSRCTVMRGVRIKKHACISGSIIGWHSTVGQWARVENMTILGEDVHVCDEIYSNGGVVLPHKEIKSSILKPEIVM

SEQ ID NO: 31855 - DNA, 900 bp, Streptomyces glaucescens
  CDS (1)..(900): transl_table=11
atgacagtggactcggacattccggtggtgctcctgtgcgggggctacggcacccggatcagggaggcgagcgaacggctgcccaaggccatggtggacatcgggggccggcccatcctgtggcacatcatgaagatctacagccactacggcttccgccggttcgtgctgtgcctcggctacaagggctgggccatcaagcagttcttcctcgactaccgtgcccagctctcggacttcaccatctccctcagtgacgagcaccggatccgcttccacgacgaccgggccgacgagaactgtgagatcacgttcgccgagaccggcctggacacggcgaccggcgctcggctgcgccgcgtgcggcgctacgtggacaccgacgacttcatgatgggctacggcgacggggtcgggaacatcgacctggcggcgctggagaaggagcaccgcgctgccggccggatcggcaccgtcaccggtatccacccgacgtcgaagttcggcgagatggacgtcgaggacgaccaggtgctggagttcaacgagaagccgacccgggtgaccggtttcgtctccggcgggttcttcatgttccgccgcgaattcctcgacgactacctcgacgacgacccgaagctgtggctggagagcgccccgctccagcgcctggcccgcgaccggcagctcaccctgcacccccaccacgacttctggtgcgcgatggacaccttcaaggactaccagcacctcaacgagctgtgggcggccggcgacgcgccctggaaggtgtgggagcagccggggaaccggtccgtcagcccgggaacagctcgttctgctcctcgcgcagccggtcgaccagccggcccgccggcagccgtacgtcgtcataggtga

SEQ ID NO: 31856 - protein, 299 aa, Streptomyces glaucescens
MTVDSDIPVVLLCGGYGTRIREASERLPKAMVDIGGRPILWHIMKIYSHYGFRRFVLCLGYKGWAIKQFFLDYRAQLSDFTISLSDEHRIRFHDDRADENCEITFAETGLDTATGARLRRVRRYVDTDDFMMGYGDGVGNIDLAALEKEHRAAGRIGTVTGIHPTSKFGEMDVEDDQVLEFNEKPTRVTGFVSGGFFMFRREFLDDYLDDDPKLWLESAPLQRLARDRQLTLHPHHDFWCAMDTFKDYQHLNELWAAGDAPWKVWEQPGNRSVSPGTARSAPRAAGRPAGPPAAVRRHR

SEQ ID NO: 31857 - DNA, 774 bp, Yersinia pseudotuberculosis
  CDS (1)..(774): transl_table=11
gtgaaagcagtcattttggccggagggcttggaacccgtcttagtgaagagaccgtagtaaaaccaaaaccaatggtagagattggtgggaagcctatcctctggcatattatgaaactttactcttcttatggcatcaatgatttcgttatttgctgtggctataaaggctatgtcattaaagaatattttgcgaattactttatgcacatgtcggatattaccttctgcatgcgcgataatgaaatggtagtacaccaaaagcgagtcgaaccttggaatgtcacgctagtagacactggcgaagattctatgaccggtggccgactgaggcgtgtaaaagattacgtcaaagacgatgaggctttctgtttcacctatggtgatggtgttagtgacgttaatattgctgaattaattgcattccataagagccatggcaagcaagccacattaacggcaacctatcccccaggccgttttggtgcgctggatattaaagataaacaagtacgtagttttaaagaaaaaccaaaaggcgatggcgcattgatcaacggcggttattttgttttgtcgcctaaagttatcgatctgatcgatggtgataagtctacttgggagcaggaacctttaatgacattagctgcgcagggggagttgatggcgtttgaacatgccgggttctggcagccaatggatacgttgcgtgacaagatctatctgcatgaactatgggaagaaggcagggcaccttggaaggtatgggaataa

SEQ ID NO: 31858 - protein, 257 aa, Yersinia pseudotuberculosis
MKAVILAGGLGTRLSEETVVKPKPMVEIGGKPILWHIMKLYSSYGINDFVICCGYKGYVIKEYFANYFMHMSDITFCMRDNEMVVHQKRVEPWNVTLVDTGEDSMTGGRLRRVKDYVKDDEAFCFTYGDGVSDVNIAELIAFHKSHGKQATLTATYPPGRFGALDIKDKQVRSFKEKPKGDGALINGGYFVLSPKVIDLIDGDKSTWEQEPLMTLAAQGELMAFEHAGFWQPMDTLRDKIYLHELWEEGRAPWKVWE

SEQ ID NO: 31859 - DNA, 1086 bp, Medicago sativa
  CDS (1)..(1086)
atgaaggcattgattctggttggggggtttggaactaggttgaggccattgacactcagtgtccctaagcctcttgttgattttgctaacaaacccatgattctgcatcagatagaggctcttaaggcgactggagtcactgaagtggtactggccattaattaccaaccagaggttatgttgaatttcttgaaggattttgaagcaaagcttggcattacgattagttgttcgcaagaaactgaaccattaggaactgcaggcccccttgctcttgctagggacaagctgatagatgactctggagagccattttttgttcttaacagtgatgttataagtgactacccacttaaagaaatgattgaattccacaaatcccatggaggggaagcttccataatggtaacaaaggttgatgagccatcaaaatatggtgtggttgttatggaggagacaacagggcaggttgagaaatttgttgaaaaaccaaagttgtttgttggtaacaaaatcaatgctggaatttacctattgaacccctctgttttggatcgaattgaactgaggcccacttctatcgaaaaagaaatttttccaaagatcgctgcagagaaaaagctatatgcaatggtcctgcctggattctggatggacatcggacaaccgagggactatatcactggcttgaggctttacctggactcactgaggaagaagtcttcttctaagttggccggtggctctaacattgtggggaatgttattgtggatgaaacagcaaaaattggcgagggatgtctcattggacctgatgtcgctatcggtcctggctgcattgtagagtctggtgttaggctttcgcgctgcacagtaatgcgaggagtccggatcaagaaacatgcttgcatttccagtagtattattgggtggcattccactgtcgggcaatgggctcgagtggagaatatgactatccttggagaagatgttcatgtttgtgatgagatttacagcaatggtggtgtggttttgccccacaaggagattaagacaaatattctgaagccagagattgtcatgtga

SEQ ID NO: 31860 - protein, 361 aa, Medicago sativa
MKALILVGGFGTRLRPLTLSVPKPLVDFANKPMILHQIEALKATGVTEVVLAINYQPEVMLNFLKDFEAKLGITISCSQETEPLGTAGPLALARDKLIDDSGEPFFVLNSDVISDYPLKEMIEFHKSHGGEASIMVTKVDEPSKYGVVVMEETTGQVEKFVEKPKLFVGNKINAGIYLLNPSVLDRIELRPTSIEKEIFPKIAAEKKLYAMVLPGFWMDIGQPRDYITGLRLYLDSLRKKSSSKLAGGSNIVGNVIVDETAKIGEGCLIGPDVAIGPGCIVESGVRLSRCTVMRGVRIKKHACISSSIIGWHSTVGQWARVENMTILGEDVHVCDEIYSNGGVVLPHKEIKTNILKPEIVM

SEQ ID NO: 31861 - DNA, 1086 bp, Solanum lycopersicum
  CDS (1)..(1086)
atgaaggcacttatccttgttggagggttcggtactcggctcaggccactcaccctcagcgtcccaaagccacttgtcgaatttgctaacaaaccaatgattttgcatcagatcgaggctctcaaggctgttggagtaaccgaagttgtactggctattaactaccaacctgaggtgatgctgaacttcttgaaagaatttgaggcaagccttggaatcaagatcacctgttctcaagaaactgaaccacttggcactgctggtcctcttgctttggctagagataagctgatagatgactctggtgaaccattttttgttcttaacagtgatgttatcagtgaatatccatttaaggagatgattcaattccacaaatcccatggtggtgaggcttctttgatggtgaccaaggtggatgagccttctaaatatggtgttgtcgtcatggaagaatccacagggcaagtagagagatttgtggagaagccaaagttatttgttggcaacaagatcaacgctggattttacctactgaacccttctgtcctagacagaattcaattacggccaacatctattgagaaagaggtttttccgaaaattgcagcagagaagaaactgtatgcaatggtgctacctggattttggatggacgttggccaaccaagagattacattactggcctcagactctatctggattctttaaagaaacactcttcacctaaattggcttcaggaccacacattgtcggaaatgtcatagtggatgaatctgctaagatcggagagggttgtttgataggaccagatgttgcaattggttctggttgtgtgattgagtctggagttagactctcccgttgcactgtgatgcgaggagtccgcatcaagaaacatgcatgcatctcaggtagcatcattggttggcactctactgttggacaatgggctcgtgttgagaacatgaccattctcggagaagatgttcatgtttgtgatgaaatttacagcaatggtggtgtagttttgccccacaaggagatcaaatccagcatattgaaacctgaaatcgtgatgtga

SEQ ID NO: 31862 - protein, 361 aa, Solanum lycopersicum
MKALILVGGFGTRLRPLTLSVPKPLVEFANKPMILHQIEALKAVGVTEVVLAINYQPEVMLNFLKEFEASLGIKITCSQETEPLGTAGPLALARDKLIDDSGEPFFVLNSDVISEYPFKEMIQFHKSHGGEASLMVTKVDEPSKYGVVVMEESTGQVERFVEKPKLFVGNKINAGFYLLNPSVLDRIQLRPTSIEKEVFPKIAAEKKLYAMVLPGFWMDVGQPRDYITGLRLYLDSLKKHSSPKLASGPHIVGNVIVDESAKIGEGCLIGPDVAIGSGCVIESGVRLSRCTVMRGVRIKKHACISGSIIGWHSTVGQWARVENMTILGEDVHVCDEIYSNGGVVLPHKEIKSSILKPEIVM

SEQ ID NO: 31863 - DNA, 1068 bp, Streptomyces griseus subsp
  CDS (1)..(1068): transl_table=11
gtgaaggctctggttctggccggcggaatggggacgcggctgcgcccgctcacccactccatgccgaaacagctggtccccctcgcgaacaaaccggtgctgtgccacgccctggaggacatcgcgcgggccggtgtcacggacgtcggcatcatcgtgggggactggcacaaggagatcgaggaggcggtgggggacggcgggcgcttcggcctgcggatcacctacctgccccaggaggcgcccttcggcctggcccactgcgtactggtcgcgcgggagttcctggcggacgacgacttcctgatgtacctcggggacaacgtcttcgccgacggcgtccacgcgctcgccgacgccttccgccgggaccggccggccgcccaggtcgccgtgaccgccgtggacagcccccaggagtacggcgtcgccgtgaccacctcggacggccgggtgctcggactccaggagaagccgcgcgagccgaggagcgacctcgccgtgaccggcgcctacttcttcaccccggagatccacgacgccatcgcccgcatccggcccagcacacgcggcgagtgggagatcaccgacgccatccaggccctgatcgaccggggcagcgaggtgcgggcggtgcggctgtccgactggtggaaggacaccgggcgcgtggaggacatcctcgactgcaatcagctcctgctcgaccacgtcacgacgtccgtccgcggttccgttgacgcggcgagcactgtgctcggtccggtcgtggtcgagcccggcgcccgcatcatccgctcgcacctgcgcggaccgctgatcgtcggcgcgggctgcgtggtcgaggacagctatgtcggcccgtactccgccgtcggcgcgaactgcgccctcaccgacgcgggcatctcccactcgatcatgctgcaggacgcgaccgtcaccgacgtcaacggcatccaccgctcggtcatcggccgctcagcccgggtgggcgcccccgtgaacggcacgggacgccaccggctcgtggtgggcgaccacaccgaactcgaagtcgtcgcatga

SEQ ID NO: 31864 - protein, 355 aa, Streptomyces griseus subsp
MKALVLAGGMGTRLRPLTHSMPKQLVPLANKPVLCHALEDIARAGVTDVGIIVGDWHKEIEEAVGDGGRFGLRITYLPQEAPFGLAHCVLVAREFLADDDFLMYLGDNVFADGVHALADAFRRDRPAAQVAVTAVDSPQEYGVAVTTSDGRVLGLQEKPREPRSDLAVTGAYFFTPEIHDAIARIRPSTRGEWEITDAIQALIDRGSEVRAVRLSDWWKDTGRVEDILDCNQLLLDHVTTSVRGSVDAASTVLGPVVVEPGARIIRSHLRGPLIVGAGCVVEDSYVGPYSAVGANCALTDAGISHSIMLQDATVTDVNGIHRSVIGRSARVGAPVNGTGRHRLVVGDHTELEVVA

SEQ ID NO: 31865 - DNA, 804 bp, Streptomyces sp
  CDS (1)..(804): transl_table=11
atgaaggtcgtactgttctgcggcggttacgggctgcgcatgcgcgccggggcctccgacgacgtgcccaaacctatggcgatggtcggcccgcgcccgctgatctggcacgtgatgcgctactacgcgcacttcgggcacaaggagttcatcctgtgcctgggctacggggcgcaccacatcaaggacttcttcctcaactacgaggagaccacgtccaacgacttcgtgctgcgcggcgggcggacggagctgctgtccaccgacatcgcggactggaccatcaccttcgcgcagaccggcatcgagtcgccgatcggtgagcggctgcgccgggtacggcaccatctggacggcgacgagatgttcctcgccaactacgcggacgtcctcacggacgccccgctcccggagatgatcgaccggttctcccgcagggacgccggcgcgtcgatgatggtggtcccgccgcagtcctcgttccactgcgtcgagctgggcgaggacggcctggtgggcggcatcaccccggtgagcgagctgccgctgtgggagaacggcggctacttcgtgctgcgccaggaggtcttcgaccacatcccggagaacggggacctggtcgccgacggatgcgcccaactggccaagcagggcagactggtggcgcaccagcaccgcggcttctggaagccgaccgacaccgtgaaggaaaaggccgcgctcgacgaggcctacgcccggggcgaccgcccgtgggccgtgtgggaagggaagcggaccgaggcgggggtggggaccgcgtga

SEQ ID NO: 31866 - protein, 267 aa, Streptomyces sp
MKVVLFCGGYGLRMRAGASDDVPKPMAMVGPRPLIWHVMRYYAHFGHKEFILCLGYGAHHIKDFFLNYEETTSNDFVLRGGRTELLSTDIADWTITFAQTGIESPIGERLRRVRHHLDGDEMFLANYADVLTDAPLPEMIDRFSRRDAGASMMVVPPQSSFHCVELGEDGLVGGITPVSELPLWENGGYFVLRQEVFDHIPENGDLVADGCAQLAKQGRLVAHQHRGFWKPTDTVKEKAALDEAYARGDRPWAVWEGKRTEAGVGTA

SEQ ID NO: 31867 - DNA, 1086 bp, Nicotiana tabacum
  CDS (1)..(1086)
atgaaggcgcttattcttgttggagggttcggtactcggttgaggccattgacgctcagtgtcccaaagccattagttgaatttgccaacaaacccatgattttgcatcagattgaggctctcaaggcagtcggagtaactgaagttgtactggctattaattaccaacctgaggagatgctgaacttcttgaaagaatttgaggcaaaccttggaatcaagatcacctgttctcaagaaactgaaccacttggcactgcaggtccccttgctttggctagagataagctgattgatgactccggtgaacctttttttgttcttaatagtgatgttatcagtgaatatcctttcaaggagatgattgctttccacaaatcccatggaggtgaggcttccttgatggtcaccaaggtggatgagccttctaaatatggtgttgtcgtcatggaagaatcgacagggcaagtagagagatttgtagagaagccaaagttatttgttggcaacaagatcaatgctggattttacctgctgaatccttctgtcctagatagaattcaattacggccaacatcaatcgagaaagaggttttcccaaaaattgcagcagaggaaaaactatatgctatggtcttaccaggattttggatggacattggtcagccaagagattacattcctggcctcagactctacctggattctttaaagaagaattcttcacctaaattggcttcaggatctcacattgttggaaatgtcatagtggatgagtctgccaagattggagagggttgtttgataggaccagatgttgcaatcggttctggttgtgttattgagtctggagttagactctcccgctgcaccgtgatgcgaggagtccgcatcaagaaacatgcctgcatctcaagtagcatcattggctggcattctacggttggacaatgggctcgtgtagagaacatgaccattcttggagaagatgtccatgtctgtgatgaaatttacagcaacggaggtgtagttttgccccacaaggagatcaaatctagcatattgaaacctgaaatagttatgtga

SEQ ID NO: 31868 - protein, 361 aa, Nicotiana tabacum
MKALILVGGFGTRLRPLTLSVPKPLVEFANKPMILHQIEALKAVGVTEVVLAINYQPEEMLNFLKEFEANLGIKITCSQETEPLGTAGPLALARDKLIDDSGEPFFVLNSDVISEYPFKEMIAFHKSHGGEASLMVTKVDEPSKYGVVVMEESTGQVERFVEKPKLFVGNKINAGFYLLNPSVLDRIQLRPTSIEKEVFPKIAAEEKLYAMVLPGFWMDIGQPRDYIPGLRLYLDSLKKNSSPKLASGSHIVGNVIVDESAKIGEGCLIGPDVAIGSGCVIESGVRLSRCTVMRGVRIKKHACISSSIIGWHSTVGQWARVENMTILGEDVHVCDEIYSNGGVVLPHKEIKSSILKPEIVM

SEQ ID NO: 31869 - DNA, 1086 bp, Arabidopsis thaliana
  CDS (1)..(1086)
atgaaggcactcattcttgttggaggcttcggcactcgcttgagaccattgactctcagtttcccaaagccccttgttgattttgctaataaacccatgatccttcatcagatagaggctcttaaggcagttggagttgatgaagtggttttggccatcaattatcagccagaggtgatgctgaacttcttgaaggactttgagaccaagctggaaatcaaaatcacttgctcacaagagaccgagccactaggtaccgctggtcctctggctctagcgagagacaaattgcttgatggatctggagagcccttctttgttcttaacagtgatgtgattagtgagtaccctcttaaagaaatccttgagtttcacaaatctcacggtggggaagcctccataatggtaacaaaggtggatgaaccgtcgaaatatggagtggttgttatggaagaaagcactggaagagtggagaagtttgtggaaaagccaaaactgtatgtaggtaacaagatcaacgctgggatttatcttctgaacccatctgttcttgataagattgagctaagaccgacttcaatcgaaaaagagactttccctaagattgcagcagcgcaagggcactatgctatggtgctaccagggttttggatggacattgggcaaccccgtgactacataacgggtttgagactctacttagactcccttaggaagaaatctcctgccaaattaaccagtgggccacacatagttgggaatgttcttgttgacgaaaccgctacaattggggaaggatgtttgattggaccagacgttgccattggtccaggctgcattgttgagtcaggagtcagactctcccgatgcacggtcatgcgtggagtccgcatcaagaagcatgcgtgtatctcgagcagtatcatcgggtggcactcaacggttggtcaatgggccaggatcgagaacatgacgatcctcggtgaggatgttcatgtgagcgatgagatctatagcaatggaggagttgttttgccacacaaggagatcaaatcaaacatcttgaagccagagatagtgatgtga

SEQ ID NO: 31870 - protein, 361 aa, Arabidopsis thaliana
MKALILVGGFGTRLRPLTLSFPKPLVDFANKPMILHQIEALKAVGVDEVVLAINYQPEVMLNFLKDFETKLEIKITCSQETEPLGTAGPLALARDKLLDGSGEPFFVLNSDVISEYPLKEILEFHKSHGGEASIMVTKVDEPSKYGVVVMEESTGRVEKFVEKPKLYVGNKINAGIYLLNPSVLDKIELRPTSIEKETFPKIAAAQGHYAMVLPGFWMDIGQPRDYITGLRLYLDSLRKKSPAKLTSGPHIVGNVLVDETATIGEGCLIGPDVAIGPGCIVESGVRLSRCTVMRGVRIKKHACISSSIIGWHSTVGQWARIENMTILGEDVHVSDEIYSNGGVVLPHKEIKSNILKPEIVM

SEQ ID NO: 31871 - DNA, 1056 bp, Arabidopsis thaliana
  CDS (1)..(1056)
ttgaaggctcttattctagttggaggattcggaaccagattgaggccacttaccttgagcatgcctaaaccacttgttgattttggaaacaaacccatgattttgcatcagattgaagctctaaaaggtgctggagtgactgaagttgtattagctatcaatcaccaacaaccagaggtcatgttgaactttgtgaaagaatatgagaagaagctagagattaagattacattttcccaagaaactgaaccgcttggaacagcagggcctctcgcgctggctcgggataagctggtcgatgaatcaggccaacccttttttgtactaaacagcgatgttatctgtgaatacccattgcttgagatgatcgagtttcacaagactaaccgtgctgaagcatcaatcatggtgaccgaggttgatgatccttctaagtatggtgtggtggttacagaggaaggtacagcgagagttgaaagttttgtcgagaaaccgaaacattttgtggggaacaagatcaacgctgggatatacctcttgagcccatctgttcttgacaggattgagctgagaaggacttcgatagagaaagagatattccctaagatagcttcagagaagaagctttacgcgatggtactacctggtttttggatggacattggtcaaccgaaagattacataaccgggcaaagaatgtaccttaactctctaagagagaaaactccgcaagaactggccacaggggataacataatcgggaatgttctcgtgcacgaaagtgcggttataggagaaggttgcttgataggacctgatgtggtgattggtccgggatgtgtgattgattcaggtgtaagattgtttggttgtactgtaatgcgcggtgtgtggatcaaggaacatgcgtgtatctctaatagtatcgtgggatgggattcaaccgttggaaggtgggctcgagtttttaatataacggttcttggcaaagatgttaacgtcgccgatgcagaggtttacaacagtggggttgttatcgaagagcaaggtctgtga

SEQ ID NO: 31872 - protein, 351 aa, Arabidopsis thaliana
LKALILVGGFGTRLRPLTLSMPKPLVDFGNKPMILHQIEALKGAGVTEVVLAINHQQPEVMLNFVKEYEKKLEIKITFSQETEPLGTAGPLALARDKLVDESGQPFFVLNSDVICEYPLLEMIEFHKTNRAEASIMVTEVDDPSKYGVVVTEEGTARVESFVEKPKHFVGNKINAGIYLLSPSVLDRIELRRTSIEKEIFPKIASEKKLYAMVLPGFWMDIGQPKDYITGQRMYLNSLREKTPQELATGDNIIGNVLVHESAVIGEGCLIGPDVVIGPGCVIDSGVRLFGCTVMRGVWIKEHACISNSIVGWDSTVGRWARVFNITVLGKDVNVADAEVYNSGVVIEEQGL

SEQ ID NO: 31873 - DNA, 1086 bp, Solanum tuberosum
  CDS (1)..(1086)
atgaaggcacttatccttgttggagggttcggtactcggctcaggccactcaccctcagtgtcccaaagccactcgtcgaatttgctaacaaaccaatgattttgcatcagattgaggctctcaaggctgttggagtaaccgaagttgtactggctattaactaccaacctgaggtgatgctgaacttcttgaaagaatttgaggcaagccttggaatcaagatcacctgttctcaagaaactgaaccacttggcactgctggtccccttgctttggctagagataagctgatagatgactctggtgaaccattttttgttcttaacagtgatgttatcagtgaatatccattcaaggagatgattcaattccacaaatcccatggtggtgaggcttctttgatggtgaccaaggtggatgagccttctaaatatggtgttgttgtcatggaagaatccactgggcaagtagagagatttgtggagaagccaaagttatttgttggcaacaagatcaatgctggattttacctgctgaacccttctgtcctagacagaattcaattacggccaacatcaattgagaaagaggtttttccaaaaattgcagcagagaagaaactgtatgcaatggtgctacctggattttggatggacattggccaaccaagagattacattactggcctcagactctatctggattctttaaagaaacactcttcacctaaattggcttcaggaccacacattgtcggaaatgtcatagtggatgaatctgccaagattggagagggttgtttgataggaccagatgttgcaattggttctggttgtgtgattgagtctggagttagactctcccgttgcactgtgatgcgaggagtccgcatcaagaaacatgcatgcatctcaggtagcatcattggctggcactctactgttggacaatgggctcgtgttgagaacatgaccattctcggggaagatgtccatgtttgtgatgaaatttacagcaatggaggtgtagttttgccccacaaggagatcaaatccagtatattgaaacctgaaatcgtgatgtga

SEQ ID NO: 31874 - protein, 361 aa, Solanum tuberosum
MKALILVGGFGTRLRPLTLSVPKPLVEFANKPMILHQIEALKAVGVTEVVLAINYQPEVMLNFLKEFEASLGIKITCSQETEPLGTAGPLALARDKLIDDSGEPFFVLNSDVISEYPFKEMIQFHKSHGGEASLMVTKVDEPSKYGVVVMEESTGQVERFVEKPKLFVGNKINAGFYLLNPSVLDRIQLRPTSIEKEVFPKIAAEKKLYAMVLPGFWMDIGQPRDYITGLRLYLDSLKKHSSPKLASGPHIVGNVIVDESAKIGEGCLIGPDVAIGSGCVIESGVRLSRCTVMRGVRIKKHACISGSIIGWHSTVGQWARVENMTILGEDVHVCDEIYSNGGVVLPHKEIKSSILKPEIVM

SEQ ID NO: 31875 - DNA, 1086 bp, Ashbya gossypii
  CDS (1)..(1086)
atgaaaggcctaattctagtcggcggatacggtacgaggctacggccattgacgttgacggtgcccaagccgctcgtggagttctgcaacagacccatgatcctacaccagatcgaggcattggccgcggcgggtgtgacggatattgtgttggcagtgaactaccgcccggaggtgatggtggagacattgaagaagtacgagaagcagtatggcgtgtccatcaccttctctgtggagactgagcctctggggacggcagggccgttgaaattggctgagaaggttttgaagaaggacaactctccattcttcgttctcaactctgacgtgatctgtgagtacccattcaaggagctcgctgccttccaccgcgcccacggtggcaagggtacgattgtggccaccaaggtggacgagccttccaaatacggtgtgattgtccacgacattgccactccaaacttgatcgaccgtttcgtggagaagcctgtggagtttgtgggtaacagaattaacgccgggttgtacattttgaaccctgaggtgatcgacttgatcgagctcagacctacttctattgagaaggagaccttccctatcttggttgaacagaagtccctctactctttcgacttggaaggctactggatggacgtcgggcaaccaaaggacttcttggccggcactgtgctgtacctaaactccctgtccaagcgccacccagagcagcttgcgaagggcgacaacatcgtcggcaacgttattatcgatccttctgctaagatctccggttctgcaaagttgggcccggacgtcgtgattgggccaaatgtgacaattggagagggtgttagaatcacgagatcggtggtgctatcggactccactatcaacgaccattctttggtgaagtccactatagtcgggtggcactcgaccgtcggtaaatggtgccgcctagagggctgctctgttttgggtgacgacgtcgaagtaaaagacgaggtgtatgtgaacggtggtaaggtcttgcctcacaagtcaatttccgccaacgttccaaaggaggccattatcatgtaa

SEQ ID NO: 31876 - protein, 361 aa, Ashbya gossypii
MKGLILVGGYGTRLRPLTLTVPKPLVEFCNRPMILHQIEALAAAGVTDIVLAVNYRPEVMVETLKKYEKQYGVSITFSVETEPLGTAGPLKLAEKVLKKDNSPFFVLNSDVICEYPFKELAAFHRAHGGKGTIVATKVDEPSKYGVIVHDIATPNLIDRFVEKPVEFVGNRINAGLYILNPEVIDLIELRPTSIEKETFPILVEQKSLYSFDLEGYWMDVGQPKDFLAGTVLYLNSLSKRHPEQLAKGDNIVGNVIIDPSAKISGSAKLGPDVVIGPNVTIGEGVRITRSVVLSDSTINDHSLVKSTIVGWHSTVGKWCRLEGCSVLGDDVEVKDEVYVNGGKVLPHKSISANVPKEAIIM

SEQ ID NO: 31877 - DNA, 1095 bp, Aspergillus fumigatus
  CDS (1)..(1095)
atgaaggctctcattctggtcggagggttcggtacccgactgcgccctttgaccctgacccttcccaaacccctggtggagtttggaaaccgcccgatgatcctgcaccaggtcgagagcttggctgctgccggtgtcacagatattgttctggccgtcaactaccgtccggatgtcatggtcgcggccctcaagaagtacgaggaacaatacaacgtcagaatcgagttctccgtcgagtccgaacccctcggtaccgctggtcccctgaagctggcagagaagattttgggcaaggacgattctcccttcttcgttctcaactccgatatcatctgtgattatccctttaagcagctcgcagagttccacaagaaacatggcgacgagggcaccatcgttgttaccaaggtcgacgagccctcgaagtacggtgtcgttgtccacaagcccaaccatccctctcgcattgatcgtttcgtcgagaagccagttgagttcgttggtaaccgcattaacgccggtatctacatcctcaaccctagtgttctcaagcgcattgagctgcgtcctacctccatcgaacaggagacattccccgccatctgcagcgacggtcagctccactcctttgatctcgagggtttctggatggatgttggtcaacccaaagatttcctgacgggcacctgcctctacctcacctcgctcgcgaagcgtaactccaagctgctggcccccaacagcgagccgtacgtctacggcggcaacgtcatggttgatccctcggccaagatcggcaagaactgtcgcattggccctaatgtagtcattggtcccaacgttgtggtcggcgatggcgtgcgtctgcaacgctgtgtgctcttggagaacagcaaggtcaaggaccatgcttggatcaagtcgactattgtcggttggaacagctccgttggcaagtgggctcgcttggagaatgtcacggtcttgggtgacgatgtcaccattgctgacgaggtgtatgtcaatggcggctctattctgccccacaagagcatcaagcagaacatcgatgttcctgccattatcatgtga

SEQ ID NO: 31878 - protein, 364 aa, Aspergillus fumigatus
MKALILVGGFGTRLRPLTLTLPKPLVEFGNRPMILHQVESLAAAGVTDIVLAVNYRPDVMVAALKKYEEQYNVRIEFSVESEPLGTAGPLKLAEKILGKDDSPFFVLNSDIICDYPFKQLAEFHKKHGDEGTIVVTKVDEPSKYGVVVHKPNHPSRIDRFVEKPVEFVGNRINAGIYILNPSVLKRIELRPTSIEQETFPAICSDGQLHSFDLEGFWMDVGQPKDFLTGTCLYLTSLAKRNSKLLAPNSEPYVYGGNVMVDPSAKIGKNCRIGPNVVIGPNVVVGDGVRLQRCVLLENSKVKDHAWIKSTIVGWNSSVGKWARLENVTVLGDDVTIADEVYVNGGSILPHKSIKQNIDVPAIIM

SEQ ID NO: 31879 - DNA, 1095 bp, Aspergillus oryzae
  CDS (1)..(1095)
atgaaggctctcattcttgtcggagggtttggtacccgtctccgtccgttgacattgacccttcccaaacccctggtggaatttgggaaccgtcccatgattttgcaccaagtcgagagcttggctgctgctggtgtcacggatattgtcctggctgttaactaccgcccagatgtcatggtttcggccctcaagaagtatgaggaacaatacaatgtgaaaatcgagttctccgtcgagtccgaacccctgggcactgccggtcccctgaagttagcggaaaagattttgggcaaggacgactctccattcttcgttctaaactccgatgtcatctgcgactaccccttcaaggagctggctgagttccataagaagcatggcgatgaaggtaccattgttgttactaaggtcgacgagccctccaagtatggcgtcgttgttcacaagcccaatcacccctcgcgcatcgaccgctttgtcgaaaagcctgttgaattcgttggaaaccgcatcaacgccggtatctacatcatgaaccctagtgtgttgaatcgcattgagctgcgcccgacatccattgagcaggagacattcccggctatctgcaaggacggacagctccactcctttgacctggagggtttctggatggacgttggtcaacctaaggacttcctcagcggcacctgtctatacctcacttctctcgccaagcgcaattcgaagctgctcgcacccaactccgaaccctacgtgtacggtggcaatgttatggttgacccctccgccaagattggcaagaattgccgcattggtcccaatgtagtcattggtcccaacgttgtggtcggtgatggagttcgtctgcagcgttgtgtgcttctagagaacagcaaggtcaaagaccatgcctgggttaagtcaaccattgtcggatggaatagctccgtaggcaggtgggctcgtttggagaatgttaccgtgctgggtgacgacgttactatcgcagacgaagtctatgttaatggtggatccatccttcctcataagagcatcaagcagaacgttgatgttcccgccattattatgtaa

SEQ ID NO: 31880 - protein, 364 aa, Aspergillus oryzae
MKALILVGGFGTRLRPLTLTLPKPLVEFGNRPMILHQVESLAAAGVTDIVLAVNYRPDVMVSALKKYEEQYNVKIEFSVESEPLGTAGPLKLAEKILGKDDSPFFVLNSDVICDYPFKELAEFHKKHGDEGTIVVTKVDEPSKYGVVVHKPNHPSRIDRFVEKPVEFVGNRINAGIYIMNPSVLNRIELRPTSIEQETFPAICKDGQLHSFDLEGFWMDVGQPKDFLSGTCLYLTSLAKRNSKLLAPNSEPYVYGGNVMVDPSAKIGKNCRIGPNVVIGPNVVVGDGVRLQRCVLLENSKVKDHAWVKSTIVGWNSSVGRWARLENVTVLGDDVTIADEVYVNGGSILPHKSIKQNVDVPAIIM

SEQ ID NO: 31881 - DNA, 1089 bp, Candida albicans
  CDS (1)..(1089): transl_table=12
atgaaaggattaattttagtcggaggatacggtaccagattgagaccattaactttaacattaccaaaaccattggtcgagttcggtaacagaccaatgatcttgcaccaaatcgaagctttggccgctgctggtgtcaccgatattgttttggccgtcaactaccgtccagaagtcatggtttccactttaaagaaatacgaagaagagtacggtgtctccatcaccttctctgttgaagaagaacctttgggcaccgccggtccattaaagttggctgaagaagtgttgaaaaaagacgactcaccatttttcgtcttgaactccgacgtcatttgcgactacccattcaaggaattggccgacttccacaaggcccacggcgctgctggtactattgttgctaccaaagtcgacgaaccatcaaaatacggggtcattgtccacgacagagacactccaaacttgatcgacagattcgtcgaaaaaccagtcgagtttgttggtaacagaattaacgccggtttatacatcttgaacccatcggtcatcgacttgattgaaatgagaccaacctcaatcgaaaaagaaactttcccaatcttggtcgaacaaaaacaattgtactccttcgacttggagggttactggatggacgtcggccaaccaaaagatttcctttctggaacctgtttgtacttgacgtcattgtcgaaaaaacacccagagaaattgtgtaaagagaaatacgtccacggcggtaacgtgttgatcgacccaactgccaagatccacccatctgccttaatcggtccaaacgtcaccatcggtccaaacgttgttgtcggtgaaggtgctagaatccaaagatcagtgttgttggccaactcccaagtcaaagaccacgcctgggtcaaatctaccattgttggttggaactccagaattggaaagtgggctagaactgaaggtgttaccgtcttgggtgacgacgtcgaagtgaaaaacgaaatctacgtcaacggtgccaaggtcttgccacacaaatcgatctcctctaacgtcgaaaaagagtctatcattatgtag

SEQ ID NO: 31882 - protein, 362 aa, Candida albicans
MKGLILVGGYGTRLRPLTLTLPKPLVEFGNRPMILHQIEALAAAGVTDIVLAVNYRPEVMVSTLKKYEEEYGVSITFSVEEEPLGTAGPLKLAEEVLKKDDSPFFVLNSDVICDYPFKELADFHKAHGAAGTIVATKVDEPSKYGVIVHDRDTPNLIDRFVEKPVEFVGNRINAGLYILNPSVIDLIEMRPTSIEKETFPILVEQKQLYSFDLEGYWMDVGQPKDFLSGTCLYLTSLSKKHPEKLCKEKYVHGGNVLIDPTAKIHPSALIGPNVTIGPNVVVGEGARIQRSVLLANSQVKDHAWVKSTIVGWNSRIGKWARTEGVTVLGDDVEVKNEIYVNGAKVLPHKSISSNVEKESIIM

SEQ ID NO: 31883 - DNA, 1095 bp, Cryptococcus neoformans
  CDS (1)..(1095)
atgaaggctctgatcctcgtcggtggtttcggtacccggcttaggcccttgaccctctcgtggcccaagcctctcgtcgagttctgcaacaaggccatgatcttgcaccaaatcgaggctcttgtcaaggcgggtgtcaaggacatcgtcctcgctgtcaactaccgaccagaggtcatggtctctgtactcaaaaagactgaggaggagtttggcatcaacatccacttcagcgtcgaaaccgaacctctcggcactgcgggtccccttgctcttgctcgcgaaatcttgggcaaggacgactctccgttctttgttttgaactctgatgtcacctgtgtctatccctttgaggctttccgagacttccacattgcccacaagtgcgaaggttccatcatggtcaccaaggtcgccgagccttctgcctatggtgtcgtggtcacgaagcccaactccactgtgattgatcgattcgtcgagaagcccgttgaattcgttggtaacaggatcaacgctggtatctacatattcaaccccagcgttttggacaggattgagctccgtcccacttctatcgaaaaagaaatcttccccgccatcgccgccgaccaacaactgcactcctttgatcttcaagggttctggatggatgtcggtcaaccaaaagacttccttgccggtacctgcctttacctttcccacctcacttctcaacattctcccttgttgactgatccctctcaaaacaagtgggtgtatggtggtaatgtgatggttgacccttctgcggaaatcgaccccacagccgtcatcggccccaatgtcgttattggtcccgacgcgaagattgggcctggtgtccgtctccagcgatgtgtgatcatgtccaacgctaccgtgcgagaccactcctggattgccaactccattgtcgggtggaacagcacggtggggcgatggacaagagtggagaacattacagtgttgggtgacgatgtgacgataaaggacgagctctatgtcaatggtgcttcagtgttgccccacaagagtatctctacctctatcactgagccccgtattgttatgtaa

SEQ ID NO: 31884 - protein, 364 aa, Cryptococcus neoformans
MKALILVGGFGTRLRPLTLSWPKPLVEFCNKAMILHQIEALVKAGVKDIVLAVNYRPEVMVSVLKKTEEEFGINIHFSVETEPLGTAGPLALAREILGKDDSPFFVLNSDVTCVYPFEAFRDFHIAHKCEGSIMVTKVAEPSAYGVVVTKPNSTVIDRFVEKPVEFVGNRINAGIYIFNPSVLDRIELRPTSIEKEIFPAIAADQQLHSFDLQGFWMDVGQPKDFLAGTCLYLSHLTSQHSPLLTDPSQNKWVYGGNVMVDPSAEIDPTAVIGPNVVIGPDAKIGPGVRLQRCVIMSNATVRDHSWIANSIVGWNSTVGRWTRVENITVLGDDVTIKDELYVNGASVLPHKSISTSITEPRIVM

SEQ ID NO: 31885 - DNA, 1089 bp, Debaryomyces hansenii
  CDS (1)..(1089)
atgaagggattaattttagtcggtggttacggtacccgtttgagacctttgactttgactttaccaaagccattggttgaatttggtaacagaccaatgattttgcatcaaatcgaagcattagctaaggccggtgttactgatattgtcttggctgttaactacagaccagaagttatggtctctaccttaaagaaatacgaagctgaatacggtgttaccatcactttctccgttgaagaagaaccattaggtactgcaggtccattaaagttggctgaaaaggttttaaagaaggatgacactcctatctttgttttgaactctgatgtcatctgtgactacccattccaagaattagcagacttccacaagactagcggtggtaaagctactattgtcgcaacaaaggttgacgaaccatccaagtatggtgttattgtccatgatagagatactccaaacttgatcgaccgtttcgtcgaaaagccagttgagtttgttggtaacagaatcaatgctggtttatatatcttgaacccatctgtcattgatttgattgaaatgaagcctacttctattgaaaaggaaactttccctatcttagttgaaaacaaggaattatactcctttgacttggaaggatactggatggatgttggtcaaccaaaggatttcttgagcggtactgttttgtacttaactgccttatctaagaaggaaccaaagaagttatgtaacgaaaaattcattcacggtggtaatgtgttggttgatccatctgcaaagatccatccatctgctttaatcggtcctaacgttgtcattggtccaaatgttgttgttggtgaaggtgccagaatccaaagatctgtcttgttatctaactctgaagttaaggaccacgcctgggttaagtctaccattgttggttggaactccagaattggtaagtgggcaagaactgatggtattactgttttaggtgatgatgttgaaattaagaatgaagtctatgttaacggtgcaaaggtcttaccacataaatctatttcctctaacgtcgaacatgaagctattattatgtga

SEQ ID NO: 31886 - protein, 362 aa, Debaryomyces hansenii
MKGLILVGGYGTRLRPLTLTLPKPLVEFGNRPMILHQIEALAKAGVTDIVLAVNYRPEVMVSTLKKYEAEYGVTITFSVEEEPLGTAGPLKLAEKVLKKDDTPIFVLNSDVICDYPFQELADFHKTSGGKATIVATKVDEPSKYGVIVHDRDTPNLIDRFVEKPVEFVGNRINAGLYILNPSVIDLIEMKPTSIEKETFPILVENKELYSFDLEGYWMDVGQPKDFLSGTVLYLTALSKKEPKKLCNEKFIHGGNVLVDPSAKIHPSALIGPNVVIGPNVVVGEGARIQRSVLLSNSEVKDHAWVKSTIVGWNSRIGKWARTDGITVLGDDVEIKNEVYVNGAKVLPHKSISSNVEHEAIIM

SEQ ID NO: 31887 - DNA, 1086 bp, Kluyveromyces lactis
  CDS (1)..(1086)
atgaagggtttaattctagttggtggttacggtaccagattgagacctttgactttgactgttccaaagccattggttgaatttggtaacagaccaatgattttacatcaaatcgaagctttggctgctgctggtgttactgatatcgtgttggccgttaactacagaccagaagttatggttgaaactttgaagaaatacgaagacgaattcggtgtctccatcactttctctgtcgaaaccgaaccattgggtactgctggtccattgaaattggcagaaagtgtcttgaagaaggacaattcaccattctttgtcttgaactcagatgttatctgtgactatccattcaaggaattggctgatttccaccaagctcacggtggtaagggtaccattgtcgctactaaggtcgatgaaccatccaaatacggtgtcattgttcatgacattgctactccaaatttgattgacagatttgtggaaaaaccagttgaattcgtcggtaacagaatcaacgccggtttgtacatcttgaacccggaagttattgacttgattgacttgaagccaacctctattgaaaaggagactttcccaatcttagtcgaacaaaaatccctatactctttcgatcttgaaggatactggatggatgtcggtcaaccaaaggacttcttatctggtacagtgctatatttgaactctttgtccaagagagatccagctaagttggccaagggtgaaaacattgttggcaacgttttggttgacccaactgccaagatttctccaactgcaaaggtcggtcctgatgtagttatcggtccaaacgtcgttatcggtgatggtgtcagaattaccagatctgttgccctatccaactctcatatcaaggaccatgctttggtcaagtccaccatcatcggttggaactctactgtcggtaaatgggctcgtttggaaggtgtcaccgttctaggtgatgatgtcgaagtcaaggacgaaatttacatcaacggtggtaaagtcttgcctcacaagtccatctccgttaatgttccaaaggaagctattattatgtga

SEQ ID NO: 31888 - protein, 361 aa, Kluyveromyces lactis
MKGLILVGGYGTRLRPLTLTVPKPLVEFGNRPMILHQIEALAAAGVTDIVLAVNYRPEVMVETLKKYEDEFGVSITFSVETEPLGTAGPLKLAESVLKKDNSPFFVLNSDVICDYPFKELADFHQAHGGKGTIVATKVDEPSKYGVIVHDIATPNLIDRFVEKPVEFVGNRINAGLYILNPEVIDLIDLKPTSIEKETFPILVEQKSLYSFDLEGYWMDVGQPKDFLSGTVLYLNSLSKRDPAKLAKGENIVGNVLVDPTAKISPTAKVGPDVVIGPNVVIGDGVRITRSVALSNSHIKDHALVKSTIIGWNSTVGKWARLEGVTVLGDDVEVKDEIYINGGKVLPHKSISVNVPKEAIIM

SEQ ID NO: 31889 - DNA, 1095 bp, Pichia angusta
  CDS (1)..(1095)
atgaaaggattaatcttggttggtggttacggtactcgtttgagacccctgacgctgtcgctgccaaaacctttggtcgagtttggtaacagacctatgatcttgcaccagatcgaggccctggccaacgctggctgtaccgacattgttctggcggtgaactacaagccagaagtcatggttggtgccctcaagcaatacgagaaggagtacggcgttagcatcaccttctccgttgaggaggagcctttgggaactgctggtcctttgaagctcgctgagaagatcttgaagaaggacaacaccccaatcttcgttctcaactccgatgtcatctgtgagtaccctctgagggatttgctcgaattccacaccgcccatggtggtgaggccactattgtcgccactaaggtggatgaaccatctaaatacggtgttattgtccacgacagagacgttccaaacctcatcgagagatttgtcgagaagccagtcgaattcgttggtaacagaatcaacgctggtatctacgttttgaacccatccgtgatcgatctgatcgagatgaggccaacttctatcgagcacgagaccttcccaattttggtcgagcaaaagaagctgtactcatttgatctcccaggatactggatggacgttggtcaaccaaaggacttcctctccggtatgtgcctttacctgtccgctttaaccaagaagaactccaatttgctcacgtcgacgtctgaggagtatgttaacggcggtaacgtactgatcgatccatctgccaagatcggaaagggatgtaagatcggtcctaacgtcgtcattggtcctaactgtatcattggtgacggtgtcagaatccaaagatctactattctgaaaaactctcaaatcaaggaccacgcttgggtcaaatctaccattgtgggctggaactctactgttggtaaatgggctagactcgagggtgtcaccgttcttggagaggacgtcactgtcaaggacgaggtctatgtcaacggtggtaaggttttgccgcacaaatctatcaaggacaatgtcgagaccccccaaattattatgtga

SEQ ID NO: 31890 - protein, 364 aa, Pichia angusta
MKGLILVGGYGTRLRPLTLSLPKPLVEFGNRPMILHQIEALANAGCTDIVLAVNYKPEVMVGALKQYEKEYGVSITFSVEEEPLGTAGPLKLAEKILKKDNTPIFVLNSDVICEYPLRDLLEFHTAHGGEATIVATKVDEPSKYGVIVHDRDVPNLIERFVEKPVEFVGNRINAGIYVLNPSVIDLIEMRPTSIEHETFPILVEQKKLYSFDLPGYWMDVGQPKDFLSGMCLYLSALTKKNSNLLTSTSEEYVNGGNVLIDPSAKIGKGCKIGPNVVIGPNCIIGDGVRIQRSTILKNSQIKDHAWVKSTIVGWNSTVGKWARLEGVTVLGEDVTVKDEVYVNGGKVLPHKSIKDNVETPQIIM

SEQ ID NO: 31891 - DNA, 1092 bp, Schizosaccharomyces pombe
  CDS (1)..(1092)
atgaaggctctgattctcgtgggtggctttggtactcgtcttcgtcctttgactttaactttgcccaagcctcttgttgaatttggtaacaagccgatgatccttcaccaagtcgaagctttggcagctgctggtgtcacggatatcgtcttggctgttaattaccgtcccgaaatcatggtagaagctttgaaaaaatacgaaaaggagtataacgttaatattactttctccgttgagaatgagcctttgggaaccgctggacctttggctcttgctcgtgacattcttgctaaagaccactctcctttcttcgtcttgaatagtgatgttatttgtgagtatcctttcgcggatttggcagctttccataaggctcatggtgccgagggtactatcgttgttaccaaggttgaggagccttctaagtatggtgttgtcgttcattatcccaactcagaatccttgattgagcgctttgttgaaaagcctgttgagtttgtatccaacagaattaatggtggtatttacattctaaacccttccgttcttgaccgtattgaacctcgtcctacctcgattgaaaaggaagtctttcccgccatggtcaatgacaagcaattacactctttcgaccttgagggttattggatggatgttggtcaacccaaggattatcttaccggtacttgtttgtatttatcctccttgcgtaagcataagcctgaaatcttggccccagctagtagcaatatcatcggtaatgtgttgattgatccctcagcaaccattggcaaaaattgtaaaattggtcccaatgttgtgattggtcccaacgtaacgattggtgatggtgttcgtctccaacgttgtgccattcttaagtcttctcgcgttcgcgaccatgcctgggttaaatcgagtattgtaggatggaactctacccttggatcttggagtcgtttggaaaacgtgtccgtcttaggcgacgatgtcgttgtcaatgacgagatttacgtaaatggtggcagtattttaccccataagagcattagtgctaacattgaggttcctggtactattgtcatgtaa

SEQ ID NO: 31892 - protein, 363 aa, Schizosaccharomyces pombe
MKALILVGGFGTRLRPLTLTLPKPLVEFGNKPMILHQVEALAAAGVTDIVLAVNYRPEIMVEALKKYEKEYNVNITFSVENEPLGTAGPLALARDILAKDHSPFFVLNSDVICEYPFADLAAFHKAHGAEGTIVVTKVEEPSKYGVVVHYPNSESLIERFVEKPVEFVSNRINGGIYILNPSVLDRIEPRPTSIEKEVFPAMVNDKQLHSFDLEGYWMDVGQPKDYLTGTCLYLSSLRKHKPEILAPASSNIIGNVLIDPSATIGKNCKIGPNVVIGPNVTIGDGVRLQRCAILKSSRVRDHAWVKSSIVGWNSTLGSWSRLENVSVLGDDVVVNDEIYVNGGSILPHKSISANIEVPGTIVM

SEQ ID NO: 31893 - DNA, 1095 bp, Trichoderma reesei
  CDS (1)..(1095)
atgaagggacttattcttgtcggcggctttggcactcgccttcgccctctcaccctgacgctccccaagcctctggttgagttctgcaacaagcccatgattgtgcaccagatcgaggctctcgtcgccgctggcgtgaccgacattgtcctcgccgtcaactaccgcccagaaatcatggaaaagttcctggccgagtacgaggagaaatacaacatcaacattgagttctccgtcgagtcggagcccctcgacaccgccggccccctcaagcttgctgagcgcatcctcggcaaggatgactcgcccttcttcgtcctcaactccgacgtcatctgcgactatcccttcaaggagctcctcgagttccacaaggcccacggcgatgagggcaccattgtcgtcaccaaggtcgaggagccgtccaagtacggtgtcgtcgtccacaagcccaaccacccctcgcgcatcgaccgcttcgtcgagaagcccgtcgagttcgtcggcaaccgcatcaacgccggcatgtacatcttcaacccctccgtcctgaagcgcatcgagcttcgccccacgtcgatcgagaaggagacgttccccgccatggttgccgacaaccagctgcactcgttcgatctcgagggcttctggatggacgttggccagcccaaggacttcctcagcggcacctgcctgtacctgtcctccctcaccaagaagggcagcaaggagctgacccctcccaccgagccctacgttcacggcggcaacgtcatgattcacccttcggccaagattggaaagaactgcagaataggccccaatgtcaccattggcccggatgttgtcgtcggtgacggcgtccgcctgcagcgatgcgtcctcctcaagggctccaaggtcaaggaccacgcctgggtcaagtcgacgattgttggctggaacagcaccgtcggtcgctgggcccgtctcgagaatgtgactgttctcggtgacgacgtgaccattggcgacgagatttacgtcaacggcggcagcgtcctgcctcacaagtccatcaaggccaacgttgacgttcccgccatcattatgtga

SEQ ID NO: 31894 - protein, 364 aa, Trichoderma reesei
MKGLILVGGFGTRLRPLTLTLPKPLVEFCNKPMIVHQIEALVAAGVTDIVLAVNYRPEIMEKFLAEYEEKYNINIEFSVESEPLDTAGPLKLAERILGKDDSPFFVLNSDVICDYPFKELLEFHKAHGDEGTIVVTKVEEPSKYGVVVHKPNHPSRIDRFVEKPVEFVGNRINAGMYIFNPSVLKRIELRPTSIEKETFPAMVADNQLHSFDLEGFWMDVGQPKDFLSGTCLYLSSLTKKGSKELTPPTEPYVHGGNVMIHPSAKIGKNCRIGPNVTIGPDVVVGDGVRLQRCVLLKGSKVKDHAWVKSTIVGWNSTVGRWARLENVTVLGDDVTIGDEIYVNGGSVLPHKSIKANVDVPAIIM

SEQ ID NO: 31895 - DNA, 1092 bp, Yarrowia lipolytica
  CDS (1)..(1092)
atgaaaggacttattcttgttggaggctacggcacccgtctgcgacccctgactctcactctgcccaagcccctcgtggagtttggaaacaagcccatgattctccaccaggtggagtctctggccgccgccggcgtcaaggacattgtcctggccgtcaactacagacctgaggtcatgatcgagaccctcaagaagtacgaggagaagtacggcgtcaacatcaccttctccgtcgagaccgagcctctcggaactgctggacccctcaagctggccgaggagattctgtgcaaggacgatacccccttctttgttctcaattccgacgttatctgcgactaccccttcgccgagctcgccgagttccacaagaagaacaatgccgaggccaccatcgttgccacaaaggtcgaggagccctccaagtacggtgtcattgtccacaagcagggcacctccaagattgaccgattcgtcgagaagcccgtcgagttcgtcggcaaccgaatcaacgccggcatttacattctcaacccctccgttgtcgatctcatcgatctgcgacccacctccattgagaaggagactttcccccagctggctgcccgagagtctctgtactcctttgacttggagggctactggatggatgttggacagcccaaggacttcctctccggaacttgtctttacctgtcttctttgtccaagaagaaccccgaggctctggtccccacttccgaaccctacgtcaccggtggaaacgttctggtcgaccctactgccaagatctctccccaggctaagattggccccaacgttgtgattggacctggcgccgtcatcggagagggtgctcgactctctcgatgtgtcgttctcgccaactctaccatcaagccccatgcattcgtcaagaactccatcattggctggaacggacgtgtcggccgatgggctcgaatcgagaacgtttccgtctttggagacgatgtggaggtcaaggacgaggtttacgttaacggtggccgagttctgccccacaagaccatctccggcaacattgagaagcccgagattatcatgtag

SEQ ID NO: 31896 - protein, 363 aa, Yarrowia lipolytica
MKGLILVGGYGTRLRPLTLTLPKPLVEFGNKPMILHQVESLAAAGVKDIVLAVNYRPEVMIETLKKYEEKYGVNITFSVETEPLGTAGPLKLAEEILCKDDTPFFVLNSDVICDYPFAELAEFHKKNNAEATIVATKVEEPSKYGVIVHKQGTSKIDRFVEKPVEFVGNRINAGIYILNPSVVDLIDLRPTSIEKETFPQLAARESLYSFDLEGYWMDVGQPKDFLSGTCLYLSSLSKKNPEALVPTSEPYVTGGNVLVDPTAKISPQAKIGPNVVIGPGAVIGEGARLSRCVVLANSTIKPHAFVKNSIIGWNGRVGRWARIENVSVFGDDVEVKDEVYVNGGRVLPHKTISGNIEKPEIIM

SEQ ID NO: 31897 - DNA, 1086 bp, Saccharomyces cerevisiae
  CDS (1)..(1086)
atgaaaggtttaattttagtcggtggttacggtaccagattgagacctttaactttgaccgttccaaagccactggttgaattcggtaatagaccaatgattttacaccaaatcgaggctttagccaacgctggtgttactgacatcgttcttgctgttaattacagaccagaagtcatggtggaaactttgaagaagtacgaaaaggaatatggtgttaacatcactttctctgtagaaactgaaccattaggtactgcaggtccattgaaattggctgaagatgttttgaagaaggacaactctccatttttcgtcctaaactccgacgtcatttgcgaatatccattcaaggaattggctgacttccacaaagctcacggtggtaaaggtaccattgttgctaccaaggtcgacgaaccttctaaatacggtgtcattgtccatgatatagctactccaaacttgattgacagatttgttgaaaagccaaaggaatttgttggtaacagaattaacgccggtttgtacattttaaacccagaagtcattgacttgattgaaatgaagccaacttcaattgaaaaggaaactttcccaatcttggtcgaagaaaaacaactatattccttcgatttggaaggtttctggatggatgttggtcaaccaaaggacttcttgtctggtaccgttctttacttgaactctttggccaagagacaaccaaaaaaattggctacaggtgccaacattgttggtaatgccttgatcgacccaaccgctaagatttcctccactgctaagattggcccagacgtggttatcggtcctaatgtcaccatcggtgatggtgttagaatcaccagatctgttgttttgtgcaactccaccatcaagaaccactccttggtcaaatctaccatcgtaggctggaactctaccgttggtcaatggtgtcgtttggaaggtgtcactgtcttgggtgacgacgttgaagttaaggacgaaatctacatcaacggtggtaaagtcttacctcataagtctatctccgataatgttccaaaggaagctattattatgtga

SEQ ID NO: 31898 - protein, 361 aa, Saccharomyces cerevisiae
MKGLILVGGYGTRLRPLTLTVPKPLVEFGNRPMILHQIEALANAGVTDIVLAVNYRPEVMVETLKKYEKEYGVNITFSVETEPLGTAGPLKLAEDVLKKDNSPFFVLNSDVICEYPFKELADFHKAHGGKGTIVATKVDEPSKYGVIVHDIATPNLIDRFVEKPKEFVGNRINAGLYILNPEVIDLIEMKPTSIEKETFPILVEEKQLYSFDLEGFWMDVGQPKDFLSGTVLYLNSLAKRQPKKLATGANIVGNALIDPTAKISSTAKIGPDVVIGPNVTIGDGVRITRSVVLCNSTIKNHSLVKSTIVGWNSTVGQWCRLEGVTVLGDDVEVKDEIYINGGKVLPHKSISDNVPKEAIIM

SEQ ID NO: 31899 - DNA, 774 bp, Salmonella typhimurium
  CDS (1)..(774): transl_table=11
atgaaagcggtcatcctggctggtggacttggtaccagactaagtgaagaaacaattgtaaaaccaaaaccgatggtagaaattggtggcaagcctattctttggcacattatgaaaatgtattctgtgcatggtatcaaggattttattatctgctgtggttataaaggatatgtgattaaagaatattttgcgaactacttccttcacatgtcagatgtaacattccatatggctgaaaaccgtatggaagttcaccataaacgtgttgaaccatggaatgtcacattggttgatacgggtgattcttcaatgactggtggtcgtctgaaacgtgttgctgaatacgtaaaagatgacgaggctttcctgtttacttatggtgatggcgttgccgaccttgatatcaaagcgactatcgatttccataaggctcacggtaagaaagcgactttaacagctacttttccaccaggacgctttggcgcattagatatccgagctggtcaggtccggtcattccaggaaaaaccgaaaggcgatggggcaatgatcaatggtggtttctttgtgttgaatccatcggttatcgatctcatcgataacgatgcaacaacctgggaacaagagccattaatgacattggcacaacagggggagttaatggcttttgaacacccaggtttctggcagccgatggataccctacgtgataaagtttacctcgaagggctgtgggaaaaaggtaaagctccgtggaaaacctgggagtaa

SEQ ID NO: 31900 - protein, 257 aa, Salmonella typhimurium
MKAVILAGGLGTRLSEETIVKPKPMVEIGGKPILWHIMKMYSVHGIKDFIICCGYKGYVIKEYFANYFLHMSDVTFHMAENRMEVHHKRVEPWNVTLVDTGDSSMTGGRLKRVAEYVKDDEAFLFTYGDGVADLDIKATIDFHKAHGKKATLTATFPPGRFGALDIRAGQVRSFQEKPKGDGAMINGGFFVLNPSVIDLIDNDATTWEQEPLMTLAQQGELMAFEHPGFWQPMDTLRDKVYLEGLWEKGKAPWKTWE

SEQ ID NO: 31901 - DNA, 1086 bp, Oryza sativa
  CDS (1)..(1086)
atgaaggcgctcattcttgttggaggcttcggcactcgccttcggcctttgacgctcagtttcccaaagcctcttgttgatttcgcgaacaagcccatgattctgcatcagattgaggccttgaaagaagttggagtaacagaagttgttttagccatcaactaccgaccggaggtaatgctcaatttcctgaaggactttgaggataagcttggcatcacaatcacgtgttcccaagagactgagcccttgggaactgctggccctcttgctctagcaagggacaagcttgtggatggatctggtgagccattctttgtcctcaacagtgacgtcataagtgaatacccttttgctgagctcataaaatttcacaagagccatggtggtgaggcaacgattatggtcaccaaggtggacgaaccatcaaaatatggtgttgtggttatggaggaggtcactggaatggtggaaaaatttgttgagaaaccaaaaatatttgtaggcaacaagatcaatgcgggaatttacttgttgaatccatctgtcctggaccgcatcgagctgaagccaacttcaattgagaaagaggtctttcctcgaattgcatctgatgcaaagctctttgctctggtccttccaggtttttggatggatgttggccaaccaagggattacattacaggcttgcgcctttatctggattcacttaggaagagatcaaccaacaggttagccactggagcacacattgttgggaatgtgctagttcacgagagtgccaagattggcgaaggctgtctgattggtcctgatgttgctatcggtcctggatgcgtcgtggaggatggtgtgaggctttcccgttgcacggtgatgcgtggcgtgcacattaagaagcatgcttgcatatcaaacagcattattggatggcactcaactgttggacaatgggcacggatagaaaatatgactatcctgggagaggacgtacatgtaggtgatgaggtctataccaacggcggtgttgttctcccgcacaaagagatcaagtcaagcatcctgaagcctgagattgtcatgtga

SEQ ID NO: 31902 - protein, 361 aa, Oryza sativa
MKALILVGGFGTRLRPLTLSFPKPLVDFANKPMILHQIEALKEVGVTEVVLAINYRPEVMLNFLKDFEDKLGITITCSQETEPLGTAGPLALARDKLVDGSGEPFFVLNSDVISEYPFAELIKFHKSHGGEATIMVTKVDEPSKYGVVVMEEVTGMVEKFVEKPKIFVGNKINAGIYLLNPSVLDRIELKPTSIEKEVFPRIASDAKLFALVLPGFWMDVGQPRDYITGLRLYLDSLRKRSTNRLATGAHIVGNVLVHESAKIGEGCLIGPDVAIGPGCVVEDGVRLSRCTVMRGVHIKKHACISNSIIGWHSTVGQWARIENMTILGEDVHVGDEVYTNGGVVLPHKEIKSSILKPEIVM

SEQ ID NO: 31903 - DNA, 1086 bp, Oryza sativa
  CDS (1)..(1086)
atgaaggcgctcattctcgtgggaggcttcggcactcgcctgcggccgctgactctcagcgtgccaaagccgctcgtcgatttcgggaacaagcccatgatcctgcatcagatcgaagctctgaaagaagttggagttacagaagttgttctggccatcaattaccagcccgaggtcatgcttaactttctcaaggacttcgagagcaagcttggtatcaagatcacctgctcgcaggagacagagccactcggaaccgccgggccgctggccctggcacgcgacaagctcgctgacggctccggcgaccctttcttcgtcctcaacagcgacgtgatcagcgagtacccattcgccgagctcatccagttccacaagtcccatggcggcgaggccacgatcatggtcaccaaggttgacgagccttccaagtacggcgtggtggtcatggaggatgagaccgacaaggtggagcgcttcgtggagaagcccaaggtgttcgtcggcaacaagatcaacgccggcatctacctgctcaacccgtcggtgctggaccgcatcgagctgaagcccacgtccatcgagaaggaggtgttcccgcgcatcgccgcggacaatggcctgttcgccatggtcctgcctgggttctggatggacatcgggcagccgagggactacatcaccgggctgaggctgtacctcgactcgcttaggaagaaggcgcccgccaagctcgcgtcgggcgcgcacgtcctgggcaacgtgctcgtccacgagaccgccgtcatcggcgagggttgcctgatcgggccggacgtcgccgttggccccgggtgcgtggtggaggccggggtgaggctgtcccggtgcacggtgatgcgcggcgcccgcgtcaagaagcacgcgtgcatctccagcagcatcatcgggtggcactccaccgtcggcatgtgggcgcgcgtcgagaacatgaccatcctcggcgaggacgtgcacgtctgcgacgaggtctacagcaacggcggcgtggtgctcccgcacaaggagatcaagtccagcatcctcaagcccgagattgtcatgtga

SEQ ID NO: 31904 - protein, 361 aa, Oryza sativa
MKALILVGGFGTRLRPLTLSVPKPLVDFGNKPMILHQIEALKEVGVTEVVLAINYQPEVMLNFLKDFESKLGIKITCSQETEPLGTAGPLALARDKLADGSGDPFFVLNSDVISEYPFAELIQFHKSHGGEATIMVTKVDEPSKYGVVVMEDETDKVERFVEKPKVFVGNKINAGIYLLNPSVLDRIELKPTSIEKEVFPRIAADNGLFAMVLPGFWMDIGQPRDYITGLRLYLDSLRKKAPAKLASGAHVLGNVLVHETAVIGEGCLIGPDVAVGPGCVVEAGVRLSRCTVMRGARVKKHACISSSIIGWHSTVGMWARVENMTILGEDVHVCDEVYSNGGVVLPHKEIKSSILKPEIVM

SEQ ID NO: 31905 - DNA, 1086 bp, Oryza sativa
  CDS (1)..(1086)
atgaaggcgctcattctggttggaggcttcggcactcgccttcggcctttaacgctcagtttcccaaagcctcttgttgatttcgcgaacaagcccatgattctgcatcagattgaggccttgaaagaagttggagtaacagaagttgttttagccatcaactaccgcccggaggtaatgctcaatttcctgaaggactttgaggataagcttggcatcacaatcacgtgttcccaagagactgagcccttgggaactgctggccctcttgctctagcaagggacaagcttgtggatggatctggtgagccattctttgtcctcaacagtgacgtcataagtgaatacccttttgctgagctcataaaatttcacaagaaccatggtggtgaggcaacaattatggtcaccaaggtggacgaaccatcaaaatatggtgttgtggttatggaggaggccactggaatggtggaaaaatttgttgagaaaccaaaaatatttgtaggcaacaagatcaatgcaggaatttacttgttgaacccgtctgtcctggaccgcatcgagctaaagccaacttcaattgagaaagaggtctttcctcgaatctcagctgatgcaaagctctttgctatggtccttccaggtttttggatggatgttggccaaccaagggattacattacaggcttgcgcctttatctggattcacttaggaagagatcagccaacaggttagccactggagcacacattgttgggaatgtgctagttcacgagagtgcgaagattggcgaaggctgtctgattggtcctgatgttgctattggtcctggatgcgtcgtggaggatggtgtgaggctttcccgttgcacggtgatgcgtggcgtgcgtattaagaagcatgcttgcatatcaaacagcattattggatggcactcaactgttggacaatgggcacggatagaaaatatgactatcctaggagaggacgtacatgtaggtgatgaggtctataccaacggcggtgttattctcccgcacaaagagatcaaatcaagcatcctgaaacctgagattgtcatgtga

SEQ ID NO: 31906 - protein, 361 aa, Oryza sativa
MKALILVGGFGTRLRPLTLSFPKPLVDFANKPMILHQIEALKEVGVTEVVLAINYRPEVMLNFLKDFEDKLGITITCSQETEPLGTAGPLALARDKLVDGSGEPFFVLNSDVISEYPFAELIKFHKNHGGEATIMVTKVDEPSKYGVVVMEEATGMVEKFVEKPKIFVGNKINAGIYLLNPSVLDRIELKPTSIEKEVFPRISADAKLFAMVLPGFWMDVGQPRDYITGLRLYLDSLRKRSANRLATGAHIVGNVLVHESAKIGEGCLIGPDVAIGPGCVVEDGVRLSRCTVMRGVRIKKHACISNSIIGWHSTVGQWARIENMTILGEDVHVGDEVYTNGGVILPHKEIKSSILKPEIVM

SEQ ID NO: 31907 - DNA, 1086 bp, Zea mays
  CDS (1)..(1086)
atgaaggcgctcattcttgtcgggggtttcggaacccgccttcggcctttgactcttagcttcccgaagccccttgtggattttgcaaacaagcccatgattctgcatcagatcgaagctttgaaagaagttggggtcacagaggtggttttggccatcaactaccgcccagaggtaatgattaatttcttgaaggactttgaggataaacttggcatcacaattacatgctcccaagagactgagcccttaggaactgctggccctcttgctctagcaagggacaagcttgcggatggatctggcgagccattctttgtcctcaacagcgatgtcataagcgaatacccatttgctgaactcatcaaatttcacaagtctcatggtggtgaggcaacaattatggtcactaaggtggatgaaccatctaaatatggtgttgtggttatggaggaggcaactggcagggtggaaaggtttgttgagaagccaaaaatatttgtgggcaacaagatcaatgctgggatttacttgctgaacccatctgtccttgaccgcattgaactgaggccaacatcaattgagaaagaggtcttccctcaaattgcagctgatcaacagctctatgcaatggtccttcctggtttttggatggatgttggtcagccaagggactacattactggattgcgtctttatctagactcgcttaggaagaaatcggctgccaggctagctgctggagcgcatgttgttggcaacgtgctggtgcatgagagcgccaagatcggagaaggttgcctgatcggtcctgatgtcgcaattggacctggatgtgtcgtggaggatggcgtgaggctttcccgctgcactgtcatgcgtggtgtgcgtatcaagaagcatgcctgcatctcgaacagcattatcgggtggcactcaactgttggacaatgggcacggatagagaatatgaccatcctgggcgaggatgttcatgtgtgtgacgaggtatacagtaatggcggtgttgttctcccacacaaagagatcaagtcaagcattctgaagcctgagatcgtcatgtaa

SEQ ID NO: 31908 - protein, 361 aa, Zea mays
MKALILVGGFGTRLRPLTLSFPKPLVDFANKPMILHQIEALKEVGVTEVVLAINYRPEVMINFLKDFEDKLGITITCSQETEPLGTAGPLALARDKLADGSGEPFFVLNSDVISEYPFAELIKFHKSHGGEATIMVTKVDEPSKYGVVVMEEATGRVERFVEKPKIFVGNKINAGIYLLNPSVLDRIELRPTSIEKEVFPQIAADQQLYAMVLPGFWMDVGQPRDYITGLRLYLDSLRKKSAARLAAGAHVVGNVLVHESAKIGEGCLIGPDVAIGPGCVVEDGVRLSRCTVMRGVRIKKHACISNSIIGWHSTVGQWARIENMTILGEDVHVCDEVYSNGGVVLPHKEIKSSILKPEIVM

SEQ ID NO: 31909 - DNA, 1086 bp, Brassica napus
  CDS (1)..(1086)
atgaaggctctcattcttgttggagggttcgggactcggttaagaccattgactctcagtttaccaaagccgcttgttgattttgctaataaacccatgatccttcaccagatagaggctcttaaggctgttggggttgatgaagtggttttgacagtcaattaccaggcagaggtgatgcttaacttcttgaaggacgttgaggaaaagctcgagatcaaaatcacttgctcaagagagactgagcctatgggtacggctggtcctctggctctagcgagagacaaactggttgacggatctggagaacctttctttgtcctcaacagtgatgtgattagtgagtatccattcaaagaaatgattgagtttcataaagctcatggtggggaagcctccataatggtgacaaaggttgatgaaccgtccaagtatggagttgtggtcatggatgaaactacaggaaaagtggagaagtttgtggaaaagccaaaactgtttgtaggtaacaaaatcaacgctgggatctaccttctgaacccatctgttctcgacaagatcgagctaagaccgacatcaatcgagaaagagaccttccccaagattgcagcagctcaaggactctacgcgatggttctacctggattctggatggacattgggcaacctcgggactacataacgggcctgagactctacttagactctctgagaaagaagtctcccgccaagctaaccactggtgcacacattgttgggaacgttctggtggatgaaaccgctaagattggggaagggtgtttgataggaccagacgtggccattggtccaggctgcgttgttgagtcaggggtgaggctttcacggtgcacggtcatgcgtggggcgaggatcaagaaacatgcgtgtatctcgagcagtatcatagggtggcactcgacggttgggcagtgggctaggattgagaacatgacgatcttgggggaagatgttcatgtgtgtgatgagatatacaccaatggaggagttgttttgccacacaaggagatcaaatccaacatcttgaagccagagatagttatgtga

SEQ ID NO: 31910 - protein, 361 aa, Brassica napus
MKALILVGGFGTRLRPLTLSLPKPLVDFANKPMILHQIEALKAVGVDEVVLTVNYQAEVMLNFLKDVEEKLEIKITCSRETEPMGTAGPLALARDKLVDGSGEPFFVLNSDVISEYPFKEMIEFHKAHGGEASIMVTKVDEPSKYGVVVMDETTGKVEKFVEKPKLFVGNKINAGIYLLNPSVLDKIELRPTSIEKETFPKIAAAQGLYAMVLPGFWMDIGQPRDYITGLRLYLDSLRKKSPAKLTTGAHIVGNVLVDETAKIGEGCLIGPDVAIGPGCVVESGVRLSRCTVMRGARIKKHACISSSIIGWHSTVGQWARIENMTILGEDVHVCDEIYTNGGVVLPHKEIKSNILKPEIVM

SEQ ID NO: 31911 - DNA, 1086 bp, Glycine max
  CDS (1)..(1086)
atgaaggcattgattctggttggggggtttggaacaaggctgaggccactgacactcagttttcctaagcctcttgttgattttgctaacaaacctatgattctgcatcagatagaggcccttaaggccattggagttactgaggtggtgctagccatcaactaccaaccagaggttatgttgaatttcttgaaggattttgaaacaaagctcggcatcaagatcacatgttctcaggaaactgaaccattgggaacagcaggtcctctggctcttgccagggataagctgatagatgactctggagaacccttttttgttctcaacagtgatgttatcagtgagtatccactcaaagaaatgattgaattccataaaaaccatggaggagaggcttccataatggtaaccaaggttgacgagccatcaaagtacggcgtggttgtgatggaagagagcacagggcaggttgataaatttgttgaaaaaccgaaattgtttgttggtaacaaaatcaatgctggaatttacctgctgaacccctctgttttggatcgaattgaactgaggcccacttctatcgagaaagaggtgtttccaaagattgcttccgagaaaaagctatatgcaatggtcctgccaggattttggatggacattggacaaccgagggattatattgctggcctgaggctttacctggactcattgaggaagaagtcatcttctaagttggccagtggctctcaaattgtagggaatgtcattgtggatgagacagccaaaattggcgagggatgcctcattggacctgatgttgctattggtcctggctgcgttattgagcaaggtgttagactcaaaagctgcacaataatgcgtggagtccgagttaagaagcatgcttgtgtatccagcagtattgttgggtggcattccactgttgggcaatgggctcgagtggataatatgaccatccttggagaagatgtccatgtatgtgatgaaatttacagcaatggtggtgttgttttgccacacaaggagatcaagtcaaatattctgaagccggagattgtcatgtga

SEQ ID NO: 31912 - protein, 361 aa, Glycine max
MKALILVGGFGTRLRPLTLSFPKPLVDFANKPMILHQIEALKAIGVTEVVLAINYQPEVMLNFLKDFETKLGIKITCSQETEPLGTAGPLALARDKLIDDSGEPFFVLNSDVISEYPLKEMIEFHKNHGGEASIMVTKVDEPSKYGVVVMEESTGQVDKFVEKPKLFVGNKINAGIYLLNPSVLDRIELRPTSIEKEVFPKIASEKKLYAMVLPGFWMDIGQPRDYIAGLRLYLDSLRKKSSSKLASGSQIVGNVIVDETAKIGEGCLIGPDVAIGPGCVIEQGVRLKSCTIMRGVRVKKHACVSSSIVGWHSTVGQWARVDNMTILGEDVHVCDEIYSNGGVVLPHKEIKSNILKPEIVM

SEQ ID NO: 31913 - DNA, 1086 bp, Glycine max
  CDS (1)..(1086)
atgaaggcactaattcttgttggagggtttggaacaaggttgaggccattgacactcagtgttcccaagcctcttgttgattttgctaacaagcccatgattctgcatcagatagaagctctcaaggccattggcgtcaatgaagtggtactagctatcaattaccaaccagaggtcatgttgaatttcttgaaggagtttgaggcaaaacttggtatcaaaatcacttgttctcaagaaactgaaccgctaggtactgcaggccccttggctcttgcgagggataagctaatagatgactctggagagccattttttgttctcaacagtgatgttatcagtgagtacccacttaaagaaatgattgaattccacaaaacccatggaggagaggctaccataatggtgacaaaggtcgatgagccatcaaaatatggtgtggttgtgatggaggagactaccgggcaggttgagagatttgtagagaaaccaaagttgtttgttggcaacaaaatcaatgctggaatctacctattgaacccctcagttttggatcgaattgaactgaggcccacttctatcgagaaagaggtgtttccaaagattgcagcagagaaaaagctatatgcaatggtcctgccaggattctggatggacattggacaaccaaaggactatatttctggcctgacactttacctggactcgctgaggaaaaagtctccttctaaactggccagtggtcctcactttgtggggaatgtcattgtgcatgaaactgccactattggcgagggatgtctcgttggacctgatgttgcaatcggtcctggctgtgttgttgagtcaggtgtcaggctttcacgctgcacagttatgcgaggagttcggattaaaaagcatacttgcatatctaacagtatcattgggtggcattccactgttgggcaatgggcccgtgtggagaatatgactatccttggagaagatgtccatgtttgtgatgaagtttatagcaatggtggtgtagttttgccccacaaggagatcaagtcaaacattctaaagccagagattgtcatgtga

SEQ ID NO: 31914 - protein, 361 aa, Glycine max
MKALILVGGFGTRLRPLTLSVPKPLVDFANKPMILHQIEALKAIGVNEVVLAINYQPEVMLNFLKEFEAKLGIKITCSQETEPLGTAGPLALARDKLIDDSGEPFFVLNSDVISEYPLKEMIEFHKTHGGEATIMVTKVDEPSKYGVVVMEETTGQVERFVEKPKLFVGNKINAGIYLLNPSVLDRIELRPTSIEKEVFPKIAAEKKLYAMVLPGFWMDIGQPKDYISGLTLYLDSLRKKSPSKLASGPHFVGNVIVHETATIGEGCLVGPDVAIGPGCVVESGVRLSRCTVMRGVRIKKHTCISNSIIGWHSTVGQWARVENMTILGEDVHVCDEVYSNGGVVLPHKEIKSNILKPEIVM

SEQ ID NO: 31915 - DNA, 1086 bp, Glycine max
  CDS (1)..(1086)
atgaaggcattgattctggttggggggtttggaacaaggctgaggccactgacactcagttttcctaagcctcttgttgattttgctaacaaacctatgattttgcatcagatagaagcccttaaggccattggagttactgaggtagtgctagccatcaactaccaaccagaggttatgttgaatttcttgaaggattttgaatcaaagctcggcatcaagatcacatgttctcaggaaactgaaccattgggaacagcaggtcctctggctcttgctagggataagctgatagatgactctggagaacccttttttgttctcaacagtgatgttatcagtgagtatccacttaaagaaatgattgaattccataaaagccatggaggagaggcttccataatggtaacaaaggttgatgagccatcaaagtacggcgtggttgtgatggaagagagcacagggcaggttgataaatttgttgaaaaaccgaagttgtttgttggtaacaaaatcaatgctggaatttacctgctgaacccctctgttttggatcgaattgaactgaggcccacttctattgagaaagaggtgtttccaaagattgctgcagagaaaaagctatttgcaatggtcctgccaggattttggatggacattggacaaccgagggattatattgctggcctgaggctttacctggactcattgaggaagaagtcatcttctaagttggccagtggctctcaaattgtagggaatgtcattgtggatgagacagccaaaattggcgagggatgcctcattggacctgatgttgctattggtcctggctgcgttattgagcaaggtgttagactcaaaagctgcacaataatgcgtggagtccgagttaagaagcatgcttgtgtatccagcagtattgttgggtggcattcaactgttgggcaatgggctcgagtggataatatgaccatccttggagaagatgtccatgtatgtgatgaaatttacagcaatggtggtgttgttttgccgcacaaggagatcaagtcaaatattctgaagccggagattgtcatgtga

SEQ ID NO: 31916 - protein, 361 aa, Glycine max
MKALILVGGFGTRLRPLTLSFPKPLVDFANKPMILHQIEALKAIGVTEVVLAINYQPEVMLNFLKDFESKLGIKITCSQETEPLGTAGPLALARDKLIDDSGEPFFVLNSDVISEYPLKEMIEFHKSHGGEASIMVTKVDEPSKYGVVVMEESTGQVDKFVEKPKLFVGNKINAGIYLLNPSVLDRIELRPTSIEKEVFPKIAAEKKLFAMVLPGFWMDIGQPRDYIAGLRLYLDSLRKKSSSKLASGSQIVGNVIVDETAKIGEGCLIGPDVAIGPGCVIEQGVRLKSCTIMRGVRVKKHACVSSSIVGWHSTVGQWARVDNMTILGEDVHVCDEIYSNGGVVLPHKEIKSNILKPEIVM

SEQ ID NO: 31917 - DNA, 1086 bp, Glycine max
  CDS (1)..(1086)
atgaaggcattgattctggttgggggatttggaacaaggctgaggccactgacactcagtttccctaagcctcttgttgattttgctaacaagcctatgattttgcatcagatagaagcccttaaggccattggagtgactgaggtagtgctagccatcaattaccaaccagaggttatgttgaatttcttgaaggattttgaatcaaagctcggcatcaagatcacatgttctcaggaaactgaaccactgggaacagcaggtcccctggctcttgctagggataagctgatagatgattctggagaacccttttttgttctcaacagtgatgttatcagtgagtatccacttaaagaaatgattgaattccataaaagccatggaggagaggcttccataatggtaacaaaggttgatgagccatcaaagtacggcgtggttgtgatggaagagagcacagggcaggttgataaatttgttgaaaaaccgaagttgtttgttggtaacaaaatcaatgctggaatttacctgctgaacccctctgttttggatcgaattgaactgaggcccacttctattgagaaagaggtgtttccaaagattgctgcagagaaaaagctatttgcaatggtcctgccaggattttggatggacattggacaaccgagggactatatttctggcctgaggctttacctggactcattgaagaagaagtcatcatctaagttggccagtggctctcaatttgtagggaatgtcattgtggatgagacagccaaaattggtgagggatgtctcattggacctgatgttgctattggtcctggctgcattattgagcaaggtgttagactcaaaagctgcacaataatgcgtggagtccgggttaagaagcatgcttgtgtatccagcagtattgttgggtggcattccactgttgggcaatgggctcgagtggataatatgaccatccttggagaagatgtccatgtatgtgatgaaatttacagcaatggtggtgttgttttgccacacaaggagatcaagtcaaatattctgaagccggagattgtcatgtga

SEQ ID NO: 31918 - protein, 361 aa, Glycine max
MKALILVGGFGTRLRPLTLSFPKPLVDFANKPMILHQIEALKAIGVTEVVLAINYQPEVMLNFLKDFESKLGIKITCSQETEPLGTAGPLALARDKLIDDSGEPFFVLNSDVISEYPLKEMIEFHKSHGGEASIMVTKVDEPSKYGVVVMEESTGQVDKFVEKPKLFVGNKINAGIYLLNPSVLDRIELRPTSIEKEVFPKIAAEKKLFAMVLPGFWMDIGQPRDYISGLRLYLDSLKKKSSSKLASGSQFVGNVIVDETAKIGEGCLIGPDVAIGPGCIIEQGVRLKSCTIMRGVRVKKHACVSSSIVGWHSTVGQWARVDNMTILGEDVHVCDEIYSNGGVVLPHKEIKSNILKPEIVM

SEQ ID NO: 31919 - DNA, 1086 bp, Zea mays
  CDS (1)..(1086)
atgaaggccctcattctcgtcggaggcttcggcacccgcctgcgcccgctcacgctcagcgtgcccaagccgctcgtggatttcggcaacaagcccatgatcctgcaccagatcgaggctctgaaggaagttggtgttacagaggttgtcctggccatcaattaccagcctgaggtcatgctcaactttctcaaggacttcgagagcaagcttggcatcaagatcacctgctcgcaggagacggagcccctcgggaccgcaggcccgctggccctggcccgcgacaagctcgccgacggatccggcgaccctttcttcgtgctcaacagcgacgtgatcagcgagtacccgttcgccgagctcattgagttccacagggcccacggcggcgaggccacgatcatggtgaccaaggtcgacgagccgtccaagtacggcgtggtggtcatggaggagggcaccggcaaggtggagcggttcgtggagaagcccaaggcgttcgtgggcaacaagatcaacgccggcatctacctgctcaacccgtccgtgctcggccgcatcgagctgaagccgacgtccatcgagaaggaggtgttcccgcgcgtcgcggcggacggggccctcttcgccatggttctcccgggtttctggatggacatcgggcagccgagggactacatcacgggcctgcgcctgtacctggactcgctgcggaagaaggcgcccgccaggctcgcgtcgggcgcgcacgtcctgggcaacgtgctggtgcacgagaccgcggtcatcggggacggctgcctcatcgggcccgacgtcgcggtcgggccaggctgcgtggtggaggccggggtgcgcctgtcccgctgcaccgtcatgcgcgccgcgcgcgtcaagcagcacgcctgcgtctccagcagcatcatcggctggcactccaccgtcggcaagtgggcgcgcgtcgagaacatgaccatcctcggcgaggacgtccacgtctgcgacgagatctacagcaacggcggcgtcgtgctcccgcacaaggagatcaaatccagcatcctcaagcccgagatcgtcatgtga

SEQ ID NO: 31920 - protein, 361 aa, Zea mays
MKALILVGGFGTRLRPLTLSVPKPLVDFGNKPMILHQIEALKEVGVTEVVLAINYQPEVMLNFLKDFESKLGIKITCSQETEPLGTAGPLALARDKLADGSGDPFFVLNSDVISEYPFAELIEFHRAHGGEATIMVTKVDEPSKYGVVVMEEGTGKVERFVEKPKAFVGNKINAGIYLLNPSVLGRIELKPTSIEKEVFPRVAADGALFAMVLPGFWMDIGQPRDYITGLRLYLDSLRKKAPARLASGAHVLGNVLVHETAVIGDGCLIGPDVAVGPGCVVEAGVRLSRCTVMRAARVKQHACVSSSIIGWHSTVGKWARVENMTILGEDVHVCDEIYSNGGVVLPHKEIKSSILKPEIVM

SEQ ID NO: 31921 - DNA, 20 bp, Artificial sequence
  primer
atgaaagcagtgattctggc

SEQ ID NO: 31922 - DNA, 20 bp, Artificial sequence
  primer
tcaccattgtttccatggcg

SEQ ID NO: 31923 - protein, 357 aa, Artificial sequence
  consensus sequence
  Variant (3)..(3): Xaa in position 3 is any amino acid
  Variant (4)..(4): Xaa in position 4 is any or no amino acid
  Variant (7)..(7): Xaa in position 7 is any amino acid
  Variant (10)..(10): Xaa in position 10 is any amino acid
  Variant (14)..(17): Xaa in position 14 to 17 is any amino acid
  Variant (18)..(18): Xaa in position 18 is any or no amino acid
  Variant (20)..(22): Xaa in position 20 to 22 is any amino acid
  Variant (26)..(32): Xaa in position 26 to 32 is any amino acid
  Variant (33)..(34): Xaa in position 33 to 34 is any or no amino acid
  Variant (36)..(38): Xaa in position 36 to 38 is any amino acid
  Variant (40)..(47): Xaa in position 40 to 47 is any amino acid
  Variant (49)..(57): Xaa in position 49 to 57 is any amino acid
  Variant (59)..(65): Xaa in position 59 to 65 is any amino acid
  Variant (66)..(68): Xaa in position 66 to 68 is any or no amino acid
  Variant (70)..(80): Xaa in position 70 to 80 is any amino acid
  Variant (81)..(103): Xaa in position 81 to 103 is any or no amino acid
  Variant (105)..(107): Xaa in position 105 to 107 is any amino acid
  Variant (109)..(120): Xaa in position 109 to 120 is any amino acid
  Variant (121)..(129): Xaa in position 121 to 129 is any or no amino acid
  Variant (131)..(135): Xaa in position 131 to 135 is any amino acid
  Variant (137)..(148): Xaa in position 137 to 148 is any amino acid
  Variant (151)..(153): Xaa in position 151 to 153 is any amino acid
  Variant (155)..(168): Xaa in position 155 to 168 is any amino acid
  Variant (169)..(170): Xaa in position 169 to 170 is any or no amino acid
  Variant (172)..(182): Xaa in position 172 to 182 is any amino acid
  Variant (183)..(185): Xaa in position 183 to 185 is any or no amino acid
  Variant (187)..(187): Xaa in position 187 is any amino acid
  Variant (191)..(195): Xaa in position 191 to 195 is any amino acid
  Variant (196)..(199): Xaa in position 196 to 199 is any or no amino acid
  Variant (202)..(202): Xaa in position 202 is any amino acid
  Variant (204)..(208): Xaa in position 204 to 208 is any amino acid
  Variant (210)..(214): Xaa in position 210 to 214 is any amino acid
  Variant (215)..(218): Xaa in position 215 to 218 is any or no amino acid
  Variant (220)..(225): Xaa in position 220 to 225 is any amino acid
  Variant (226)..(227): Xaa in position 226 to 227 is any or no amino acid
  Variant (229)..(239): Xaa in position 229 to 239 is any amino acid
  Variant (240)..(240): Xaa in position 240 is any or no amino acid
  Variant (242)..(247): Xaa in position 242 to 247 is any amino acid
  Variant (249)..(250): Xaa in position 249 to 250 is any amino acid
  Variant (253)..(259): Xaa in position 253 to 259 is any amino acid
  Variant (261)..(267): Xaa in position 261 to 267 is any amino acid
  Variant (268)..(349): Xaa in position 268 to 349 is any or no amino acid
  Variant (351)..(355): Xaa in position 351 to 355 is any amino acid
  Variant (356)..(356): Xaa in position 356 is any or no amino acid
MKXXILXGGXGTRXXXXXTXXXPKPXXXXXXXXXPXXXHXXXXXXXXGXXXXXXXXXYXXXXXXXXXXFXXXXXXXXXXXXXXXXXXXXXXXXXXXXXXXXXXLXXXGXXXXXXXXXXXXXXXXXXXXXFXXXXXDXXXXXXXXXXXXFHXXXGXXXXXXXXXXXXXXXXGXXXXXXXXXXXXXXFXEKPXXXXXXXXXINXGXXXXXPXXXXXXXXXIXXXXXXXXEXXXXXXXXXXXXLXXXXXXGXXFWXXXXXXXDXXXXXXXXXXXXXXXXXXXXXXXXXXXXXXXXXXXXXXXXXXXXXXXXXXXXXXXXXXXXXXXXXXXXXXXXXXXXXXXXXXXXXXXXXWXXXXXXW

SEQ ID NO: 31924 - protein, 20 aa, Artificial sequence
  protein pattern
  Variant (2)..(2): Xaa in position 2 is any amino acid
  Variant (3)..(3): Xaa in position 3 is any or no amino acid
  Variant (6)..(6): Xaa in position 6 is any amino acid
  Variant (10)..(10): Xaa in position 10 is Ile or Leu
  Variant (11)..(11): Xaa in position 11 is any amino acid
  Variant (12)..(12): Xaa in position 12 is Glu or Pro
  Variant (13)..(13): Xaa in position 13 is any amino acid
  Variant (14)..(14): Xaa in position 14 is Ser or Thr
  Variant (15)..(17): Xaa in position 15 to 17 is any amino acid
LXXGGXGTRXXXXXXXXPKP

SEQ ID NO: 31925 - protein, 18 aa, Artificial sequence
  protein pattern
  Variant (2)..(7): Xaa in position 2 to 7 is any amino acid
  Variant (9)..(9): Xaa in position 9 is Phe or Tyr
  Variant (11)..(12): Xaa in position 11 to 12 is any or no amino acid
  Variant (15)..(16): Xaa in position 15 to 16 is any amino acid
  Variant (17)..(17): Xaa in position 17 is Gln or Arg
  Variant (18)..(18): Xaa in position 18 is Asp, Glu or Pro
LXXXXXXGXWXXMDXXXX

SEQ ID NO: 31926 - DNA, 1227 bp, Azotobacter vinelandii
  CDS (1)..(1227): transl_table=11
atgcctaccttggacttgtcttttgtacgtagccaattccccgcctttgcagaaccctctctcgatgggcagggctttttcgataatgccggcggctcctacacctgccaacaagtgatcgatcatcttaaccgatactatcggcaaatgaagatccaaccctacggtgctcatccagcttcgcgtagggctggggaagagatggaccattcacacgtagagattgccagttacttgggggtatctgcagaagaagtccatcttggaccctctacatcccagaatacttatgtgctcgcagaggcattcggtaaccgtctccaaccaggggatgaaatcattgtcacgaaccaagaccacgaagcaaacaacggtgtatggcgtcgcctcgccaagcgaggcattgtgatcaaagagtggcaggtcaatccttcgacgggttcgctgaataccgaagcacttcaagccctgctgtcgacgcgtacaaaggtagtggcattcactcactgctcgaacatcctgggtgaaatcaacccagttcgtaaaatctgcgagatcgtccacgcggctggtgcactcgctgtggttgacggagtttcctatgccggtcatgggctgcccgatgtctctcaactaggtgccgatatctaccttttctcactgtacaaaacatttggtccccatctcggcgcaatggtaatccgacgccccttgatggactttctaggcaatcaagctcactatttcaacgaagcgtatctggccaaatggtttgttccagccggtcctgaccatgctcaagtagctgcggctagcggagtcacggcttacttcgacaaggtccatgagtatcacttccctagtgcagacagtaaacatcgcgctgaaaatgtgaggacactgtttagagaagcagaagcctctctacttccaacactgcttgagttctgtggcggcgattcacgagttcgcctcctcggcccgattgaagcaataaagcgctcggcgacggtatccattcaaacactgagcgccactccacgagaaatctctgagcggttggcaaagaaaggaattatcgcgggtgcaggtcacttctatgcagttcgtctactcgaggcgctgggggtaaattctgctgagggggtgctgcgcctgtctttcgctcactactccagcccagaagagatccaacagctcattaacgctttgaacgaagcactttaa

SEQ ID NO: 31927 - protein, 408 aa, Azotobacter vinelandii
MPTLDLSFVRSQFPAFAEPSLDGQGFFDNAGGSYTCQQVIDHLNRYYRQMKIQPYGAHPASRRAGEEMDHSHVEIASYLGVSAEEVHLGPSTSQNTYVLAEAFGNRLQPGDEIIVTNQDHEANNGVWRRLAKRGIVIKEWQVNPSTGSLNTEALQALLSTRTKVVAFTHCSNILGEINPVRKICEIVHAAGALAVVDGVSYAGHGLPDVSQLGADIYLFSLYKTFGPHLGAMVIRRPLMDFLGNQAHYFNEAYLAKWFVPAGPDHAQVAAASGVTAYFDKVHEYHFPSADSKHRAENVRTLFREAEASLLPTLLEFCGGDSRVRLLGPIEAIKRSATVSIQTLSATPREISERLAKKGIIAGAGHFYAVRLLEALGVNSAEGVLRLSFAHYSSPEEIQQLINALNEAL

SEQ ID NO: 31928 - DNA, 1278 bp, Mesorhizobium loti MAFF303099
  CDS (1)..(1278): transl_table=11
gtggagacgatggtggattttccgatcgaggccgtgcgcggacaatttccagcgctttccctgaccgacaagggccgccgtcgcatctatcttgacaatcccgccggcacgcaggtgccgcaggccgtcgccgatgcggtgtcgcgctgcttgctcaccaccaatgccaatctcggtggctatttcgaaacgacgatcgcggctcaatccgtcgtcgatgacgcgcatcgggcgatggccgatttcctcggtgcggcgagcccggaggaaatcatcatcggcgccaatatgacgacgctgacctaccacatgtcgcgcacgctcggccgcacgctgaagcccggtgacgagatcatcctcacccgcatggaccatgagggcaacgtctcgccgtggctgcaactggccgaggatttgagcctcgtcgtgcgctggctgccattcgatgaaaagagctggcaggtcgaggaggcggcgctgaccgggctgctgtccgacaagacacggctggtcgcgctgaattatgcctcgaacctgaccggttcgatcaaccgggttaaggccctgaccgccatcgcaaaacgggccggcgccctggtctatgtcgacgccgtgcagttcgcgccgcatggcctgatcgacgtgcaggacctcggctgcgatctcctgatctgctcggcctacaaattcttcggtccgcatatgggcattttgtgggggcggcgcgaaatcatcgatggcctgaagccctacaaatgccgctgttcgtcaaatggcctgccggagcggttcgagcttggcacaccgcagatcgaactgatggccggcctcatggcggcggtcgactattttgccgggctgggtgtagcagcgggcgagggtggttcgcgcaggcagaagatcgccagggcgttcgaggtttccatcgcctacgagaatccgctggcacaaaggctgatcgatggcctgtccgacattccaggcctgactatccatggcatcaccgatcgcaagcggctcgccgatcgcgtgccgacggtgtccttcaccgtcgacggcatcgtaccggagacgatcgttcgacagatgaatgccgaaaacatcttcctgtggtccggccacaactacgcctgggagatcgtccaccagctcggcattccggccgagcagggcgttgtgcgcatcggcatcgcgcactacaacacggcggccgaaatcgacgagacgctggagagcgtgcaccgggtcatcgccatgctcaggcagcagcgctcctga

SEQ ID NO: 31929 - protein, 425 aa, Mesorhizobium loti MAFF303099
METMVDFPIEAVRGQFPALSLTDKGRRRIYLDNPAGTQVPQAVADAVSRCLLTTNANLGGYFETTIAAQSVVDDAHRAMADFLGAASPEEIIIGANMTTLTYHMSRTLGRTLKPGDEIILTRMDHEGNVSPWLQLAEDLSLVVRWLPFDEKSWQVEEAALTGLLSDKTRLVALNYASNLTGSINRVKALTAIAKRAGALVYVDAVQFAPHGLIDVQDLGCDLLICSAYKFFGPHMGILWGRREIIDGLKPYKCRCSSNGLPERFELGTPQIELMAGLMAAVDYFAGLGVAAGEGGSRRQKIARAFEVSIAYENPLAQRLIDGLSDIPGLTIHGITDRKRLADRVPTVSFTVDGIVPETIVRQMNAENIFLWSGHNYAWEIVHQLGIPAEQGVVRIGIAHYNTAAEIDETLESVHRVIAMLRQQRS

SEQ ID NO: 31930 - DNA, 1206 bp, Deinococcus radiodurans R1
  CDS (1)..(1206): transl_table=11
atgcagacagccgggccgatcacacgcgaggcgctccgcacccagtttcccagtcttgccggaggccgggcctacctcgacaacgccgccgggggcctgctgcccacccgcagcattcaggccgtcaccgagcacctgacccgcttcggcgcgaccaacgcgatgcctgggcacgcgccggggcaacagattgggcagctcaaggcgcgggcgcgggaaggcacggcgctgtttctgaacgccgaggcgccggacgtggcgctggggccgagtgcgaccgcgctggcgttccggctggcggcggcctttgcacggctgtggggccccggcgacgaggtgatcgtctcgggcctggaacacgaggcgaacgccagcccctggcgcgagctcgagcgggtcggcgtgacggtgaaggtctggcacgcccgtgcccccgagatgcggctgcacccggatgacctcgccgcgctgctttccccgcgcacccggctagtagcggtgacggccgcgagcaacgtgctgggcgtggcccccgacatcgccgccatcaccgcgcaggtgcgggcggctggtggctggacggtggtggacgccgtgcacgccgcgccgcacctgctgcccgatgtgcaggcgtggggcgcagacttcgtgacctttagcccctacaaggtgttcgggccgcacctcggcgggctgtggatccgccccgagctgcgcccgcagttgccctggcctcggctgagcttcgtggaagacggcgacatcactggcatcgaacacggcacgccgcagtacgaactgctcgccgggtggctggggacgctcgattacctgcgcgaactggggggcggcgacaccttgacccgcgccgcgctcgtcgccgcgtttgagcagattgccgcgctggaacggcccgtcactgaggctctgctcaccggtctgctcgctcggccctatgtgacggtgtacggcccgcagacgctggaaggccgggtgggcacggtggctttccaggtgcagggcgaggcgccgctcgacaccgccctgcgcctgagcgcccagggggtggacgtggccgccgggcacttctacgcggtgcagccgctgcgcgacctgggcctgtatccggacggcgtggcgcgcgccagcctcgcgcactacaccagcgaggaggacgtggcacgactcctggcggcgctgggctga

SEQ ID NO: 31931 - protein, 401 aa, Deinococcus radiodurans R1
MQTAGPITREALRTQFPSLAGGRAYLDNAAGGLLPTRSIQAVTEHLTRFGATNAMPGHAPGQQIGQLKARAREGTALFLNAEAPDVALGPSATALAFRLAAAFARLWGPGDEVIVSGLEHEANASPWRELERVGVTVKVWHARAPEMRLHPDDLAALLSPRTRLVAVTAASNVLGVAPDIAAITAQVRAAGGWTVVDAVHAAPHLLPDVQAWGADFVTFSPYKVFGPHLGGLWIRPELRPQLPWPRLSFVEDGDITGIEHGTPQYELLAGWLGTLDYLRELGGGDTLTRAALVAAFEQIAALERPVTEALLTGLLARPYVTVYGPQTLEGRVGTVAFQVQGEAPLDTALRLSAQGVDVAAGHFYAVQPLRDLGLYPDGVARASLAHYTSEEDVARLLAALG

SEQ ID NO: 31932 - DNA, 1206 bp, Salmonella typhimurium LT2
  CDS (1)..(1206): transl_table=11
atgaacgcttttaatcccacgcagtttcgcgcgcagtttcccgcgctagccgatgcgggtgtttatctcgatagcgccgccacggcattaaagccacaggcagtcattgacgccacgcaccagttttattgtttgagcgccggtaacgttcatcgtagccagtttgcgcaggcgcagcgcctgacggcgcaatatgaagcggccagagcaaaagcagcgcggctgttaaacgcgcccgatgaaaaaagtatcgtctggacacgcggcaccaccgaagcgatcaacatggtggcgcagtgttacgcccgtcctcgtctgcgccccggcgatgaaattatcgttagcgtcgccgagcatcacgccaaccttgtgccctggctgatggtggcgcaacaaaccggcgcgcaggtcataaaactgccgcttaatgaccggcgtcttcctgatgttgagcgtctgccggaactgatcacgtcgcgcagccggattctggcgctggggcaaatgtcgaacgtaacgggcggctgcccggatctcgcaagcgctatcagcgccgctcacgcagcgggaatggtcgtgatggtagatggcgcgcaaggcgcggtacacttcccggcggatgttcagcagcttgatatcgatttttatgctttttccgctcacaaactgtatggcccgaccggtatcggcgtgctgtacggtaagccggagcttcttgaggcgatgtcgccctggctcggcggcggcaagatgatccgtgacgttagctttgaaggcttcaccactcaaagcgctccctggaaactggaagcggggacgccgaacgtcgccggggtcatcggcctgagcgctgcgctggaatggctgtccgatatcgatattgaacaggccgaaaactggagccgcgggctggcgacgctggcggaagacgcactggcgaaacgcccgggctttcgttcgttccgctgccaggactccagcctgctggcctttgattttgtcggcgtgcaccacggcgatatggtgacgctgctggcggaatacggtattgcgctccgggccgggcaacattgcgcccagccattgctggcggaacttggcgtcacagggactctgcgcgcctcttttgcgccgtataatacccaacatgatgtggatgcgttggttaacgccgttgaccgcgcgctggaactgctggtggattaa

SEQ ID NO: 31933 - protein, 401 aa, Salmonella typhimurium LT2
MNAFNPTQFRAQFPALADAGVYLDSAATALKPQAVIDATHQFYCLSAGNVHRSQFAQAQRLTAQYEAARAKAARLLNAPDEKSIVWTRGTTEAINMVAQCYARPRLRPGDEIIVSVAEHHANLVPWLMVAQQTGAQVIKLPLNDRRLPDVERLPELITSRSRILALGQMSNVTGGCPDLASAISAAHAAGMVVMVDGAQGAVHFPADVQQLDIDFYAFSAHKLYGPTGIGVLYGKPELLEAMSPWLGGGKMIRDVSFEGFTTQSAPWKLEAGTPNVAGVIGLSAALEWLSDIDIEQAENWSRGLATLAEDALAKRPGFRSFRCQDSSLLAFDFVGVHHGDMVTLLAEYGIALRAGQHCAQPLLAELGVTGTLRASFAPYNTQHDVDALVNAVDRALELLVD

SEQ ID NO: 31934 - DNA, 1227 bp, Listeria monocytogenes EGD-e
  CDS (1)..(1227): transl_table=11
atgattgatatccaaaaaattcgggcggattttccaattttagctcaagaaataaatgaaaaaccgctagcttatttagataatgctgccacttcacaaaagccgaaacaagttattgaagctttaacacattactatgagtttgataatgcgaacgttcaccgtggtgtgcatacgcttgcggcaagagcgacggatgcttatgaatcagctcgaggtaaagtagccaagtttattcatgcgcgtgaagtagcagaaattattttcacaagaggcactacttcagcgattaatttagttgtagatagttacgcggaagcaaatattgaagctggcgatgagatagttatttcttatttagagcatcattctaatttgattccatggcaacaactagctaaacgcaaaggcgcggttttaaaatatatcgaactagaagaagatggcacgatttcagtggaacaagcgaaaaaaacgattggcgagaaaacgaaaatcgttgcgctagcacatgtttctaatgttctagggacaatcacgccaattaaagaaatcgcagcaattgctcatcaatttggagcagtcattctcgttgacggtgcgcaagctgtgcctcatatggaagtcgatgtagttgatttagatgctgacttttatgctttttcagggcataaaatgatggctcctactggcattggcgctttgtatggcaaacgtgaattgcttgatgcgatggaacctaccgaatttggcggagaaatgattgattttgttgaattatacgattcgacttggaaagaactaccttggaaatttgaagccggaacaccgattattggcggagcaattgcgctaggtgcggcgattgattacttggcagaagtcggactcgaaaacattcacgcacatgaacaagcattagccagctacgcgatggaagaaatgagcaaaatcgaaggcattaccatttacgggccgaaagatgcaagtaaacgttgtggtttagtgacttttaatttagaaggcgcacacccacatgatattgcgactattttggacgaagatggggtggcgattcgagctggacatcactgtgcacaaccgttgatgaaatggctggacgtttcttccacagctcgcgcaagcttttatatttataatacaaaagaagaaattgatgcgcttatagatggcctcaagttaacaaaggagtattttggattatga

SEQ ID NO: 31935 - protein, 408 aa, Listeria monocytogenes EGD-e
MIDIQKIRADFPILAQEINEKPLAYLDNAATSQKPKQVIEALTHYYEFDNANVHRGVHTLAARATDAYESARGKVAKFIHAREVAEIIFTRGTTSAINLVVDSYAEANIEAGDEIVISYLEHHSNLIPWQQLAKRKGAVLKYIELEEDGTISVEQAKKTIGEKTKIVALAHVSNVLGTITPIKEIAAIAHQFGAVILVDGAQAVPHMEVDVVDLDADFYAFSGHKMMAPTGIGALYGKRELLDAMEPTEFGGEMIDFVELYDSTWKELPWKFEAGTPIIGGAIALGAAIDYLAEVGLENIHAHEQALASYAMEEMSKIEGITIYGPKDASKRCGLVTFNLEGAHPHDIATILDEDGVAIRAGHHCAQPLMKWLDVSSTARASFYIYNTKEEIDALIDGLKLTKEYFGL

SEQ ID NO: 31936 - DNA, 1395 bp, Nostoc sp. PCC 7120
  CDS (1)..(1395): transl_table=11
atgtcaacaccatcaactaaggagtctgacatggaagctttagacttgaaatggatacgtgggcagtttccggcacttacacaaaaaattaacggacaaccagctatattttttgatggccctggtggaacacaagtacctgggtctgttttagatgctatcagtgactatttagttaggtcaaatgctaatgctcacggggcttttgctacgagtgcgcggacggatgctttaattattgcagctaggacggcgatcgctgattttttgggttgccacagtgatgaggtggttttcggcgctaatatgacgacgctcacctttactttaagtcgcgctattggacgaacgctgcaaccgggtgatgaaattattgtgacacgccttgaccattcggctaatgtttcttcttgggaagcgttggcagaacaaggtgcagtgattcgttatgtcgatgtcaaagttgatgattgcactttagatatcaatgatttggagcaacaaatcaattcccgtaccaagttagtagccgtctcttatgcttccaacgctgtggggacgattaacgatattgccactatcgtcaaactagcccattctgtaggtgcattggtgtttgtcgatgcagtccattatgctcctcatgggccgataaacgttcatgctttggggtgtgattttctcgcctgttctgcatacaaattctttgccccccatgttgggattttgtatggtaagcgggaacatcttgcaaatctgcaaccttataaagtcaaaccagcacccaatgaagtcccatctcgttgggaaactggaaccctaaattatgaaggattggcgggtgtagtcgcggcggttaactatttggcaaaattaggttgtcatgtctccccgacagttgaccaagagttagtttcagcattgattgaggctgataaggaaggtttggaacacttccactgtccccgatttttaacatcagcagaacaaccatcacatgaaattgcctcggcttatcacagtcgtcgggcggcaatagttgcagccatgtcagcgattcagcaatacgaaagagaattgagctataagctaatttccggcttgctagaaattcctggcttaactttatatggcattacagatccagaacgctttgcttggcggacaccaacagtagcaattcgactccagggtaaaagcccagaaagcattgcgaggacattaggcgatcgcggtattttctcctggcatggtaacttttatgccttgaatctgactgagaaactaggtgtagaaagcaatggcggcttattgcgcctgggtttagtacactacaattctgtggaagagattatacaattactccaagctttaaaagaaattgggcttgactaa

SEQ ID NO: 31937 - protein, 464 aa, Nostoc sp. PCC 7120
MSTPSTKESDMEALDLKWIRGQFPALTQKINGQPAIFFDGPGGTQVPGSVLDAISDYLVRSNANAHGAFATSARTDALIIAARTAIADFLGCHSDEVVFGANMTTLTFTLSRAIGRTLQPGDEIIVTRLDHSANVSSWEALAEQGAVIRYVDVKVDDCTLDINDLEQQINSRTKLVAVSYASNAVGTINDIATIVKLAHSVGALVFVDAVHYAPHGPINVHALGCDFLACSAYKFFAPHVGILYGKREHLANLQPYKVKPAPNEVPSRWETGTLNYEGLAGVVAAVNYLAKLGCHVSPTVDQELVSALIEADKEGLEHFHCPRFLTSAEQPSHEIASAYHSRRAAIVAAMSAIQQYERELSYKLISGLLEIPGLTLYGITDPERFAWRTPTVAIRLQGKSPESIARTLGDRGIFSWHGNFYALNLTEKLGVESNGGLLRLGLVHYNSVEEIIQLLQALKEIGLD

SEQ ID NO: 31938 - DNA, 1203 bp, Streptomyces coelicolor A3(2)
  CDS (1)..(1203): transl_table=11
atggccctcgacgtcgccgcgatccgcgcgcacgtgcccgccctgaagtccggtaccgcgcggttcgacgcgccgggcggtacgcagaccccgcagccggtgatcgacgcgatcgcggcggcgctgaccgccccgctcgccaaccgggggcgcaacaccgagggcgagcgcaacgcggaccggatcgtcgacgaggcgcggtccgcgctcgccgacctcctcgggaccacgccggggacggtcgtcttcgggcgcagcgccacccagctcgcctacgacctgtcgcggaccctggccaagggctgggggccgggcgacgaggtggtggtcacccggctcgaccacgactcgaacatccggccgtgggtgcaggcggccgaggcggccggggcagacgtgcggtgggcggacttcgacccggccaccggcgagctgcgtcccgagcacctcgcggcggtgctgggcccgcgcaccaggctggtcgcggtcaccgccgcgtcgaacctgatcgggaccatgccggacctgccggcgctggcgtccctcgtccacgcgaacggggcgcacttccacgtcgacgcggtgcactacgcctcgcacgccgtggtggacctggcggcgacgggcgcggacacgctggtgtgctcgccgtacaagttcctcggcccgcacctgggcgtgctgaccggccgggccgagctgctggagtcgctgcgcccggacaagctgctgccgtccgccgacaccgtgcccgagcgtttcgagctgggcaccctgccgtatgagttgctggccgggacgagcgcggcggtggacttcctggcggggctcgaagcggaggccgaaggttctcgccgggaccggctggtcgcctcgttcgccgcattggaggcgcacgaggaggcgctgcgcgagcgcctcgaacgagggctcgcggagctgggcgggatcaccgtgtactcgcgggcggcacggcgcaccccgacgctgctgttcaccgtggcgggcctgcgcccggccgacgtctaccggcagctcgccgagcgggcggtcgacgcgcctgccggttccttctacgccgtggaggccgcgcgccggctgggcctcggtgacgagggcggcgtacgtgtgggcctcgctccgtacagcagcgcggaggacgtggaccggctgctgacggcgctcggcgccctggagcgctga

SEQ ID NO: 31939 - protein, 400 aa, Streptomyces coelicolor A3(2)
MALDVAAIRAHVPALKSGTARFDAPGGTQTPQPVIDAIAAALTAPLANRGRNTEGERNADRIVDEARSALADLLGTTPGTVVFGRSATQLAYDLSRTLAKGWGPGDEVVVTRLDHDSNIRPWVQAAEAAGADVRWADFDPATGELRPEHLAAVLGPRTRLVAVTAASNLIGTMPDLPALASLVHANGAHFHVDAVHYASHAVVDLAATGADTLVCSPYKFLGPHLGVLTGRAELLESLRPDKLLPSADTVPERFELGTLPYELLAGTSAAVDFLAGLEAEAEGSRRDRLVASFAALEAHEEALRERLERGLAELGGITVYSRAARRTPTLLFTVAGLRPADVYRQLAERAVDAPAGSFYAVEAARRLGLGDEGGVRVGLAPYSSAEDVDRLLTALGALER

SEQ ID NO: 31940 - DNA, 1248 bp, Bradyrhizobium japonicum USDA 110
  CDS (1)..(1248): transl_table=11
atgagcacgcatccggcagtcaggaacggctcctacgacgtcgcccgcgtccgccaggatttcccggcgctggccatgcaggtctacggcaaaccgctggtctatctcgacaacgccgcctccgcgcagaagccgcaagtcgtgctcgaccgcatgacgcaggcctatacgagcgaatacgccaacgtgcatcgcggcctgcattacctcgccaacgccgcgaccgaagcctatgagggcggccgcaccaaggtcgcgcagttcatcaacgccggccgcaccgaagaggtgatcttcacccgcaacgcgacggaggccatcaacctggtcgcctcgtcctggggcgggccgaacatcaaagagggcgacgagatcgtcatctcgatcatggagcaccactccaacatcgtgccctggcatttcctcagggaaagacagggcgcggtgatcaaatggtcgccggtcgacgacgagggcaatttcctcatcgaggagttcgagaagctcctgacggcgaagaccaagctggttgcgatcacgcagatgtcgaacgcgctcggtaccatcgtcccgatcaaggacgtcgtgaagatcgcccacgcccgcggcatccccgtgctggtcgacggcagccagggcgcggtgcatatgcccgtcgatgtccaggatctcggctgcgacttctacgtcttcaccggccacaaggtctacggcccgaccggcatcggcgtgctctgggccaagtacgaccatctcgtcgcgatgcgcccctataacggcggcggcgagatgatccgcgaggtctcgcgcgatgtcgtcacctacggcgatcccccgcacaagttcgaggccggcacacccgcgatcgtcgaggccgtcggccttggcgccgcgatcgactacgtcaattcgatcggcaaggagcgcatcgccgcgcacgagcacgatctcgtcacctacgcccaggagaagctgcgcgagatcaactcgctgcggctgatcggcaccgcccgcggcaagggcccggtgatctccttcgagctcaagggcgctcatgcccatgacgtcgccaccgtgatcgaccgccagggcatcgcggtgcgcgccggcacccattgcgtgatgccgcttttagagcggttcaacgtgacggccacatgccgggcctcattcggcatgtataatacgcgggaagaagtcgatcatctggcacaggcgcttttgaaggcgcgggatttgttcgcatga

SEQ ID NO: 31941 - protein, 415 aa, Bradyrhizobium japonicum USDA 110
MSTHPAVRNGSYDVARVRQDFPALAMQVYGKPLVYLDNAASAQKPQVVLDRMTQAYTSEYANVHRGLHYLANAATEAYEGGRTKVAQFINAGRTEEVIFTRNATEAINLVASSWGGPNIKEGDEIVISIMEHHSNIVPWHFLRERQGAVIKWSPVDDEGNFLIEEFEKLLTAKTKLVAITQMSNALGTIVPIKDVVKIAHARGIPVLVDGSQGAVHMPVDVQDLGCDFYVFTGHKVYGPTGIGVLWAKYDHLVAMRPYNGGGEMIREVSRDVVTYGDPPHKFEAGTPAIVEAVGLGAAIDYVNSIGKERIAAHEHDLVTYAQEKLREINSLRLIGTARGKGPVISFELKGAHAHDVATVIDRQGIAVRAGTHCVMPLLERFNVTATCRASFGMYNTREEVDHLAQALLKARDLFA

SEQ ID NO: 31942 - DNA, 1236 bp, Vibrio parahaemolyticus RIMD 2210633
  CDS (1)..(1236): transl_table=11
atgaacttcaatcttaatcaaatcagagaacagtttcccgcgctggctcagtatcataatgacaaaccagttacgttttttgatgggcctggcggctcgcaagtccctcaatctgtgcttgattcaatggtcggctaccttgggcgttttaattccaacttgggtgggcattacttctctagccaagctacagtcgatgtcatgcagagtgcgcgcgagtcggcacaagcgctattgaatgccccttcgtctggtaatattgtctttggcgcgaacatgacatcactgacgttccagttaagccgtgcaatcagtcgtgattggcaagaaggggatgagatcattgtctcagcgcttgaccattactcgaacgtttcaagctggcaacaagcagcagaagacaaaggagctaaggttcaccaagttcgaatcaataaagctgattgcactttagatcttgagcacttacaaagcctgctttcagaaaaaacacgtttggttgcagtgacatatgcgtcaaacaccacgggatcgatagtcgatattcagcgcgtagttgaaatggcgcacggtgttggtgctcaagtttatgtcgatgctgtgcattatgctcctcaccacttagtcgatgtacaagcgctgggctgtgatttcttagcgtgttcagcttataagttctttggaccgcatgtaggtatcgcttacgtggctgaccaatggttgcacagccttcgtccttataaagtagaaccggctacgaatattggtccgggtcgttttgaaacggggacacaaagcttcgaaggccttgctggtgttgcggctgcagtgggatatttggctcagtttggcgacaacgacttaccacttcgtcagcgattagaacaaagttacgcgctttacaatcaacacgaacagcgtttaagtgagcgttttttgcaacgactcgacgcgctagaaggtgtgaaactgtatggcattgagagcgaagattgtcagcaacgtacgccgacgtttgccctaacatttgacaagtattcaccagagtttatcgctaagaccttaggtgagcacaatatctgtgtttggaatggccacttttatgcacttggtttggttcgtcagcttggcattgaagaatcaggtggggtcgtacgaattggttgtatgcattacaacactattgaagaagtggatatgttgtttgatgtgctagaaagcatccttgatgcttaa

SEQ ID NO: 31943 - protein, 411 aa, Vibrio parahaemolyticus RIMD 2210633
MNFNLNQIREQFPALAQYHNDKPVTFFDGPGGSQVPQSVLDSMVGYLGRFNSNLGGHYFSSQATVDVMQSARESAQALLNAPSSGNIVFGANMTSLTFQLSRAISRDWQEGDEIIVSALDHYSNVSSWQQAAEDKGAKVHQVRINKADCTLDLEHLQSLLSEKTRLVAVTYASNTTGSIVDIQRVVEMAHGVGAQVYVDAVHYAPHHLVDVQALGCDFLACSAYKFFGPHVGIAYVADQWLHSLRPYKVEPATNIGPGRFETGTQSFEGLAGVAAAVGYLAQFGDNDLPLRQRLEQSYALYNQHEQRLSERFLQRLDALEGVKLYGIESEDCQQRTPTFALTFDKYSPEFIAKTLGEHNICVWNGHFYALGLVRQLGIEESGGVVRIGCMHYNTIEEVDMLFDVLESILDA

SEQ ID NO: 31944 - DNA, 1215 bp, Porphyromonas gingivalis W83
  CDS (1)..(1215): transl_table=11
atgtacgacattcaaaaaatcagggaggacttccccatcctccatacccgggtacacggtaaacctctcatctatctggacaatgccgccacgacacagaaacccatagcggtattagaccaaatcgaacgagcctaccgcacattcaatgccaatatccaccgcggcgtacaccatctgagtcaggtggctacggagcaacacgaaaatgctcgcaagcggatagcccgctacatcggagcggaagaccccaaagaggtgctctttacgcgcggcaccacagaggcaatcaatctggtggcctcttcgttcggccaagctttcgtccgctccggcgatgagattatcatcagtaccctcgaacaccattcgaatatcgtcccatggcaacttttggccgaacgtaccggtgctcggctcagagtgatccggttgaccgaatcgggcgaactggatgtggagcatttccggtctctactgaacgaacgtaccaaaatcgtttcgatagcccacgtcagcaatgtgctcggcaccatcaatcccatacgccggataacggatttggctcatgccgccggagtacccgttctggtcgatggagcacaggccatcgcccactgccgggtagatgttcgggagttgggagcggatttctacgccttctccggccataaagtctacgcacccacaggaataggcgtattgtatggcaaagcggagtggttggagaagatccccccctaccacggtggcggagagatgatcgccaaggtgacattcgaaaagaccacctacaacgaattgccctataagttcgaagccggcacgccggactatgtcggctccacggctttggccacagctctcgactacatcgaaggattgggtttggaagccatagccgcacatgaagacaaactcctgcgcatggccaccgaaggcgtgagagctttccccaatgcccgtatcatcggagaagccgaacacaagagcggtgtgctctctttccttataggggacattcatccctatgacctcggcatgctgctcgatcggctgggtatagccatccgtaccggacatcactgtgccgaaccgctactcgaaagcatgggactcaatgccacggctcgcgcctcctttgctctctacaataccgaggaggaagtggagcaattcctccaagccttgaaacgtgtagtaagcatgttctaa

SEQ ID NO: 31945 - protein, 404 aa, Porphyromonas gingivalis W83
MYDIQKIREDFPILHTRVHGKPLIYLDNAATTQKPIAVLDQIERAYRTFNANIHRGVHHLSQVATEQHENARKRIARYIGAEDPKEVLFTRGTTEAINLVASSFGQAFVRSGDEIIISTLEHHSNIVPWQLLAERTGARLRVIRLTESGELDVEHFRSLLNERTKIVSIAHVSNVLGTINPIRRITDLAHAAGVPVLVDGAQAIAHCRVDVRELGADFYAFSGHKVYAPTGIGVLYGKAEWLEKIPPYHGGGEMIAKVTFEKTTYNELPYKFEAGTPDYVGSTALATALDYIEGLGLEAIAAHEDKLLRMATEGVRAFPNARIIGEAEHKSGVLSFLIGDIHPYDLGMLLDRLGIAIRTGHHCAEPLLESMGLNATARASFALYNTEEEVEQFLQALKRVVSMF

SEQ ID NO: 31946 - DNA, 1239 bp, Gloeobacter violaceus PCC 7421
  CDS (1)..(1239): transl_table=11
atgaataatgtgctcgatctcgattttgtgcggcggcagtttccggcgctgatgggtgagtggacttttttagacaacgcgggcggttcgcagattcttggccgggtggtcgagcggattgccgattttttgctgaccaccaacgtgcagatcggtgcctcctatgcgatctccgaggcggccaccgcccggctcgacctggcccgcgcccgaatggccgcctacttgaacgccgaatatcccgaagagatcgtccacggctcctccaccacccaattgctttccaacctggcagcggcgatggctcccagcctgcagcccggcgatgagatcgtcgtcaccgactgtgaccacgaatcgaatatcggaccctgggtgcgcctggcccaccaacgggggctcgccctcaagatctggaagatcaaccccgagacctggacgctggaaccggaagatctggagatgttgctgggtgagcgcacccggctggtgtgcttcacctacgcttccaacgtcgtgggcaccatccagcctgtagcccagatcgttcggctggcccaccgctacggagcgcgcgtctgcatcgacgcggtcgcctacgccccccaccgcgccatcgacgtgcgcgccaccggtgtcgattttctgaccttcagcacctacaagacctacggtccccacgcggcggtgctctacggcaagcgcgactggctgttggagctggcgagtctcaaccactacttcatcggcaaagacgacattccctacaagttgcagcccggcaacgccaacttcgaactggcctgggggatgagcggcctggtcgattattgcgaagagctggccgcgctgcacgcccagataccggccgacaccgtccacggccgggtggagcaggcttttgaaccgattgcccgccacgaggagtacctgggcgcccggctgcttgcctatttaaccagtaagccaaacgtgcgcatcctgggtctgcgcggggcggaccgcgagcggcgcgttccgacggtgagcttctggattccgggccgtcacgcctcggagatcccgacccggatcgatccgctcaagattggcatccgctggggcgacttttacgcccgccgcctcatcgacagcctcggtctcacccctgccggggggatcgtgcgcgtctcgatggtccactacaacacgcctgcagagatcgaccggctcatcgtggggctggagagcatcttgtag

SEQ ID NO: 31947 - protein, 412 aa, Gloeobacter violaceus PCC 7421
MNNVLDLDFVRRQFPALMGEWTFLDNAGGSQILGRVVERIADFLLTTNVQIGASYAISEAATARLDLARARMAAYLNAEYPEEIVHGSSTTQLLSNLAAAMAPSLQPGDEIVVTDCDHESNIGPWVRLAHQRGLALKIWKINPETWTLEPEDLEMLLGERTRLVCFTYASNVVGTIQPVAQIVRLAHRYGARVCIDAVAYAPHRAIDVRATGVDFLTFSTYKTYGPHAAVLYGKRDWLLELASLNHYFIGKDDIPYKLQPGNANFELAWGMSGLVDYCEELAALHAQIPADTVHGRVEQAFEPIARHEEYLGARLLAYLTSKPNVRILGLRGADRERRVPTVSFWIPGRHASEIPTRIDPLKIGIRWGDFYARRLIDSLGLTPAGGIVRVSMVHYNTPAEIDRLIVGLESIL

SEQ ID NO: 31948 - DNA, 2013 bp, Mycobacterium avium subsp. paratuberculosis K-10
  CDS (1)..(2013): transl_table=11
atgagtacaagtgagtaccgagcggtagacgccgaaagcgacctgcccatcagcgccgcggaactcgccgcgctggccagccagctgtatgcggccagcatccgcccgggccccgacagcccgccgcagcaggcgccggtggcacctcgcggcagcgtgccggacgccacggcggcaacctcggccgggcggaccgccgccggcacggccgacgtgtacccgggaccggttccgcaggtcggtgggcgcgacgtctacctgccgcccccggcgtctcccgcccccgaagcacccccgcaggcggcgccgcccgccccgcgcggcagcgcgccggacgccacggcggccacgtcggccgggcgggcggccgccggcaccagcgacgtgtattcgtcatgggtgccgcagctgggagtcgccgacatctatctcggggctccgacgcccgccgggccggaggcgccgccgcagagcgcgccgcccgccccccgcggccaggtgcccgacacgaccgccgcggccaccgcctacggcgccgacctgagcgcgttcgcggtgcccaccggcatcgtgtccaccgcgcccggtgtgcaggccgggacggcgccgcccgtccctgtcgttccgcgggccgcgacggcgccgtcgtggctgcccgaggcgccctcggtcgccgacctgggctggtccgacgcacccgcacccgatgcgccggccggcgacgagcatgactaccacttcctgaccaaaaccgatccggtgccgcagtttcgcgacgagcacgaggttttcgacgtcgccgcgattcgctcggacttcccgatcctgaaggagacggtcaacggaaaaccgttgatctggttcgacaatgcggcgacgacgcagaagccgcaggtggtcatcgaccggctgtcgcacttctacgcccacgagaactcgaacattcaccgcgccgcacacgaattggcggcccgcgccaccgacgcctacgaggaggcccgcgacaccgtcgccgagttcatcggcgcgcccagctcggacaacatcgtgttcgtgcggggcaccaccgaggcgatcaacctggtggcccacgcgtggggcgccaagcatctgcagcccggcgacgagatcgtcatcacccacctggagcaccacgcgaacatcgttccctggcagctgatttcgcaaaagaccggtgccatcctcaaggtggcgccgatcgacgacgcgggcaacctgctgctgagcgaattcgaggggctgctgggcccgcggaccaagctggtcgcggccagccacgtgtcgaacgccctgggcaccgtgatgccggtggacaagatcgtcgagttgggtcaccgctacggcgcccgggtgctgatcgacggcgcccagtccatccagcacatcccgatcgacgtcgccgaactcggcgccgacttcttcgtcttctccggccataagatctacggccccaccgggattggtgcgctctacggcaccgaggaagcgctcaccgagaccccgccgtggcagggcggcggccacatgatcgccgacgtcaccctggaacgctcgctgtaccaggggccgccgacgaagttcgaggccggcaccggcaacatcgccgacgccgtcgggctgaccgaggcgctgcgctacgtgcaacggttgggcgtcgagcggatcgccgcctacgagcacgccctgctggagtacgcgacaccgcggttggccgacatccccggggtccgcctgatcgggaccgcgcaggagaaggccagcgtgttgtccttcgtgctggcgggccacgaaccgctcgaggtgggcaaggcgctcaacgccgagggcatcgcggtgcgggcgggccaccactgcgcccagccggccctgcgccgactgggactcgaggccaccgtgcgcccgtcgttcgccttctacaacacgttcgaggagatcgacgtgttcctgcgcgcggtgcgccggatagccgagggcggcgccaacgtcggctga

SEQ ID NO: 31949 - protein, 670 aa, Mycobacterium avium subsp. paratuberculosis K-10
MSTSEYRAVDAESDLPISAAELAALASQLYAASIRPGPDSPPQQAPVAPRGSVPDATAATSAGRTAAGTADVYPGPVPQVGGRDVYLPPPASPAPEAPPQAAPPAPRGSAPDATAATSAGRAAAGTSDVYSSWVPQLGVADIYLGAPTPAGPEAPPQSAPPAPRGQVPDTTAAATAYGADLSAFAVPTGIVSTAPGVQAGTAPPVPVVPRAATAPSWLPEAPSVADLGWSDAPAPDAPAGDEHDYHFLTKTDPVPQFRDEHEVFDVAAIRSDFPILKETVNGKPLIWFDNAATTQKPQVVIDRLSHFYAHENSNIHRAAHELAARATDAYEEARDTVAEFIGAPSSDNIVFVRGTTEAINLVAHAWGAKHLQPGDEIVITHLEHHANIVPWQLISQKTGAILKVAPIDDAGNLLLSEFEGLLGPRTKLVAASHVSNALGTVMPVDKIVELGHRYGARVLIDGAQSIQHIPIDVAELGADFFVFSGHKIYGPTGIGALYGTEEALTETPPWQGGGHMIADVTLERSLYQGPPTKFEAGTGNIADAVGLTEALRYVQRLGVERIAAYEHALLEYATPRLADIPGVRLIGTAQEKASVLSFVLAGHEPLEVGKALNAEGIAVRAGHHCAQPALRRLGLEATVRPSFAFYNTFEEIDVFLRAVRRIAEGGANVG

SEQ ID NO: 31950 - DNA, 1239 bp, Lactobacillus johnsonii NCC 533
  CDS (1)..(1239): transl_table=11
atggccaaattaaacactgaaaaaataaagcaggattttccaatttttaatcaaaagattaatgatgaaactcttgtttatctagataatgctgcaactagccaaataccgaagtttgttgaagaaaaagttagagattttaatgaaaaagaacgtgcaaatgtccatcgcggagtccatgcattaggcttaagagctactaatcaatatgaatcaagccgtcaaaaggtggctaattttattggcgcaaataatgctaaagaagttatttttacttctggatgtactgatagtttaaatttagttgcagctagcttcggtgaacaaaatattcaggcaggggatgagatcctagtctcaattatggaacatcatagtaatcttttgccttggcagcaacttgctaaaagaaaacaggctaagttaaattttattgaaataaattcagatggcttacttgatattaaaaatttaaaaagtaagatcaattcaaaaactaaaattgttgccttgacgcatgtaagcaatgttttgggcacaattaatccaattaaggagcttactgatctagctcatgaaaaaggagcaattgttgtagttgatggtgcacaagcagttggacattttccaattgatgtagctgaattaaatgtagatttctatgctttttctggccataaaatgtttgctccgacaggaattggtgttttatatgggaaaaaagatctcttagataaaatgcagccttatcgtttgggtggtgaaatgattgctaatgtaactagagaaggagcaacatgggcagaagtaccatataaatttgaagctggtacaccaaatattgctggtgccattggacttggagcagcaattgattatctgcagtctctagactttgagcttattcaaaaacatgaacaggaattgacaagttatgccttagaaaagcttaaaaatgtttcaggattaacaatctatggtccacaaaaaagtaatggtcgcattggagtaatatcttttaatttaaagaatattcatccccatgacttagcgactgcactagatttaaacggaattgaagttcgtgctggccatcattgtgctcagccgctaatggctagccttaatacggagtcaactgttcgagctagtttatctatttataatactaaagatgatattgataaattagtaagttctctccatgaagcaaaggagtttttcagtgagtttagataa

SEQ ID NO: 31951 - protein, 412 aa, Lactobacillus johnsonii NCC 533
MAKLNTEKIKQDFPIFNQKINDETLVYLDNAATSQIPKFVEEKVRDFNEKERANVHRGVHALGLRATNQYESSRQKVANFIGANNAKEVIFTSGCTDSLNLVAASFGEQNIQAGDEILVSIMEHHSNLLPWQQLAKRKQAKLNFIEINSDGLLDIKNLKSKINSKTKIVALTHVSNVLGTINPIKELTDLAHEKGAIVVVDGAQAVGHFPIDVAELNVDFYAFSGHKMFAPTGIGVLYGKKDLLDKMQPYRLGGEMIANVTREGATWAEVPYKFEAGTPNIAGAIGLGAAIDYLQSLDFELIQKHEQELTSYALEKLKNVSGLTIYGPQKSNGRIGVISFNLKNIHPHDLATALDLNGIEVRAGHHCAQPLMASLNTESTVRASLSIYNTKDDIDKLVSSLHEAKEFFSEFR

SEQ ID NO: 31952 - DNA, 1212 bp, Magnaporthe grisea 70-15
  CDS (1)..(1212)
atgtctcagtcaacgttggatatcaaacaggtgcggggtagcttcccagccttgagcgtggaccaagtcttttttgacaacgccggtggaagtcaaacactggacaaggtgatcgattcgatacgtgaatacctgagcaacaccaatgttcaactgggtgcatcttattccactggccaaaagtcgacagatttgtatgacaaggggtatgaggccgcggcaaagtatatcaacgcttcagtcgacaacattgtcctgggatcatccaccacccaactcttccgcaatctatcccaaaccctcaacttcagccacggagatgagatcatcgtctccaagatcgaccacgaggcaaacatcgcctcgtgggtcgacctcgccgagcgacagaagctggtcctgaaatggtggctcccgtcgcaggccagcctcgatgcatcgtcgccgaagctcgaggtggctgacctcaaggacctcttgtctgacaagactcgccttgtgaccctgacgcacgcgagcaacatcctcggcacgatacacgacgtcaaggccgtctctgatgcggtgcacgcgcaaaaagacgaggcactcgtgtgcgtcgacggcgtggcttatgctccccaccggcctattgatgtcaaggcattgggggtggatatttactgcttttcgtggtacaaggtctacgggcctcacatctccatgctatacgcctcggacagagccaactcccagatgaagtcgctgggccactacttcaacccctcaaagacggtagaggacaagctcggcctcgccgggtccagctacgagctcgtcgcctccatccccgaggtggtcacctatctggacggcaaagaggccgccatcgagaagcaggagactctgctgtccgagactttgctcaagtacctcaggtcacgagacgacgtgaccatctggggtgaaaagtcatccgatggccagctccgtgttcccaccatatccttcaccgtcaagggttggggatcacaggagctggtcgagacggtagaaaaggggaccaactttgggttccgatggggtagtttctactcggtgcgtctcgttgaggagatgctggatttgggccacgacggaattaccagggtcagcatggtacactacaataccgttgacgaggttgagcggcttgtagaagctctggacaaaaccttggcgtccaaggagtaa

SEQ ID NO: 31953 - protein, 403 aa, Magnaporthe grisea 70-15
MSQSTLDIKQVRGSFPALSVDQVFFDNAGGSQTLDKVIDSIREYLSNTNVQLGASYSTGQKSTDLYDKGYEAAAKYINASVDNIVLGSSTTQLFRNLSQTLNFSHGDEIIVSKIDHEANIASWVDLAERQKLVLKWWLPSQASLDASSPKLEVADLKDLLSDKTRLVTLTHASNILGTIHDVKAVSDAVHAQKDEALVCVDGVAYAPHRPIDVKALGVDIYCFSWYKVYGPHISMLYASDRANSQMKSLGHYFNPSKTVEDKLGLAGSSYELVASIPEVVTYLDGKEAAIEKQETLLSETLLKYLRSRDDVTIWGEKSSDGQLRVPTISFTVKGWGSQELVETVEKGTNFGFRWGSFYSVRLVEEMLDLGHDGITRVSMVHYNTVDEVERLVEALDKTLASKE

SEQ ID NO: 31954 - DNA, 1227 bp, Gibberella zeae PH-1
  CDS (1)..(1227)
atgacgcagtccaaaaatgacattgtggctttaagagcccagtttcctgctttacagcagaaacagatctttttagacaacgccggaggcagccaaattttaggcgccgctgccgactcgatacgggactatttaatcacttcaaatgtgcaaatgggcggatcgtatgacgccagtcagacagcatccaagaaggtgaacaaaggttatgaagcaggttcacgatacatcaatgcacagccagatgagattgtctacggcgcctcatccactcaacttcttcgaaacctggcccttggtctcacattcgcagaaggcgacgagatcatcgtgtcaacccttgaccacgaatccaacatcgcaccatggcttgatctcgcagaacgacagggattgggtatcaagttttggaacccagaagggcaaggtaacaacccaaaactcacagtcgagactctcaagccgttgctatccaacaggacaaagctcctggcctttactcatacgacaaatcttcttggatccattcatgacgtaaaagccatcacggctgctgctcacgagtaccctgacgtccttgtctgtgtggatggagttgcttatgccccccatcgttcagtcgatgtgaaagatctcggagtcgacttttactgtctctcatggtacaaggtcttcggaccccatatttccatgctatacgcaagtcgagaggctcagaagcaacttcggcctttgtcccattactttaaccctacacagaccctgtcggacaaggcctcattcgctgctgggagctatgaattgatcgcgagcattcccaccgttgtggatcacatatccgagcatgggtgggagggcagcgtcaagcaagagacgcagatacaaacgatgctactcgactacctttcgaagcgagaggacatcactatatacggagaacccagcagcgattcggaaagccgagtccctatcgtaagcttcactgtcgaagggtggaactctcgaagcgtcgtagcggccatcgaagccaactcgaacattggtttgaagcacggtcatttctactctcatcggttgatcacagaagtcctggatttggacgccacagatggtgtcgtgcgagtgagcatggcgcattacaatactcgcgaggagattgagacggtgatctcgacattggaagatgtcattgtgaagagaggtctgttgaacaaaaacgggaaataa

SEQ ID NO: 31955 - protein, 408 aa, Gibberella zeae PH-1
MTQSKNDIVALRAQFPALQQKQIFLDNAGGSQILGAAADSIRDYLITSNVQMGGSYDASQTASKKVNKGYEAGSRYINAQPDEIVYGASSTQLLRNLALGLTFAEGDEIIVSTLDHESNIAPWLDLAERQGLGIKFWNPEGQGNNPKLTVETLKPLLSNRTKLLAFTHTTNLLGSIHDVKAITAAAHEYPDVLVCVDGVAYAPHRSVDVKDLGVDFYCLSWYKVFGPHISMLYASREAQKQLRPLSHYFNPTQTLSDKASFAAGSYELIASIPTVVDHISEHGWEGSVKQETQIQTMLLDYLSKREDITIYGEPSSDSESRVPIVSFTVEGWNSRSVVAAIEANSNIGLKHGHFYSHRLITEVLDLDATDGVVRVSMAHYNTREEIETVISTLEDVIVKRGLLNKNGK

SEQ ID NO: 31956 - DNA, 1221 bp, Gibberella zeae PH-1
  CDS (1)..(1221)
atgtcatcttccagcttctccattgagaatgtcaggtcacaattcccggcactggaaaaacgccagatcttcggggacaacgctggtggtagccaggttcttggaactgtcgcaaaaaggcagctaagccctatcactgagtatctcatcgagactaatgttcagctcggcgcgagttacaagacttcaacacaatcaaccgccatttttgacaatgcgtacaaggctgctgccaaatacatcaatgccgggattgatgagatagtgatcggtgcctcgacaacacaggtctttcgcaacctcgctgccgctctcaaattacaacccggagacgaactgattctcaccaatgtagaccacgagtccaacattgacccgtggcttcactatgccgccctcaacaacgctacaatcaagtggtggacaccgtctgatctcaataaccccaagctagatccagagcaattacgaagcctcttgaccaacaagacacgcctagttgcctgtacacattgcagtaatatcctcggtaccatcaataacattaaagctatagcagatgttgtgcatgagatccccggtgcattattggcagttgacggcgtcgcttatgcccctcatagggcaatcgatgtaaaggaacttggagcggacttttacgccttttcttggtacaaggtctatgggccgcacatctccctactgtacggctcaaaggcagcccaggctcagctctcgtcattaggtcacttcttcaaccctgatggtagcttgatggataagcttgagttggcagcagctagctacgagttgacacaggctatcatacccctcacagcgtactttggtgagaatcccaagcagacgtgggatgccatcgcagagcatgagcagaagctacagacccgacttatcgagtaccttgtatcaaagccgcaaatcacggtatacggcgagacatctaccgataaggcggttcgtgtgcctacggtaagcttcactgttgaggggatgtcatcgcaaagcgtggtagaggctgtggaagcagtctcgcatgctggcattcgatggggtcatttcttttccaagagactcgtagggagcattcttggtctcagcgatgacggcgttgtgcgagtgagcttggttcactataatacagatcgtgtcgcagtggaggaagttgatcagattatcgtcgcgttggagatggttctgtaa

SEQ ID NO: 31957 - protein, 406 aa, Gibberella zeae PH-1
MSSSSFSIENVRSQFPALEKRQIFGDNAGGSQVLGTVAKRQLSPITEYLIETNVQLGASYKTSTQSTAIFDNAYKAAAKYINAGIDEIVIGASTTQVFRNLAAALKLQPGDELILTNVDHESNIDPWLHYAALNNATIKWWTPSDLNNPKLDPEQLRSLLTNKTRLVACTHCSNILGTINNIKAIADVVHEIPGALLAVDGVAYAPHRAIDVKELGADFYAFSWYKVYGPHISLLYGSKAAQAQLSSLGHFFNPDGSLMDKLELAAASYELTQAIIPLTAYFGENPKQTWDAIAEHEQKLQTRLIEYLVSKPQITVYGETSTDKAVRVPTVSFTVEGMSSQSVVEAVEAVSHAGIRWGHFFSKRLVGSILGLSDDGVVRVSLVHYNTDRVAVEEVDQIIVALEMVL

SEQ ID NO: 31958 - DNA, 1215 bp, Thermus thermophilus HB27
  CDS (1)..(1215): transl_table=11
atggacctaagcgccctgagggaggacttccccctcttcgcccagcgcccggagctcgtctacctggactccgccgccacgagccagaagcccaggcgggtcatagaggccctgaggcgctactacgagaccttgaacgccaacgtccaccggggggcctaccggctctccgccgaggccaccgaggcctacgaggaggcgcggaggcgcctggcccgctttctcaacgccgagcccaaggagatcgtctttgtgcgcaacaccaccgaggccatgaacctggtggcctacgcctggggccttaggaaccttaaggagggggacgaggtcctggtcacggagatggagcaccatgcgggcctcgtcccctggcacctggtggcaggcctcaccggggccaaggtgaaggccatccccctcaccgaggagggaaggctggacctaagcgccctggaggacctcctcacggaaaggaccaaggtggtctccctggtccacatgtccaacgtcctcggcaccatcaaccccgtggccgagatcgcaaggagggccaaggaggccggggccctcgtggtggtggacggggcccagtccgccccccacctccccgtggacgtcaaggcccttggcgccgacttcttcgccctttccgggcacaagatgctggggcccacgggggccggggtcctttgggggcggtacgaggtcctggaggggatgatgccctttttggggggcggggagatgatcctcgaggtccacgtggaccggtccacctacgcccccccgccccagcgctttgaggcgggcaccccccccatcgccgaggccatcgccctgggggaggccgcctgctacctcatggaggtggggatggacaaggtcttcgcccacgaccgggcccttctggagtacgccctaaagcgcctggaagaggtgccgcgcctccgggtctacgggcctaggggcgaggaccggggcggggtcatccccttcaccttaggccgcctccacgcccacgacctcgccaccttcctggaccaggaggggatcgccgtgagggcgggccaccactgcgcccagcccctccaccggaagctcggccttgcggccacggcccgggcgagcttctacctctacaacacgaaggaagaggtggaccgcttcgtggaagcccttctaaggatagaggccaagtaccgggcctggctataa

SEQ ID NO: 31959 - protein, 404 aa, Thermus thermophilus HB27
MDLSALREDFPLFAQRPELVYLDSAATSQKPRRVIEALRRYYETLNANVHRGAYRLSAEATEAYEEARRRLARFLNAEPKEIVFVRNTTEAMNLVAYAWGLRNLKEGDEVLVTEMEHHAGLVPWHLVAGLTGAKVKAIPLTEEGRLDLSALEDLLTERTKVVSLVHMSNVLGTINPVAEIARRAKEAGALVVVDGAQSAPHLPVDVKALGADFFALSGHKMLGPTGAGVLWGRYEVLEGMMPFLGGGEMILEVHVDRSTYAPPPQRFEAGTPPIAEAIALGEAACYLMEVGMDKVFAHDRALLEYALKRLEEVPRLRVYGPRGEDRGGVIPFTLGRLHAHDLATFLDQEGIAVRAGHHCAQPLHRKLGLAATARASFYLYNTKEEVDRFVEALLRIEAKYRAWL

SEQ ID NO: 31960 - DNA, 1221 bp, Bacillus anthracis str. 'Ames Ancestor'
  CDS (1)..(1221): transl_table=11
atgaatattcatgaaatacgcaaacagtttccaattcttgatcaaaaagtgaacggcaaacaacttgtttatttcgatagtgcagcaacttctcaaaaaccaattcaagtcattgaaacgttagaacgttactataaagaatataattctaacgtgcatcgcggtgttcatacgctcggtacgaaagctaccgatgcgtatgaaggtgcacgtgagaaagttcgcaagtttattaatgcgaaatcaatggaagagattattttcacatgcggaacgacaactgcattaaatacagtagcggctagttatggtcttgaaaatgtaaaagaaggcgatgaaatcgttatttcttacatggagcatcatagtaacatcattccgtggcaacaagttgcgaagaaaactggtgcaactttaaaatatcttccgcttcaaccagatgggacaatttcaatagaagatgctcgtcaaacaattacaccgaatacaaaaatcgtttctatcatgtatgtatctaacgtacttggaacgattaaccctgtaaaagaaatcggagcaatcgcacacgaaaacggtgcaattatggtcgttgacggtgcacaaagtacacctcatatgaaagtggatgtacaagatttaaattgtgatttctacgcattatctgctcataagatgtgcggacctacaggtatcggcgtattatatggtaagaaagaattgctaaacaatatggagccaattgaatttggcggtgaaatgattgatttcgtagatttacaagaatctacttggaaagagcttccgtggaagtttgaagcaggtacgccgattatcggtaatgcaatcggacttggtgcggcaattgatttcctagaagaaatcggtcttgataatattgaaaagcatgagcatgaattagcgcaatacgctttagaaagactatcagaagtagatggcgttacaatttatggtccaaagcatcgcgctggtcttgttacatttaatattgaagatgtacatcctcacgatgtagcgacagtattagatgtagaaggtatcgcggttcgcgcaggacaccactgtgcacaaccgcttatgaagtggctgaaagcttcttcaacagcacgtgcgagcttctatttatataatacaaaagaagaaattgatacatttgttgaatcgctaatcaagacaaaggagtatttcacaaatgtcatttaa

SEQ ID NO: 31961 - protein, 406 aa, Bacillus anthracis str. 'Ames Ancestor'
MNIHEIRKQFPILDQKVNGKQLVYFDSAATSQKPIQVIETLERYYKEYNSNVHRGVHTLGTKATDAYEGAREKVRKFINAKSMEEIIFTCGTTTALNTVAASYGLENVKEGDEIVISYMEHHSNIIPWQQVAKKTGATLKYLPLQPDGTISIEDARQTITPNTKIVSIMYVSNVLGTINPVKEIGAIAHENGAIMVVDGAQSTPHMKVDVQDLNCDFYALSAHKMCGPTGIGVLYGKKELLNNMEPIEFGGEMIDFVDLQESTWKELPWKFEAGTPIIGNAIGLGAAIDFLEEIGLDNIEKHEHELAQYALERLSEVDGVTIYGPKHRAGLVTFNIEDVHPHDVATVLDVEGIAVRAGHHCAQPLMKWLKASSTARASFYLYNTKEEIDTFVESLIKTKEYFTNVI

SEQ ID NO: 31962 - DNA, 1242 bp, Burkholderia mallei ATCC 23344
  CDS (1)..(1242): transl_table=11
atgggtgacatgctgcgttcggccacgatgatggcgagcgcgtttccggcgcttgcgcagcgcgtgaacggcgcgccgctcgcgtatctcgacaacgcggcgacgacgcacgtgccgcagcccgtcctcgccgcgatgcgcggcttcgacgagcgcgatcgcgcgaacatccaccgcggcgtccacacgctcagccagcgggcgaccgacgcttacgaacgcgcgcgcgacacgctcgcgcgcttcgtcggcgcgaacggcgagcacctgctcgtcttcacgtcgggcgcaaccgatgcgctgaatctcgtcgcgaatgggctatcggttgccggccacacgcaagccgtgctgcaggaaggcgacgagatcatcgtcagcgcgctcgagcatcacgcgaacctcgtgccgtggcagatggccgcgcgccgttgcggcgcgaagctgcggatcctgcatccggatccgcagggcagcctgcatgttcgggacctcgaacgattgctggggccgcgcacgcgcgtgttcgcggtcaccgcgtgctcgaacgcgacgggcgagcggccgccgtacgaagcgctgctcgcggccgcgcgcgcgggcggcgcgctgacggtgctcgacgcggcacaggcggtcggccacgacgtgcccgatctgtccgcgctcgcgtgcgacttcgccgcgttctccggccacaagatgtacgggccgatgggcaccggcgcgctcgtcggccgccgggacgcgctcgagcggctcgtcccgctgcgcttcggcggcgacatggtgagctgggtgggcgagacggacgcgacattcgacgcgctgcccgcgcggctcgaaggcggcacgccgaacgtcgcgggcgcggtcggcatcgcggcggccgccgactatatcgacgcgatcggccgcgcccggatcgacgcccacgtgcgcgcactgcgcgatcacgcggccgcgggcctcgcggcgctcgacggcgtgaccgtgctctcgccgcgcacgtcgtcggcgatcgtatccttcgtcgtcgacggcgtgcatccgcacgacatcggcacattgctcgacgagcgcggcatcgccgtgcgcacgggctttcactgcgcgcagccgctgctcgaacggctcggctgcgggccgacgacgcgcgcgtcgttcgcgctctacaacacgcacgacgaagtcgagcgcctcgtcgcgggcgtcgcgcaagcactgaaggtgttgagatga

SEQ ID NO: 31963 - protein, 413 aa, Burkholderia mallei ATCC 23344
MGDMLRSATMMASAFPALAQRVNGAPLAYLDNAATTHVPQPVLAAMRGFDERDRANIHRGVHTLSQRATDAYERARDTLARFVGANGEHLLVFTSGATDALNLVANGLSVAGHTQAVLQEGDEIIVSALEHHANLVPWQMAARRCGAKLRILHPDPQGSLHVRDLERLLGPRTRVFAVTACSNATGERPPYEALLAAARAGGALTVLDAAQAVGHDVPDLSALACDFAAFSGHKMYGPMGTGALVGRRDALERLVPLRFGGDMVSWVGETDATFDALPARLEGGTPNVAGAVGIAAAADYIDAIGRARIDAHVRALRDHAAAGLAALDGVTVLSPRTSSAIVSFVVDGVHPHDIGTLLDERGIAVRTGFHCAQPLLERLGCGPTTRASFALYNTHDEVERLVAGVAQALKVLR

SEQ ID NO: 31964 - DNA, 1233 bp, Burkholderia pseudomallei K96243
  CDS (1)..(1233): transl_table=11
atgctgcgttcggccacgatgatggcgagcgcgtttccggcgcttgcgcagcgcgtgaacggcgcgccgctcgcgtatctcgacaacgcggcgacgacgcacgtgccgcagcccgtcctcgccgcgatgcgcggcttcgacgagcgcgatcgcgcgaacatccaccgcggcgtccacacgctcagccagcgggcgaccgacgcttacgaacgcgcgcgcgacacgctcgcgcgcttcgtcggcgcgaacggcgagcacctgctcgtcttcacgtcgggcgcaaccgatgcgctgaatctcgtcgcgaatgggctatcggttgccggccacacgcaagccgtgctgcaggaaggcgacgagatcatcgtcagcgcgctcgagcatcacgcgaacctcgtgccgtggcagatggccgcgcgccgttgcggcgcgaagctgcggatcctgcatccggatccgcagggcagcctgcatgttctggacctcgaacgattgctggggccgcgcacgcgcgtgttcgcggtcaccgcgtgctcgaacgcgacgggcgagcggccgccgtacgaggcgctgctcgcggccgcgcgcgcgggcggcgcgctgacggtgctcgacgcggcacaggcggtcggccacgacgtgcccgatctgtctgcgctcgcgtgcgacttcgccgcgttctccggccacaagatgtacgggccgatgggcaccggcgcgctcgtcggccgccgggacgcgctcgagcggctcgtcccgctgcgcttcggcggcgacatggtgagctgggtgggcgagacggacgcgacattcgacgcgctgcccgcgcggctcgaaggcggcacgccgaacgtcgcgggcgcggtcggcatcgcggcggccgccgactatatcgacgcgatcggccgcgcccggatcgacgcccacgtgcgcgcactgcgcgatcacgcggccgcgggcctcgcggcgctcgacggcgtgaccgtgctcgcgccgcgcacgtcgtcggcgatcgtatccttcgtcgtcgacggcgtgcatccgcacgacatcggcacattgctcgacgagcgcggcatcgccgtgcgcacgggctttcactgcgcgcagccgctgctcgaacggctcggctgcgggccgacgacgcgcgcgtcgttcgcgctctacaacacgcacgacgaagtcgagcgcctcgtcgcgggcgtcgcgcaagcactgaaggtgttgagatga

SEQ ID NO: 31965 - protein, 410 aa, Burkholderia pseudomallei K96243
MLRSATMMASAFPALAQRVNGAPLAYLDNAATTHVPQPVLAAMRGFDERDRANIHRGVHTLSQRATDAYERARDTLARFVGANGEHLLVFTSGATDALNLVANGLSVAGHTQAVLQEGDEIIVSALEHHANLVPWQMAARRCGAKLRILHPDPQGSLHVLDLERLLGPRTRVFAVTACSNATGERPPYEALLAAARAGGALTVLDAAQAVGHDVPDLSALACDFAAFSGHKMYGPMGTGALVGRRDALERLVPLRFGGDMVSWVGETDATFDALPARLEGGTPNVAGAVGIAAAADYIDAIGRARIDAHVRALRDHAAAGLAALDGVTVLAPRTSSAIVSFVVDGVHPHDIGTLLDERGIAVRTGFHCAQPLLERLGCGPTTRASFALYNTHDEVERLVAGVAQALKVLR

SEQ ID NO: 31966 - DNA, 1224 bp, Silicibacter pomeroyi DSS-3
  CDS (1)..(1224): transl_table=11
atggcgttggatatagactttgtgcgcaagcagtttcccgcatttgccgaaccgtcgctgcacggtcaggcgtttttcgagaatgcgggcgggtcttatacctgccagccggtgatcgaccggctgacgcggttctatacccagcgcaaggtacagccctatgctccctacgaggcaagccggctgggcggcgccgagatggacgaggcgcgcgcgcgcatggccgcgatcctgggggtcgagaccgacgagctgagctttggcccctcgaccacgcagaacacctatgtcctggcccaggcgttccgccaatggatgcagccgggcgaggcgatcatcgtcaccaatcaggatcacgaggccaattccggcccctggcggcgactcgccgaggcagggatcgaggtgcgtgaatggcagatcgaccccgagaccgggcatctgaaccccgaggatctggaggacctgctggacgagaccgtgcgtctggtctgttttccccattgttcgaacgtggtgggcgagatcaacccggtgaccgagatcaccgccatcgcccatgccgccggcgcgtttgtctgtgtcgacggggtgtcctatgtgccgcatggctttcccaatgtcggcgaactggggccggatatctacctgttctcggcctacaagacctatggcccgcatcaggggctgatggtgatccgccgcaccctgggcgagctgctgcccaatcaggggcattatttcaacgccgactcactttacaaacggtttacccccgcagggccggatcatgctcaggtggcggcctgtgcgggcatggccgattatgtcgatcaactggcggcccatcacgggatcaccgccaccgacgcggccgggcgcggggcggcggtgcatgacctgatgcgcgcacatgaggtcacgttgctgcaaccgctgctcgatgcggtgcgcgatcgcaactcggtccgcctgatcgggccggaccgggccgagcaacgggcgccgacggtggcactggcgatgaaccgcccgggtgaaccggtggcggcagagctggcgcaacacggtatcatggcggggggcggcgatttctacgcggtgcgcgcgctggcggcgatgggagtcgatccggtgcagggcgtgctgcggctgagctttacccattacaccagcaaggacgagatcgcgcagctgatcgaggcgctcgaccgggtgttgtga

SEQ ID NO: 31967 - protein, 407 aa, Silicibacter pomeroyi DSS-3
MALDIDFVRKQFPAFAEPSLHGQAFFENAGGSYTCQPVIDRLTRFYTQRKVQPYAPYEASRLGGAEMDEARARMAAILGVETDELSFGPSTTQNTYVLAQAFRQWMQPGEAIIVTNQDHEANSGPWRRLAEAGIEVREWQIDPETGHLNPEDLEDLLDETVRLVCFPHCSNVVGEINPVTEITAIAHAAGAFVCVDGVSYVPHGFPNVGELGPDIYLFSAYKTYGPHQGLMVIRRTLGELLPNQGHYFNADSLYKRFTPAGPDHAQVAACAGMADYVDQLAAHHGITATDAAGRGAAVHDLMRAHEVTLLQPLLDAVRDRNSVRLIGPDRAEQRAPTVALAMNRPGEPVAAELAQHGIMAGGGDFYAVRALAAMGVDPVQGVLRLSFTHYTSKDEIAQLIEALDRVL

SEQ ID NO: 31968 - DNA, 1374 bp, Anabaena variabilis ATCC 29413
  CDS (1)..(1374): transl_table=11
atggaagctttagacttgaaatggatacgtgggcagtttccggcgcttacacaaaaaattaacggacaaccagctatattttttgatggccccggtggtacacaagtacctgggtctgttttagatgctatcagtgactatttagttaggtcaaatgctaatgctcacggggcttttgctactagcgcgcggacggatgctttaattattgcagcaagaacggcgatcgctgattttttgggttgtcacagtgatgaggtggtgttcggcgctaatatgacgacgctcacctttagtttgagtcgcgctattggacggacgctgcaaccaggtgatgaaattattgtgacacggcttgaccattcggctaatgtttcctcttgggaagcattggcagaacaaggtgcagttattcgttatgtggatgtcaaagttgatgattgcaccttagatatgaatgatttggagcagcaaatcaattcccgcaccaagttagtagccgtcacttatgcttccaatgctgtggggacaattaacgatattgccgctattgtcaaattagcccatgctgtaggcgctttggtgtttgtcgatgcagttcattatgcccctcatggaacgataaatgttcatgctttggggtgtgattttctcgcctgttctgcatacaaattcttcggcccccacgttgggattttgtatggtaagcgggaacatcttaccaatctgcaaccttataaagtcaaaccagcacccaatgaagtcccatcccgttgggaaaccggaaccttgaatcatgaaggattagcgggtttagtcgcggctattaactatttggcaaaattaggttgtcatgtctccccgaaaattaaccaagagttagtttcggcgttgattgaggctgataaggaaggtttggaacatttccaatgtccccggtttctaacttcaccagaacaaccatcatccacattggcatcagcttatcacagtcgtcgggcagctttagttgcagccatgtcagcgattcagcaatacgaaagagaattgagccataaactaatttccgggttgctagaaattcctggcttaactatatatggcatcacagatccagaacgctttgcttggcggacaccaacggtagcaattcgactccaaggtaaaagcccagaaagcattgcgaggacattaggcgatcgcggtattttctcctggcatggtaacttctatgccttgaatctgactgagaaactaggtatagaaaatgatggcggtttattgcgcctggggttggtacactacaattctgtggaagagattatacaattactgcaagctttaaaagaaattggcagtgccatatcgctttaa

SEQ ID NO: 31969 - protein, 457 aa, Anabaena variabilis ATCC 29413
MEALDLKWIRGQFPALTQKINGQPAIFFDGPGGTQVPGSVLDAISDYLVRSNANAHGAFATSARTDALIIAARTAIADFLGCHSDEVVFGANMTTLTFSLSRAIGRTLQPGDEIIVTRLDHSANVSSWEALAEQGAVIRYVDVKVDDCTLDMNDLEQQINSRTKLVAVTYASNAVGTINDIAAIVKLAHAVGALVFVDAVHYAPHGTINVHALGCDFLACSAYKFFGPHVGILYGKREHLTNLQPYKVKPAPNEVPSRWETGTLNHEGLAGLVAAINYLAKLGCHVSPKINQELVSALIEADKEGLEHFQCPRFLTSPEQPSSTLASAYHSRRAALVAAMSAIQQYERELSHKLISGLLEIPGLTIYGITDPERFAWRTPTVAIRLQGKSPESIARTLGDRGIFSWHGNFYALNLTEKLGIENDGGLLRLGLVHYNSVEEIIQLLQALKEIGSAISL

SEQ ID NO: 31970 - DNA, 1239 bp, Rhodobacter sphaeroides 2.4.1
  CDS (1)..(1239): transl_table=11
atgaccttgctcgacataggctacgtccgttcctttttccccgccttctcggaacccgcgctggcgggacaggccttcttcgagaatgcgggaggctcctacacctgccggccggtgatcgaccggctgagccgcttctaccaccagcgcaaggtgcagccctatgcgccctatgccgcctcgcatgcggcgggcgccgagatggacgaggcgcgtagccgcctcgccgccctgatgggggtggaggaggacgagctgtccttcggcccctcgacctcggccaacacctacgttctggcgcaggcggtgcgcggctggctttcgcgcgagggcggggccatcgtcgtgacgaaccaggaccacgaggccaacagcggcgtctggcgtaggctcgcccacgaggggatcgaggtccgcgaatggcgcatcgatcccgaaacgggccatctcgatcccgcgggcctgccgccgcttctggccgacgggcgggtgcgcctggtctgtttcccgcattgctcgaacgtcgtgggcgagatcaatccggtggccgagatctgcgccaccgcgcgggcggcgggcgccttcacctgcgtggacggcgtgagctatgcgccccacggcctgcccgacatggaggcgctcggggccgatatctatctcttctcggcctacaagacctacggcccgcatcaggggatcctgctgatgcggcgcgcgctggccgagcttctgcccgcgcaggggcactggttcaacgcggacaccttgttcaagcgcttcacgccggcggggccggaccatgcgcaggtcgcggcctgcgcggggcttgccgattatgtggatgcgctggcggcccatcacggcgcgggcggggccgcgccgctcgagcggtcgcgcgcggtgcaccggctgatgcgcgagcatgagatccggcttctgcggccgctcctcgaccagctggcggcgcgcaacgacctgcgcctgatcgggccgcgcacgcccgagacccgggcccccaccgtggcgctggtgctcgaccggcccgtggcgcccgtcgcggccgcgctggccgcgcacgggatcatggcgagcgcgggggatttctacgccgtccgtccgctcgaggcgctggggatcgatcccgcccggggcgtgctgcggctgagcttcgtccattacacgtcggaggccgaggtggcgcagctgatgctcgcgctcgacgcggtgctggggcgctga

SEQ ID NO: 31971 - protein, 412 aa, Rhodobacter sphaeroides 2.4.1
MTLLDIGYVRSFFPAFSEPALAGQAFFENAGGSYTCRPVIDRLSRFYHQRKVQPYAPYAASHAAGAEMDEARSRLAALMGVEEDELSFGPSTSANTYVLAQAVRGWLSREGGAIVVTNQDHEANSGVWRRLAHEGIEVREWRIDPETGHLDPAGLPPLLADGRVRLVCFPHCSNVVGEINPVAEICATARAAGAFTCVDGVSYAPHGLPDMEALGADIYLFSAYKTYGPHQGILLMRRALAELLPAQGHWFNADTLFKRFTPAGPDHAQVAACAGLADYVDALAAHHGAGGAAPLERSRAVHRLMREHEIRLLRPLLDQLAARNDLRLIGPRTPETRAPTVALVLDRPVAPVAAALAAHGIMASAGDFYAVRPLEALGIDPARGVLRLSFVHYTSEAEVAQLMLALDAVLGR

SEQ ID NO: 31972 - DNA, 1260 bp, Synechococcus elongatus PCC 7942
  CDS (1)..(1260): transl_table=11
atgactgcgatcgccctgaccaatcttgcgactgaggttcgtgccgactttccgatcctgcagcagcaggtcaacggtcagcccttggtctatctcgacaatgcggccacttcgcaaaaaccgagagcggtgatccagtccctcgtcgattactacgagggctacaacagcaacgtccatcgcggcgtccacaccctgagcggcaaggcaacggatgcctacgaaggggcacggcaaaaggtggcgcggttcatcaacgccaagacggaacaggagattgtctacacccgcaatgccagcgaggcgatcaacctcgtcgcctacagcttcggcatgaactttctccaagccggtgatgagatcatcctctcggcgatggagcaccacagcaacctaatcccttggcagtttgtggcagcgaaaacaggagcggcgctgaaattcgtcggggtgactgagaccggtcagttcgacctcgagcagttccgtagcctcctcagcgatcgcaccaaactggtgtcggtcgtccatgtttctaatacgctaggttgctgcaatccggtcacggaaatttgtcagctcgcccatgccaagggtgcgcgggtgttgattgatgcctgccaaagtcttccccaccaggcgatcgatgttcaggcgatcgattgcgattggctggttggctctggccacaaaatgtgtgcaccgacgggcattggtttcctctacggcaagctcgacctgttgcgtcaaatgccgcccttcctcggcggtggtgaaatgatcgccgatgtcttccttgatcacgcaacttacgccgatcttcctcacaaattcgaagcaggaacaccggcaattggagaagcgatcgcattgggcgcggcgattgattatctaaccgcgatcggcatggatcgcattcacgcctacgaacagcagctaacccaacacctcttccaacggctggcagaaattcctgagctgaccgtctacggacctacgccggagcaagatcgcgatcgcgctgccctcgccgcctttaccgccggtgcagtccatccccacgatctctcgaccatcctcgaccagtcaggcattgcgattcgagccgggcatcactgcactcagccactgcaccgtgaattacaagtccaatcaacggcgcgggctagttgttatttctacaatacgactgacgagatcgatcgtctgatcgagtctctcaaggaagccgttgagttctttggagcgattttcagctag

SEQ ID NO: 31973 - protein, 419 aa, Synechococcus elongatus PCC 7942
MTAIALTNLATEVRADFPILQQQVNGQPLVYLDNAATSQKPRAVIQSLVDYYEGYNSNVHRGVHTLSGKATDAYEGARQKVARFINAKTEQEIVYTRNASEAINLVAYSFGMNFLQAGDEIILSAMEHHSNLIPWQFVAAKTGAALKFVGVTETGQFDLEQFRSLLSDRTKLVSVVHVSNTLGCCNPVTEICQLAHAKGARVLIDACQSLPHQAIDVQAIDCDWLVGSGHKMCAPTGIGFLYGKLDLLRQMPPFLGGGEMIADVFLDHATYADLPHKFEAGTPAIGEAIALGAAIDYLTAIGMDRIHAYEQQLTQHLFQRLAEIPELTVYGPTPEQDRDRAALAAFTAGAVHPHDLSTILDQSGIAIRAGHHCTQPLHRELQVQSTARASCYFYNTTDEIDRLIESLKEAVEFFGAIFS

SEQ ID NO: 31974 - DNA, 1329 bp, Frankia sp. CcI3
  CDS (1)..(1329): transl_table=11
atgacgctgaccgacgcggccgtgcgcccggggtccggaccccggctcgtcggcgggttcgacgtcgagcaggtccgccgggacttccccgtcctggcccgcacggtgcacggcgaccggccgctggtctacctcgacagcgccgccacctcgcagaagccgctggcggtgctcgacgccgagcggacctactacgagctgcacaacgccaacgtgcaccgcggcatccacgtgctggccgaggaggccaccgggctgtacgaggcctcccgggacaaggtcgccgccttcatcggggcgggcgaccgccgggaggtggtgttcaccaagaactcctcggaggcgctgaacctcgtcgcctacgcgatgagcaacgccggggccgccggcgccgaggcggagcggttccgggtcggcccgggtgacgagatcgtcgtcaccgagatggagcatcactccaatctcgtgccgtggcagatgctggcccggcgcaccggggcgacgctgcgctggatcgggctgaccgacgacggccggctcgacctgagcaacctcgattcgatcatcaccgagcgggcgaaggtcgtcgccttcgtccaccagtcgaacattctcggcacgatcaacccggtcgcgcaggtggtggcgcgggcccgcgaggtcggcgcgctgaccgtgctcgacggctcccagtcggtaccgcacaacccggtcgacgtcaccgagctcggggtggacttcctggccttcaccgggcacaagatgtgcgcgcccaccggggtcggggtgctctggggacgctacgagctgcttggggtcatgccgcccttcctcggcggcggcgagatgatcgagcttgtcaccatggagggctcgacctacgcggcgccgccgcaccggttcgaggccggcaccccgatgattgcccaggtggtcgggctcggcgcggccgtcgactacctgaccgcgctcggcatgccggccgtcgccgagcacgagcacgcggtgacggcctacgcgctggacgccttcgccgaggtgccggggttgcggatcatcggtccgccggcggcggacgcccgcggcggggcgatctcctttgtgctgcacgaggacgacggccggccgatccatccccacgacgtcggacagatcctcgacgagcgcggcattgccgtgcgggtcgggcaccactgcgcccggccggtctgcctgcggttcggggtacctgcgacgacccgcgcgtcgttccacctctacacgacgaccggcgaggtcgacgccctggtggaaggactgcacggggtccggaggttctttctgaggtga

SEQ ID NO: 31975 - protein, 442 aa, Frankia sp. CcI3
MTLTDAAVRPGSGPRLVGGFDVEQVRRDFPVLARTVHGDRPLVYLDSAATSQKPLAVLDAERTYYELHNANVHRGIHVLAEEATGLYEASRDKVAAFIGAGDRREVVFTKNSSEALNLVAYAMSNAGAAGAEAERFRVGPGDEIVVTEMEHHSNLVPWQMLARRTGATLRWIGLTDDGRLDLSNLDSIITERAKVVAFVHQSNILGTINPVAQVVARAREVGALTVLDGSQSVPHNPVDVTELGVDFLAFTGHKMCAPTGVGVLWGRYELLGVMPPFLGGGEMIELVTMEGSTYAAPPHRFEAGTPMIAQVVGLGAAVDYLTALGMPAVAEHEHAVTAYALDAFAEVPGLRIIGPPAADARGGAISFVLHEDDGRPIHPHDVGQILDERGIAVRVGHHCARPVCLRFGVPATTRASFHLYTTTGEVDALVEGLHGVRRFFLR

SEQ ID NO: 31976 - DNA, 1257 bp, Acidobacteria bacterium Ellin345
  CDS (1)..(1257): transl_table=11
atggcaacgagtgcacatgccagtgtgaacctggaagcgattcgagcgcaatttcctgccctcagccaaacgtacaacgggcatccgcgagtgtatttcgatgcgcccggtggaactcaggtaccgcagcaggtgattgacgcgatctcgggctacctggtgcattcgaactcgaacacgcatgggcaattccataccagtcacctgaccgacgaagtgctggagcacgcccacgcagcaatggccgacatgcttgggtgcgatgcggatgagattgtgttcggacagaacatgaccacgctgacctttgcgttgagccgcgcgctgggccgcgatttacgcgcaggggatgagatcgtgacgacattgctcgatcacgatgcgaatgtagcgccgtggcgcgcgctggaagagaccggggcgagggtgcacgcggtgaagttccatcccgaggactgcacgctggatctggaggatttgcagtcgaagctgaacgggcggacgaagattgtggcggtgggatttgcgtcgaacgcggtgggcacgatcaatcccattaaaaagattgtggagatggcgcacgcggtgggagcgttggttttcgtggacgccgtgcactttgcgccgcatgggttcatcgatgtgcgcgatctggattgcgattttctcgcgtgctcgacgtataagttttttggtccgcacatgggggtcctatttgggaagcatgagcatctgttgcggttgaagccgtataaggtgcgtccggcggcagatactttgccggaccggtgggagacgggcaccctgaaccatgagtgcattgcgggaatcacggcatgcgtggagtacctggccgatgtcgggctgaagacggtgaagcatccggagtcgcggcgggatgcgattgcggcggcgtatgcgtggatgaaagagcatgagcatgaattggcgaggcagcttatcggcggactgctggagattccggggctgacgttttatgggatccgggatttgagccggctggatgagcgaacgccaacggtgtcaatacgaatggcgaaactttcgccagcagagttgtcgaagaagcttggcgatctcgggatttatacgtgggatgggaacttctacgcgatcaatgtgacggaacagttgggcgtggaagaagatggcgggatcctacggatcgggttggcgcattatgcaacttcagcggaagtggaaaggttgttgaaggcgctgcgagagtgggcatag

SEQ ID NO: 31977 - protein, 418 aa, Acidobacteria bacterium Ellin345
MATSAHASVNLEAIRAQFPALSQTYNGHPRVYFDAPGGTQVPQQVIDAISGYLVHSNSNTHGQFHTSHLTDEVLEHAHAAMADMLGCDADEIVFGQNMTTLTFALSRALGRDLRAGDEIVTTLLDHDANVAPWRALEETGARVHAVKFHPEDCTLDLEDLQSKLNGRTKIVAVGFASNAVGTINPIKKIVEMAHAVGALVFVDAVHFAPHGFIDVRDLDCDFLACSTYKFFGPHMGVLFGKHEHLLRLKPYKVRPAADTLPDRWETGTLNHECIAGITACVEYLADVGLKTVKHPESRRDAIAAAYAWMKEHEHELARQLIGGLLEIPGLTFYGIRDLSRLDERTPTVSIRMAKLSPAELSKKLGDLGIYTWDGNFYAINVTEQLGVEEDGGILRIGLAHYATSAEVERLLKALREWA

SEQ ID NO: 31978 - DNA, 1230 bp, Silicibacter sp. TM1040
  CDS (1)..(1230): transl_table=11
atgaaacgcgccatggatatcgaatttgtccgcaaacaatttccggcatttgaacagccctctttgcagggtcaggccttctttgagaatgcaggcggctcttacacctgccggcaggtgatcgaccgcctgtttcgattttacaccgagcataaggtccagccctacgcgccttatgccgcctccgaggcagccggcgccgagatggatgaagcgcgcagtcgtctggcggcgatgctgggtgtctctgcgcaggatctgagcttcggtccttcgacaacccagaatacctatgtgctggcgcaggccttccggggcttcttgaagccgggcgagaagatcatcgttaccaatcaggaccatgaggccaactccggcccgtggcgacgcttggccgacgagggcatcgaggtgctggagtggcagatcgatcctgccaccggccatcttgaaccgagcgcgctggaggatctcttggacgagagcgtgcggctggtctgttttccccattgctccaatgtggtgggcgagatcaatccggtcacggaaatcactgcgctggcccatgctgcgggggcttttgtctgcgttgatggcgtctcttacgcgccgcatggtttgccgaacgtgggtgaactggggccggatatctatttgttctccgcctataaaacctatggccctcatcaagggatcatggtgatcaatcccgctcttgccgagcttttgcccaatcaggcgcactactttaacggggatgttccttacaaacgcttcacccccgccggacccgatcacgcgcaggtcgccgcctgtgcgggaatggtcgactacttcgaggcgctcgccgaacatcacaacgcacctgagatcacaggcacaggggcgggcgcctttgtgcacgatctgatgcgcgagcaggagatctccttgttgcagccgctcctggatgcggtgaaggggcgaaacgatgtgcgcttgcttggccccgcgaacgccaaagagcgtgccccgaccgtcgcgcttgcgcttgggcgggcagcagagcccgttgccaagcaattggcagagcttgggatcatggcggggggcagcgacttttacgcagtgcgtgcgctcagggcaatgggggtcgaccccgcgcagggcgtgctgcggctgagttttactcactataccgatcaattggaggtgacagcgctgatcgaggccctagatcgcgtcctgtaa

SEQ ID NO: 31979 - protein, 409 aa, Silicibacter sp. TM1040
MKRAMDIEFVRKQFPAFEQPSLQGQAFFENAGGSYTCRQVIDRLFRFYTEHKVQPYAPYAASEAAGAEMDEARSRLAAMLGVSAQDLSFGPSTTQNTYVLAQAFRGFLKPGEKIIVTNQDHEANSGPWRRLADEGIEVLEWQIDPATGHLEPSALEDLLDESVRLVCFPHCSNVVGEINPVTEITALAHAAGAFVCVDGVSYAPHGLPNVGELGPDIYLFSAYKTYGPHQGIMVINPALAELLPNQAHYFNGDVPYKRFTPAGPDHAQVAACAGMVDYFEALAEHHNAPEITGTGAGAFVHDLMREQEISLLQPLLDAVKGRNDVRLLGPANAKERAPTVALALGRAAEPVAKQLAELGIMAGGSDFYAVRALRAMGVDPAQGVLRLSFTHYTDQLEVTALIEALDRVL

SEQ ID NO: 31980 - DNA, 1260 bp, Cytophaga hutchinsonii ATCC 33406
  CDS (1)..(1260): transl_table=11
atgattgacaccatcaataccgaccttataaccgccgatggaacattaaacatcgaccgtatccgggaagacttcccgatcttacatcaagaggtgaatggtaagcctttggtgtattttgacaatgctgctactacacaaaaacccatacaagttgtcgaagcacttacggcgtattatttaaacgacaacgcgaatattcaccgtggtattcatacccttgccgaacgtgctactgctgcttttgaagcgtctcgtgatgcagtaaaaacatccatcaatgccaaggaacgtgaagaagtaattttcacgcgcggcacaaccgaaggaatcaacctggttgcttcaacctggggattggctaatcttaaagccggtgacgagattgttgtttcagcaatggaacaccattcaaacatggtaccctggcacatgcttgcacaacgcaccaaagcggttgttaaaatattaccgatgaatgatgcaggtgaattgcttgtcgaagcattcgatacaatcattacatccaaaaccaaaatgcttgcctgtacacatgtttccaatacgcttggaagcatcaatcctataaaagaactgattgctaaagcacatgctgttggcgcgattaccttgattgacggtgctcaggcggtttctcacttagatattgacgtacaggatctggatgcagatttctatgcattctctgcgcataaattatacggacctaccggtgtaggtatcttatatggtaaacgtgcgatccttgaagctatgcctccatatcagggcggcggcgaaatgatcagcgaagtaacgtatgagagctgcacctacaatgagcttccctataagtttgaagcaggtacgccaaacatcgcggatgtgatagctttgaaagctgctattgattacataaattctattggcaaggctgctattcgttcatacgaacatgaactgcttgattatgcagtctcaaaattgaaggatatcgaaggtatccgtttgatcggaacagcaaaagataaagtgagtgtgcagtcgtttgtattttcagacatacaccaccaggatttaggaattatattagatcaagaaggtgttgcgatccgtaccggtcaccattgtacacaaccgttaatgggaagattgggcgttacgggaacttctcgcgcctcttttgcattttataatacaaaggaagaaatcgaccaattcattgctgccatttacaaggcaataaaattattcagataa

SEQ ID NO: 31981 - protein, 419 aa, Cytophaga hutchinsonii ATCC 33406
MIDTINTDLITADGTLNIDRIREDFPILHQEVNGKPLVYFDNAATTQKPIQVVEALTAYYLNDNANIHRGIHTLAERATAAFEASRDAVKTSINAKEREEVIFTRGTTEGINLVASTWGLANLKAGDEIVVSAMEHHSNMVPWHMLAQRTKAVVKILPMNDAGELLVEAFDTIITSKTKMLACTHVSNTLGSINPIKELIAKAHAVGAITLIDGAQAVSHLDIDVQDLDADFYAFSAHKLYGPTGVGILYGKRAILEAMPPYQGGGEMISEVTYESCTYNELPYKFEAGTPNIADVIALKAAIDYINSIGKAAIRSYEHELLDYAVSKLKDIEGIRLIGTAKDKVSVQSFVFSDIHHQDLGIILDQEGVAIRTGHHCTQPLMGRLGVTGTSRASFAFYNTKEEIDQFIAAIYKAIKLFR

SEQ ID NO: 31982 - DNA, 2013 bp, Mycobacterium avium 104
  CDS (1)..(2013): transl_table=11
atgagtacaagtgagtaccgagcggtagacgccgaaagcgacctgcccatcagcgccgcggaactcgccgcgctggccagccagctgtatgcggccagcatccgcccgggccccgacagcccgccgcagcaggcgccggtggcacctcgcggcagcgtgccggacgccacggcggcgatctcggccgggcggaccgccgccggcacagccgacgtgtacccgggaccggttccgcaggtcggtgggcgcgacgtctacctgccgcccccggcgtctcccgcccccgaagcacccccgcaggcggcgccgcccgccccgcgcggcagcgcgccggacgccacggcggccacgtcggccgggcgggcggccgccggcaccagcgacgtgtattcgtcatgggtgccgcagctgggggtcgccgacatctatctcggggctccgacgcccgccgggccggaggcgccgccgcagagcgcgccgcccgccccccgcggccaggtgcccgacacgaccgccgcggccaccgcctacggcgccgacctgagcgcgttcgcggtgcccaccggcatcgtgtcgaccgcgcccggtgtgcaggccgggacggtgccgcccgtccccgtcgtgccgcgggccgcgacggcgccgtcgtggctgcccgaggcgccctcggtcgccgacctgggctggtccgacgcacccgcacccgatgcgccggccggcgacgagcatgactaccacttcctgaccaaaaccgatccggtgccgcagtttcgcgacgagcacgaggttttcgacgtcgccgcgattcgctcggacttcccgatcctgaaggagacggtcaacggaaaaccgttgatctggttcgacaatgcggcgacgacgcagaagccgcaggtggtcatcgaccggctgtcgcacttctacgcccacgagaactcgaacattcaccgcgccgcacacgaattggcggcccgcgccaccgacgcctacgaggaggcccgcgacaccgtcgccgagttcatcggcgcgcccagctcggagaacatcgtgttcgtgcggggcaccaccgaggcgatcaacctggtggcccacgcgtggggcgccaagcatctgcagcccggcgacgagatcgtcatcactcacctggagcaccacgcgaacatcgttccctggcagctgatttcgcaaaaaaccggtgccatcctcaaggtggcgccgatcgacgacgcgggcaacctgctgctgagcgaattcgaggggctgctgggcccgcggaccaagctggtcgcggccagtcacgtgtcgaacgccctgggcaccgtggtgccggtggacaagatcgtcgagttgggtcaccgctacggcgcccgggtgctgatcgacggcgcccagtccatccagcacatcccgatcgacgtcgccgaactcggcgccgacttcttcgtcttctccggccataagatctacggccccaccgggattggtgcgctctacggcaccgaggaagcgctcaccgagaccccgccgtggcagggcggcggccacatgatcgccgacgtcaccctggaacgctcgctgtaccaggggccgccgacgaagttcgaggccggcaccggcaacatcgccgacgccgtcgggctgaccgaggcgctgcgctacgtgcaacggttgggcgtcgagcggatcgccgcctacgagcacgccctgctggagtacgcgacaccgcggttggccgacatccccggggtccgcctgatcgggaccgcgcaggagaaggccagcgtgttgtccttcgtgctggcgggccacgaaccgctcgaggtgggcaaggcgctcaacgccgagggcatcgcggtgcgggcgggccaccactgcgcccagccggccctgcgccgactgggactcgaggccaccgtgcgcccgtcgttcgccttctacaacacgttcgaggagatcgacgtgttcctgcgcgcggtgcgccggatcgccgagggcggcgccaacgtcggctga

SEQ ID NO: 31983 - protein, 670 aa, Mycobacterium avium 104
MSTSEYRAVDAESDLPISAAELAALASQLYAASIRPGPDSPPQQAPVAPRGSVPDATAAISAGRTAAGTADVYPGPVPQVGGRDVYLPPPASPAPEAPPQAAPPAPRGSAPDATAATSAGRAAAGTSDVYSSWVPQLGVADIYLGAPTPAGPEAPPQSAPPAPRGQVPDTTAAATAYGADLSAFAVPTGIVSTAPGVQAGTVPPVPVVPRAATAPSWLPEAPSVADLGWSDAPAPDAPAGDEHDYHFLTKTDPVPQFRDEHEVFDVAAIRSDFPILKETVNGKPLIWFDNAATTQKPQVVIDRLSHFYAHENSNIHRAAHELAARATDAYEEARDTVAEFIGAPSSENIVFVRGTTEAINLVAHAWGAKHLQPGDEIVITHLEHHANIVPWQLISQKTGAILKVAPIDDAGNLLLSEFEGLLGPRTKLVAASHVSNALGTVVPVDKIVELGHRYGARVLIDGAQSIQHIPIDVAELGADFFVFSGHKIYGPTGIGALYGTEEALTETPPWQGGGHMIADVTLERSLYQGPPTKFEAGTGNIADAVGLTEALRYVQRLGVERIAAYEHALLEYATPRLADIPGVRLIGTAQEKASVLSFVLAGHEPLEVGKALNAEGIAVRAGHHCAQPALRRLGLEATVRPSFAFYNTFEEIDVFLRAVRRIAEGGANVG

SEQ ID NO: 31984 - DNA, 1200 bp, Nocardioides sp. JS614
  CDS (1)..(1200): transl_table=11
atgaccttcgacgtcgaccgcatccgcaaagacttcccggccctcgactccggcaccgcctacttcgacgggccgggcggcagccaggtgccgcggcaggtggccgaggcggtggcggggacgatgacgtccgggatctccaaccgtggccaggtcacggcggccgagcagcgcgccgaggacgtcgtggtcggtgcgcgggcggcggtcgcggacctgctcggctgcgacccgggcggggtggtgttcgcgcggtcgatgacgcaggcgacgtacgacgtctcccgcgcgctcgccaaggagtgggggccgggtgacgaggtggtggtcactcgcctggaccacgacgggaacatccggccgtgggtgcaggcggcgcaggcggcgggcgcgaccgtgcggtgggccgggttcgaccaggagaccggcgagctgggcgtcgacgacgtccgcgagcagctgtcggcaaggaccaagctggtcgcggtgacgggtgcgtcgaacgtcctcggcacccggcccgacgtgccggcgatcgcggctgcggtgcacgaggtgggtgccctgctctacgtcgacggggtgcacctgaccccgcacgtgcccgtggacgtcgcggcgatcggcgccgacttctacgcgtgctcgccgtacaagttcctgggcccgcaccacggcatcgtggtcgccgcaccggagctcctggagcggatccacccggacaagctggtgccggccggcgaccaggtcccggagcggttcgagctcgggacgctgccctacgagctgctcgccggcaccacggctgcagtcgactacctcgcgggcctcgcctcggacgcggcggaccggcggacccgggtgctggagtcgatgcgggcagtggagcagcacgaggaggccctgttcgcgaggctgttggacgggctgcgcgggatcgacgccgtcacgctgtacggcgacccggagcggcgcaccccgaccgcgttcttctccgtcgccggccgggcggaccaggaggtctacgagcgcttggccgccgcgggggtgaacgctccggcgagcagcttctacgcgatcgaggcatcgcggtggatcggcctcggcgacaccggcgcggtgcgggccgggctcgcgccgtacagcagcgccgacgacgtcgagcggctgctcgcgggggtcgccgagatcgccgggtga

SEQ ID NO: 31985 - protein, 399 aa, Nocardioides sp. JS614
MTFDVDRIRKDFPALDSGTAYFDGPGGSQVPRQVAEAVAGTMTSGISNRGQVTAAEQRAEDVVVGARAAVADLLGCDPGGVVFARSMTQATYDVSRALAKEWGPGDEVVVTRLDHDGNIRPWVQAAQAAGATVRWAGFDQETGELGVDDVREQLSARTKLVAVTGASNVLGTRPDVPAIAAAVHEVGALLYVDGVHLTPHVPVDVAAIGADFYACSPYKFLGPHHGIVVAAPELLERIHPDKLVPAGDQVPERFELGTLPYELLAGTTAAVDYLAGLASDAADRRTRVLESMRAVEQHEEALFARLLDGLRGIDAVTLYGDPERRTPTAFFSVAGRADQEVYERLAAAGVNAPASSFYAIEASRWIGLGDTGAVRAGLAPYSSADDVERLLAGVAEIAG

SEQ ID NO: 31986 - DNA, 1203 bp, Magnetospirillum magnetotacticum MS-1
  CDS (1)..(1203): transl_table=11
atgagccagaccattcgcgcggcttttccggcgctgtcgcgaccgggttttcattatctggacaacgccgccatggcgcagattccgggactggtgtccgaggccatcgccagcctcaaccgcgtcgcccgttccaatgtgcgccgggggctgcacgaagcggcccttcgcgccgatgaagcctatgattccgcccgcgccacggtggggcgctttttgaacgctccggccgaggaggtggtgttcaccggcggctgtaccctggcgctgaacatggcggcctgggggctggggcgcaagctggggcccggcgacgaggtggcgctcagccggttggagcatcactccgcctgcctgccctggatgagcctggccgaggaccggggattcgccatccgctggttgccggtgacccatgaggggcggctggatctcgaccatctcggcgccatcgtcacgccttgctgcaaggtggtggcggtgacccatgcctccaatgtcaccggcgccgtcagcgatctgccgcgtctggccgaggccgcccatggggtgggagcccggctggtggtggacggcgcccagatggtgccccatggccgtgtcgatccccggtccctcggggctgatctctatgccttctctgggcacaaggcctatgggccgacgggaatcggtgtgttgtggggccgggccgaagttcttcagtccatgactcccatggtagttggcggcggcatggtggatgcggtgggtgacgatgacgtcacctgggccgatccacctcaccgcttcgaggcgggaaccccgcccgtggcccaggcggtcggtctggccgccgccctggactggatgatgagtctggatggtcaggagatacatcagcaggaagcggccctgacctggcatcttctggatgggctgggctcgatggccggagtgaaaatcgtcggcccgcgagggttggaggcccgcgtgcccgtcgtgtccttcaccgtggagggctgtcatccccatgatctggcgcatctgctggccgagcggggcgtggcggtgcgcggtggcgcccattgcgcccggccgctgatggcggctttggggctggaggaggggacgttgcgcgcctcgctggcgccctattccgaccgctccgacgtggaggccctgcttgtggggctggccgaggcggtgaaggtgctgcgatga

SEQ ID NO: 31987 - protein, 400 aa, Magnetospirillum magnetotacticum MS-1
MSQTIRAAFPALSRPGFHYLDNAAMAQIPGLVSEAIASLNRVARSNVRRGLHEAALRADEAYDSARATVGRFLNAPAEEVVFTGGCTLALNMAAWGLGRKLGPGDEVALSRLEHHSACLPWMSLAEDRGFAIRWLPVTHEGRLDLDHLGAIVTPCCKVVAVTHASNVTGAVSDLPRLAEAAHGVGARLVVDGAQMVPHGRVDPRSLGADLYAFSGHKAYGPTGIGVLWGRAEVLQSMTPMVVGGGMVDAVGDDDVTWADPPHRFEAGTPPVAQAVGLAAALDWMMSLDGQEIHQQEAALTWHLLDGLGSMAGVKIVGPRGLEARVPVVSFTVEGCHPHDLAHLLAERGVAVRGGAHCARPLMAALGLEEGTLRASLAPYSDRSDVEALLVGLAEAVKVLR

SEQ ID NO: 31988 - DNA, 1233 bp, Nostoc punctiforme PCC 73102
  CDS (1)..(1233): transl_table=11
atgcttttgaatcttgataaagttcgtcaatattttcctgcgctagctagtgaatggactttttttgataatgctggcggttcacaaactctgaaaaaagtagtagatagaattagcgaatttctcctgagttctgatgttcagttgggagcttcttatgcggtttctcaacttgcgggagaaagattggctttagcgactaggggaatggctattttgattaatgccaattcttttaaagaagtagtgatgggcccatctacgacaatgatgttgaaagttctctcaatttgtctgggtcaaacctttacatctggtgatgaaattattgttactaattgtgaccatgaagccaatattggtgcttgggtggctttagaaaaacaaggaattaaggttaaagtgtggcaaattcgcccagataccttagaacttcatttagcagatttagaagcattgatgagtcctcgcaccaaattagtaaccttgactcatgcttctaatgttctgggaacgattaacccgatcaaagaaattgctacatttgtacacgatcgcaacgcgatgatttgtgtagatggtgtagcttatgcaccccacagattagttgatgtacaagatttggatgttgatttttatgctttgagtttttataaagtctacggaccacaccatgccttactttatggcaaagaagaacatttattaagattgcccggacttaatcattattttattcaacagacagatataccttataaatttcagttagggaatgtcaattttgaattaagttatggaatgttaggcttatgtgattatttaagtgaattagcacaactgcactacggcgataaaactgcacctgatttgagaagtcagatggtgcaagcatttgatttaattagcatacatgaagaagaacttagcgatcgcctcttaagctacctcaacagcaagccgaatgtgcgagtaattggtcaatccaaggctgaccgaaaattgcgtgtaccgactatatcttttgtagttgatggaatgaatagctcaaccattcccgcaaaaattgaccaacattacattgggattcgctacggagacttttatgctaaacggcttattgaatatctgggattagccttgcaaggtggaatagtccgggtgagtatggtacattacaacacccttgaggaagttaacagcttgattgaagcttttgagcagttattttaa

SEQ ID NO: 31989 - protein, 410 aa, Nostoc punctiforme PCC 73102
MLLNLDKVRQYFPALASEWTFFDNAGGSQTLKKVVDRISEFLLSSDVQLGASYAVSQLAGERLALATRGMAILINANSFKEVVMGPSTTMMLKVLSICLGQTFTSGDEIIVTNCDHEANIGAWVALEKQGIKVKVWQIRPDTLELHLADLEALMSPRTKLVTLTHASNVLGTINPIKEIATFVHDRNAMICVDGVAYAPHRLVDVQDLDVDFYALSFYKVYGPHHALLYGKEEHLLRLPGLNHYFIQQTDIPYKFQLGNVNFELSYGMLGLCDYLSELAQLHYGDKTAPDLRSQMVQAFDLISIHEEELSDRLLSYLNSKPNVRVIGQSKADRKLRVPTISFVVDGMNSSTIPAKIDQHYIGIRYGDFYAKRLIEYLGLALQGGIVRVSMVHYNTLEEVNSLIEAFEQLF

SEQ ID NO: 31990 - DNA, 1227 bp, Roseovarius nubinhibens ISM
  CDS (1)..(1227): transl_table=11
atggcaatgttggatattgaatatgtgcgaggtcagttcccggcctttgacgagccgagcctcaaggggcaggcgtttttcgagaatgccggtgggtcctatacctgtcgcccggtgatcgagcggctgacgcggttctatcacgcccgcaaggtgcagccctatgcgccctatgaggcgagccgtcttggcggggccgagatggacgaggcgcgcacccggctggccggattgctgggggtgggcgaggacgagctgagctttggcccgtcgaccaccgccaatacctatgtgctggcgcgggcctttgccgggttcatggaaaagggcgaggcgatcatcgtcaccaatcaggaccatgaagccaacagcggcccgtggcggcggctggccgaggaaggctttgagatccgcgaatggaagatgaacccggagaccgggcatcttgaccccgatgatctcgacgatctgctggatgaaaaggtgcggcttgtttgttttccccattgctcgaatgtggtgggcgaggaaaacccggtggtcgagatcacagcgcgcgcccatgcggcgggggcctttgtctgtgttgacggggtgagctatgcgccgcacgggttttgcaatgtcgggatgatggggccggatatttacctgttttcggcctataagacctatggcccgcatcaggggatcatggtgatgcgccgtgaattggcgcggcaattgcccaatcaggcgcattatttcaacgccgagagcctgaccaagaaattcaccccggcggggccggatcatgcgcagatcgcggcctgtgcgggaatggccgattatatcgacgcgctggcccagcatcacgggattgcgggcgatgcggcgagccgctgtgacggggtgcatcagctcatgcgggaccatgaggcggcgctgttgcagcctctgttgaacggggtgaaagggcgcaatgccgtgcgtcttctggggccggatcaggccgagcgccgcgcgccgaccgtggcgcttgcgctgagccacatgaaaggcgaggcggcggcagagcagctcgcggcgcggggcatcatggcggggggcggtgatttctacgcggtgcgcgcgctcgaggcgctgggcattgatccggggcatggcgtgctgcggctgagtttcgtgcattacacgcgccgcgatgagatcgatgcgctgctcaacgcgctggacgatattctttga

SEQ ID NO: 31991 - protein, 408 aa, Roseovarius nubinhibens ISM
MAMLDIEYVRGQFPAFDEPSLKGQAFFENAGGSYTCRPVIERLTRFYHARKVQPYAPYEASRLGGAEMDEARTRLAGLLGVGEDELSFGPSTTANTYVLARAFAGFMEKGEAIIVTNQDHEANSGPWRRLAEEGFEIREWKMNPETGHLDPDDLDDLLDEKVRLVCFPHCSNVVGEENPVVEITARAHAAGAFVCVDGVSYAPHGFCNVGMMGPDIYLFSAYKTYGPHQGIMVMRRELARQLPNQAHYFNAESLTKKFTPAGPDHAQIAACAGMADYIDALAQHHGIAGDAASRCDGVHQLMRDHEAALLQPLLNGVKGRNAVRLLGPDQAERRAPTVALALSHMKGEAAAEQLAARGIMAGGGDFYAVRALEALGIDPGHGVLRLSFVHYTRRDEIDALLNALDDIL

SEQ ID NO: 31992 - DNA, 1656 bp, Oceanospirillum sp. MED92
  CDS (1)..(1656): transl_table=11
atggcaccgcaagataactttatagagggtattcggcgtgaattccctctgcttaaccaacttgtcgatgacaagccgttaatctacttcgataatgcagcaacgacgcaaaaacccaacacagtcattgcaacggttgaggattattaccgttctgcgaacgctaatgtccatagagccagccacgcactgagtgcaattgccacctctcgctttgaacaggctcggcagaccatagcggactaccttaatgccccgtcgcctaagcagatcatatggacccgcggtacgactgaagcaatcaacctggttgccaatagctttgggcagagcttccagcctggtgatcagatcattgtttcagaacaagagcaccacgctaatatcgttccatggcaattacttgctgaaagaagcggtgcggttatcaaggtgatccccgttcaggaaaacggtgagctcgatcaggctgtgtttaagcaactgttaaatgaacggactaaactggtcgcgatcacccatgtatccaacgcgcttggcaccattaatccagtcaaacaaatgataagccaggctcatgattttggcgcaaaggttcttattgatggcgcgcaggccttgccacactttcaggttgatgttcaggagctggatgcagatttttacgtattctccggccataagatttatgcccctacgggaataggcgttctttatggaaaggagtcacttcttgaatcgatgccaccctggcaagcaggtggcgagatgatcgaaaaagtgagcttctctggtacaacatttaaccgcttgccttttaaatttgaagccggtacgccgaatattgcaggggcactaggcttagctgaagcggttagatggctaataaaacagcctttcgacctgatcagccaacatgaaaaggcgcttttcgattcagccttagatgcctgttcttcattaaaagggttcagacgaatcggttgccctgagaaacatgtcagcttactgtcgttcactattgagcaattccatcaacaggatattggcttactgcttgataaacagggaatcgccatacgaacaggtcatcactgtgctatgcctctgatgcacgcattaggccttaatggaacatctcgcgcatcttttgctttttacaatacacttgatgaggtcggtcagtttgcgaccgctctggagcagttaatcagtcctatatctatcccagtgaaagcggccattcatcaggataaaactggcttagtgcaagagctgttgaagcagaaaggctggaatgcgcggtatcgacagataatgctctatggaaaagatcatagcggcctggatgattcagcaaagtcagaatccaatttggtgcctggttgcgaaagccagacctggttaactgcccagatcgataaggatgggaaatatcaattccaggctgattccgaggctcgtattatccgaggcctgattgcggttgtactgtctattttcaataataagaattcggccgagattaaccgtgtcgatattgatatgatcttcaaccagttagaacttcaacagcacttgagcccatctcgaggaaatggcttacgtgctgttatagaaagaatttatcagatagcaaatcagtctgaaggctga

SEQ ID NO: 31993 - protein, 551 aa, Oceanospirillum sp. MED92
MAPQDNFIEGIRREFPLLNQLVDDKPLIYFDNAATTQKPNTVIATVEDYYRSANANVHRASHALSAIATSRFEQARQTIADYLNAPSPKQIIWTRGTTEAINLVANSFGQSFQPGDQIIVSEQEHHANIVPWQLLAERSGAVIKVIPVQENGELDQAVFKQLLNERTKLVAITHVSNALGTINPVKQMISQAHDFGAKVLIDGAQALPHFQVDVQELDADFYVFSGHKIYAPTGIGVLYGKESLLESMPPWQAGGEMIEKVSFSGTTFNRLPFKFEAGTPNIAGALGLAEAVRWLIKQPFDLISQHEKALFDSALDACSSLKGFRRIGCPEKHVSLLSFTIEQFHQQDIGLLLDKQGIAIRTGHHCAMPLMHALGLNGTSRASFAFYNTLDEVGQFATALEQLISPISIPVKAAIHQDKTGLVQELLKQKGWNARYRQIMLYGKDHSGLDDSAKSESNLVPGCESQTWLTAQIDKDGKYQFQADSEARIIRGLIAVVLSIFNNKNSAEINRVDIDMIFNQLELQQHLSPSRGNGLRAVIERIYQIANQSEG

SEQ ID NO: 31994 - DNA, 1236 bp, Alteromonadales bacterium TW-7
  CDS (1)..(1236): transl_table=11
atgaatatagcgcaattacgtgagcagtttccggcattaatgcaaagcgttgatggtaaatcgccgatatttttagacggccctggtggctctcaagtgccgcagtcagtgcttaatgcaatgtcggcttatttaggacactacaattcaaacctaggtggcgcgtttttttcaagcgataaaactgttgagctaatggcaaatacacgccaagctgcagcagatttacttaatgcgccaagtgctcaaaatattgtgtttggccctaacatgacaagccttacctttagttttagccgagctatttcgcgcgactggcaagccggtgatgagatcattgttactaacgccgatcacttttcaaacgtgtcatcatggcagcaagccgcagaagataaaggcgttaaggttaatactgccttgattaatgaagccgattgcagcctagatatgacgcagtttgaaagcttattaaacagcaagactaagttggtggctgtgacctatgcttcaaataccacaggctcaattaacgacattaaacgtattatagagctagctcatgctgtaggttctcttgtgtacgttgatgcggtacattttgcgccgcacgagcttattgatgtacaagcccttgattgcgactttttagcctgctcagcgtataagttttttggcccacacttagggatggtgtacggtaaaaaagagcatcttgaaggttttacgccttacaaagtagagcctgctaaagatgtagcgccgggacgttgggaaaccggtacccaaagctttgaagcaatggcaggctttattgccgctgttgattacattgctgcaattagcgagcttgatgatagccatacacgccgtgaaaagctaacagctgcgtttgctaaaactaaacagcacgagatggcgctcagtgaacactttttaacgcgtttggttaattaccctcgtataaagttatacggtattgatgactttgatcgattaaacgaacgtacccctacgtttgctttaacgtttgaaggtttagagccacgcgccgtttcagagtttttaggcaaacagcatatatgtgtgtgggatggacatttttacgcgcaaggtttgtgtaagcaattaaacgtgcttgatacaggcggtgtagtacgtattggttgtatgcattacaacacagtcgaagagcttgataagctgtttgatatgtttgacgagctacttggttaa

SEQ ID NO: 31995 - protein, 411 aa, Alteromonadales bacterium TW-7
MNIAQLREQFPALMQSVDGKSPIFLDGPGGSQVPQSVLNAMSAYLGHYNSNLGGAFFSSDKTVELMANTRQAAADLLNAPSAQNIVFGPNMTSLTFSFSRAISRDWQAGDEIIVTNADHFSNVSSWQQAAEDKGVKVNTALINEADCSLDMTQFESLLNSKTKLVAVTYASNTTGSINDIKRIIELAHAVGSLVYVDAVHFAPHELIDVQALDCDFLACSAYKFFGPHLGMVYGKKEHLEGFTPYKVEPAKDVAPGRWETGTQSFEAMAGFIAAVDYIAAISELDDSHTRREKLTAAFAKTKQHEMALSEHFLTRLVNYPRIKLYGIDDFDRLNERTPTFALTFEGLEPRAVSEFLGKQHICVWDGHFYAQGLCKQLNVLDTGGVVRIGCMHYNTVEELDKLFDMFDELLG

SEQ ID NO: 31996 - DNA, 1206 bp, Pseudomonas putida GB-1
  CDS (1)..(1206): transl_table=11
atgttccagccctccccctggcgtgccgactttcccgccatcgccgccctgcaacggcagcaccagacctacctggacagcgccgccaccagccagaagccgcaagccctgctcgatgccctgagccattactacggccatggcgcagccaacgtgcaccgtgcccagcacttgcccggtgcgctggcgacccaggccttcgaaaccagccgcgacaaggtcgccgcctggctcaatgccgcagactcacggcaagtggtgttcacccacggcgccacctcggcactgaacctgctggcatacggcctggaacaccgcctcgaagccggggacgaaattgccgtcagtgccctggagcaccatgccaacctgctgccctggcaacagctggcgcaccggcgcaacctgcgcctggtggtactgccgctggacgctcatggttgcatcgacctgaaccaggcactgcaactgatcggcccgcgcacccgcgtgctggcagtcagccagctgtccaacgtactgggtacctggcaaccgctaccggcgctgttggcccatgcccgcgcccaaggcgcgctgaccgtggtcgatggtgcccagggcgtggtgcacggccgccatgacgtgcagcaactggggtgcgacttctatgtgttttccagccacaagctgtacggcccggacggcgtcggcgtgctttatggccacagccaagcgctggggctgctgcgccactggcagttcggtggcgagatggtgcaacttgccgagtaccacagcgccagcttccgcccggcaccgctggggttcgaggcaggtacgccgcccatagccggggtgatcggccttggcgcaaccctgggctacctggccagcctcgatgcccaagcggtcgcggcccacgaaaccagcctgcaccagcacctgctgcgcggcctggctgaccgcgaaggcgtgcgcatactcggtacgccacaggcggccctggccagcttcgtcatcgagggcgtgcacaatgccgatattgcccacttgctcaccgagcaaggcattgccgtgcgcgccggtcaccactgtgccatgccgctgctgaaaggcttgggcctggaaggcgcaattcgggtgtcgctgggcttgtacaacgacagcgatgacttgcagcgctttttcacggcgctggatcagggcctggagctgctgcgatga

SEQ ID NO: 31997 - protein, 401 aa, Pseudomonas putida GB-1
MFQPSPWRADFPAIAALQRQHQTYLDSAATSQKPQALLDALSHYYGHGAANVHRAQHLPGALATQAFETSRDKVAAWLNAADSRQVVFTHGATSALNLLAYGLEHRLEAGDEIAVSALEHHANLLPWQQLAHRRNLRLVVLPLDAHGCIDLNQALQLIGPRTRVLAVSQLSNVLGTWQPLPALLAHARAQGALTVVDGAQGVVHGRHDVQQLGCDFYVFSSHKLYGPDGVGVLYGHSQALGLLRHWQFGGEMVQLAEYHSASFRPAPLGFEAGTPPIAGVIGLGATLGYLASLDAQAVAAHETSLHQHLLRGLADREGVRILGTPQAALASFVIEGVHNADIAHLLTEQGIAVRAGHHCAMPLLKGLGLEGAIRVSLGLYNDSDDLQRFFTALDQGLELLR

SEQ ID NO: 31998 - DNA, 1218 bp, unidentified eubacterium SCB49
  CDS (1)..(1218): transl_table=11
atgagctttgatataaaaaagatacgagaagattttcctatccttaaaagaaaggtgaatggggctccattagtctatttagacaatgctgctacttctcaaaaaccacaacaagttatagattgcattgtagactattatagcaactacaatgcaaacatacatcgtggtgtgcacaccctttctcaagaggcgacagatgcttatgagaaagcaaggaaaacactacaacaacattttaatgctgcacaagtacacgaggtcttattcacttctggaactacagaagggattaacttagtagcttcaggtttttctgaaattttaaaaccagaagatgaaattatagtttctgcacttgagcaccactcaaacatagtaccttggcaaatgctttgtgaaaaaacaggcgctaaattaaaggttatacctatgtgcgaagacggttctttgcaaatggatgtgtatgataccttactaaatgacaaaactaaacttgtctttgtaaatcacatttcaaacgcattaggaattataaatcctattgaaactattattgaaaaagcacaccaagtaggggctgctgttttaatagatggagctcaagcttgttcgcatataaaagcagatgttcaagcgctagatgtagacttttatgttacctctgcacataaaatgtgtggaccaactggagtaggaatgttatatatgaaagaagattggggcaaaaaactaccaccatatcaaggaggtggtgaaatgattgctacagtaactttcgaaaaaacgacctatgcagaaatgccacataaatttgaagcaggaacacctaatatctgtggcggtatcgcttttggcgctgccgtagactacttaaatgagattgggtttgatgctattaaaaagcaagaagcagccttattagactatgcaactgcacaattattgcagatagaaggattaaaaatttacggtacagcttcagaaaaaacaagtgtgatatcatttaatgtaggtgaaatacacccctatgatattggtacaattttagataaattaggaattgcagtacgcacaggacaccattgtgcacaacctattatggatttctactgtattcccggaactgttagagcgtcgtttgctttctacaatagcattgaagaagtagacgcactagtacatgctgttaaaaaggcaacaatgatgttatcttaa

SEQ ID NO: 31999 - protein, 405 aa, unidentified eubacterium SCB49
MSFDIKKIREDFPILKRKVNGAPLVYLDNAATSQKPQQVIDCIVDYYSNYNANIHRGVHTLSQEATDAYEKARKTLQQHFNAAQVHEVLFTSGTTEGINLVASGFSEILKPEDEIIVSALEHHSNIVPWQMLCEKTGAKLKVIPMCEDGSLQMDVYDTLLNDKTKLVFVNHISNALGIINPIETIIEKAHQVGAAVLIDGAQACSHIKADVQALDVDFYVTSAHKMCGPTGVGMLYMKEDWGKKLPPYQGGGEMIATVTFEKTTYAEMPHKFEAGTPNICGGIAFGAAVDYLNEIGFDAIKKQEAALLDYATAQLLQIEGLKIYGTASEKTSVISFNVGEIHPYDIGTILDKLGIAVRTGHHCAQPIMDFYCIPGTVRASFAFYNSIEEVDALVHAVKKATMMLS

SEQ ID NO: 32000 - DNA, 1239 bp, Moritella sp. PE36
  CDS (1)..(1239): transl_table=11
atgaacttatgtattgagtcaatccgccaagctttcccagcattacaacagcaagtaaatggcgagccagtgtatttttttgacggtcctggtggctcacaagttccacagtctgtgcttgatgcaatgacagcttatttaagtaaatataactcgaatcttggcggccgttttttctcaagtgaaaagaccgttgatgtgatgcgtaatgcacgcctgagcggtcaagcattactgaataccgaatcaccagataatatcgtatttggtgctaacatgacgtcactgacgttccaattaagccgtgcgatcagtcgtgattggcaagcgggtgacgaagtcattgtgacctcactcgatcattactctaacgtatcaacgtggcaacaagctgcggatgataaaggcgctgtagtacatcaagcccgtgttaatgaagttgattgcacgttagatagcgagcatttaatttcgttaatttccaataaaactaaattagtggctttaacgtttgcatcgaacaccacaggttcattggtagacgtaaaaccgatcattgaagcagcacatgccgtcggtgctaaagtctatatcgatgcggtacattacgcgccacataagcttgttgatgtgcaagcattgggttgtgacttcttagcttgttcagcttataagttctttggtcctcacgtaggtatcgcttatgtagcgccaaaatggttacatactctatcaccttacaaagtcgagccagcaacaaatcaagggccaggtcgctttgaaacgggtacccaaagttttgaagccttagctggatttagcgctgcggttgaataccttgcccatgctggtgatcaagtactgccgctacgtgaaagactggtgcaaagcttcgagctataccaaacccatgaacaaaaactaagccaacacttccttgccaagttagcgcaatacagcaacgtgacgttatacggcatcgatgatatggaccgattagcagagcgtacaccgaccttctctatccgcatcgaccatgcctcaccagaagatgtatcaggattacttggtcaacataatatgtgtgtatggaacggtcatttttatgcaattggcttatgcaaacaattaggtatcttagacaaaggtggcgtgatccgtattggtttcatgcactacaataccaccagcgaaattgatgcattatttgatgtgttatcagcggtgctagttaaataa

SEQ ID NO: 32001 - protein, 412 aa, Moritella sp. PE36
MNLCIESIRQAFPALQQQVNGEPVYFFDGPGGSQVPQSVLDAMTAYLSKYNSNLGGRFFSSEKTVDVMRNARLSGQALLNTESPDNIVFGANMTSLTFQLSRAISRDWQAGDEVIVTSLDHYSNVSTWQQAADDKGAVVHQARVNEVDCTLDSEHLISLISNKTKLVALTFASNTTGSLVDVKPIIEAAHAVGAKVYIDAVHYAPHKLVDVQALGCDFLACSAYKFFGPHVGIAYVAPKWLHTLSPYKVEPATNQGPGRFETGTQSFEALAGFSAAVEYLAHAGDQVLPLRERLVQSFELYQTHEQKLSQHFLAKLAQYSNVTLYGIDDMDRLAERTPTFSIRIDHASPEDVSGLLGQHNMCVWNGHFYAIGLCKQLGILDKGGVIRIGFMHYNTTSEIDALFDVLSAVLVK

SEQ ID NO: 32002 - DNA, 1371 bp, Ostreococcus tauri
  CDS (1)..(1371)
atgccggcggggacgtcctcgctctcggcgctcgcgtcacacgctcgggggcatcaccgccgagggcgatgcaacaattggagaggtcgaagcgcacgcgtggaggcgagcgcgtcgacggagcggaggccgacgacgttaggggaggagacgaggaaggatttcccgattctggaccagaaaaccgagagcggggcgcagttggtgtacctggataatgccgcgacgtcgcagaagccgaacgaggtggtggacgcgcacatgttttattataaggactacaattcgaatgtgcaccgaggggtgcactacctgagcagcaaggcgacggacgcgtatgagctgtcgaggcggaaaattgcgaggttcgtaaacgcaaagacggatagggagattgtcttcacaagaaacgcgagcgaagcgatcaacctagtggcgaacacgtggggaacgaaatacttggaggccggggatgagataattctaagcgtgctggagcatcactcgaacattgtgccctggcagcttctcgcggagcgcactgggtgcgttttgaagtttgttaaactcacgaaggatacgcaggagctggatattgctgagcttcgttcactcgtgaacgagaagacaaaactcatcacgacggcgcatgttagcaacgtcactggcggtgaggcaccagtggctgagattgtagagctcgctcgtggcgtcggcgccaaggtgcttctcgatgcgtgccagagcttgccccacatgcccgtcgacgtgcaatcgctcggagcagactggatcgtcggtagcggtcacaaaatgtgtggaccgacgggtataggttttttgtggggtcgtctcgacgtacttgagacgatgcctccctggatgggcggcggcgagatgattcaggacgtcttcctggagaggagcacgtacgctgagccgccgggaagattcgaggccggcacgccggcgatcgcggaggcgatcgcgctcggagcggcgtgcgattacctgtcgagaatcggtatggaccgcatccacgagtacgaggttgaaatcggtcgttacctgtatgagaagctctcccaggtgccaaaggtgaccatttacggcccgccgccgtcacgaggccgtgcctcgctctgtgccttcaacgtcgagggcatccacgctaatgatctgtgcacgctgttggaccaagccgggatcgcctgccgcagcggccatcactgcacgcagcccctgcaccgctacctcgacgttcccgggagcgcgcgcgccagtctctacttttacaacgttcgcgaagacgtcgacgccttcatcgatgccctccgatccaccatagaattcttttctgagtttgaatga

SEQ ID NO: 32003 - protein, 456 aa, Ostreococcus tauri
MPAGTSSLSALASHARGHHRRGRCNNWRGRSARVEASASTERRPTTLGEETRKDFPILDQKTESGAQLVYLDNAATSQKPNEVVDAHMFYYKDYNSNVHRGVHYLSSKATDAYELSRRKIARFVNAKTDREIVFTRNASEAINLVANTWGTKYLEAGDEIILSVLEHHSNIVPWQLLAERTGCVLKFVKLTKDTQELDIAELRSLVNEKTKLITTAHVSNVTGGEAPVAEIVELARGVGAKVLLDACQSLPHMPVDVQSLGADWIVGSGHKMCGPTGIGFLWGRLDVLETMPPWMGGGEMIQDVFLERSTYAEPPGRFEAGTPAIAEAIALGAACDYLSRIGMDRIHEYEVEIGRYLYEKLSQVPKVTIYGPPPSRGRASLCAFNVEGIHANDLCTLLDQAGIACRSGHHCTQPLHRYLDVPGSARASLYFYNVREDVDAFIDALRSTIEFFSEFE

SEQ ID NO: 32004 - DNA, 1401 bp, Medicago truncatula
  CDS (1)..(1401)
atggaagttttgctgccaaaacttccaagccccagttattgccgttcaatcactaccagaaccacatcacgtgtcagagctggcttccgccgtttatcttatctccatgttcgtgcatcaactgtcaatcaagaagtagctgaaccaactcttagctctccctctttgggtcacactaccagaccccatttccctatccttcaccaggaagtaaatggctcaaaacttgtttacatagacaatgcagcaacatctcagaagcctgcagctgttgtgaaggcgttgcaagactattatgaaggttacaattcaaacgtgcatcggggcatacattacctgagtgcaaaggccacagacgagtacgaatcagctagacggaaggttgcagcttttataaatgcttctgattcacgagaaattgttttcacaagaaatgctactgaagctatcaatctagtagcttattcttggggcttgtcaaatttaaaacaaggagatgagatcgtacttacagttgctgaacatcacagtgcaattgttccatggcaattagtagctcaaaaagttggagctgttttgaaatttgtgaatttaaaccaagatgaaattccagatatagacaaattgaaggaagtgctttcaaagaaaacaaaaatagtcgctgttcatcatgtttcaaacgtgcttgcttctgttcttcctattagagatattgcacactgggcacatggggttggagcaaaagttcttgtagatgcctgccagagtgttccacacatggtggttgatgttcaaaaccttgatgctgattttcttgttgcttcttctcacaagatgtgtgggcctacaggcatcggattcttatatggtaaaatggacctcttgtcttccatgcctccatttttaggcggtggtgaaatgatttcagatgtatatttggatcattcaacttatgccgaacctccatccagatttgaggctggaacaccagctattggtgaagcaattggattaggagcagcaattgattacttgtctgggattgggatgcaagccatacatgagtatgaggtcgagctgggtacatacctgtatgaaaggcttctgtcagtcccaaatattcgtatctatgggccagccccttcgaaagaagtcaaacgagcttctctttgttctttcaatgttgacaatttgcaccctactgatcttgcaacatttctggaccaacagcatggagtggcaatcagatcaggtcaccattgtgcccaacccctccatcggtatttaggggtcaatgcaagcgcacgtgctagcctctatttctacaacactaaggaggatgtcgacaactttatccatgcccttcatgacacagtcagcttcttcaattcattcaagtag

SEQ ID NO: 32005 - protein, 466 aa, Medicago truncatula
MEVLLPKLPSPSYCRSITTRTTSRVRAGFRRLSYLHVRASTVNQEVAEPTLSSPSLGHTTRPHFPILHQEVNGSKLVYIDNAATSQKPAAVVKALQDYYEGYNSNVHRGIHYLSAKATDEYESARRKVAAFINASDSREIVFTRNATEAINLVAYSWGLSNLKQGDEIVLTVAEHHSAIVPWQLVAQKVGAVLKFVNLNQDEIPDIDKLKEVLSKKTKIVAVHHVSNVLASVLPIRDIAHWAHGVGAKVLVDACQSVPHMVVDVQNLDADFLVASSHKMCGPTGIGFLYGKMDLLSSMPPFLGGGEMISDVYLDHSTYAEPPSRFEAGTPAIGEAIGLGAAIDYLSGIGMQAIHEYEVELGTYLYERLLSVPNIRIYGPAPSKEVKRASLCSFNVDNLHPTDLATFLDQQHGVAIRSGHHCAQPLHRYLGVNASARASLYFYNTKEDVDNFIHALHDTVSFFNSFK

SEQ ID NO: 32006 - DNA, 1317 bp, Aspergillus oryzae
  CDS (1)..(1317)
atgaaatcggtagcaacctcatcacttgatgtcgacaaagattcggtcccactgggctctagcataaatggcactgcacaggcagaaacacctcttgaaaatgtcatagatgtcgaaagtgtccgatcccactttccagttctaggaggagagacagctgctttcaacaatgcgtctgggacggttgttctgaaggaagcgattgaaagtacaagcaacttcatgtactccttccctttccccccgggcgtcgatgcgaagagcatggaggcaatcacagcctatacggggaacaaggggaaggtggccgcgtttatcaatgcgttgccagacgaaataaccttcggccaatcaaccacatgtctatttcgcctgctaggattatctctcaaacccatgctaaacaacgattgtgaaatcgtctgctcaaccctctgccacgaggcagcagccagtgcctggatccatctttccagagaactaggaatcaccattaaatggtggtccccaaccaccaccccgaacagccccgacgacccggtcctcaccacagacagcctcaaaccactcctctctcccaaaacccgactcgtcacctgcaaccacgtctccaacgtcgtcggaaccatccatcccatccgcgagatcgcagacgtagtgcacactatcccaggctgcacgctcatcgtcgacggcgtagcctgcgtgccccatcgtcccgtggacgtgaaggagctcgacgtcgacttctactgtttcagctggtacaagctgttcggcccccatatgggcacgctctatgcgagtcgcaaagcacaggaccgatacatgactagcatcaatcactatttcgtttcctcgtcgtctctcgatgggaaattggctctggggatgcccagcttcgagctccagctcatgtgttcgccgatcgtttcctatctccaagatacagttggttgggaccggattgtccgtcaggagactgtcctggttactatcttgcttgagtatctcctgagcaaaccgagtgtttaccgggtctttgggcgccggaatagtgacccgagtcaaagggttgcgattgtgacgtttgaggtcgtgggccgatcatctggggatgtggctatgcgggtgaatacgaggaatcggtttagaattacctcgggtatatgtttggcgccgcgcccgacgtgggatgttttgaagccgaagagtagcgatggtttggttagggttagttttgtccattacaatactgtcgaggaagttagggcgttttgcagtgagttggatgagattgtcacgcgggatacctag

SEQ ID NO: 32007 - protein, 438 aa, Aspergillus oryzae
MKSVATSSLDVDKDSVPLGSSINGTAQAETPLENVIDVESVRSHFPVLGGETAAFNNASGTVVLKEAIESTSNFMYSFPFPPGVDAKSMEAITAYTGNKGKVAAFINALPDEITFGQSTTCLFRLLGLSLKPMLNNDCEIVCSTLCHEAAASAWIHLSRELGITIKWWSPTTTPNSPDDPVLTTDSLKPLLSPKTRLVTCNHVSNVVGTIHPIREIADVVHTIPGCTLIVDGVACVPHRPVDVKELDVDFYCFSWYKLFGPHMGTLYASRKAQDRYMTSINHYFVSSSSLDGKLALGMPSFELQLMCSPIVSYLQDTVGWDRIVRQETVLVTILLEYLLSKPSVYRVFGRRNSDPSQRVAIVTFEVVGRSSGDVAMRVNTRNRFRITSGICLAPRPTWDVLKPKSSDGLVRVSFVHYNTVEEVRAFCSELDEIVTRDT

SEQ ID NO: 32008 - DNA, 1203 bp, Aspergillus oryzae
  CDS (1)..(1203)
atgactctcgatatcgcacaggtccggtctcgctttcctgcactgaagcaggagcaggtcttcctggataatgcagggggtagtcaagtactggacaccgtgattgagtccattgcatcttacctcacaaacaccaatgtccaattgggggcaacatacaagacctccaagctgtccactgctggatttgcgaatggctacgaagcagcggcgaagttcatcaatgcaaagcccgaggagacctgtcttggtgtatcaactacacaactactgcacaatctctccacggcattgaagttccagccaggggatgagctcattctttcgaaattgaaccacgaggccaattccgccgcctgggtcagaatcgcagaacgactaggtttagaggtgaaatggtggtccgcttccaaccctcagaatcctgtctgcgatccgaatgacttgaagcagttaatctcggagaagacgagactagtagcttgcccgcatgcatcgaatatacttggatctatcgtggatgttaaggagattgcgaagatcgtgcatcaataccctcgggcccttctctgcgtggacggcgttgcacttgcgccccatcgacaagtcgatgtcaaggatcttgatgtcgacttttacgccttctcatggtacaaggtctatggacctcacatcgcgcagctgtatgcctcatcacgcattcatgatcagatcgacaccctaggacatttcttcaagggcacggacaccctcgacttgaagctcaacttggcatccgccaattatgagcatgttcagagcattccacgagtagtcgaatacttcgagcctgatgtatctgcatcatgggaaaagattgccgtccaagaggaaagactgcagcagatcatcttggatttcctcaatggtaatgatcgggtcactgtctacggagagcgctctgcggataagaacctccgtgtccctgtgattagtttcacggtgcggggtacgaaaagccagaagttggtagaagaggttgaaaagcgatctgcgtatgggttccgaagtggccatatgtacagtcatagattgatcaaggatatcattggcttggaggacgttgaggatggagttgtgcggatcagtatgttgcattataatacagaggaagagatgaccggtttggtcaaggttttggaggaggttattgcgacattgtag

SEQ ID NO: 32009 - protein, 400 aa, Aspergillus oryzae
MTLDIAQVRSRFPALKQEQVFLDNAGGSQVLDTVIESIASYLTNTNVQLGATYKTSKLSTAGFANGYEAAAKFINAKPEETCLGVSTTQLLHNLSTALKFQPGDELILSKLNHEANSAAWVRIAERLGLEVKWWSASNPQNPVCDPNDLKQLISEKTRLVACPHASNILGSIVDVKEIAKIVHQYPRALLCVDGVALAPHRQVDVKDLDVDFYAFSWYKVYGPHIAQLYASSRIHDQIDTLGHFFKGTDTLDLKLNLASANYEHVQSIPRVVEYFEPDVSASWEKIAVQEERLQQIILDFLNGNDRVTVYGERSADKNLRVPVISFTVRGTKSQKLVEEVEKRSAYGFRSGHMYSHRLIKDIIGLEDVEDGVVRISMLHYNTEEEMTGLVKVLEEVIATL

SEQ ID NO: 32010 - DNA, 1233 bp, Serratia liquefaciens
  CDS (1)..(1233): transl_table=11
atgacctttacgcccgagctcgcccgacgccagttcagcgccctgtcccagcacatcgacggcaaaccggcgatctttttcgacggccccggcggtgcacaggtttcacggggcgtgctggaaaaaatgaccgactatctggggaaatacaatgccaacctgggcggccactacttctccagccgggtcaccggcgaggtgatgggccaggcgcgagaatcggtgcgcgccttgttaaatgcgccttcgcccgacaacatcgtcttcggcatgaatatgaccacgctgacctttcatctcagccgcatcatcagccgcgactggcgggccggcgatgaggtcatcgtcaccgcgctcgatcactacgccaacgtctccagctggcagcaggccgccgccgacaaaggggccgtggtgcatcagataccgctggagagcgccgactgcgcattggacgccgcgaaagtgtgtgagcgcatcaacgccaacacccgcctggtggcggtcagctacgcctccaacgtcaccggcagcatcgtcgatatcaaaaccatcgtcgaagccgcgcatcgggtcggcgcgcaggtgtatgtcgacgccgtgcactatgcgccgcacaatctgatcgacgtacaggcgttaggatgtgacttcctggtgtgctccgcctacaagttctttggcccgcacgtcggcatggcctacctcgcaccgcagtggctgcagcgcctgcggccttacaaggtcgagccggccaccgatgtcggccccggccgtttcgagaccggcacgcagagcttcgaagcgctggccggcgtcgcggccgcgatcgactatctggcgcagtgggggacgcccgacgcgccgttaaggcagcgtttgcaggagagcttcgccgcctaccatcggcatgaagaggcgctgtgccgccactttttgcaacggctgcagcacctcgacggcgtgcgactctacggccattcacaggcagacagcgcgcgccgcacgccaaccttcgccctgaccttcagcggccagacgcctgacgcgatcgcccgccgcctggggcagcacaacatctgcgccggcagcgggcatttctatgcgctgggtctgattcagcagttggggttacaggacggcggcgtgctgcgcatcggcatgatgcactacaacacccagggcgaaatagacgcgctgtttaaggtgatcgccgaagatatactcagttaa

SEQ ID NO: 32011 - protein, 410 aa, Serratia liquefaciens
MTFTPELARRQFSALSQHIDGKPAIFFDGPGGAQVSRGVLEKMTDYLGKYNANLGGHYFSSRVTGEVMGQARESVRALLNAPSPDNIVFGMNMTTLTFHLSRIISRDWRAGDEVIVTALDHYANVSSWQQAAADKGAVVHQIPLESADCALDAAKVCERINANTRLVAVSYASNVTGSIVDIKTIVEAAHRVGAQVYVDAVHYAPHNLIDVQALGCDFLVCSAYKFFGPHVGMAYLAPQWLQRLRPYKVEPATDVGPGRFETGTQSFEALAGVAAAIDYLAQWGTPDAPLRQRLQESFAAYHRHEEALCRHFLQRLQHLDGVRLYGHSQADSARRTPTFALTFSGQTPDAIARRLGQHNICAGSGHFYALGLIQQLGLQDGGVLRIGMMHYNTQGEIDALFKVIAEDILS

SEQ ID NO: 32012 - DNA, 1836 bp, Mycobacterium leprae
  CDS (1)..(1836): transl_table=11
gtgcgggccacgcagctgtatgcggccagctttcggcccgggtttgacagcccgccgcagctggtgcctgttgccctgcgcggcagcgcgccagacacgacgactgtggcgtcggctggcgagttagccgtgggcaccactgatccgtgcccggcaccagttgcgcagatcggtgtcgctgacgtctatgtcccagcgccgacgtcacccgagcccgaaggattaccacaggtggcaccagtcttctcacgcggcaatgtccccgacaccacggcggtgccggcggcggccgggacaaccgtgggtgtggccgatccctatctgccgcccggggtaggtcacctgagtgggttcgcagtgcccagccacggtatcgtgcccaccgttcctggcgtgttggccggcgggccgccgactgctccggtggccccgcgcaattcggcgcctgttttgcggcccgagtggccgtaccatgtgccgtcggtgagtgatttggactggtttgatgcggtgccagcgggtgtgcctggaggcgacgaacacaattacaattttctgatcgcagccccccaagtgcctcggttggccgatgaacacgagatggtcgacgtcttcgatattcaggccgtgcgggcggactttccgattctgcaggagaccgtcaacggcaagccgttgatctggttcgacaatgccgcgaccacccagaagccgcaggtagtcatcgaccgactgtcttacttctatgcccacgaaaactccaacattcaccgcgcggcgcatgaactggcggctcgggccaccgatgcttacgaggaagcccgggaaacagcacggcgttttatcggtgcagccaaggcccaagagatcatcttcgtgcgcggtactactgaagcgattaacctggttgcctatgcgtgggggggtaagcatttgcaacctggtgacgaggtagtcatcactcatctcgaacatcacgctaatatcgttccttggcaattgctttcgtcacaaactggggcaatcctgaaagtcgcaccggttgacgatgcgggcaacttgttaatgtcggaattcgaggatctgctgggtcccagaacgaagttggtggctgcgactcaggtgtcgaacgcattaggcacggttacacaaggtgagaagatcgttgagttgggtcatcgctacggtgctcgggtgctgatcgacggcgcacagtcgattccgcatctgccgatcaatgtctccgagctcggcgccgatttcttcgtgttttccggacataagatttacggccccaccgggatcggtgtgctttacgggtgcgaggatgtgctgacggagatgccaccgtggcagggcggtggcaacatgatcgtcgatgtgacgctggaacggtcgctatatcaggggccgcccaacaagtttgaggccggcaccgggaatatcgctgacgccgtcggactgggggaggcgctgcgttacgtcgagcgggtgggcgtccagcgtattgcgtcccatgagcaagcactgctcgactatgcgacacctcggctggccgacatacccggtgttcgcctggtgggcaccgcaacggagaaagccagcgtgctgtcgttcgtgctggctggacacgagccgctagaggtgggcaaggcactcaatgccgaagggattgcggtgcgtgctggtcatcattgcgcacagccagttctgcggcgccttgggttggaggccacggttcgcccatcgttcgccttttacaacacatacgaagagatcgacgtcttcatcaatgtggtgcgtcggatcgcagagggcggtaccaatatcggctga

SEQ ID NO: 32013 - protein, 611 aa, Mycobacterium leprae
MRATQLYAASFRPGFDSPPQLVPVALRGSAPDTTTVASAGELAVGTTDPCPAPVAQIGVADVYVPAPTSPEPEGLPQVAPVFSRGNVPDTTAVPAAAGTTVGVADPYLPPGVGHLSGFAVPSHGIVPTVPGVLAGGPPTAPVAPRNSAPVLRPEWPYHVPSVSDLDWFDAVPAGVPGGDEHNYNFLIAAPQVPRLADEHEMVDVFDIQAVRADFPILQETVNGKPLIWFDNAATTQKPQVVIDRLSYFYAHENSNIHRAAHELAARATDAYEEARETARRFIGAAKAQEIIFVRGTTEAINLVAYAWGGKHLQPGDEVVITHLEHHANIVPWQLLSSQTGAILKVAPVDDAGNLLMSEFEDLLGPRTKLVAATQVSNALGTVTQGEKIVELGHRYGARVLIDGAQSIPHLPINVSELGADFFVFSGHKIYGPTGIGVLYGCEDVLTEMPPWQGGGNMIVDVTLERSLYQGPPNKFEAGTGNIADAVGLGEALRYVERVGVQRIASHEQALLDYATPRLADIPGVRLVGTATEKASVLSFVLAGHEPLEVGKALNAEGIAVRAGHHCAQPVLRRLGLEATVRPSFAFYNTYEEIDVFINVVRRIAEGGTNIG

SEQ ID NO: 32014 - DNA, 1221 bp, Bacillus subtilis
  CDS (1)..(1221): transl_table=11
atgaatatcacagatattcgtgaacagttcccgatccttcatcagcaagtgaacggacatgatctcgtttatctcgacagcgcggcgacttcccagaagccgcgtgctgtcattgaaacactggataagtattataaccaatacaattccaatgttcaccggggcgtccatacacttggaaccagagcgacagatggttatgaaggagcgcgtgaaaaagtccgcaagtttattaacgcgaagtcaatggctgagattattttcacaaaaggcacgaccacatcactgaatatggtggcgttaagctatgcgcgcgccaacctgaaacctggtgatgaagtggtcatcacctacatggagcatcatgcgaatatcattccgtggcagcaggctgtaaaagcaactggcgccacattaaaatatattccgttgcaggaagacggaacgatttctttagaagacgtcagagaaacggtcacaagcaacacaaaaattgttgcggtgtctcatgtatctaatgttctcggcacggtcaacccgattaaagaaatggcgaaaatcgctcatgacaatggggctgtcattgtggtggacggtgcacaaagcacgcctcacatgaaaattgacgtgcaggatctcgattgcgacttctttgcgctttcttcccataaaatgtgcggacctaccggtgttggtgtgctgtacggaaagaaagccctgctggaaaacatggagcctgccgaattcggcggtgaaatgatcgactttgtcgggctttatgaatcaacttggaaagagcttccgtggaaattcgaagcgggtacgccgattattgcaggagcaatcggcctcggtgccgccattgattttctcgaagaaatcggtcttgatgagatttcccgccatgagcacaagcttgcagcttatgcgcttgaacgcttccgccagcttgacggcgtaacggtttacgggccggaagagcgtgccgggcttgtcacatttaaccttgatgatgttcatccgcacgatgtggcgactgtgcttgatgcggagggaatcgcagtcagagccggccaccattgtgcgcagccgctgatgaaatggctggatgtaactgctactgcaagagcaagcttttatctgtataatacagaggaagagattgataagcttgtggaagctcttcaaaagacaaaggagtattttacaaatgtcttttaa

SEQ ID NO: 32015 - protein, 406 aa, Bacillus subtilis
MNITDIREQFPILHQQVNGHDLVYLDSAATSQKPRAVIETLDKYYNQYNSNVHRGVHTLGTRATDGYEGAREKVRKFINAKSMAEIIFTKGTTTSLNMVALSYARANLKPGDEVVITYMEHHANIIPWQQAVKATGATLKYIPLQEDGTISLEDVRETVTSNTKIVAVSHVSNVLGTVNPIKEMAKIAHDNGAVIVVDGAQSTPHMKIDVQDLDCDFFALSSHKMCGPTGVGVLYGKKALLENMEPAEFGGEMIDFVGLYESTWKELPWKFEAGTPIIAGAIGLGAAIDFLEEIGLDEISRHEHKLAAYALERFRQLDGVTVYGPEERAGLVTFNLDDVHPHDVATVLDAEGIAVRAGHHCAQPLMKWLDVTATARASFYLYNTEEEIDKLVEALQKTKEYFTNVF

SEQ ID NO: 32016 - DNA, 1206 bp, Pseudomonas putida
  CDS (1)..(1206): transl_table=11
atgttccagccctctccctggcgtgccgacttccccgccatcgccgccctgcaacggcagcaccagacctatctggacagcgccgccaccacccagaagccgcaagccttgctcgatgccctgagccattactacggccatggcgcggccaacgtgcaccgtgcccagcatttgcccggtgcgctggcgacccaggccttcgaaaccagccgcgacaaggtcgccgcctggctcaatgccgcagactcgcggcagatcgtgttcacccacggcgccacctcggcactgaacctgctggcctatggcctggagcaccgcctcgaagccggtgacgaaattgccatcagtgccctggagcaccatgccaacctgctgccctggcaacagctggcgcaccggcgcaacctgcacctggtggtgctgccactggacgcccatggtcgtatcgaccaggaccaggcactgcaactgatcggcccgcgcacccgagtgctcgccatcagccagctgtccaacgtgctgggtacctggcaaccgctgccagcgctgctggcccatgcccgcgcccagggcgcgctgacggtggtcgatggtgcccagggcgtggtgcatggtcgccaggacatgcagcaactgggctgcgacttctatgtgttttccagccacaagctgtacggtccggacggcgtcggcgtgctctatggccgcgcccaggccctggagctgttgcgccactggcagttcggtggcgagatggtgcagctggccgagtaccacagcgccagcttccgtcccgcgcccctgggcttcgaagcgggtacgccgccgattgccggggtgatcggtctgggcgcgacactggactatctggccagcctcgatgcccatgcggtcgcagcgcatgaagccagcctgcaccagcacctgctgcgtggcctgggcgaccgcgagggcgtgcgggtgttgggcgcaccgcagacggccctggccagtttcgtcatcgagggcgtgcacaacgccgatattgctcatttgctgactgaacagggcattgccgtgcgtgccggtcaccactgcgccatgccactgctgaaggggctggggctggagggcgcgatacgggtatcgctgggtttgtacaacgacagcgatgacgtgcagcgtttcttcgacgcgctggaccaaggcctggagctgttgcgatga

SEQ ID NO: 32017 - protein, 401 aa, Pseudomonas putida
MFQPSPWRADFPAIAALQRQHQTYLDSAATTQKPQALLDALSHYYGHGAANVHRAQHLPGALATQAFETSRDKVAAWLNAADSRQIVFTHGATSALNLLAYGLEHRLEAGDEIAISALEHHANLLPWQQLAHRRNLHLVVLPLDAHGRIDQDQALQLIGPRTRVLAISQLSNVLGTWQPLPALLAHARAQGALTVVDGAQGVVHGRQDMQQLGCDFYVFSSHKLYGPDGVGVLYGRAQALELLRHWQFGGEMVQLAEYHSASFRPAPLGFEAGTPPIAGVIGLGATLDYLASLDAHAVAAHEASLHQHLLRGLGDREGVRVLGAPQTALASFVIEGVHNADIAHLLTEQGIAVRAGHHCAMPLLKGLGLEGAIRVSLGLYNDSDDVQRFFDALDQGLELLR

SEQ ID NO: 32018 - DNA, 1257 bp, Streptomyces coelicolor
  CDS (1)..(1257): transl_table=11
gtgacacagctgccgggcctcctcgacacagaggcgatccgcaaggacttccccatcctggaccgccaggtccacgacgggcacaagctcgtgtacctggacaacgcggcgaccagccagaagccgcggcaggtgctggacgcgctcagcgagtactacgagcgctacaacgccaacgtccaccgcggcgtgcacgtcctcgccgaggaggccacggcgctgtacgagggcgcgcgtgacaaggtcgcggagttcatcaacgcgccctcgcgcgacgaggtgatcttcaccaagaacgcctcggagtccctcaacctggtcgcgaacatgctgggctgggccgacgacccctaccgcgtggaccacgagaccgagatcgtcatcacggagatggagcaccactccaacatcgtgccgtggcagctgctggcgcagcgcaccggtgcgaagctccgctggttcggcctcacggacgacggccgcctggacctgtccaacatcgacgaggtcatcaccgagaagacgaaggtcgtctccttcgtgctggtctccaacatcctgggcacccagaacccggtcgaggcgatcgtgcgccgcgcccaggaggtcggtgcgctggtctgcatcgacgcctcccaggccgcgccgcacatgccgctggacgtgcaggccctccaggccgacttcgtggccttcaccggccacaagatgtgcggcccgaccggcatcggcgtgctgtgggggcgccaggagctcctcgaggacctcccgccgttcctcggcggcggcgagatgatcgagaccgtctcgatgcactcctccacctacgccccggccccgcacaagttcgaggcgggcacgcccccggtcgcccaggcggtcggtctcggcgcggcgatcgactacctcaactcgatcggcatggacaagatcctcgcccacgagcacgcgctgaccgagtacgccgtcaagcgcctgctggaggtcccggacctgcgcatcatcggccccaccacggccgaggagcgcggcgcggcgatctccttcacgctgggggacatccacccgcacgacgtgggccaggtcctcgacgagcagggcatcgcggtccgggtcggccaccactgcgcccgccccgtctgcctgcgctacggaattcctgcgaccacgcgagcgtcgttctatctgtactccacgccggccgagatcgacgcactggtcgacggcctggagcacgtacggaacttcttcggctga

SEQ ID NO: 32019 - protein, 418 aa, Streptomyces coelicolor
MTQLPGLLDTEAIRKDFPILDRQVHDGHKLVYLDNAATSQKPRQVLDALSEYYERYNANVHRGVHVLAEEATALYEGARDKVAEFINAPSRDEVIFTKNASESLNLVANMLGWADDPYRVDHETEIVITEMEHHSNIVPWQLLAQRTGAKLRWFGLTDDGRLDLSNIDEVITEKTKVVSFVLVSNILGTQNPVEAIVRRAQEVGALVCIDASQAAPHMPLDVQALQADFVAFTGHKMCGPTGIGVLWGRQELLEDLPPFLGGGEMIETVSMHSSTYAPAPHKFEAGTPPVAQAVGLGAAIDYLNSIGMDKILAHEHALTEYAVKRLLEVPDLRIIGPTTAEERGAAISFTLGDIHPHDVGQVLDEQGIAVRVGHHCARPVCLRYGIPATTRASFYLYSTPAEIDALVDGLEHVRNFFG

SEQ ID NO: 32020 - DNA, 1263 bp, Synechocystis sp
  CDS (1)..(1263): transl_table=11
atggttgctctccaaattcccagccttgccgccactgtccgccaagattttcccatcttaaatcaagaaattaatggccatcccctggtgtatttggacaatgccgccacctcccaaaaaccccgggctgtgctggaaaaattgatgcattactatgaaaacgataatgctaatgttcaccggggagcccatcaactaagtgtgcgggctactgatgcctacgaagcagttcggaataaagtggcaaaatttattaatgcccgatcgccaagggagattgtttacactcgtaacgccacggaagcgattaatttggtggcctatagctgggggatgaataatctcaaagcaggggatgaaatcattaccaccgtgatggaacatcacagcaatttagtgccttggcaaatggtggcggccaaaaccggggctgtactaaaatttgtccaattagacgagcaagaaagctttgatttagaacattttaaaactctactttctgaaaagactaagttggtcactgttgttcacatttctaacaccttgggctgcgttaacccggcggaagaaattgcccaattagcccaccaagctggggctaaagtgttagttgacgcctgccaaagtgcgcctcattaccctctggacgtacaactaattgattgtgattggttagtggccagtggtcacaaaatgtgcgctcccacgggcattgggttcctttacggcaaagaagaaatcttagaagccatgcctcccttttttggcggcggcgaaatgattgctgaagtcttttttgatcatttcaccactggagagttgccccacaaatttgaagcggggaccccggccattgccgaggcgatcgccttaggagcggcagtggattatttaaccgacttagggatggaaaatattcataactatgaagtggaattaacccattacctctggcaaggcttggggcaaattccccaactgcgactttacggccccaatcccaaacacggcgatcgggccgctttagcgtcctttaacgtggcgggactccacgccagcgacgtggccaccatggtggatcaagacggtatcgccatccgttccgggcaccattgcacccaaccgttgcaccgattgtttgacgcttccggcagtgctagggccagtctgtatttctacaacaccaaagaagaaattgacctatttttacaatctttgcaagcaaccattcgcttctttagtgatgacgactttaccgtttaa

SEQ ID NO: 32021 - protein, 420 aa, Synechocystis sp
MVALQIPSLAATVRQDFPILNQEINGHPLVYLDNAATSQKPRAVLEKLMHYYENDNANVHRGAHQLSVRATDAYEAVRNKVAKFINARSPREIVYTRNATEAINLVAYSWGMNNLKAGDEIITTVMEHHSNLVPWQMVAAKTGAVLKFVQLDEQESFDLEHFKTLLSEKTKLVTVVHISNTLGCVNPAEEIAQLAHQAGAKVLVDACQSAPHYPLDVQLIDCDWLVASGHKMCAPTGIGFLYGKEEILEAMPPFFGGGEMIAEVFFDHFTTGELPHKFEAGTPAIAEAIALGAAVDYLTDLGMENIHNYEVELTHYLWQGLGQIPQLRLYGPNPKHGDRAALASFNVAGLHASDVATMVDQDGIAIRSGHHCTQPLHRLFDASGSARASLYFYNTKEEIDLFLQSLQATIRFFSDDDFTV

SEQ ID NO: 32022 - DNA, 1392 bp, Arabidopsis thaliana
  CDS (1)..(1392)
atggaaggtgtggctatgaaactcccgtcgttccctaacgccatctccatcggccaccggagcttctcccgcgttcgttgctcctcttcgctatccgtttgttccgccgccgccgcttcctccgccaccatctccactgattccgaatccgtctctctcggccatcgcgttcgaaaagatttccgaattctccaccaggaagtgaatgggtcaaagcttgtgtacttagacagtgctgcaacttctcagaagccagcagctgtattggacgctttgcagaattactatgagttctataattccaacgttcatcgaggaatacactatttaagtgctaaagctacagatgaatttgagttagctaggaaaaaagttgctcgtttcatcaatgcttctgatagtagagagattgtttttacaaggaatgccactgaagccatcaatcttgtagcttattcatggggtctttctaatcttaaaccaggagacgaggttatacttacagttgctgaacatcatagttgcattgttccttggcaaattgtatctcaaaaaactggagcagttctaaagtttgtgactttgaatgaggatgaagtccctgacataaacaagttgagagaattgatttctccaaagacaaagctcgtcgctgttcatcatgtttctaatgttcttgcatcttctcttcctattgaagagattgtggtatgggcacacgatgttggagcgaaagttctagtggatgcttgtcaaagtgttcctcacatggtggttgatgtccagaagcttaatgctgattttctagttgcgtcttctcacaagatgtgtggacctacaggcattgggttcttatatggtaagagtgatcttctacattccatgcctccattcttaggtggcggagaaatgatctcagatgtatttcttgaccattcaacttatgcggaacctccatccagatttgaagctggaacacctgcaataggagaagcaattgcccttggagcagcagttgattacttgtcaggaattggcatgccgaaaatccatgaatatgaggtagagattggtaagtatttgtacgagaaactgtcttccctgcctgatgtgcggatatacggtcccagaccttctgaaagtgttcacaggggtgctctttgttccttcaatgtggagggcttgcacccaactgatttggcaacctttcttgatcagcagcacggagttgcaataaggtcaggacaccactgcgcacagccactccaccggtatcttggagtgaatgcaagtgcacgcgccagcctctacttttacaacacaaaggatgacgttgacgccttcatcgttgcgctggcagacactgtgagcttcttcaactctttcaaataa

SEQ ID NO: 32023 - protein, 463 aa, Arabidopsis thaliana
MEGVAMKLPSFPNAISIGHRSFSRVRCSSSLSVCSAAAASSATISTDSESVSLGHRVRKDFRILHQEVNGSKLVYLDSAATSQKPAAVLDALQNYYEFYNSNVHRGIHYLSAKATDEFELARKKVARFINASDSREIVFTRNATEAINLVAYSWGLSNLKPGDEVILTVAEHHSCIVPWQIVSQKTGAVLKFVTLNEDEVPDINKLRELISPKTKLVAVHHVSNVLASSLPIEEIVVWAHDVGAKVLVDACQSVPHMVVDVQKLNADFLVASSHKMCGPTGIGFLYGKSDLLHSMPPFLGGGEMISDVFLDHSTYAEPPSRFEAGTPAIGEAIALGAAVDYLSGIGMPKIHEYEVEIGKYLYEKLSSLPDVRIYGPRPSESVHRGALCSFNVEGLHPTDLATFLDQQHGVAIRSGHHCAQPLHRYLGVNASARASLYFYNTKDDVDAFIVALADTVSFFNSFK

SEQ ID NO: 32024 - DNA, 1224 bp, Erwinia carotovora subsp
  CDS (1)..(1224): transl_table=11
atgagttatcctattgagcgagttcgtgctgatttcccgttgctggcaagcgaggttaacggccaaccgttagcctatctggatagtgccgcgagtgcgcaaaagccgcattcggttatcgatcgtgaagctgaattctatcgccatgaatacgccgctgtgcatcgcggcattcatacgctgagcgcacaggcgaccagtgcgatggaagctgtacgcgagaaggtggcatcttttatcaatgccgcttcagcggaagagattgtctttgtacgtgggacgacggaggccatcaatctggtggccaacagctatggtcgcaccttcatccagccgggcgataacctgatcatcaccgagatggagcaccacgcgaatattgttccctggcagatgctggcggaagcgcatggcgttgaagttcgtgtattgccgctagctgaagatggctcgctggatgtggcacagcttcccgtactgttggatgaacgcactcgtctgctggcggtgacgcagatatccaacgtattgggcacgctgaacccagtgaaagcgatgattgcgcaggcaaaagcggcgggtgctgttgtgttgatcgatggtgcacagtcgattatgcatcagcctgtcgatgtgcaggatctggattgcgatttctttgtcttttcaggacataagatctacggcccttcaggcattggtgtgctgtatggcaaacgtgacctgcttcaagccatgccaccgtgggaaggcggcggggcgatgattcgtcaggtcagcctgcgtacgggcatcacctatgctgattcaccgtggcgctttgaagctggatcgcctaacacgggcggtattatgggcttaggtgccgcactggattatgtgacggcactgggacgtgaagatattcagcgttatgaatcttcgctgatgcagtacgcgcttgaagcgttaacgcaggttcccgatctgaccttgtacggtcctgctgaacgtcacggtgttattgcgtttaaccttgggcagcaccacgcctatgatgtgggaagtttcctcgatcggtacggtattgcgattcgcaccggccaccattgcgcgatgccgctgatggaacactatggtgttcccagtatgtgccgcgcctcgctggccgtttatactacgcgcgaagaaattgaccggctagttgccggattgcaacgtatccatcgattgctgggcagttaa

SEQ ID NO: 32025 - protein, 407 aa, Erwinia carotovora subsp
MSYPIERVRADFPLLASEVNGQPLAYLDSAASAQKPHSVIDREAEFYRHEYAAVHRGIHTLSAQATSAMEAVREKVASFINAASAEEIVFVRGTTEAINLVANSYGRTFIQPGDNLIITEMEHHANIVPWQMLAEAHGVEVRVLPLAEDGSLDVAQLPVLLDERTRLLAVTQISNVLGTLNPVKAMIAQAKAAGAVVLIDGAQSIMHQPVDVQDLDCDFFVFSGHKIYGPSGIGVLYGKRDLLQAMPPWEGGGAMIRQVSLRTGITYADSPWRFEAGSPNTGGIMGLGAALDYVTALGREDIQRYESSLMQYALEALTQVPDLTLYGPAERHGVIAFNLGQHHAYDVGSFLDRYGIAIRTGHHCAMPLMEHYGVPSMCRASLAVYTTREEIDRLVAGLQRIHRLLGS

SEQ ID NO: 32026 - DNA, 1221 bp, Yersinia pestis
  CDS (1)..(1221): transl_table=11
atgaattttcctattgaacgtgtaagagctgattttccactgttgagccgccaggttaatgggcagccgttggtttatctggacagcgcagccagtgcgcaaaaacctcaggcggtcattgacaaggagcttcatttttaccgtgatggttatgcggccgttcataggggcattcacagtttaagtgctgaagcgactcagcagatggaagccgtacgcactcaggtggctgattttattcacgccgcctccgcagaagaaattatttttgtcagaggcaccactgaagcaatcaatttggttgctaacagttatggccgccatttccttgccgcgggtgatagcattatcattaccgaaatggaacaccatgccaatattgtgccttggcagatgttggcgcaagatcttggtgttgaaatccgtgtttggccactgacggctaccggtgagttggagataaccgccctggcagcgttgattgatgacaccacgcgcttactggcggtgactcaggtctccaacgtgttgggaacggtaaacccgattaaggatattgtggcccaggcaaaagccgccggtttagtggtgttggtggatggtgcgcaagcggttatgcatcagccagttgatgttcaggcgttgggctgcgatttttatgttttctcagggcacaaactgtacggcccatcgggtattgggattctgtacggcaaaagtgcgttgttacaacagatgccgccatgggaagggggcggggcgatgatcaaaacagtcagtttgacgcaaggcactacgtttgctgacgccccttggcgctttgaggctgggtcacctaatactgcgggtatcatggggcttggcgcggccattgactatgtcactgaattggggctcttgccgatccaacagtatgagcaatcgctgatgcattacgcattggcgcaactgagccagattaagagcctgacactgtatggcccaacagagcgtgccggggttattgccttcaatctgggccagcaccatgcctatgatgtgggcagctttcttgaccaatacggtattgctattcgtacgggtcatcactgtgcgatgccgctgatggcattctatcaggtaccgagtatgtgccgtgcctcactggcgctgtataatacccgcgaggatgttgatcggttggtggcaggattacagcgtatcgaaaaattgctggggtga

SEQ ID NO: 32027 - protein, 406 aa, Yersinia pestis
MNFPIERVRADFPLLSRQVNGQPLVYLDSAASAQKPQAVIDKELHFYRDGYAAVHRGIHSLSAEATQQMEAVRTQVADFIHAASAEEIIFVRGTTEAINLVANSYGRHFLAAGDSIIITEMEHHANIVPWQMLAQDLGVEIRVWPLTATGELEITALAALIDDTTRLLAVTQVSNVLGTVNPIKDIVAQAKAAGLVVLVDGAQAVMHQPVDVQALGCDFYVFSGHKLYGPSGIGILYGKSALLQQMPPWEGGGAMIKTVSLTQGTTFADAPWRFEAGSPNTAGIMGLGAAIDYVTELGLLPIQQYEQSLMHYALAQLSQIKSLTLYGPTERAGVIAFNLGQHHAYDVGSFLDQYGIAIRTGHHCAMPLMAFYQVPSMCRASLALYNTREDVDRLVAGLQRIEKLLG

SEQ ID NO: 32028 - DNA, 1395 bp, Brassica napus
  CDS (1)..(1395)
atggaaggtgtggctatgaaactcccctctttcaaatccctagctcccaccgccatatccgtcgcctctaccttctccatacgacggagcttatccttcgctcgccgctcctcttcgctttccgccgccaccatcaccgccgattcagagcccgtctctctcggccatcgcgctcgtaaagacttccgaattcttcaccaggaagtgaatggctcaaagcttgtgtacttggacagtgctgcgacttctcagaagcctgctgctgtattggaagctttgcagaactactacgagttttataattcaaacgttcatagaggaatccactacttaagtgccaaggctacagatgaatttgagttggctaggaagaaggtagctcgtttcatcaatgcttctgatagtagagagattgttttcactaggaacgctactgaagccatcaatcttgttgcttattcttggggtctttctaacctcaaaccaggagacgaggttatacttacagtggccgaacatcatagctgcattgtcccttggcaaattgtatctcaaaagactggagctgttctgaagtttgtgactttgaatgaagatgaagtcccggacatagacatgttgagagaaatgatttctgaaaagacaaaactcgtggctgttcatcacgtatcaaatgttcttgcatcttctcttcctattgaagagatagtggtctgggcgcacgaagttggagcgaaagttcttgtggatgcttgtcaaagtgttccccacatggttgttgatgtccagaagctaaatgctgatttcttagttgcgtcttctcacaagatgtgtggacctacaggcattggtttcttatatggtaagagtgatcttctacttgccatgcctccattcttaggtggcggagaaatgatctcagatgtatttctagatcattcgacttatgcggaacctccatcgagatttgaagctggaacacctgcaattggtgaagcaattgcccttggagcagcctgtgattacttgtcagatattggcatgccgaaaatccatgaatatgaggtcgagcttgctaagtacctgtacgagaaactggcttcagtgcctgatgtccggatatacggcccaaggccttctgaaagtgttcaaagggcagctctttgttccttcaatgtggagggactgcacccaactgatttggcaacctttcttgaccaacagcatggagttgcgataaggtcaggacaccactgcgcgcagccactccaccggtatcttggagtgaatgcaagtgcacgcgccagcctctacttttacaacacaaaggaagacgttgactccttcatcgttgcacttgcagatactgcgagcttcttcaattctttcaaatag

SEQ ID NO: 32029 - protein, 464 aa, Brassica napus
MEGVAMKLPSFKSLAPTAISVASTFSIRRSLSFARRSSSLSAATITADSEPVSLGHRARKDFRILHQEVNGSKLVYLDSAATSQKPAAVLEALQNYYEFYNSNVHRGIHYLSAKATDEFELARKKVARFINASDSREIVFTRNATEAINLVAYSWGLSNLKPGDEVILTVAEHHSCIVPWQIVSQKTGAVLKFVTLNEDEVPDIDMLREMISEKTKLVAVHHVSNVLASSLPIEEIVVWAHEVGAKVLVDACQSVPHMVVDVQKLNADFLVASSHKMCGPTGIGFLYGKSDLLLAMPPFLGGGEMISDVFLDHSTYAEPPSRFEAGTPAIGEAIALGAACDYLSDIGMPKIHEYEVELAKYLYEKLASVPDVRIYGPRPSESVQRAALCSFNVEGLHPTDLATFLDQQHGVAIRSGHHCAQPLHRYLGVNASARASLYFYNTKEDVDSFIVALADTASFFNSFK

SEQ ID NO: 32030 - DNA, 1383 bp, Zea mays
  CDS (1)..(1383)
atggcggcgacggcagcggcgctccggtgctgcttccccggatcctccggtgtcggtagtggcttcgtcaagcccaactcctccaggcgaggctggtgcgcagcggccgtggcggcgccgtcgcgggaggcggaaccggtttcgtcgctggggcaccgcacccgcgtcgacttccccatccttcaccaggaatttgatgatgccaaattagtttacttcgacaatggtgcaacatcgcagaaaccatgtagtgtgatgaaaacattagatgagtactaccgatcgtacaattcgaatgttcatcgtggtatccatgcactcagtgcgaaggctactcatgcatatgaggatgcaagaagaaaagttgcaaattttgtcaacgcagctgatagcagagagattgttttcactcgtaatgctactgaagctattaatctggtagcctattcatggggactatctaacttgaaagaaggagatgaaattgttcttacagttgcagagcatcatagtgctattgttccatggcaatttgtttcccagaagactggtgccaccttaaaatatgttggattgactaaagaaaatgtcccagacattgagcagttaaaagggtttctgtcgaacaagacaaagatagttgttgttcatcatgtctcaaatgttctaggttccatgcttcctatcgaggagattgtaacatggtcaaacagagttggagctaaagtccttgtagatgcttgccaaagtgttccccatatgccagttgatgttcagaaacttggcgcggactttcttgtcgcatcctctcataagatgtgtggccctacaggcgtcggatttttgcatggtaaatttgagattttgtcgtctatggagcctttcttaggtggtggtgaaatgattgcggatgtattcgaagacaaatccacatatgctgagcctccctctagatttgaggctggaactcctgcaattggagaagctataggactgggagcagccatcgactatttatcatgcattggcatggagcagatccacgaatatgagaaagagctggggacatacctctacgaaagccttctctctgttccaaatgtccagatatatggcccggcgccttcccagactgtccaccgtgctccgttgtgctccttcaatatcgagaacgtccatcctacagatatcgcagagattcttgatctgcagcatagcgtagcgattcggtcggggcatcactgcgcgcagatcttgcataggacccttggcatcaacgcaagtgctcgtgcgagtcttcacttctacaacacaaaagacgaggtggataccttcgtcgacgcgcttaaagccaccgttgatttcctcacggatcgatactag

SEQ ID NO: 32031 - protein, 460 aa, Zea mays
MAATAAALRCCFPGSSGVGSGFVKPNSSRRGWCAAAVAAPSREAEPVSSLGHRTRVDFPILHQEFDDAKLVYFDNGATSQKPCSVMKTLDEYYRSYNSNVHRGIHALSAKATHAYEDARRKVANFVNAADSREIVFTRNATEAINLVAYSWGLSNLKEGDEIVLTVAEHHSAIVPWQFVSQKTGATLKYVGLTKENVPDIEQLKGFLSNKTKIVVVHHVSNVLGSMLPIEEIVTWSNRVGAKVLVDACQSVPHMPVDVQKLGADFLVASSHKMCGPTGVGFLHGKFEILSSMEPFLGGGEMIADVFEDKSTYAEPPSRFEAGTPAIGEAIGLGAAIDYLSCIGMEQIHEYEKELGTYLYESLLSVPNVQIYGPAPSQTVHRAPLCSFNIENVHPTDIAEILDLQHSVAIRSGHHCAQILHRTLGINASARASLHFYNTKDEVDTFVDALKATVDFLTDRY

SEQ ID NO: 32032 - DNA, 20 bp, Artificial sequence
  primer
atgcctaccttggacttgtc

SEQ ID NO: 32033 - DNA, 20 bp, Artificial sequence
  primer
ttaaagtgcttcgttcaaag

SEQ ID NO: 32034 - protein, 469 aa, Artificial sequence
  consensus sequence
  Variant (2)..(2): Xaa in position 2 is any amino acid
  Variant (3)..(3): Xaa in position 3 is any or no amino acid
  Variant (6)..(6): Xaa in position 6 is any amino acid
  Variant (8)..(14): Xaa in position 8 to 14 is any amino acid
  Variant (15)..(20): Xaa in position 15 to 20 is any or no amino acid
  Variant (22)..(26): Xaa in position 22 to 26 is any amino acid
  Variant (28)..(31): Xaa in position 28 to 31 is any amino acid
  Variant (33)..(64): Xaa in position 33 to 64 is any amino acid
  Variant (65)..(68): Xaa in position 65 to 68 is any or no amino acid
  Variant (70)..(72): Xaa in position 70 to 72 is any amino acid
  Variant (74)..(88): Xaa in position 74 to 88 is any amino acid
  Variant (89)..(90): Xaa in position 89 to 90 is any or no amino acid
  Variant (92)..(105): Xaa in position 92 to 105 is any amino acid
  Variant (106)..(118): Xaa in position 106 to 118 is any or no amino acid
  Variant (122)..(128): Xaa in position 122 to 128 is any amino acid
  Variant (130)..(131): Xaa in position 130 to 131 is any amino acid
  Variant (133)..(135): Xaa in position 133 to 135 is any amino acid
  Variant (137)..(142): Xaa in position 137 to 142 is any amino acid
  Variant (143)..(143): Xaa in position 143 is any or no amino acid
  Variant (145)..(170): Xaa in position 145 to 170 is any amino acid
  Variant (171)..(176): Xaa in position 171 to 176 is any or no amino acid
  Variant (178)..(179): Xaa in position 178 to 179 is any amino acid
  Variant (181)..(185): Xaa in position 181 to 185 is any amino acid
  Variant (188)..(189): Xaa in position 188 to 189 is any amino acid
  Variant (191)..(205): Xaa in position 191 to 205 is any amino acid
  Variant (207)..(207): Xaa in position 207 is any amino acid
  Variant (208)..(208): Xaa in position 208 is any or no amino acid
  Variant (210)..(213): Xaa in position 210 to 213 is any amino acid
  Variant (215)..(220): Xaa in position 215 to 220 is any amino acid
  Variant (222)..(224): Xaa in position 222 to 224 is any amino acid
  Variant (227)..(228): Xaa in position 227 to 228 is any amino acid
  Variant (230)..(231): Xaa in position 230 to 231 is any amino acid
  Variant (233)..(236): Xaa in position 233 to 236 is any amino acid
  Variant (238)..(239): Xaa in position 238 to 239 is any amino acid
  Variant (241)..(242): Xaa in position 241 to 242 is any amino acid
  Variant (245)..(246): Xaa in position 245 to 246 is any amino acid
  Variant (247)..(247): Xaa in position 247 is any or no amino acid
  Variant (249)..(249): Xaa in position 249 is any amino acid
  Variant (251)..(260): Xaa in position 251 to 260 is any amino acid
  Variant (261)..(261): Xaa in position 261 is any or no amino acid
  Variant (263)..(278): Xaa in position 263 to 278 is any amino acid
  Variant (279)..(290): Xaa in position 279 to 290 is any or no amino acid
  Variant (292)..(306): Xaa in position 292 to 306 is any amino acid
  Variant (308)..(318): Xaa in position 308 to 318 is any amino acid
  Variant (319)..(375): Xaa in position 319 to 375 is any or no amino acid
  Variant (377)..(378): Xaa in position 377 to 378 is any amino acid
  Variant (380)..(386): Xaa in position 380 to 386 is any amino acid
  Variant (388)..(419): Xaa in position 388 to 419 is any amino acid
  Variant (420)..(428): Xaa in position 420 to 428 is any or no amino acid
  Variant (430)..(438): Xaa in position 430 to 438 is any amino acid
  Variant (439)..(439): Xaa in position 439 is any or no amino acid
  Variant (441)..(443): Xaa in position 441 to 443 is any amino acid
  Variant (445)..(457): Xaa in position 445 to 457 is any amino acid
  Variant (458)..(462): Xaa in position 458 to 462 is any or no amino acid
  Variant (464)..(464): Xaa in position 464 is any amino acid
  Variant (466)..(468): Xaa in position 466 to 468 is any amino acid
RXXFPXLXXXXXXXXXXXXXDXXXXXQXXXXVXXXXXXXXXXXXXXXXXXXXXXXXXXXXXXXXXXXXRXXXAXXXXXXXXXXXXXXXXXTXXXXXXXXXXXXXXXXXXXXXXXXXXXGDEXXXXXXXHXXNXXXWXXXXXXXGXXXXXXXXXXXXXXXXXXXXXXXXXXXXXXXXTXXVXXXXXSNXXGXXXXXXXXXXXXXXXGXXAXXXXDXXXXXXHXXXDVXXLXXDXXXXSXXKXXGPXXXGXLXXXXXXXXXXXPXXXXXXXXXXXXXXXXXXXXXXXXXXXXGXXXXXXXXXXXXXXXYXXXXXXXXXXXXXXXXXXXXXXXXXXXXXXXXXXXXXXXXXXXXXXXXXXXXXXXXXXXXXXXXXXXXEXXLXXXXXXXLXXXXXXXXXXXXXXXXXXXXXXXXXXXXXXXXXXXXXXXXXLXXXXXXXXXXGXXXAXXXXXXXXXXXXXXXXXXRXSXXXY

SEQ ID NO: 32035 - protein, 18 aa, Artificial sequence
  protein pattern
  Variant (4)..(4): Xaa in position 4 is Ile, Leu or Val
  Variant (5)..(5): Xaa in position 5 is Ala, Ile, Leu or Val
  Variant (6)..(6): Xaa in position 6 is any amino acid
  Variant (7)..(7): Xaa in position 7 is Ser or Thr
  Variant (8)..(9): Xaa in position 8 to 9 is any amino acid
  Variant (10)..(10): Xaa in position 10 is Asp, Glu or Asn
  Variant (12)..(12): Xaa in position 12 is any amino acid
  Variant (13)..(13): Xaa in position 13 is Ala, Gly or Ser
  Variant (14)..(14): Xaa in position 14 is Ala, Cys, Gly or Asn
  Variant (15)..(17): Xaa in position 15 to 17 is any amino acid
GDEXXXXXXXHXXXXXXW

SEQ ID NO: 32036 - protein, 26 aa, Artificial sequence
  protein pattern
  Variant (2)..(2): Xaa in position 2 is Lys or Arg
  Variant (3)..(3): Xaa in position 3 is Ile, Leu or Val
  Variant (4)..(4): Xaa in position 4 is Phe, Leu or Val
  Variant (5)..(9): Xaa in position 5 to 9 is any amino acid
  Variant (12)..(13): Xaa in position 12 to 13 is any amino acid
  Variant (14)..(14): Xaa in position 14 is Ala or Gly
  Variant (15)..(21): Xaa in position 15 to 21 is any amino acid
  Variant (22)..(22): Xaa in position 22 is Ile, Leu, Met or Val
  Variant (23)..(25): Xaa in position 23 to 25 is any amino acid
  Variant (26)..(26): Xaa in position 26 is Ala, Gly, Ser or Val
TXXXXXXXXSNXXXXXXXXXXXXXXX

SEQ ID NO: 32037 - DNA, 1362 bp, Azotobacter vinelandii
  CDS (1)..(1362): transl_table=11
atgagcgccagtggcaagctggaacgtcttaccctctggctgaaggaacgcaagatcaccgaggtcgagtgcctgatcagcgacatgaccggcatcgcccgcggcaagatcgcgccgaccagcaagttcatcgccgagcggggcatgcgcctgccggagagcgtgctgctgcagaccgtgaccggcgactatgtgaacgaggacgtctattaccggctgctcgatccggccgagatcgacatgttctgtcatcccgacgagagcgcggcgttcctcgtgccctgggccgtcgagccgaccgccatggtgatccacgacaccagcgacaagtggggcaaccccatcgaactgtcgccgcgcaacctgctcaagaaggtgctggcgatgtacgccgagcgcggctggcagccgatcgtcgcgccggagatggagttctacctgacccagcgcagcgacgaccccgactacccgctgcaggccccggtgggccgctccggccgtcaggagaccggccgccagtcgttctccatcgacgcggccaacgagttcgacccgctgttcgaggacatgtacgactggtgcgaggcccagggcctggatctggacaccctgatccacgaggaaggcaccgcgcagatggaaatcaacttccgtcacggcgaagcgctgcacctggctgaccagatcttcgtgttcaagcgcaccctgcgcgaggcggcgctcaagcacaacgtcaccgccaccttcatggccaagccgatgaccggcgagccgggcagcgccatgcacctgcaccagagcgtgctcgacagcgacgggcagaacatcttctccactccggacggctccatgagcgagctgttcctcaaccatatcggcggactgcagaaatacattcccgaactgctgccgctgttcgcgcccaacgtcaactcgtttcgccgcttcctgcccggcacctcggcgccggtcaacgtcgagtggggcgaggaaaaccgcaccgtcggcctgcgcgtgccggactccgcgccgcacaaccggcgggtggagaaccgcctgccgggcgccgacgccaacccctacctggccatcgccgcgagcctcctgtgcggctacatcggcatggtcgagcagttgcagccgagcgccccggtacaggggcgcggctacgagcggcgcagcctgcgcctgccgctgaccctggaggcggcgctggagcgcatggagaactgccgcgcgctggagcgctacctgaacccgcgcttcatcaccgcctacatcgcggtgaagcgcgccgagaacgagaacttcaagcgggtgatcagctcctgggagcgggccttcctgctgctctcggtgtga

SEQ ID NO: 32038 - protein, 453 aa, Azotobacter vinelandii
MSASGKLERLTLWLKERKITEVECLISDMTGIARGKIAPTSKFIAERGMRLPESVLLQTVTGDYVNEDVYYRLLDPAEIDMFCHPDESAAFLVPWAVEPTAMVIHDTSDKWGNPIELSPRNLLKKVLAMYAERGWQPIVAPEMEFYLTQRSDDPDYPLQAPVGRSGRQETGRQSFSIDAANEFDPLFEDMYDWCEAQGLDLDTLIHEEGTAQMEINFRHGEALHLADQIFVFKRTLREAALKHNVTATFMAKPMTGEPGSAMHLHQSVLDSDGQNIFSTPDGSMSELFLNHIGGLQKYIPELLPLFAPNVNSFRRFLPGTSAPVNVEWGEENRTVGLRVPDSAPHNRRVENRLPGADANPYLAIAASLLCGYIGMVEQLQPSAPVQGRGYERRSLRLPLTLEAALERMENCRALERYLNPRFITAYIAVKRAENENFKRVISSWERAFLLLSV

SEQ ID NO: 32039 - DNA, 1422 bp, Klebsiella pneumoniae subsp. pneumoniae MGH 78578
  CDS (1)..(1422): transl_table=11
atggaaaccaatatcgtagaagttgagaattttgttcagcaaacggaagagagacgggttagcgcgttcgcgaaagaagtgaagcgctacctcgaaacctaccctgatacccagtatgtcgatgtcctcctcactgacctgaacggctgcttccgcggcaagcgcatcccggttgccggcctgagcaaactggagaaaggctgttatttcccggcctcggtgtttgcgatggatattctcggcaatgtggtggaagaggctggtctgggccaggagatgggcgagccggatcgcagctgcatcccggtacccggcaccttaaccccttcggcggctgacccacaatcgatagcccaggtacagctaaccatggttgatgaagatggcgctccctttgacgttgagccgcggaacgtactcaaccgcctctggcagcagttgcgccagcgcgggctgttccccgtggtagcggtagagctggagttctatttactggaccgcaaacgcgatgccgaaggctacctgcagccgccgtgtgcgccgggcaccgacgatcgcaacacccaaagccaggtctactcggtcgataaccttaaccacttcgccgacgtgctcaacgacatcgacgagctggccaaactgcagctgatccccgccgatggcgcggtggcggaagcctcgccgggccagtttgaaatcaaccttcaccataccgataacgtgctggacgcctgcgatgatgcgctggcgttaaaacgtctcgtgcgtttgatggcggagaagcataagatgcacgccacttttatggcgaagccttatgaagagcatgccggcagtgggatgcatatccacatcagcatgctgaacaataaaggggaaaacgtgctggtggacggcgatggggaagactctgcgctgctcaaacgcgcgctggccgggatgatcgatctgatgccggcttcgatggcgctgctggcgccgaacgtgaactcgtatcgccgcttccagccggggatgtacgtcccgacgcaggcttcgtgggggcataacaaccgcaccgtcgcgctgcgtattccgtgcggcgagcggcagaaccaccgcgtggagtatcgcgtcgcgggggcggacgccaacccgtatctggtgatggcggcgatttttgccggcattctgcacgggctggataacccccagctgcctttacaggaagaggtggaaggtaacggtctggaacaagagggcctgccattcccgatccgccagagcgatgcgctgtgggagtttatgcagaacgatcacttgcgtgagcgcctcggcgagcgtttctgccatgttttccatgcctgtaagcatgatgaattactgcagtttgagcgtcttatcacagaaaccgaaattgagtggatgttgaaaaacgcctga

SEQ ID NO: 32040 - protein, 473 aa, Klebsiella pneumoniae subsp. pneumoniae MGH 78578
METNIVEVENFVQQTEERRVSAFAKEVKRYLETYPDTQYVDVLLTDLNGCFRGKRIPVAGLSKLEKGCYFPASVFAMDILGNVVEEAGLGQEMGEPDRSCIPVPGTLTPSAADPQSIAQVQLTMVDEDGAPFDVEPRNVLNRLWQQLRQRGLFPVVAVELEFYLLDRKRDAEGYLQPPCAPGTDDRNTQSQVYSVDNLNHFADVLNDIDELAKLQLIPADGAVAEASPGQFEINLHHTDNVLDACDDALALKRLVRLMAEKHKMHATFMAKPYEEHAGSGMHIHISMLNNKGENVLVDGDGEDSALLKRALAGMIDLMPASMALLAPNVNSYRRFQPGMYVPTQASWGHNNRTVALRIPCGERQNHRVEYRVAGADANPYLVMAAIFAGILHGLDNPQLPLQEEVEGNGLEQEGLPFPIRQSDALWEFMQNDHLRERLGERFCHVFHACKHDELLQFERLITETEIEWMLKNA

SEQ ID NO: 32041 - DNA, 1404 bp, Xanthobacter autotrophicus Py2
  CDS (1)..(1404): transl_table=11
atggcgaaacgcagcaagggcgcgcagaagattccggtgacggcgccgcggggtgtcaattccctcgccgaggccaaggcctggatggccagccggggcatcaccgagatcgagtgcaccgttcccgatcttgcgggtgtcgcccgcggcaagatcatgccggcctcgaaattcttctcctccccggtgatgaacctgcccctgtcggtcttcttccagaccatttcgggcgagtatccggactatgagggcctggtggattcggtggtcgccgacagcgacctggtgatggagccggacctcgccaccctgtgctcggtgccgtgggcgcaggaccccaccgcccaggtgatccacgacgccttccaccgcgacgggcgtccggtggagctggcgccgcggcaggtgctgcgccacgtcatctcgctctacgagaagaagggctggaagccggtggtggcgccggaaatcgaattctacctggtggagcccaacaccgatcccgactatccgctgaagccgccggtgggccgctcggggcgtcccgagatcggccgccagtcctattccatccaggcggtgaacgagttcgatgccctgttcgaggacatctacgactattcggaagcccaggggctggagatcgacacgctgatccacgaggacggcgccgcgcagatggaaatcaacctgcgccacggcgatccgctcacgctggccgaccaggtgttcctgttcaagcgcaccatccgcgaggcggcgctggcgcacaagatctacgccaccttcatggccaagcccatcgccaacgagccgggcagcgccatgcacatccaccagtcggtgatctcggcgcagaccggcaagaacatcttctcggacgaggacggcgacccgacgccggaattcttctccttcatcgccggccaccagaaatacctgccgtcggtcatgtgcatcatggcgccctatgtgaattcctaccggcggctgacgcgcgactccatggcgcccatcaacctgcaatggggctacgacaaccgcaccgcaggcctgcgcgtgccgccctccacccccgaggcgcggcggctggagaaccgggtgccgtcctccgacgccaatccctatctcgtcatcgccgcctccctggcctgcggctatctcggcctcaccgagaacctgcgcgccaccgatccgctggagggcgacgccaagaacctcgacttcgacctgccgcgcggcctcctggaggcggtggcggccttctcggacagcgagcccctcgccgaggtgctcggccatcgcttcgttgccgcctatgccgcggtgaagcaggccgagttcgagaccttcatgcgggtgatctcgccgtgggagcgggaatatctgctgctgaacgtctga

SEQ ID NO: 32042 - protein, 467 aa, Xanthobacter autotrophicus Py2
MAKRSKGAQKIPVTAPRGVNSLAEAKAWMASRGITEIECTVPDLAGVARGKIMPASKFFSSPVMNLPLSVFFQTISGEYPDYEGLVDSVVADSDLVMEPDLATLCSVPWAQDPTAQVIHDAFHRDGRPVELAPRQVLRHVISLYEKKGWKPVVAPEIEFYLVEPNTDPDYPLKPPVGRSGRPEIGRQSYSIQAVNEFDALFEDIYDYSEAQGLEIDTLIHEDGAAQMEINLRHGDPLTLADQVFLFKRTIREAALAHKIYATFMAKPIANEPGSAMHIHQSVISAQTGKNIFSDEDGDPTPEFFSFIAGHQKYLPSVMCIMAPYVNSYRRLTRDSMAPINLQWGYDNRTAGLRVPPSTPEARRLENRVPSSDANPYLVIAASLACGYLGLTENLRATDPLEGDAKNLDFDLPRGLLEAVAAFSDSEPLAEVLGHRFVAAYAAVKQAEFETFMRVISPWEREYLLLNV

SEQ ID NO: 32043 - DNA, 2538 bp, Oryza sativa (japonica cultivar-group)
  CDS (1)..(2538)
atggagatggagtccaagtacgcggcgctgcggcgcgcggcggaggaggcggcggcggtggacgcgcacgcgcacaacctcgtcgccgacggctccgcgttccccttcctccgctgcttctccgaggccgacgccgccgacgccctcgccctcgctccccacaccctctccttcaagagaagcctgagggacatcgctgcattgtacaactgtgaagcttcacttgagaaggtggaggagttcagaagggctgaagggttgtcgtctataagctcaaagtgcttcaaggctgccaacttatctgcaattcttatagatgatggcatagactttgacaagatgcttgaactggaggcacacaaggcgtttgctcctacagttggcagaattctgaggattgaaaagctggcagaaacaattattaatgatgaatcattcagcgcatcaagctggacacttgactcttttactgaaatttttgtcactaagctgaaatcagttgccaacaaaattgttggattgaaaagtatagctgcatatagaagtggcttagagattgatccaaatattagcaagacagatgcagaggatggactacgtaaggagttatcaggtcagaggcctcttcggattacaaataagaacctgattgactatctatttacttgcagtcttgaaattgctgtatcatatcacctgccaatgcagattcacacaggatttggagataaggacctggacttgcgaaagtgcaaccctctccatctgcgtgctgttcttgaggacacaagattctctaagtgccaaattgttcttttacatgcctcttatccattttcaaaggaagcatcatatctagcatcagtgtactcccaggtataccttgattttggcttggcaattccaaaacttagtgttcaaggaatgacatcatcaattaaagagctccttgagctagctcccataaagaaggtcatgttcagcacagatggttatgcttttccagagacatattacctaggtgcaaggagggcacgtgatgttgtttatcgtgtactctcagctgcatgtgaagatggtgaccttagcattcaagaagctattgaagcagttgaggacatatttagacgaaatgcattgtatctatacaagttgaatgttgccaacgggtcagtcggtcagataacagcaatagctgacaacggcataccattatctgaacaagatgtgctctttgttcgagtcgtctggattgatacttcaggtcaacataggtgccgcgttgtgccagccggaagattttatgaaattgctaggaaaaagggtattggtctgacttttgcatcgatgggaatgacttcatttactgatggcccagcagatggaacaaaccttactggtgtaggagagatcaggcttatgccggatatgtcaacactattgaggcttccatggtcaagacgcgaagaaatggtaatggctgaaatgcatataaggcctggggaagcctgggaatactgtcccagaaataccttgagaaaagtcacaaaagttctgctagatgagtttaatgtgacaatgatggcaggttttgagaatgaatttttcctacgtaaaaaagtagtaagtggtgaaaaggagctgtgggtcccatttgacaataccccctactgctcaactacagcattcgatggtgcatcatctgtgttgcaagaagtatatacttctcttaaagcggcggaaattgtggttgagcagctgcatgctgaatctggaaaagggcagtttgagatagccttgaagtatgtgttgtgcactcttgctgctgacaaactgatatatgcccgtgagattattaaatcagttgctcgaaagcatgggctacttgcaacttttcttccaaaacctgacttgaatgatattggatccggttctcatgtgcatctgagtttatgggaattcgatcagaatgtgttcatgggatcaagtgaatataattactatggaatgtcaagaatcggagaaagcttccttgctggagtatatctccatcttccatcaatcttggcattcactgctcctcacccaaacagctacaaccgaattcagccaaacacatggagtggtgcatatcagtgctgggggaaggagaacagggaggctccactgagaactgcatgcccacctgggatacctcttgatctcgtcagcaacttcgaaattaaatccttcgatgcgtgcgcaaacccgcacttgggccttgctgctatagttgctgctgggattgatggactcaggagaagccttacgttgcctgaaccaactgaatcaaaccctgcaggttatgcctccaactccaagctcaaaaggatgccgaaggacttgatggaatctgtcgaagcactagctgcagacaaaatcatgcatgaattgatcggcgataaacttgtcactgccgttattgctgtacgaaaggctgagatcgatcactacgagaagaaccctgcagcattcgccgatctcattcaccgttactag

SEQ ID NO: 32044 - protein, 845 aa, Oryza sativa (japonica cultivar-group)
MEMESKYAALRRAAEEAAAVDAHAHNLVADGSAFPFLRCFSEADAADALALAPHTLSFKRSLRDIAALYNCEASLEKVEEFRRAEGLSSISSKCFKAANLSAILIDDGIDFDKMLELEAHKAFAPTVGRILRIEKLAETIINDESFSASSWTLDSFTEIFVTKLKSVANKIVGLKSIAAYRSGLEIDPNISKTDAEDGLRKELSGQRPLRITNKNLIDYLFTCSLEIAVSYHLPMQIHTGFGDKDLDLRKCNPLHLRAVLEDTRFSKCQIVLLHASYPFSKEASYLASVYSQVYLDFGLAIPKLSVQGMTSSIKELLELAPIKKVMFSTDGYAFPETYYLGARRARDVVYRVLSAACEDGDLSIQEAIEAVEDIFRRNALYLYKLNVANGSVGQITAIADNGIPLSEQDVLFVRVVWIDTSGQHRCRVVPAGRFYEIARKKGIGLTFASMGMTSFTDGPADGTNLTGVGEIRLMPDMSTLLRLPWSRREEMVMAEMHIRPGEAWEYCPRNTLRKVTKVLLDEFNVTMMAGFENEFFLRKKVVSGEKELWVPFDNTPYCSTTAFDGASSVLQEVYTSLKAAEIVVEQLHAESGKGQFEIALKYVLCTLAADKLIYAREIIKSVARKHGLLATFLPKPDLNDIGSGSHVHLSLWEFDQNVFMGSSEYNYYGMSRIGESFLAGVYLHLPSILAFTAPHPNSYNRIQPNTWSGAYQCWGKENREAPLRTACPPGIPLDLVSNFEIKSFDACANPHLGLAAIVAAGIDGLRRSLTLPEPTESNPAGYASNSKLKRMPKDLMESVEALAADKIMHELIGDKLVTAVIAVRKAEIDHYEKNPAAFADLIHRY

SEQ ID NO: 32045 - DNA, 1497 bp, Escherichia coli O157:H7 EDL933
  CDS (1)..(1497): transl_table=11
ttgcatacagattcgaatggtggtcattatattttacgctttgataacgagcggaaaacaaaccaaaggcgaagaatcatggaaaccaatatcgttgaagtagagaactttgttcagcagtcagaagagaggcggggtagcgcctttacgcaggaagtgaaacgctacctggagcgctacccgaatacgcaatatgttgatgttttacttaccgatttgaatggttgcttccgtggaaaacgtattcctgtttcaagcctgaagaagctcgagaaagggtgttatttcccggcctcggtatttgcaatggatattctgggcaacgtagtagaagaagcaggtctgggtcaggaaatgggcgagccggatcgtacctgtgttcctgttctcggttccttaaccccttctgccgccgatccagagtttatcggtcagatgctcctgaccatggtcgatgaagatggcgctccctttgacgttgagccgcggaacgttcttaaccgcctgtggcagcagctgcgccagcgcggattgttcccggtcgtagcggtagagctggagttctatttactggatcgccagcgcgacgctgaagggtatctgcaaccgccctgcgcgcccggcactgatgaccgcaatacacaaagccaggtttactccgttgataacctcaaccacttcgccgacgtgctcaatgatattgatgaactggcgcagttacagctgattccggcagatggcgcggtcgctgaggcctcgccgggtcagtttgaaatcaacctttaccatactgataacgtgctggaagcctgcgatgatgcgctggcactaaaacgcctggtgcgtctgatggcagaaaagcataagatgcacgccacttttatggcgaagccgtatgaagagcacgcgggcagcggaatgcatatccatatcagtatgcaaaataatcgtggcgagaacgtgctttctgacacagaaggcgaagattcgccgctgctgaaaaagatgctcgccgggatgattgacctgatgccgtcatcaatggcgttgctggcaccaaacgtgaactcgtatcgccgcttccagccggggatgtatgtaccgacgcaggcgtcgtggggccataataaccgtaccgtcgccctgcgtattccatgcggcgatcgtcataatcaccgcgtggaatatcgcgtggcgggtgccgatgccaacccatatctggtgatggcagcgatttttgccggtattttgcatggccttgataacgagctgccgttgcaggaagaagtcgaaggtaacgggctggaacaggaaggcttacccttcccgattcgccagagcgatgccctgggtgagtttatcgagaatgatcacctgcgccgctatttaggcgaacggttttgccatgtgtatcacgcctgtaaaaatgatgagctgttgcagtttgagcgcctcatcacagaaacagaaattgagtggatgttgaaaaacgcatag

SEQ ID NO: 32046 - protein, 498 aa, Escherichia coli O157:H7 EDL933
MHTDSNGGHYILRFDNERKTNQRRRIMETNIVEVENFVQQSEERRGSAFTQEVKRYLERYPNTQYVDVLLTDLNGCFRGKRIPVSSLKKLEKGCYFPASVFAMDILGNVVEEAGLGQEMGEPDRTCVPVLGSLTPSAADPEFIGQMLLTMVDEDGAPFDVEPRNVLNRLWQQLRQRGLFPVVAVELEFYLLDRQRDAEGYLQPPCAPGTDDRNTQSQVYSVDNLNHFADVLNDIDELAQLQLIPADGAVAEASPGQFEINLYHTDNVLEACDDALALKRLVRLMAEKHKMHATFMAKPYEEHAGSGMHIHISMQNNRGENVLSDTEGEDSPLLKKMLAGMIDLMPSSMALLAPNVNSYRRFQPGMYVPTQASWGHNNRTVALRIPCGDRHNHRVEYRVAGADANPYLVMAAIFAGILHGLDNELPLQEEVEGNGLEQEGLPFPIRQSDALGEFIENDHLRRYLGERFCHVYHACKNDELLQFERLITETEIEWMLKNA

SEQ ID NO: 32047 - DNA, 1410 bp, Escherichia coli O157:H7 EDL933
  CDS (1)..(1410): transl_table=11
  misc_feature (664)..(664): r is g or a
atgtccgctgaacacgtactgacgatgctgaacgagcacgaagtgaagtttgttgatttgcgcttcaccgataccaaaggtaaagaacagcacgtcactatccctgctcatcaggtgaatgctgaattcttcgaagaaggcaaaatgtttgacggctcctcgattggcggctggaaaggcattaacgaatccgacatggtgctgatgccagacgcatccaccgcagtgattgacccgttcttcgccgactccaccctgattatccgttgcgacatccttgaacctggcaccctgcaaggctatgaccgtgacccgcgctctattgcgaagcgcgccgaagattacctgcgttccactggcattgccgacaccgtactgttcgggccagaacctgaattcttcctgttcgatgacatccgtttcggatcatctatctccggttcccacgttgctatcgacgatatcgaaggcgcatggaactcctccacccaatacgaaggtggtaacaaaggtcaccgtccggcagtgaaaggcggttacttcccggttccgccggtagactctgctcaggatattcgttctgaaatgtgtctggtgatggaacagatgggtctggtggttgaagcccatcaccacgaagtagcgactgctggtcagaacgaartggctacccgcttcaataccatgaccaaaaaagctgacgaaattcagatctacaaatatgttgtgcacaacgtagcgcaccgcttcggtaaaaccgcgacctttatgccaaaaccgatgttcggtgataacggctccggtatgcactgccacatgtcgctgtctaaaaacggcgttaacctgttcgcaggcgacaaatacgcaggtctgtctgagcaggcgctgtactacattggcggcgtaatcaaacacgctaaagcgattaacgccctggcaaacccgaccaccaactcttataagcgtctggtcccgggctacgaagctccggtaatgctggcttactctgcacgcaaccgttctgcgtctatccgtattccggtggtttcttctccgaaagcacgtcgtatcgaagtacgtttcccggatccggcggctaacccgtacctgtgctttgctgccctgctgatggccggtcttgatggcatcaagaacaagatccatccgggcgaagccatggacaaaaacctgtatgacctgccgccggaagaagcgaaagagatcccacaggttgcaggctctctggaagaagcactgaacgagctggatctggaccgcgagttcctgaaagccggtggcgtgttcacggatgaagcgatcgatgcgtacatcgctctgcgtcgcgaagaagatgaccgcgtgcgtatgactccgcatccggtagagtttgagctgtactacagcgtctaa

SEQ ID NO: 32048 - protein, 469 aa, Escherichia coli O157:H7 EDL933
  misc_feature (222)..(222): The Xaa at location 222 stands for Met, or Val.
MSAEHVLTMLNEHEVKFVDLRFTDTKGKEQHVTIPAHQVNAEFFEEGKMFDGSSIGGWKGINESDMVLMPDASTAVIDPFFADSTLIIRCDILEPGTLQGYDRDPRSIAKRAEDYLRSTGIADTVLFGPEPEFFLFDDIRFGSSISGSHVAIDDIEGAWNSSTQYEGGNKGHRPAVKGGYFPVPPVDSAQDIRSEMCLVMEQMGLVVEAHHHEVATAGQNEXATRFNTMTKKADEIQIYKYVVHNVAHRFGKTATFMPKPMFGDNGSGMHCHMSLSKNGVNLFAGDKYAGLSEQALYYIGGVIKHAKAINALANPTTNSYKRLVPGYEAPVMLAYSARNRSASIRIPVVSSPKARRIEVRFPDPAANPYLCFAALLMAGLDGIKNKIHPGEAMDKNLYDLPPEEAKEIPQVAGSLEEALNELDLDREFLKAGGVFTDEAIDAYIALRREEDDRVRMTPHPVEFELYYSV

SEQ ID NO: 32049 - DNA, 1374 bp, Mycobacterium tuberculosis CDC1551
  CDS (1)..(1374): transl_table=11
gtgaccggccccggttcgccgccgttggcgtggaccgagttggagcgactggtcgcggccggtgacgtcgacaccgtcatcgtcgcgttcaccgacatgcagggccggctggccggcaaacggatatcgggccggcatttcgtcgacgacatagccacccgcggcgtcgagtgctgcagttatctgctggccgtggacgtcgacctgaacacggtgcccggctatgcgatggccagttgggacaccggctacggcgatatggtgatgacgccggacttgtccactctgcggctgattccttggctaccgggaacggcgctggtgatcgccgacctggtctgggccgacggcagcgaggtcgccgtctcgccgcgcagcattctgcgccgtcagctcgatcggctcaaggcgcgcggactggtcgccgatgtggccaccgagctggagttcatcgtgttcgaccagccgtatcgccaggcatgggccagcgggtatcgcgggctgaccccggccagcgactacaacatcgactacgcgatattggcatcctcgcggatggagccgttgctgcgcgacatccggttgggtatggccggtgcgggtctgcgattcgaggcggtcaaaggcgaatgcaacatgggccagcaggagatcgggtttcgttacgacgaggcgctggtcacctgcgacaaccatgcgatctacaagaacggcgccaaggaaatcgccgaccagcacggcaagagcctaacgttcatggcgaaatacgatgaacgcgaaggtaatagctgtcacatccatgtctcgctgcgtggcacggatggctccgcggtgtttgccgacagtaacgggccgcacggcatgtcgtcgatgttccgcagcttcgtcgccggccagttggccacgttgcgcgaattcacgctgtgctatgcgccgaccattaactcctacaagcgatttgccgatagcagtttcgcgccgacggcgctggcttgggggctggacaatcgcacctgcgccctgcgggtggttggccacgggcaaaacatccgggtcgaatgccgggttcccggcggtgatgtcaaccagtacctggcggtggcggctctcattgctggagggttgtacggtatcgagcggggccttcagctgcccgagccctgtgtcggcaacgcctaccaaggcgccgatgtcgaacggctgccggttacgctggccgacgccgcggtgctgttcgaggattctgcgctggtgcgcgaggcgttcggcgaggatgttgtcgcgcactacctgaacaacgcgcgtgtggagctggcggcgttcaacgcggcggtcaccgattgggagaggatacgtggatttgagcgcctctag

SEQ ID NO: 32050 - protein, 457 aa, Mycobacterium tuberculosis CDC1551
MTGPGSPPLAWTELERLVAAGDVDTVIVAFTDMQGRLAGKRISGRHFVDDIATRGVECCSYLLAVDVDLNTVPGYAMASWDTGYGDMVMTPDLSTLRLIPWLPGTALVIADLVWADGSEVAVSPRSILRRQLDRLKARGLVADVATELEFIVFDQPYRQAWASGYRGLTPASDYNIDYAILASSRMEPLLRDIRLGMAGAGLRFEAVKGECNMGQQEIGFRYDEALVTCDNHAIYKNGAKEIADQHGKSLTFMAKYDEREGNSCHIHVSLRGTDGSAVFADSNGPHGMSSMFRSFVAGQLATLREFTLCYAPTINSYKRFADSSFAPTALAWGLDNRTCALRVVGHGQNIRVECRVPGGDVNQYLAVAALIAGGLYGIERGLQLPEPCVGNAYQGADVERLPVTLADAAVLFEDSALVREAFGEDVVAHYLNNARVELAAFNAAVTDWERIRGFERL

SEQ ID NO: 32051 - DNA, 1359 bp, Agrobacterium tumefaciens str. C58
  CDS (1)..(1359): transl_table=11
atgtatgatattgaaaacgcaaagaaatttttcgctgataatcccgatatcgaaattctcgaagctttcgtcatagatgcgaacggcgttccgcgcggtaaatggattccgcgtgagagagcaattgacgtgcttgaaaagggaatggcgatcccgcgatccgtttatgcgctggatatctggggccgggatgtgcacgccgcaggtctcgccgaaggcacgggtgatcctgatggtttttgtttccccgttcccggtacgctgtcacgggtaacatggcttggccggccgacggcgcaggttctgctggcgatgaaaaacgcggatgggaccggattttatggtgatccgcgccatgttctgtcgcaggttctgaacgcctataaaaaggctggcctcacgccggtcgtggcgaccgaactggaattctacctcatcgatcccgtccgctcggcgcttgacccggtgcgcccgccgcacagccgcgaaggtcgctggcacaccggccagacgcaggttctatcgatttccgaattgcaggatttcgaggatgtcttccatgatatcgcgacagcctgccgcgcccagggtgtgcttgcagatacgacgctgcgggaaaatggccccgggcaatatgagatcaacctcaaccacgtgccggatgccctgcaggccgccgattttgccgtcttcctgaaacgcatcgtcaaaggtgtggcgcgacggcacgaactcgacgccaccttcatggccaagccctatgggctgcaggccggcaacggcatgcatgtgcatttttccgttctcgacagggacggcaggaatatctacgccggggaaaacggtccgtcggatgcgctgatgcactcggtcggcggcctgttggaaaacatgggggagagcatggcgatcttcgctccccatgccaattcctatcgccgcctcaccccaagcgaacacgcgccgacctacgcttcgtggggtatcgacaaccgctcggcggcggtccgcgtcatcgtggccagcaaggcggcaacccgcatcgaacaccgcgtcgccggcgccgacaccaatccctacctggtcctcgcgatgatcctcagcgccgctatcgccggcatgaaggagaagcgccagcccggcggcgcgattgccggtgacagccacgcgatcaatcacgaaccgcttcccaccaactgggactatgcattgcagcgcttcacgcgttcgagctttgcctatgcgacgctcggccagaagtaccgcacgctgttttccgcctgcaagcagcaggagctttccgaattttccctgcgtgtaaccgacgtcgaatatgacgcctatatcaggacggtgtga

SEQ ID NO: 32052 - protein, 452 aa, Agrobacterium tumefaciens str. C58
MYDIENAKKFFADNPDIEILEAFVIDANGVPRGKWIPRERAIDVLEKGMAIPRSVYALDIWGRDVHAAGLAEGTGDPDGFCFPVPGTLSRVTWLGRPTAQVLLAMKNADGTGFYGDPRHVLSQVLNAYKKAGLTPVVATELEFYLIDPVRSALDPVRPPHSREGRWHTGQTQVLSISELQDFEDVFHDIATACRAQGVLADTTLRENGPGQYEINLNHVPDALQAADFAVFLKRIVKGVARRHELDATFMAKPYGLQAGNGMHVHFSVLDRDGRNIYAGENGPSDALMHSVGGLLENMGESMAIFAPHANSYRRLTPSEHAPTYASWGIDNRSAAVRVIVASKAATRIEHRVAGADTNPYLVLAMILSAAIAGMKEKRQPGGAIAGDSHAINHEPLPTNWDYALQRFTRSSFAYATLGQKYRTLFSACKQQELSEFSLRVTDVEYDAYIRTV

SEQ ID NO: 32053 - DNA, 1440 bp, Agrobacterium tumefaciens str. C58
  CDS (1)..(1440): transl_table=11
atgcccgccaaaaaaaccatgctccgcccgaagaaacaggcaaccatggcaaagaagtctcctcccctcgatctctcctccacccgtggcgtttcctcctggcgcgaagccgcgcaatggctgcgcgtgcgcgggatcgaagacatagaatgcatcacgcccgaccttgccggggttgcgcgcggaaagatgatgccgacggcgaaattcacgggcgatacctcgctcgcgctgccgtccgcgctctaccgccacacgatatcaggcgaatatcctgatgagacggcgaacttccgttacgagccgcgcgacagcgacctgaaactagtgccggatctttcgacgctgtccgtcgtgccgtgggagagcgacccaaccgcgcaggtgatctgcgacgttgtggatgccgagggtaatttcgttccctacacgccgcgcaacgtgctgaagaacgtgctttcgctctataccgaaaagggctggaagccggtcgtagcacccgaaatcgaattttatctcgtcgccatgaatgacgatccggattatccgctgcatccgccgaagggccgctccggccgctccatcgttggcggtcagagctattccatcgccggcatcaacgaattcgacgagctgatcgacgacatctaccatttctcggaaaaacagggtctcgagatcgatacgctgatccacgaggaaggcccggcgcagctggaaatcaacctgcgccacggcgacccgatcgaacttgccgaccaggtgtttcttttcaagcgcaccattcgcgaggccgcgctgaaacacggcatctacgccaccttcatggcaaagccgatgcagggccagccaggttcggccatgcatatccatcagtcggtggtggaaatcgatggcggacgcaatatcttctccaatgccgatggcagtccttcgaaggtattcttctccttcgtcggcggcatgcagcgttatgttccaaacgcactcgtcatgctggcgccctatgtgaattcctatcgccgcctgacgcccgacatggcctgcccggtcaacaatgcctggggttacgacaaccgcaccacggctttccgggtgccgatttccagcccgcaggcgcgtcgcgtcgaaaaccgcctgccgagttcggacgccaatccgtacctggcgcttgccgcttcgctcggctgcggctggcttggcatcgtcaacaatatcgagccgaccgaacccaccgccgatacggccaatgaaggctccatcgaactgccgcgtggtctccttgaggccgtggcgctgctggaaggcgaggaacagttcgaccgggtgttcggccatgaattcgtgggcctttatgccggcctgaaacgcggggaattcgagaccttcatgcaggtcatcagcccctgggagcgcgagttcctgcttctcaacgtgtga

SEQ ID NO: 32054 - protein, 479 aa, Agrobacterium tumefaciens str. C58
MPAKKTMLRPKKQATMAKKSPPLDLSSTRGVSSWREAAQWLRVRGIEDIECITPDLAGVARGKMMPTAKFTGDTSLALPSALYRHTISGEYPDETANFRYEPRDSDLKLVPDLSTLSVVPWESDPTAQVICDVVDAEGNFVPYTPRNVLKNVLSLYTEKGWKPVVAPEIEFYLVAMNDDPDYPLHPPKGRSGRSIVGGQSYSIAGINEFDELIDDIYHFSEKQGLEIDTLIHEEGPAQLEINLRHGDPIELADQVFLFKRTIREAALKHGIYATFMAKPMQGQPGSAMHIHQSVVEIDGGRNIFSNADGSPSKVFFSFVGGMQRYVPNALVMLAPYVNSYRRLTPDMACPVNNAWGYDNRTTAFRVPISSPQARRVENRLPSSDANPYLALAASLGCGWLGIVNNIEPTEPTADTANEGSIELPRGLLEAVALLEGEEQFDRVFGHEFVGLYAGLKRGEFETFMQVISPWEREFLLLNV

SEQ ID NO: 32055 - DNA, 1308 bp, Agrobacterium tumefaciens str. C58
  CDS (1)..(1308): transl_table=11
gtgacactggacctctccaaatttgctgccgaaaagggcatcaaatatttcatgatcagctataccgatctcttcggcggccagcgcgccaagctggtgccggcggaagcgatcgccgatatgcagaaaggcggcgcgggttttgccggtttcgccacatggttcgatctgacgcctgcccatcccgatcttttcgccgtgccggacgcctcctcggtcatccagcttccgtggaaaaaggacgtcgcctgggtggcagccgattgcgtcatggaagaccagccggtggagcaggcaccgcgcgtgatgctgaaaaaactcatcgcggaagcggcgggcgaggggctcagggtcaagacaggcgtcgagccggaatttttcctgatttcgcctgacggtgcgaaaatctccgacgaatacgacacggcggaaaagccctgctacgaccagcaggcggtgatgcgccgttatgacgttatcgccgagatttgcgactacatgctggagctgggttggaagccctaccagaacgaccatgaggatgcgaatggccagttcgagatgaactgggaatatgacgatgcgctccagactgccgacaaacattccttcttcaagttcatggtcaaatccgtcgccgaaaagcacgggctgcgcgccaccttcatgccgaagccgttcaaggggctgaccggcaacggctgccatgcgcatatctcggtctgggatatggacggcaaggtcaacgccttcgccgacaaggaaatgcccttcggcctctcggctaaaggcaagacctttttgggtggcatcatgaaacacgcttcagcgctcgcggcggttaccaatccgacggtcaattcctacaagcgcatcaacgcgccgcgcaccatttccggcgcgacctgggcgccgaacacggtgacctggaccggcaataaccgcacccatatggtgcgtgtgccgggtccggggcgtttcgaactgcgcctgccggatggtgcggtgaacccctatctgctgcaggccatcatcatcgccgccggtctctccggcgttcgctccaaggccgatcccggcccgcactacgatatcgacatgtatcgtgaaggccataccgtcacggatgcaccgaagttgccgctcaatcttctcgatgcgctgcgcgaatatgagaaggatgcggagttgcagcaggcgctcggcatggaattctcgaaggcctatctcaagctcaagcagggggagtggaacagctattgcgcacagttcaccgcctgggagcaccagaccacgctcgacgtctga

SEQ ID NO: 32056 - protein, 435 aa, Agrobacterium tumefaciens str. C58
MTLDLSKFAAEKGIKYFMISYTDLFGGQRAKLVPAEAIADMQKGGAGFAGFATWFDLTPAHPDLFAVPDASSVIQLPWKKDVAWVAADCVMEDQPVEQAPRVMLKKLIAEAAGEGLRVKTGVEPEFFLISPDGAKISDEYDTAEKPCYDQQAVMRRYDVIAEICDYMLELGWKPYQNDHEDANGQFEMNWEYDDALQTADKHSFFKFMVKSVAEKHGLRATFMPKPFKGLTGNGCHAHISVWDMDGKVNAFADKEMPFGLSAKGKTFLGGIMKHASALAAVTNPTVNSYKRINAPRTISGATWAPNTVTWTGNNRTHMVRVPGPGRFELRLPDGAVNPYLLQAIIIAAGLSGVRSKADPGPHYDIDMYREGHTVTDAPKLPLNLLDALREYEKDAELQQALGMEFSKAYLKLKQGEWNSYCAQFTAWEHQTTLDV

SEQ ID NO: 32057 - DNA, 1422 bp, Sulfolobus tokodaii str. 7
  CDS (1)..(1422): transl_table=11
atgccaagtttacctaaaacagccgaagaggctctgaaatttctaaaagacaataaaataaaatgggtggatctacagtttacagatctacctggaagattgcatcatattacagtcccagcctcagaatttacagaagattcatttaaaacagggtttggaaaattagatggaagtagtataaaaggatttactatgatttatgaaagcgatatggtgctaatgcccataccacaaactatggcagttataccttggaatgaaggaattgctagagttataacccaggtattttggggaggaggaaagggaagattcgagagagatccaagacatattgcagaagaagcagaaaagaaacaatcagaagaaggttatattagttattttggcccagagctagaattctttatatttgataaagtagatttggatgtagccacacctcaaagcggaactggatataaaatacatgctagagaagccccatgggctagaaatggagggttcctaataagatacaaagagggttattatccagcaccacctgtagatcagctaatggatataagagtcgaggctattaatatattaactgattactttggattcaatatagaagctactcaccatgaagttgctacagctggacaaggcgaaattgatttcagattctctacattagctgatacagccgataaagttcaaacactaaaatatgtcgtaaaaaatgtagcagcaaagcatggaatgatagccacttttatgccaaaaccaatgtttggagataatgggacaggaatgcatacgcattttagtctatggacaaaagatggaaagaatctaatgtacgatcctaacgatgaatatgctgagttaagtcaaataggtagatatatagtaggaggaatattagaacatggtagagcattatcagcaatagtatcgccaaccacaaatagttatagaagattaattccaggttatgaggcacccgtatatctagtgtggagtaaatccaacagaagtgctgcaattagaataccatcatattatagaggaatggaaaaagcaaagagattagaatatagaccaccagatccctcgtgtaacccatacttggcattcgctgcaatactaatggctgctttagatggaataaagaaaaagattgagcctggtgatcctgttgatgaaaatgtatatcatatgagcgaagagaggaaaaaacagttaaaaattaaggaattacctagatcattagatgaagcattagatgagttagaaagcgacaatgagttcctaaaaccagtatttaattcatcaatattaaatacatacattgacctaaagagagacgaagcaaaaactatgcaacagtatcctcatcctatggagttatattactatttagatgcctaa

SEQ ID NO: 32058 - protein, 473 aa, Sulfolobus tokodaii str. 7
MPSLPKTAEEALKFLKDNKIKWVDLQFTDLPGRLHHITVPASEFTEDSFKTGFGKLDGSSIKGFTMIYESDMVLMPIPQTMAVIPWNEGIARVITQVFWGGGKGRFERDPRHIAEEAEKKQSEEGYISYFGPELEFFIFDKVDLDVATPQSGTGYKIHAREAPWARNGGFLIRYKEGYYPAPPVDQLMDIRVEAINILTDYFGFNIEATHHEVATAGQGEIDFRFSTLADTADKVQTLKYVVKNVAAKHGMIATFMPKPMFGDNGTGMHTHFSLWTKDGKNLMYDPNDEYAELSQIGRYIVGGILEHGRALSAIVSPTTNSYRRLIPGYEAPVYLVWSKSNRSAAIRIPSYYRGMEKAKRLEYRPPDPSCNPYLAFAAILMAALDGIKKKIEPGDPVDENVYHMSEERKKQLKIKELPRSLDEALDELESDNEFLKPVFNSSILNTYIDLKRDEAKTMQQYPHPMELYYYLDA

SEQ ID NO: 32059 - DNA, 1437 bp, Sinorhizobium meliloti 1021
  CDS (1)..(1437): transl_table=11
atgtcttccaagagaagtgttgcccaagagacagcaaaggtcagcaagagttcgaagatacccctcgccctgcatgccgcccgtggcgtgaagacctggaccgaagcggtcgactggctcaagatccgcggcatcgaagatatcgagtgcatcacgccggaccttgccggcgttgcgcgcggcaagatgatgccgacgtccaagttcacgtccaatacctcgcttgccttgccctcggcgatctaccggcacacgatttccggcgaatatccggaggagacggggcaattccgttatgattcccgcgacagcgacatcaagctcgttccggacctgtccaccctttccatcgttccatgggaaagcgacccgacggcgcaggtcatctgcgacatcgtcggctcgcagggcgagcagatcagctacaccccgcgcaatgtgctgaagcgcgtcatcgagctctaccggcagaagggctggaaaccggtggtcgcaccggagatcgaattctatctcgtcgcccagaacgacgacccggactatccgctgcggccgccgaagggccggtccggccgctcgatcctcggcggccagggctattcgatcgccggcatcaacgagttcgacgagctcatcgacgacatctaccatttttccgaaaaacaaggcctcgagatcgatacgctgattcacgaagaggggccggcccagctcgagatcaacctcaggcacggcgatccgatcgagcttgccgaccaggtcttcctgttcaagcggaccatccgcgaagcggcgctgaagcacggaatctatgcgacgttcatggccaagcccatgcagggccagcccggctccgccatgcatatccaccaatcggtgatcgacatcgagaccggccgcaacatcttctccaatcccgacggctcgccatctcaggcgttcttttccttcataggcggcatgcagctttacgtgccgcggacgttgtcgatgatggcgccctatgtgaactcctatcggcgcctcacgccggacatgtcggccccggtcaacaccgcctggggctatgacaaccggaccacggcgttccgtatccccgtctccgatccggtcgcccggcgcatcgagaaccgcctgccgagctccgatgcgaacccctacctggcgctcgcggcctcgctcggctgcggctatctcggcatcatcgagggcctgcaggcgacaccgcccacggaacacaccgccaatgagggcgaaatcgaactgccgcgagggctgctcgaggcggtttcgctgctcgaatcggctcccgcgctggcggaggtcttcagcgccgagttcatcgccatctatgccggcgtgaagcgcggcgagttcgaaaccttcatgcaggtcatcagcccgtgggaacgcgagttcctgctcctgaatgtctga

SEQ ID NO: 32060 - protein, 478 aa, Sinorhizobium meliloti 1021
MSSKRSVAQETAKVSKSSKIPLALHAARGVKTWTEAVDWLKIRGIEDIECITPDLAGVARGKMMPTSKFTSNTSLALPSAIYRHTISGEYPEETGQFRYDSRDSDIKLVPDLSTLSIVPWESDPTAQVICDIVGSQGEQISYTPRNVLKRVIELYRQKGWKPVVAPEIEFYLVAQNDDPDYPLRPPKGRSGRSILGGQGYSIAGINEFDELIDDIYHFSEKQGLEIDTLIHEEGPAQLEINLRHGDPIELADQVFLFKRTIREAALKHGIYATFMAKPMQGQPGSAMHIHQSVIDIETGRNIFSNPDGSPSQAFFSFIGGMQLYVPRTLSMMAPYVNSYRRLTPDMSAPVNTAWGYDNRTTAFRIPVSDPVARRIENRLPSSDANPYLALAASLGCGYLGIIEGLQATPPTEHTANEGEIELPRGLLEAVSLLESAPALAEVFSAEFIAIYAGVKRGEFETFMQVISPWEREFLLLNV

SEQ ID NO: 32061 - DNA, 1398 bp, Caulobacter crescentus CB15
  CDS (1)..(1398): transl_table=11
atgaagcccaagcacaacaaggccaagcgcgaccagatcctggatcgtggcgtctcgacgatcgaggaggccaaggactggttcgcccgccagcacatcgaggagatcgagtgcgtggtgcccgacctggccggcgtggcgcgcggcaagatcatgccggtgcgcaagttcctgggctcgccgtcgatgaacctgccgctggcggtgttctaccagaccatcaccggcgacttccccgagttcgagggggcggtgaacgcggtgcagtccgacacggacatcttcctgaccccagacttcgcgaccctggcggctgtgccctgggcgcaggatcccacggcgcaggtgatccacgacgctttccaccccgacggtcgcccggtcgaggaggcgccgcgccaggtgctgcggcgggtgctggcgctctatgccgacaagggctggcatccgatcgtcgcgccggagatcgagttctacctcgtcgatcgcaacaccgacccggactatccgctcaagccgccgatcggccgctcgggacggcccgagaccggacggcagggctattcgatcagcgcggtcaacgagttcgatgcgctgttcgaggacatgtacgaatactccgagcgccaggggctggagatcgacaccctgatccacgaaagcggcgtggcgcagatggagatcaacctgcagcacggccatccgctggagctggccgaccaggtgttcatgatgaagcgcacgatccgcgaggcggcgctggagcatgagatctacgccaccttcatggccaagccgatggccaatgagcccggcagcgccatgcacatccaccagtcgatcgtcgacaagaagggccgcaacctgttctcggatgaggacggggcggagtcggcgatgttccacggcttcatcgccggccagcagacctatctgccggcgatcatggccatcctggcgccttacgtgaacagctatcgccgcatctcgcgcgacagtggcgcgccggtgaacacccagtggggctatgacaaccgcacctgcggcctgcgcgtgccgccgtcgggacccaacaaccgccgggtcgaaaaccgcatcccgtcatcggacgccaatccgtacctggccatcgccgcatcgctggccgcgggctatctcggcatggtgcaggggctgaaacccagcgagccggtgtcgatcgacgccggcgctcgcgggatcgagctgccgcgcagcctgtcggactcgctccgcctgttcgtcgcctgccagccgctggtcgagatcctgggcccgaccttctgcgcggcctatgaccgcgtgaagcaggccgagtacgaaaccttcatgcgtacgatcagcccgtgggagcgggagttcctgctgctgaatgtgtga

SEQ ID NO: 32062 - protein, 465 aa, Caulobacter crescentus CB15
MKPKHNKAKRDQILDRGVSTIEEAKDWFARQHIEEIECVVPDLAGVARGKIMPVRKFLGSPSMNLPLAVFYQTITGDFPEFEGAVNAVQSDTDIFLTPDFATLAAVPWAQDPTAQVIHDAFHPDGRPVEEAPRQVLRRVLALYADKGWHPIVAPEIEFYLVDRNTDPDYPLKPPIGRSGRPETGRQGYSISAVNEFDALFEDMYEYSERQGLEIDTLIHESGVAQMEINLQHGHPLELADQVFMMKRTIREAALEHEIYATFMAKPMANEPGSAMHIHQSIVDKKGRNLFSDEDGAESAMFHGFIAGQQTYLPAIMAILAPYVNSYRRISRDSGAPVNTQWGYDNRTCGLRVPPSGPNNRRVENRIPSSDANPYLAIAASLAAGYLGMVQGLKPSEPVSIDAGARGIELPRSLSDSLRLFVACQPLVEILGPTFCAAYDRVKQAEYETFMRTISPWEREFLLLNV

SEQ ID NO: 32063 - DNA, 1383 bp, Agrobacterium tumefaciens str. C58
  CDS (1)..(1383): transl_table=11
atggaaacggcttgctggtgcataatgtatgatattgaaaacgcaaagaaatttttcgctgataatcccgatatcgaaattctcgaagctttcgtcatagatgcgaacggcgttccgcgcggtaaatggattccgcgtgagagagcaattgacgtgcttgaaaagggaatggcgatcccgcgatccgtttatgcgctggatatctggggccgggatgtgcacgccgcaggtctcgccgaaggcacgggtgatcctgatggtttttgtttccccgttcccggtacgctgtcacgggtaacatggcttggccggccgacggcgcaggttctgctggcgatgaaaaacgcggatgggaccggattttatggtgatccgcgccatgttctgtcgcaggttctgaacgcctataaaaaggctggcctcacgccggtcgtggcgaccgaactggaattctacctcatcgatcccgtccgctcggcgcttgacccggtgcgcccgccgcacagccgcgaaggtcgctggcacaccggccagacgcaggttctatcgatttccgaattgcaggatttcgaggatgtcttccatgatatcgcgacagcctgccgcgcccagggtgtgcttgcagatacgacgctgcgggaaaatggccccgggcaatatgagatcaacctcaaccacgtgccggatgccctgcaggccgccgattttgccgtcttcctgaaacgcatcgtcaaaggtgtggcgcgacggcacgaactcgacgccaccttcatggccaagccctatgggctgcaggccggcaacggcatgcatgtgcatttttccgttctcgacagggacggcaggaatatctacgccggggaaaacggtccgtcggatgcgctgatgcactcggtcggcggcctgttggaaaacatgggggagagcatggcgatcttcgctccccatgccaattcctatcgccgcctcaccccaagcgaacacgcgccgacctacgcttcgtggggtatcgacaaccgctcggcggcggtccgcgtcatcgtggccagcaaggcggcaacccgcatcgaacaccgcgtcgccggcgccgacaccaatccctacctggtcctcgcgatgatcctcagcgccgctatcgccggcatgaaggagaagcgccagcccggcggcgcgattgccggtgacagccacgcgatcaatcacgaaccgcttcccaccaactgggactatgcattgcagcgcttcacgcgttcgagctttgcctatgcgacgctcggccagaagtaccgcacgctgttttccgcctgcaagcagcaggagctttccgaattttccctgcgtgtaaccgacgtcgaatatgacgcctatatcaggacggtgtga

SEQ ID NO: 32064 - protein, 460 aa, Agrobacterium tumefaciens str. C58
METACWCIMYDIENAKKFFADNPDIEILEAFVIDANGVPRGKWIPRERAIDVLEKGMAIPRSVYALDIWGRDVHAAGLAEGTGDPDGFCFPVPGTLSRVTWLGRPTAQVLLAMKNADGTGFYGDPRHVLSQVLNAYKKAGLTPVVATELEFYLIDPVRSALDPVRPPHSREGRWHTGQTQVLSISELQDFEDVFHDIATACRAQGVLADTTLRENGPGQYEINLNHVPDALQAADFAVFLKRIVKGVARRHELDATFMAKPYGLQAGNGMHVHFSVLDRDGRNIYAGENGPSDALMHSVGGLLENMGESMAIFAPHANSYRRLTPSEHAPTYASWGIDNRSAAVRVIVASKAATRIEHRVAGADTNPYLVLAMILSAAIAGMKEKRQPGGAIAGDSHAINHEPLPTNWDYALQRFTRSSFAYATLGQKYRTLFSACKQQELSEFSLRVTDVEYDAYIRTV

SEQ ID NO: 32065 - DNA, 1395 bp, Agrobacterium tumefaciens str. C58
  CDS (1)..(1395): transl_table=11
atggcaaagaagtctcctcccctcgatctctcctccacccgtggcgtttcctcctggcgcgaagccgcgcaatggctgcgcgtgcgcgggatcgaagacatagaatgcatcacgcccgaccttgccggggttgcgcgcggaaagatgatgccgacggcgaaattcacgggcgatacctcgctcgcgctgccgtccgcgctctaccgccacacgatatcaggcgaatatcctgatgagacggcgaacttccgttacgagccgcgcgacagcgacctgaaactagtgccggatctttcgacgctgtccgtcgtgccgtgggagagcgacccaaccgcgcaggtgatctgcgacgttgtggatgccgagggtaatttcgttccctacacgccgcgcaacgtgctgaagaacgtgctttcgctctataccgaaaagggctggaagccggtcgtagcacccgaaatcgaattttatctcgtcgccatgaatgacgatccggattatccgctgcatccgccgaagggccgctccggccgctccatcgttggcggtcagagctattccatcgccggcatcaacgaattcgacgagctgatcgacgacatctaccatttctcggaaaaacagggtctcgagatcgatacgctgatccacgaggaaggcccggcgcagctggaaatcaacctgcgccacggcgacccgatcgaacttgccgaccaggtgtttcttttcaagcgcaccattcgcgaggccgcgctgaaacacggcatctacgccaccttcatggcaaagccgatgcagggccagccaggttcggccatgcatatccatcagtcggtggtggaaatcgatggcggacgcaatatcttctccaatgccgatggcagtccttcgaaggtattcttctccttcgtcggcggcatgcagcgttatgttccaaacgcactcgtcatgctggcgccctatgtgaattcctatcgccgcctgacgcccgacatggcctgcccggtcaacaatgcctggggttacgacaaccgcaccacggctttccgggtgccgatttccagcccgcaggcgcgtcgcgtcgaaaaccgcctgccgagttcggacgccaatccgtacctggcgcttgccgcttcgctcggctgcggctggcttggcatcgtcaacaatatcgagccgaccgaacccaccgccgatacggccaatgaaggctccatcgaactgccgcgtggtctccttgaggccgtggcgctgctggaaggcgaggaacagttcgaccgggtgttcggccatgaattcgtgggcctttatgccggcctgaaacgcggggaattcgagaccttcatgcaggtcatcagcccctgggagcgcgagttcctgcttctcaacgtgtga

SEQ ID NO: 32066 - protein, 464 aa, Agrobacterium tumefaciens str. C58
MAKKSPPLDLSSTRGVSSWREAAQWLRVRGIEDIECITPDLAGVARGKMMPTAKFTGDTSLALPSALYRHTISGEYPDETANFRYEPRDSDLKLVPDLSTLSVVPWESDPTAQVICDVVDAEGNFVPYTPRNVLKNVLSLYTEKGWKPVVAPEIEFYLVAMNDDPDYPLHPPKGRSGRSIVGGQSYSIAGINEFDELIDDIYHFSEKQGLEIDTLIHEEGPAQLEINLRHGDPIELADQVFLFKRTIREAALKHGIYATFMAKPMQGQPGSAMHIHQSVVEIDGGRNIFSNADGSPSKVFFSFVGGMQRYVPNALVMLAPYVNSYRRLTPDMACPVNNAWGYDNRTTAFRVPISSPQARRVENRLPSSDANPYLALAASLGCGWLGIVNNIEPTEPTADTANEGSIELPRGLLEAVALLEGEEQFDRVFGHEFVGLYAGLKRGEFETFMQVISPWEREFLLLNV

SEQ ID NO: 32067 - DNA, 1365 bp, Agrobacterium tumefaciens str. C58
  CDS (1)..(1365): transl_table=11
atgacgagctacacattcgacgcacttaaaatggatgtcgccgaggggcgcatcgacactgttctggcctgccttgtcgacatgcaggggcgtctgatgggcaaacggttccaggcggaattcttcgttgaaagcgcctttgaggaaacccatagctgcaactatgtgcttgccaccgacatggagatggaaaccgttcccggttacaagtcctcgagctgggaaaagggatatggcgattatacgctgaagcccgacctttcgacgctgcggaaggtgccgtggctggaaggtacggcgctggttttgtgcgacgtgctcgaccatcacacccatgaagaagtgccgcattcgccgcgcgcgctcctgaaaaagcaggtggcgcggctggaggcgatggggctgaaggcctatatggcgaccgaactagaattctttctgttcgaccagaccttcgatgcggcgcgcgccagcggttataaagacctcaatctcgccagcggctataatgaggattaccatatcttccagacgaccaaggaagaggatgtcatgcgggcgttgcgcaagggcctgcagggtgcgggaattccggtcgagaattccaagggcgaggcgtctcccggtcaggcggaaatcaatgtgcgttatgccgaggcgctgaccatggctgaccggcacgccatcatcaagaacgccaccaaggagatcgcctggtcgaagggcaaggcagtcacgttccttgccaagtggaactacaatgccgcgggcagttcatcgcatatccaccagtcgctctggagcctggacggtaagccggccttcctcgacaaggatggcgaacatggcatgtcggatgtgatgcggcattatgttgccgggcttctggcgcatgccagcgacatcacctatttcctggcgccatacatcaattcctacaagcgcttcatggctggcacgtttgcgccgacaaaggcgatctggagcctcgacaaccgcacggcaggataccgcctttgcggcgcggaaaccaagggcatccgtatcgagtgccgcgtcggcgggtcggacctcaatccctatctcgccatggccgctcttcttgcagcgggcattgacggtatcgaaaataaactcgaacttgagcccgcttttgtcggtgatgcctatggcggtaaggacgtgcgcgagatacccaagacattacgcgacgcgaccgcctttctggacggatcgaaaatgctgcgccaggcctttggcgacgacgtggtcgatcactacgtgcatgccgcaaggtgggagcaggaagaatacgaccgccgcgtgaccgactgggaagtggcacgcggtttcgagcgagcgtga

SEQ ID NO: 32068 - protein, 454 aa, Agrobacterium tumefaciens str. C58
MTSYTFDALKMDVAEGRIDTVLACLVDMQGRLMGKRFQAEFFVESAFEETHSCNYVLATDMEMETVPGYKSSSWEKGYGDYTLKPDLSTLRKVPWLEGTALVLCDVLDHHTHEEVPHSPRALLKKQVARLEAMGLKAYMATELEFFLFDQTFDAARASGYKDLNLASGYNEDYHIFQTTKEEDVMRALRKGLQGAGIPVENSKGEASPGQAEINVRYAEALTMADRHAIIKNATKEIAWSKGKAVTFLAKWNYNAAGSSSHIHQSLWSLDGKPAFLDKDGEHGMSDVMRHYVAGLLAHASDITYFLAPYINSYKRFMAGTFAPTKAIWSLDNRTAGYRLCGAETKGIRIECRVGGSDLNPYLAMAALLAAGIDGIENKLELEPAFVGDAYGGKDVREIPKTLRDATAFLDGSKMLRQAFGDDVVDHYVHAARWEQEEYDRRVTDWEVARGFERA

SEQ ID NO: 32069 - DNA, 1431 bp, Brucella melitensis 16M
  CDS (1)..(1431): transl_table=11
atgtctgctgatacgacggaaaagaaggctacgcgcacaccgcgtcgccgtacgcctgcttatgtcaaatctctgcgcggggtgaaaaactggaaacaggcaactgaatggctggcctggcgcgatattgaagatattgagtgcattacccccgatcaggcgggggttgcgcgcggcaagatgatgccatcgaagaaattcacatccaacacatcgctggcgctgccttccgccgttttcatgacgacgatttccggcgcttaccccgaggatggctatggtttccattatcccgaagacgatggcgacctgaagcttctgcccgatcttaccaccctctctgccgtgccatgggaaacggattcgacggcgcaggtgatctgcgatctcgtctatcaggacgggcgcgcggtggaattcaccccgcgcaatgtgctgcgcaatgtcattgccgcctatagcaagcgcggcctgaagccggttgtcgccccggaaatcgagttttatctggtgcgcaaaaacccggatccggactatccgctgacgccgcctgttggccgttcgggccgggccattggtggcggacagggctattccattgccggtgtcaacgagttcgatgaactgatcgacgatatctatcatttctcggaaggtcaggggctggagatcgacacgctgatccatgaagaaggtgctggccagcttgaaataaacctgcgccatggcgacccggtggaactggccgatcaggttttcatgttcaagcgcacgatccgcgaggcggcactgaaacacgatatgtacgccacgttcatggccaagcccattcagggccagccgggctcggccatgcatatccaccagtccatcgtggacaagaagaccggacgaaacatcttcaccaatgaagacggcagcgaaagccaagccttccaccatttccttggcgggatgcagcgccatgtgcccaatgcactcgtcatgttcgccccttatgtgaactcctaccgccgcctcacgccggacgcctcggccccggtcaacgtcaaatggggctatgacaaccgcacaaccgccttccgcgtgccgcgttcagaccccagtgcgcgccgcgtggaaaaccgcatcccctcttccgacgccaatccctaccttgcccttgctgcttcgcttgcttgcggcctgatcggccttgtaaacaagatcgagccggaacagcccgcgaccacgagcgtcaacaccaaggaggtcgagttgccccgcggcctcatcgacgcggtggagcttttcgaggaagacgccgaattgcgcaatctgttcggcagttccttcatgaccacctatgccgccatcaaacgcgccgagttcgagaccttcatggaagtcatcagcccctgggaacgggagtttttgttgctcaatgtttaa

SEQ ID NO: 32070 - protein, 476 aa, Brucella melitensis 16M
MSADTTEKKATRTPRRRTPAYVKSLRGVKNWKQATEWLAWRDIEDIECITPDQAGVARGKMMPSKKFTSNTSLALPSAVFMTTISGAYPEDGYGFHYPEDDGDLKLLPDLTTLSAVPWETDSTAQVICDLVYQDGRAVEFTPRNVLRNVIAAYSKRGLKPVVAPEIEFYLVRKNPDPDYPLTPPVGRSGRAIGGGQGYSIAGVNEFDELIDDIYHFSEGQGLEIDTLIHEEGAGQLEINLRHGDPVELADQVFMFKRTIREAALKHDMYATFMAKPIQGQPGSAMHIHQSIVDKKTGRNIFTNEDGSESQAFHHFLGGMQRHVPNALVMFAPYVNSYRRLTPDASAPVNVKWGYDNRTTAFRVPRSDPSARRVENRIPSSDANPYLALAASLACGLIGLVNKIEPEQPATTSVNTKEVELPRGLIDAVELFEEDAELRNLFGSSFMTTYAAIKRAEFETFMEVISPWEREFLLLNV

SEQ ID NO: 32071 - DNA, 1434 bp, Corynebacterium glutamicum ATCC 13032
  CDS (1)..(1434): transl_table=11
gtggcgtttgaaaccccggaagaaattgtcaagttcatcaaggatgaaaacgtcgagttcgttgacgttcgattcaccgaccttcccggcaccgagcagcacttcagcatcccagctgccagcttcgatgcagatacaatcgaagaaggtctcgcattcgacggatcctcgatccgtggcttcaccacgatcgacgaatctgacatgaatctcctgccagacctcggaacggccacccttgatccattccgcaaggcaaagaccctgaacgttaagttcttcgttcacgatcctttcacccgcgaggcattctcccgcgacccacgcaacgtggcacgcaaggcagagcagtacctggcatccaccggcattgcagacacctgcaacttcggcgccgaggctgagttctacctcttcgactccgttcgctactccaccgagatgaactccggcttctacgaagtagataccgaagaaggctggtggaaccgtggcaaggaaaccaacctcgacggcaccccaaacctgggcgcaaagaaccgcgtcaagggtggctacttcccagtagcaccatacgaccaaaccgttgacgtgcgcgatgacatggttcgcaacctcgcagcttccggcttcgctcttgagcgtttccaccacgaagtcggtggcggacagcaggaaatcaactaccgcttcaacaccatgctccacgcggcagatgatatccagaccttcaagtacatcatcaagaacaccgctcgcctccacggcaaggctgcaaccttcatgcctaagccactggctggcgacaacggttccggcatgcacgctcaccagtccctctggaaggacggcaagccactcttccacgatgagtccggctacgcaggcctgtccgacatcgcccgctactacatcggcggcatcctgcaccacgcaggcgctgttctggcgttcaccaacgcaaccctgaactcctaccaccgtctggttccaggcttcgaggctccaatcaacctggtgtactcacagcgcaaccgttccgctgctgtccgtatcccaatcaccggatccaacccgaaggcaaagcgcatcgaattccgcgctccagacccatcaggcaacccatacctgggctttgcagcgatgatgatggccggcctcgacggcatcaagaaccgcatcgagccacacgctccagtggacaaggacctctacgaactaccaccagaggaagctgcatccattccacaggcaccaacctccctggaagcatccctgaaggcactgcaggaagacaccgacttcctcaccgagtctgacgtcttcaccgaggatctcatcgaggcgtacatccagtacaagtacgacaacgagatctccccagttcgcctgcgcccaaccccgcaggaattcgaattgtacttcgactgctaa

SEQ ID NO: 32072 - protein, 477 aa, Corynebacterium glutamicum ATCC 13032
MAFETPEEIVKFIKDENVEFVDVRFTDLPGTEQHFSIPAASFDADTIEEGLAFDGSSIRGFTTIDESDMNLLPDLGTATLDPFRKAKTLNVKFFVHDPFTREAFSRDPRNVARKAEQYLASTGIADTCNFGAEAEFYLFDSVRYSTEMNSGFYEVDTEEGWWNRGKETNLDGTPNLGAKNRVKGGYFPVAPYDQTVDVRDDMVRNLAASGFALERFHHEVGGGQQEINYRFNTMLHAADDIQTFKYIIKNTARLHGKAATFMPKPLAGDNGSGMHAHQSLWKDGKPLFHDESGYAGLSDIARYYIGGILHHAGAVLAFTNATLNSYHRLVPGFEAPINLVYSQRNRSAAVRIPITGSNPKAKRIEFRAPDPSGNPYLGFAAMMMAGLDGIKNRIEPHAPVDKDLYELPPEEAASIPQAPTSLEASLKALQEDTDFLTESDVFTEDLIEAYIQYKYDNEISPVRLRPTPQEFELYFDC

SEQ ID NO: 32073 - DNA, 1341 bp, Corynebacterium glutamicum ATCC 13032
  CDS (1)..(1341): transl_table=11
atgaacagcgaacaggaatttgtactcagcgccattgaagaacgcgacattaagtttgtgcgtctatggttcactgacattcttggccacttgaagtcagtggttgtggctcctgcagaactagagtctgcgttggaagaaggcatcggattcgatggctcagccattgagggctacgcgcgtatctcggaagcggacaccattgcccgcccagatccatcgacattccaggtcctcccactagaagcgggcatctcaaaactgcaggcagcacgcctgttttgcgatgtcacgatgccagacggacagccatctttttctgacccgcgccaagtgctgcgcaggcaggtccaactagctgcagatgaaggcttgacctgcatgatctcaccagagattgagttctatttggtgcaaagccttcgcaccaacggactgccacctgtgcccactgacaacggcggatatttcgaccaagccacattcaatgaggcgccgaatttccgtcgaaacgcgatggtagcgctggaggaactcggcatccctgtcgagttctcccaccatgaaactgcacctggccagcaagaaatcgatttacgccatgcggatgcgctcaccatggccgacaacatcatgaccttccgctacatcatgaaacaggtggcaagggaccaaggcgtcggggcatcatttatgcccaagccattccaagaacatgcaggctccgccatgcacacgcacatgtccttatttgagggcgataccaacgcgttccacgatccagacgattcttacatgctgtccaaaaccgcaaaacagttcatcgctggaatcttgcatcacgctccagaattcaccgctgtgaccaaccagtgggtcaattcctacaaacgcatcgtgtacggaaacgaagctccaactgcggcaacctggggtgtatctaatcgttctgcgctggttcgtgttcctacctaccgtttgaataaggaggagtcgcgccgggtggaggtgcgtcttcctgataccgcttgtaacccatatttggcgttttcagtgatgctcggcgctggtttgaaaggcattaaagaaggttatgagctcgacgagccagctgaggacgatatctccaacttgagcttccgggaacgtcgcgccatgggctacaacgatctgccaagcagccttgatcaggcactgcgccaaatggaaaagtcagagcttgttgctgacatcctcggtgagcacgtttttgagtttttcttgcgcaataagtggcgtgaatggcgtgactaccaagagcagatcactccgtgggagctccgaaacaatcttgattactag

SEQ ID NO: 32074 - protein, 446 aa, Corynebacterium glutamicum ATCC 13032
MNSEQEFVLSAIEERDIKFVRLWFTDILGHLKSVVVAPAELESALEEGIGFDGSAIEGYARISEADTIARPDPSTFQVLPLEAGISKLQAARLFCDVTMPDGQPSFSDPRQVLRRQVQLAADEGLTCMISPEIEFYLVQSLRTNGLPPVPTDNGGYFDQATFNEAPNFRRNAMVALEELGIPVEFSHHETAPGQQEIDLRHADALTMADNIMTFRYIMKQVARDQGVGASFMPKPFQEHAGSAMHTHMSLFEGDTNAFHDPDDSYMLSKTAKQFIAGILHHAPEFTAVTNQWVNSYKRIVYGNEAPTAATWGVSNRSALVRVPTYRLNKEESRRVEVRLPDTACNPYLAFSVMLGAGLKGIKEGYELDEPAEDDISNLSFRERRAMGYNDLPSSLDQALRQMEKSELVADILGEHVFEFFLRNKWREWRDYQEQITPWELRNNLDY

SEQ ID NO: 32075 - DNA, 1389 bp, Streptomyces coelicolor A3(2)
  CDS (1)..(1389): transl_table=11
atgtctcccggccagaaggaggctctccccgtggcagaccgcacacccccgctcggggtcgaggaactgcacgccctcgtcgccgccggtgacatcgacaccgtcgtcctcgccttccccgacatgcagggccgcctccagggcaagcggttcgccgcccggttcttcctcgatgaggtcctggaacacggcaccgagggctgcaactacctcctcgccgtggacgccgacatgaacaccgtcgacggctacgccatgtcctcctgggaccgcggctacggcgacttcgccatgcgcgccgacccggccaccctgcgccggctcccctggaacgagggcaccgcgatggccgtcgccgacctcgcctgggaggacggctccccggtgctcgccgcgccccgccagatcctgcgccgccagctggagcggctcgccggacacgggtacaccgcacaggtcggcaccgagctggagttcatcgtcttccgggacacctacgaacacgcctgggacgcgaactaccgcggcctgaccccggccaaccagtacaacgtcgactactccgtcctcggcaccggccgcgtcgaacccctgctgcgccgcatccgcaacgagatggccggcgccggcctcaccgtcgagtccgccaagggcgagtgcaaccccggccagcacgagatcgccttccgctacgacgaggccctggtcacctgcgaccagcacgccgtctacaagaccggcgccaaggagatcgccgcccaggagggcatgtccctcaccttcatggccaagtacaacgagctggaaggcaactcctgccacatccacctctcgctcgccgacgccgacggccgcaacgccatggccgagggagggggaatgtccgacgtcatgcggcacttcctcgccggacagctggtggcgctgcgcgagttctccctcctctacgccccgcacatcaactcctacaagcgcttccagcccggttccttcgcccccaccgccgtcgcctggggccacgacaaccgcacctgcgccctgcgcgtcgtcggccacggccgctccctccgtttcgagaaccggctccccggcggcgacgtcaacccctacctcgcggtggccggcctggtcgcggccggattgcacggcatcgagcagcggctggaactgcccgagccctgccccggcaacgcgtacaccgccgacttcgcgcacgtccccaccaccctgcgcgaggccgccgagctgtgggagaacagcaccctggccaaggccgccttcggggacgaggtcgtcgcccactaccggaacatggcccgcgtcgaactggacgccttcgacgccgccgtcaccgactgggaactgcgccgctccttcgaacgcatgtga

SEQ ID NO: 32076 - protein, 462 aa, Streptomyces coelicolor A3(2)
MSPGQKEALPVADRTPPLGVEELHALVAAGDIDTVVLAFPDMQGRLQGKRFAARFFLDEVLEHGTEGCNYLLAVDADMNTVDGYAMSSWDRGYGDFAMRADPATLRRLPWNEGTAMAVADLAWEDGSPVLAAPRQILRRQLERLAGHGYTAQVGTELEFIVFRDTYEHAWDANYRGLTPANQYNVDYSVLGTGRVEPLLRRIRNEMAGAGLTVESAKGECNPGQHEIAFRYDEALVTCDQHAVYKTGAKEIAAQEGMSLTFMAKYNELEGNSCHIHLSLADADGRNAMAEGGGMSDVMRHFLAGQLVALREFSLLYAPHINSYKRFQPGSFAPTAVAWGHDNRTCALRVVGHGRSLRFENRLPGGDVNPYLAVAGLVAAGLHGIEQRLELPEPCPGNAYTADFAHVPTTLREAAELWENSTLAKAAFGDEVVAHYRNMARVELDAFDAAVTDWELRRSFERM

SEQ ID NO: 32077 - DNA, 1362 bp, Streptomyces coelicolor A3(2)
  CDS (1)..(1362): transl_table=11
atggacaagcagcaggagttcgtgatccggacgctggaggagcgcgacatccggttcgtacgcctgtggttcacggacgtgctgggcttcctcaagtccgtcgccgtggccccggccgagctggagcaggccttcgacgagggcatcggcttcgacggctccgcgatcgagggcttcgcccgggtctacgagtccgacatgatcgccaagccggacccgtcgaccttccaggtcctgccgtggcgcgcggaggcccccggcacggcccgtatgttctgcgacatcctcatgccggacggctcgccgtccttcgcggacccgcgctacgtgctcaagcgggccctggcccgcacctccgacctgggcttcaccttctacacccacccggagatcgagttcttcctgctgaaggacaagcccgtcgacggctcggtcccgacccccgccgacaactccggctacttcgaccacaccccgcagaacatcggcatggacttccgccgccaggcgatcaccatgctggagtcgatgggcatctcggtggagttctcccaccacgagggtgcccccggccagcaggagatcgacctgcgctacgcggacgcgctctccacggccgacaacgtcatgaccttccgcctggtcatgaagcaggtggccctcgaacagggcctccaggccaccttcatgccgaagccgttctcggagtatcccggctcgggcatgcacacccacctctccctcttcgagggcgaccgcaacgcgttctacgagtccggcgcggagtaccagctctccaaggtgggccgctccttcatcgcgggcctgctgcgccacgccgccgagatctccgcggtcaccaaccagtgggtgaactcctacaagcgcatctggggcggtaccgagcgcaccgccggcgcgggcggcgaggccccctcctacatctgctggggccacaacaaccgctcggccctggtccgggtcccgatgtacaagcccggcaagaccggctcggcccgcgtcgaggtccgctccatcgactccggcgccaacccgtacctcacctacgccgtcctcctcgccgccggcctcaagggcatcgaggagggctacgaactcccgccgggcgccgaggacgacgtctgggccctctccgacgcggagcgccgcgccctgggcatcgagcccctcccccagaacctgggcgaggctctcgccctgatggaacgcagcgacctggtcgccgagaccctgggcgaacacgtcttcgacttcttcctccgcaacaagcgccaggagtgggaggagtaccggtcccaggtgacggcgttcgagctgcggaagtcgctgccggtgctgtag

SEQ ID NO: 32078 - protein, 453 aa, Streptomyces coelicolor A3(2)
MDKQQEFVIRTLEERDIRFVRLWFTDVLGFLKSVAVAPAELEQAFDEGIGFDGSAIEGFARVYESDMIAKPDPSTFQVLPWRAEAPGTARMFCDILMPDGSPSFADPRYVLKRALARTSDLGFTFYTHPEIEFFLLKDKPVDGSVPTPADNSGYFDHTPQNIGMDFRRQAITMLESMGISVEFSHHEGAPGQQEIDLRYADALSTADNVMTFRLVMKQVALEQGLQATFMPKPFSEYPGSGMHTHLSLFEGDRNAFYESGAEYQLSKVGRSFIAGLLRHAAEISAVTNQWVNSYKRIWGGTERTAGAGGEAPSYICWGHNNRSALVRVPMYKPGKTGSARVEVRSIDSGANPYLTYAVLLAAGLKGIEEGYELPPGAEDDVWALSDAERRALGIEPLPQNLGEALALMERSDLVAETLGEHVFDFFLRNKRQEWEEYRSQVTAFELRKSLPVL

SEQ ID NO: 32079 - DNA, 1401 bp, Streptomyces coelicolor A3(2)
  CDS (1)..(1401): transl_table=11
gtgagcgagagcgaccccgtgcccggcgggcgccccggcgaggtcgagcgggccaccgcgctgagcggcgagctgaccgggcagggcgtgcacggcgtggtgctggcgtacgtcgacaccgccgggatcgcccgggtgaagaccgtgcccaccgcgaagctcgccgcggccgcggcctggggcgtcggcatgtccccggtgttcgacaccttcctggccgacgactcgatcgtcggcacggacgtcctcggctcccccgacggcgacctgcgcctctaccccgacctcgaccggctgaccatgctcgcggcacagcccggctgggcgtgggcgccggtagaccggatcacgcaggagggcgccccgcacccggcgtgcgggcgcaccgtgctgcgccggatcgtggccggggcggccgaacggcacggcatcaccttcagggccgccgtcgaggtcgagtgggtcgtgggccggggcgacgcgggcggcgacgcgttcgtcccggcggtgtccggaccggcgtacggcgcggcccggcaggtggagctgagcgactgcgccgccgacctgctggcggcgctggcggcgcagggcgtggacgtggagcagttccatcccgagtacgcggcggggcagttcgaggtctcggtgggggcgctcggcccggtggcggcggccgaccacagcgtgctggtgcggcagacgatccgggcggtctcggctcggcacgggctgcgcgtctccttcgccccggccgtcctcggacagggtgtcggcaacggcgggcacctccacctctccgcctggcgcgacgggacgaacctgcacgcgggcgggaccgcccgctgcgggatgaccgccgaggcggagtccttcgtggccggggtgctcggccacctcccggcgctcacggcgctgaccgcgccgagcccggcgagccgactgcggctgcggccctcgcagtgggccggggtgttcaccgcctggggccgggagacccgcgaggccgcgctgcggatcgtgaccggcaccgccgggatccgcgaccgcgcggcgaacctggaggtgaagccggtcgacctcgccgccaacccgtacctcgccctcgcctcggtgatcgcggccggactggacgggctggcctcgtccgctccactgcccgaggagatcaccggcgacccggcccggctcgatcccgccgcggccgccgcccggggcgtgcggcggctgccggtcacgctcacggagtcggtggccgccttccggaccgacggcgtactgcgcgaggcgctgggtccggtgctggccgacgcggtgatcgccgtgcggctgggcgaggcggggtcggtcgaggggctggacgacgacggtgtggcggcggcgtaccgctggaagtactga

SEQ ID NO: 32080 - protein, 466 aa, Streptomyces coelicolor A3(2)
MSESDPVPGGRPGEVERATALSGELTGQGVHGVVLAYVDTAGIARVKTVPTAKLAAAAAWGVGMSPVFDTFLADDSIVGTDVLGSPDGDLRLYPDLDRLTMLAAQPGWAWAPVDRITQEGAPHPACGRTVLRRIVAGAAERHGITFRAAVEVEWVVGRGDAGGDAFVPAVSGPAYGAARQVELSDCAADLLAALAAQGVDVEQFHPEYAAGQFEVSVGALGPVAAADHSVLVRQTIRAVSARHGLRVSFAPAVLGQGVGNGGHLHLSAWRDGTNLHAGGTARCGMTAEAESFVAGVLGHLPALTALTAPSPASRLRLRPSQWAGVFTAWGRETREAALRIVTGTAGIRDRAANLEVKPVDLAANPYLALASVIAAGLDGLASSAPLPEEITGDPARLDPAAAAARGVRRLPVTLTESVAAFRTDGVLREALGPVLADAVIAVRLGEAGSVEGLDDDGVAAAYRWKY

SEQ ID NO: 32081 - DNA, 1386 bp, Xanthomonas campestris pv. campestris str. ATCC 33913
  CDS (1)..(1386): transl_table=11
atgtcgatccgtacacgttcgcgcaagtccacgcccaagcagccggagagcgcgctgcgccgttggctcaaggagcgccacatcaccgaagtggagtgcctggtgccagacatcaccggcaatgcgcgcggcaagatcattccagccgacaagttctcccatgactacggcacgcgcctgcccgaaggcatcttcgccaccacggtcaccggcgattttccggacgattactacgcgctgacctcgccatcggattcggacatgcacctgcgcccggatgcctccaccgtgcgcatggtgccgtgggccgccgatcccaccgcgcaggtcatccacgattgctacaccaaggacgggcagccgcacgaactggcgccgcgcaacgtgctgcgccgcgtgctcgaggcctatgccgaggtcaagttgcagccggtggtggcgccggaactggaattttttctggtgcagaaaaacaccgacccggattttccgctgctgccgccggcagggcgctccgggcgcccggaaaccgcacggcagtcgtattcgatcgatgcggtgaacgagttcgacccgatcctggatctgatgtacgactattgcgatgcgatggagctggacgtggataccttgatccacgaatccggcgccgcgcagctggaagtcaatttcacccacgccgatgcgttgtcgcgcgccgaccaggtgttcctgttcaaacgcaccatgcgcgaggcggcgctgcggcacggcgtgtatgccaccttcctggccaaaccgatggagaccgagcccggcagtgcgatgcatatccatcagagcctgttgcatgccggcaccggcaagaacgtgttcagcggcaagcgcgagggcggcttcagcgacacctttgcgcattatctgggcgggctgcagaaatacattccgatggcgatggggctgctggcgcccaacgtcaattcgtaccggcggctgatgttcggcgaggtctcgccaagcaatgtgctgtggggcttcgacaaccgcacctgcgggttgcgggtgccgatcgatgcgccgcagaacatgcgggtggagagccggtttgcaggctccgatgccaacccgtacctggcgatggcagcgactttggcatgcgggctcctgggcatccgcgagaagctggagccgaccgcgccgatcagcagcaacggcaaggagcagggctacgatttgccgcggtcgttgggggaggcgttggatgagttggaggggtgtgaggcgttgaaggagatgttggggccgcggtttgtgcgggcctatatttctgtgaagcggaaagaatacgagacgtttttccgggtgatcagttcgtgggagcgggagttcttgttgttgaatgtgtga

SEQ ID NO: 32082 - protein, 461 aa, Xanthomonas campestris pv. campestris str. ATCC 33913
MSIRTRSRKSTPKQPESALRRWLKERHITEVECLVPDITGNARGKIIPADKFSHDYGTRLPEGIFATTVTGDFPDDYYALTSPSDSDMHLRPDASTVRMVPWAADPTAQVIHDCYTKDGQPHELAPRNVLRRVLEAYAEVKLQPVVAPELEFFLVQKNTDPDFPLLPPAGRSGRPETARQSYSIDAVNEFDPILDLMYDYCDAMELDVDTLIHESGAAQLEVNFTHADALSRADQVFLFKRTMREAALRHGVYATFLAKPMETEPGSAMHIHQSLLHAGTGKNVFSGKREGGFSDTFAHYLGGLQKYIPMAMGLLAPNVNSYRRLMFGEVSPSNVLWGFDNRTCGLRVPIDAPQNMRVESRFAGSDANPYLAMAATLACGLLGIREKLEPTAPISSNGKEQGYDLPRSLGEALDELEGCEALKEMLGPRFVRAYISVKRKEYETFFRVISSWEREFLLLNV

SEQ ID NO: 32083 - DNA, 1386 bp, Xanthomonas axonopodis pv. citri str. 306
  CDS (1)..(1386): transl_table=11
atgtccatccgcacacgttcgcgcaagaccacgtccacgcagccggagagcgcgctgcgccgctggctcaaggagcgcagcatcaccgaggtggaatgcctggtgccggacatcaccggcaacgcccgcggcaagatcattcccgccgacaagttctcgcacgattacggcacgcgcctgccggaaggcatcttcgccactaccgtgaccggcgatttcccggacgactactacgcgctgacctcgccatcggattcggacatgcatctgcgcccggacgccagcaccgtgcgcatggtgccgtgggcggcagaccccactgcgcaggtcatccacgactgctataccaaggatggccagccgcacgaacttgccccgcgcaacgtgctgcgccgcgtgctggatgcctatgcccaggccgagctgcaaccggtggtggcgccagagctggaattcttcctggtgcagaaaaacaccgaccccgacttcccgctgttgccgccggccgggcgctcggggcggccggaaacggcgcggcagtcgtactcgatcgacgcagtcaacgagttcgaccccatcctggacctgatgtacgactattgcgatgcgatggaactggacgtggacacgctgatccacgaatccggcgccgcgcagttggaagtcaacttcacccatgccgacccgatgtcgcgcgcggaccaggtgttcctgttcaagcgcaccatgcgcgaagccgcgctgcggcacggtgtgtatgccacgttcctggccaagccaatggaaaccgagccaggcagtgcgatgcatatccaccagagcctgctgcatgccggcaccggcaagaacgtgttcagcggcaagcgcgagggcggtttcagcgataccttcgcgcattatctgggtggcctgcagaaatacatcccgatggcgatgggcctgctggcgcccaacgtcaattcttaccggcggttgatgttcggcgaggtgtcgccgagcaatgtgctgtggggcttcgacaaccgcacctgcgggctgcgcgtgcccatcgatgtgccgcagaacatgcgggtggaaagccgcttcgccggctcagacgccaacccgtatctggccatggccgcgacgctggcctgcgggttattggggatcggcgaaaagctcgagccgaccgcgccgatcagcagcaatggcaaggagcaaggctacgatttgccgcgctcgctgggcgaggcgctagatgagctggaaggctgccaggcgttgcaggagatgttggggcggcggttcgtgcgtgcgtacatctcggtgaagcgaaaagagtacgagacgtttttccgggtcatcagttcgtgggaacgggagttcctgctgttgaatgtgtga

SEQ ID NO: 32084 - protein, 461 aa, Xanthomonas axonopodis pv. citri str. 306
MSIRTRSRKTTSTQPESALRRWLKERSITEVECLVPDITGNARGKIIPADKFSHDYGTRLPEGIFATTVTGDFPDDYYALTSPSDSDMHLRPDASTVRMVPWAADPTAQVIHDCYTKDGQPHELAPRNVLRRVLDAYAQAELQPVVAPELEFFLVQKNTDPDFPLLPPAGRSGRPETARQSYSIDAVNEFDPILDLMYDYCDAMELDVDTLIHESGAAQLEVNFTHADPMSRADQVFLFKRTMREAALRHGVYATFLAKPMETEPGSAMHIHQSLLHAGTGKNVFSGKREGGFSDTFAHYLGGLQKYIPMAMGLLAPNVNSYRRLMFGEVSPSNVLWGFDNRTCGLRVPIDVPQNMRVESRFAGSDANPYLAMAATLACGLLGIGEKLEPTAPISSNGKEQGYDLPRSLGEALDELEGCQALQEMLGRRFVRAYISVKRKEYETFFRVISSWEREFLLLNV

SEQ ID NO: 32085 - DNA, 1347 bp, Streptococcus agalactiae 2603V/R
  CDS (1)..(1347): transl_table=11
atgactatcacagcagaagatattcgtcgcgaagttaaggaaaaaaatgttaccttcctccgtttgatgttcacagatatcttaggagtaatgaaaaatgtcgaaattccggctacagatgaacaattagacaaagttttatcaaataaagcaatgtttgatggatcttctattgagggctttgttcgtatcaatgaatctgatatgtatttatatcctgatttagatacttggattgtctttccttggggagatgaaaatggagctgttgcaggtctaatctgtgatatctatacagcagaaggagaaccttttgccggagatccacgtggaaatcttaagcgtaatatgaaacgtatgcaagagatgggctataagtcatttaacttaggaccagaacctgaatttttcctatttaaaatggatgaaaatggtaacccaacacttgatgttaatgacaaaggaggctactttgacttagctccaacagacttagcagataatacacgtcgtgaaattgttaatgtcttaacacaaatgggctttgaagttgaagctagtcatcatgaagtagcagttggacagcatgaaattgactttaaatatgatgatgttttaaaagcctgtgacaacattcaattatttaaattggttgttaaaacaattgctcgtaagcatggtttatatgctacttttatggcaaaacctaagtttggtatcaatggttcaggtatgcattgtaatatgtctctttttgataatgaagggaacaatgctttctttgatccagaagatccacgtggaatgcaattatcagaggatgcctactactttttaggtgggttaatgaaacacgcttacaattacacagctatcattaatccaactgttaattcttataaacgtttggtaccaggatacgaagcaccagtttacgttgcttgggcaggtcgcaatcgttcgccacttattcgtgtacctgcatctcgaggtatgggaacacgcctagaattgcgctcggttgacccaacagcaaatccttatcttgctttatcagtacttttgggatcaggacttgagggaatcgagaataaaattgaagcaccagaaccaattgagacaaatatctatgctatgactgtagaagaacgtcgtcaagcaggtattgttgatttaccatctactcttcataatgctcttgaagcacttgaagaagatgaagtggtaaaagcggccctaggaactcatatctatactaatttcttagacgctaagcgtattgaatgggcaagttatgcgacttatgtttcacaatgggaaattgataattacctagatttatattaa

SEQ ID NO: 32086 - protein, 448 aa, Streptococcus agalactiae 2603V/R
MTITAEDIRREVKEKNVTFLRLMFTDILGVMKNVEIPATDEQLDKVLSNKAMFDGSSIEGFVRINESDMYLYPDLDTWIVFPWGDENGAVAGLICDIYTAEGEPFAGDPRGNLKRNMKRMQEMGYKSFNLGPEPEFFLFKMDENGNPTLDVNDKGGYFDLAPTDLADNTRREIVNVLTQMGFEVEASHHEVAVGQHEIDFKYDDVLKACDNIQLFKLVVKTIARKHGLYATFMAKPKFGINGSGMHCNMSLFDNEGNNAFFDPEDPRGMQLSEDAYYFLGGLMKHAYNYTAIINPTVNSYKRLVPGYEAPVYVAWAGRNRSPLIRVPASRGMGTRLELRSVDPTANPYLALSVLLGSGLEGIENKIEAPEPIETNIYAMTVEERRQAGIVDLPSTLHNALEALEEDEVVKAALGTHIYTNFLDAKRIEWASYATYVSQWEIDNYLDLY

SEQ ID NO: 32087 - DNA, 1419 bp, Shigella flexneri 2a str. 301
  CDS (1)..(1419): transl_table=11
atggaaaccaatatcgttgaagtagagaactttgttcagcagtcagaagagaggcggggtagcgcctttacgcaggaagtgaaacgctacctggagcgctacccgaatacgcaatatgttgatgttttacttactgatttgaatggttgcttccgtggaaaatgtaagcctgtttcaagcctgtacaagctcgacacacgccgttatttggtggcctcgatatttgcactgaatattttgggcaacgtagtagaagaagcaggtctgggtcaggaaatgggcgagccggatcgtacctgtgttcctgttctcggttccttaactccttctgccgccgatccagagtttatcggtcagatgctcctgaccatggtcgatgaagatggcgctccctttgacgttgagccgcggaacgttcttaaccgcctgtggcagcagctgcgccagcgcggattgttcccggttgtagcggtagagctggagttctatttactggatcgccagcgcgacgctgaaggggatctgcaaccgccctgcgcgcctggcaccgatgaccgcaatacacaaagccaggtttactccgttgataacctcaaccacttcgccgacgtgctcaatgatattgatgaactggcgcagttgcagctgattccggcagatggcgcggtcgctgaggcctcgccgggtcagtttgaaatcaacctttaccatactgataacgtgctggaagcctgcgatgatgcgctggcactaaaacgcctagtgcgtctgatggcagaaaagcataagatgcacgccacttttatggcgaagccgtatgaagagcacgcgggcagcgggatgcatatccatatcagtatgcaaaataatcgtggcgagaatgtgctttctgacacagaaggcgaagattcgccgctgctgaaaaagatgctcgccgggatgattgacctgatgccgtcgtcgatggcgttgctggcaccaaacgtgaactcgtatcgccgcttccagccgggaatgtatgtgccgacgcaggcgtcgtggggccataacaaccgcaccgtcgccctgcgtattccgtgcggtgaccgtcataatcaccgcgtggaatatcacgtggcgggtgccgatgccaacccatatctggtgatggcagcgatttttgccggtattttgcatggccttgataacgagctgccgttgcaggaagaagtcgaaggcaacgggctggaacaggaaggcttacccttcccgattcgccagagcgatgccctgggtgagtttatcgagaatgatcacctgcgccgctatttaggcgaacggttttgccatgtgtatcacgcctgtaaaaatgatgagctgttgcagtttgagcgcctcatcacagaaacagaaattgagtggatgttgaaaaacgcgtaa

SEQ ID NO: 32088 - protein, 472 aa, Shigella flexneri 2a str. 301
METNIVEVENFVQQSEERRGSAFTQEVKRYLERYPNTQYVDVLLTDLNGCFRGKCKPVSSLYKLDTRRYLVASIFALNILGNVVEEAGLGQEMGEPDRTCVPVLGSLTPSAADPEFIGQMLLTMVDEDGAPFDVEPRNVLNRLWQQLRQRGLFPVVAVELEFYLLDRQRDAEGDLQPPCAPGTDDRNTQSQVYSVDNLNHFADVLNDIDELAQLQLIPADGAVAEASPGQFEINLYHTDNVLEACDDALALKRLVRLMAEKHKMHATFMAKPYEEHAGSGMHIHISMQNNRGENVLSDTEGEDSPLLKKMLAGMIDLMPSSMALLAPNVNSYRRFQPGMYVPTQASWGHNNRTVALRIPCGDRHNHRVEYHVAGADANPYLVMAAIFAGILHGLDNELPLQEEVEGNGLEQEGLPFPIRQSDALGEFIENDHLRRYLGERFCHVYHACKNDELLQFERLITETEIEWMLKNA

SEQ ID NO: 32089 - DNA, 1356 bp, Shewanella oneidensis MR-1
  CDS (1)..(1356): transl_table=11
atgaataagctaatcgcttttttaaaagaacgaaaaatcacggaagtcgaatgtgttatctgcgatatgacaggtatcgcccgtggaaaaatagcaccagttgataagtttctcgacgaaaaaggcatgcgcttacccgaaagtgtcttgctacaaaccgtcaccggtgactttgtcgacgatgatatttactacagtttactcgatgatgcagatatcgattttgtctgcgttcccgatgagaacgcggtatttatgctgccttggacgattgaagccacggcgcaggtaatccacgattgctatgacagaatgggcaatcccatcgagttatcacctcgtaacgtcttgaaaaaagtgctgtctctttacgatgaaaaaggatgggaacccgtcattgcgccagaaatggagttttacctgacgagccgaagtgatgatcacgatttacctcttaaaccgccaattggtcgttcaggcaggccggaagcgggacgtcagtccttctcaattgatgccgccaacgaatacgatcctctgtttgaagacatgtatgactggtgcgaaattcaaggtttagatattgatacgcttatccatgaagacggcccagcgcagatggagattaacttcagccacggtaacccgttatcacttgctgatcaggtgtttgtatttaagcgtaccctgcgtgaggcggcattaaagcataatgtttgtgccacttttatggcgaaacctgtgaccgatgagccgggcagcgccatgcatattcatcaaagtgtgattaacaaagaaacaggtaaaaatatttttaccaatgaagatggcacccaaagcgcgttatttttgagttatatcgcaggactacagaaatacattcctgaattcttgccactcatggcgccaaacgctaactcgtttcgtcgttttttaccgggaacttctgcgccagtgaacttggaatggggaattgagaatcgaacgtgcggattacgcattcctgaatcttcaccacaaaaccgccgtattgaaaaccgaattccaggagcggatgctaactgctatttagcttttgcggcaggtttactctgtggttatatcggcatggtcgaaggattaaaaccatcgacacccgttcaaggtaaagcgaacgaaagccgaagcaacaatccacattgtttgccgttaaccttggaagaagccttagtcgcgatggaggaaagcgacgcctgtaaggaatacttaggtgaatcctttactacggggtttgtggccgtaaaacaggctgaacttgaaaatttccgcagggtagtgagttcgtgggagcgggagttcctattactcagcgtgtaa

SEQ ID NO: 32090 - protein, 451 aa, Shewanella oneidensis MR-1
MNKLIAFLKERKITEVECVICDMTGIARGKIAPVDKFLDEKGMRLPESVLLQTVTGDFVDDDIYYSLLDDADIDFVCVPDENAVFMLPWTIEATAQVIHDCYDRMGNPIELSPRNVLKKVLSLYDEKGWEPVIAPEMEFYLTSRSDDHDLPLKPPIGRSGRPEAGRQSFSIDAANEYDPLFEDMYDWCEIQGLDIDTLIHEDGPAQMEINFSHGNPLSLADQVFVFKRTLREAALKHNVCATFMAKPVTDEPGSAMHIHQSVINKETGKNIFTNEDGTQSALFLSYIAGLQKYIPEFLPLMAPNANSFRRFLPGTSAPVNLEWGIENRTCGLRIPESSPQNRRIENRIPGADANCYLAFAAGLLCGYIGMVEGLKPSTPVQGKANESRSNNPHCLPLTLEEALVAMEESDACKEYLGESFTTGFVAVKQAELENFRRVVSSWEREFLLLSV

SEQ ID NO: 32091 - DNA, 1347 bp, Pseudomonas putida KT2440
  CDS (1)..(1347): transl_table=11
atgagtgtcatctttccggatctgctggctgaagtgcgctcgttccgagcagagcacccggcaattcgctatgtcgacctgattgcgctggacatccccgggcacttctacggcaagcgctaccccatggacatgctggaaaaagtcgcagccggtgcgcctctgaagctgccgcagaactgcgtgctgctgggtacccagggcggcctttacccgattggtgactattgcttcgccgacggcgacccggatgctgcccggcgcctggtgccgggtacgctgaagccggtgcgctgggaaaaggaagtgatcgcccagatgctgatcacgtccgacggcactgcaaagccgatcgaattcgagcctcgtgaagtgctggcgcgtgttcttcagcgtctggccaagcgtggcattcgcccggtggtggcgtttgaactggagttctacctgttcgaccgcaagcttgataacggcctgccccagtatccacgtgacacggcgaccgaggatgaagacgatcagccgaacatgcacatcgagcggttgtcgcgcttttcgtcggtcctgcacgagatggtcgatggcgccaacgagcagggcgtgccggcgaacgtcatcaccgcagagctgggcccaggccagttcgagatcaacttctcgcacagcgacgatgccctcagtgcggcggactggtcggcactgttctgccgcagtacccgcggtatcgcgatgaagcacggctaccgtgccagcttcatgagcaaaccctacctggacgcgccaggcagcggcatgcatgtgcacgtcagcctgtacgacgccgccggcaataacatcctggcgggaagcgaacagcgcaagctgcgccatgcggtggcaggctgcctggaactgctgccgcactgcatgccgatctttgcccccaaccacaatgcctaccgacgttatggcgccatggtcaacgcggcgagcaaggccagctggggtttcgaagaccgtgacgcgtgcatccgcatccccgagtccgacccgcgcaacctgcgcatcgagcaccgcctcgctggcgccgacgccaacccgtatctggtactggcggccattttgaccgggatggagcatggcctggatcgcggcgtggagcccatcgccccgctgaacgaaaaccgccagagcggcatcgacttccccaaggatgccctcagcgccttggccgccatgcgtcatcacccggtggtcaaccaaggcctgggcagcgagttcgtgatggtctattgcgaaaacaaataccaggagcaactggacttcatgcaccacatcgatgcccgcgaataccgctggttcctgtag

SEQ ID NO: 32092 - protein, 448 aa, Pseudomonas putida KT2440
MSVIFPDLLAEVRSFRAEHPAIRYVDLIALDIPGHFYGKRYPMDMLEKVAAGAPLKLPQNCVLLGTQGGLYPIGDYCFADGDPDAARRLVPGTLKPVRWEKEVIAQMLITSDGTAKPIEFEPREVLARVLQRLAKRGIRPVVAFELEFYLFDRKLDNGLPQYPRDTATEDEDDQPNMHIERLSRFSSVLHEMVDGANEQGVPANVITAELGPGQFEINFSHSDDALSAADWSALFCRSTRGIAMKHGYRASFMSKPYLDAPGSGMHVHVSLYDAAGNNILAGSEQRKLRHAVAGCLELLPHCMPIFAPNHNAYRRYGAMVNAASKASWGFEDRDACIRIPESDPRNLRIEHRLAGADANPYLVLAAILTGMEHGLDRGVEPIAPLNENRQSGIDFPKDALSALAAMRHHPVVNQGLGSEFVMVYCENKYQEQLDFMHHIDAREYRWFL

SEQ ID NO: 32093 - DNA, 1359 bp, Pseudomonas putida KT2440
  CDS (1)..(1359): transl_table=11
atgaacgcccccttcgatcagctgtccacctggctgaaagaacaccggatcaccgaagtcgaatgcgtgatcagcgacttgaccggcatcgcccgcggcaagattgcgcctaccgccaagttcctccatgagcgaggcatgcgtctgccagaaagcgtgctgctgcagacagtcaccggcgactacgtcgacgatgacatctattacaacctgctcgacgccgccgacatcgacatggtctgccgccccgatcccaccgccgtttaccagatcccgtgggcgatcgagccaaccgcgatcgtgatccacgacaccttcgacaagcaaggcaaccctatcgagctttcgccacgcaacgtcctgaaaaaggtgctcaagctgtacgccgacaagggctggcagccgatcgtcgcgcccgagatggagttctacctgaccaagcgctgcgaagacccggatttgccactgcaggtaccactggggcgttccggccgtgctgaaagtggccgccagtcgttctcgatcgacgccgccaacgaattcgacccactgttcgaagacgtctacgactggtgcgagatccagggcttggacctggatacgctgatccacgaagacggcccggcgcagatggagatcaacttccgccacggcgacgcgctggacctggccgaccagatcaccgtgttcaagcgcaccatgcgcgaggccgcgctcaagcacaacgtggccgccacgttcatggccaagccgatcaccgatgaacccggcagtgccatgcacctgcaccagagcgtggtcgacatcgccactggcaaaccgatctttgccaacgaagacggcagcatgagccagctgtttttgcatcacatcggcggcttgcagaagtacatccccaagctgctgccgatgttcgcgcccaacgtcaactcgttccgccgcttcctgccggatacctcggcaccggtcaacgtcgagtggggcgaagaaaaccgcacggccggcctgcgcgtgcccacctccagccctgaggcgatgcgggtggaaaaccgcctgccgggcgccgatgccaacccgtacctggccatcgctgccagcctgctgtgcggctacctgggcatggtcgagcagatcgaccctagcgcaccggtgcagggccgcgcctatgaacgccgcaacctgcgcctgccgatcaccatcgaggatgcgctgcagcacatggaggactgcgaaaccgtgcagcagtacctgggcaagcagttcgtccagggctacgtggcggtcaagcgcgccgagcacgagaactacaagcgcgtcatcagctcatgggagcgtgaattcctgatgctgagtgtctga

SEQ ID NO: 32094 - protein, 452 aa, Pseudomonas putida KT2440
MNAPFDQLSTWLKEHRITEVECVISDLTGIARGKIAPTAKFLHERGMRLPESVLLQTVTGDYVDDDIYYNLLDAADIDMVCRPDPTAVYQIPWAIEPTAIVIHDTFDKQGNPIELSPRNVLKKVLKLYADKGWQPIVAPEMEFYLTKRCEDPDLPLQVPLGRSGRAESGRQSFSIDAANEFDPLFEDVYDWCEIQGLDLDTLIHEDGPAQMEINFRHGDALDLADQITVFKRTMREAALKHNVAATFMAKPITDEPGSAMHLHQSVVDIATGKPIFANEDGSMSQLFLHHIGGLQKYIPKLLPMFAPNVNSFRRFLPDTSAPVNVEWGEENRTAGLRVPTSSPEAMRVENRLPGADANPYLAIAASLLCGYLGMVEQIDPSAPVQGRAYERRNLRLPITIEDALQHMEDCETVQQYLGKQFVQGYVAVKRAEHENYKRVISSWEREFLMLSV

SEQ ID NO: 32095 - DNA, 1365 bp, Pseudomonas putida KT2440
  CDS (1)..(1365): transl_table=11
atgcactttgcccctgtagagcaggctacccgttttctggccgacaaccccgatatcgagctgttcgaactgttcatcctcgacgccaacggtgtgccacgcggcaagctgttgcaccgcgaggaactgctggccgtgtaccagacaggccggccactgcccagcaccatccttggcctgaccctcaacggcgacgacgtggaaaactccggcctggtgtgggacgtcggcgacatcgactgccgtgcctacccgcttgacggcagcctggtgcgcctgccctggcgccgggtgcccaccgccgcagtgcaggtgagcatgcaccccagcgagggtctgccggccagcatcgcggacccacgccatgtgctgctgcgcaccatcgaagcgttgaaggccgatggttatcacccggtgatggcctgcgagctggagttctacctgctcgaccagcagcgtgatgcccagggccgcccacaaccggcactggacaacgatggcggccgcccccgcagcacccaggtctatggcctgcgcgaactggagcagatcgaaccgttcctcgccgacctgtacgctgcctgcaaggcccaaggcatcccggcgcgcacggccatttccgagtacgccccgggccaggtggaaatcaccctggagcatggcgatgcgctgcaggcgatggaccaggcggtgcgctacaagcgcttggtaaaaggtgtggcccatgcccacggcatgcaggcctgcttcatggccaagccattcgcccaactggccggcaccggcatgcacatgcacctgagcctggccgacagcgccggcaacaacctgttcgccagcgaagacaaggccggcaccccgctgctgcgccaggccgtggccggcatgctgcgccacctgcgcgactcgctgctgctgttctgccccaacgccaactccttccgccgcttccaggccaacagctatgcgcccctggcgccaacctggggcgtggacaaccgcaccgtgagcctgcgtgtgccaggaggccctgccaacagccgccatgtggagcaccgcatctgtggcgcggatgccaacccttacctggcagcagcggcgatccttgctgccagccactggggcatccgcgaacagcttgacccaggcgcgcccgttgaaggcaacggctatgcccaggccaccgaacacctgcccactgactggctgaccgcactcgacgccctgcaacattccgattgggcccgtgaagcattgggcgaagacttccttggcgtgtacctgaaggtcaagcgcgccgagtaccgccagttcatggccgaagtcagcgaacaggactggcgctggtacctgcaccaggcctga

SEQ ID NO: 32096 - protein, 454 aa, Pseudomonas putida KT2440
MHFAPVEQATRFLADNPDIELFELFILDANGVPRGKLLHREELLAVYQTGRPLPSTILGLTLNGDDVENSGLVWDVGDIDCRAYPLDGSLVRLPWRRVPTAAVQVSMHPSEGLPASIADPRHVLLRTIEALKADGYHPVMACELEFYLLDQQRDAQGRPQPALDNDGGRPRSTQVYGLRELEQIEPFLADLYAACKAQGIPARTAISEYAPGQVEITLEHGDALQAMDQAVRYKRLVKGVAHAHGMQACFMAKPFAQLAGTGMHMHLSLADSAGNNLFASEDKAGTPLLRQAVAGMLRHLRDSLLLFCPNANSFRRFQANSYAPLAPTWGVDNRTVSLRVPGGPANSRHVEHRICGADANPYLAAAAILAASHWGIREQLDPGAPVEGNGYAQATEHLPTDWLTALDALQHSDWAREALGEDFLGVYLKVKRAEYRQFMAEVSEQDWRWYLHQA

SEQ ID NO: 32097 - DNA, 1359 bp, Pseudomonas putida KT2440
  CDS (1)..(1359): transl_table=11
atgagtaacaacctcgaccagctcaccgattggttgaaagagcacaagatcaccgaagtcgaatgcatgatcagcgacctgaccggcatcacgcgcggcaagatttcgccaaccaacaaattcatcgctgaaaaaggcatgcggctgcccgagagcgtgctgctgcagaccgtgaccggcgactacgtcgacgacgacatctattacgaactgctcgacccggcagacatcgacatgatctgccgccctgacgagaacgctgtgttcctcgtgccgtgggccatcgagccgaccgcacaggtcatccacgacacctacgacaagaagggcaacccggtcgaactgtcgccgcgcaacgtgctgaagaaagtgctcaagctatacgccgacaagggctggcagccgatcgtcgcccccgagatggagttctacctgaccaagcgcagcgaagacccggactttccgctgcagcccccggtaggccgttccggtcgcccggaaaccggccgtcagtctttctcgatcgaagctgccaacgaattcgacccgctgttcgaagacgtctacgactggtgcgagctgcagcagctggacctcgacacgctgatccacgaagacggcacggcgcagatggaaatcaacttccgtcacggcgacgctctgcacctggccgaccagatcctggtgttcaagcgcaccatgcgcgaggcggcgctcaagcacaacgtggctgccactttcatggccaaaccgatgaccggcgagccgggcagtgccatgcacctgcaccagagtgtggtcgacgtggccaccggcaagaacatcttcagcaatgaagacggcagcatgagcgcgctgttcctcaaccacatcggcggcctgcagaagttcatccccgaggcgctgccgctgttcgcgcccaacgtcaactcgttccgccgcttcctgcccgacacttcggcgccggtgaatgtggagtggggcgaagaaaaccgcaccgtcggcctgcgcgtaccggatgccggcccgcaaagccggcgcgtcgagaaccgcctgccgggcgccgacgccaacccgtacctggccatcgccgccagcctactgtgtggctacatcggcatggtcgaaggtatcgaggccagcgcgccagtgcagggccgtggctacgaacgccgcaacctgcgcctgcccctgaccatcgaggacgccttggaacgcatggaaaacagccgtgcgctggtgcagtacctgggcaagaaattcatcaccgggtatgtcgctaccaagcgcgccgagcatgaaaacttcaagcgcgtcatcagttcgtgggagcgtgagttcctgctgttcgctgtctga

SEQ ID NO: 32098 - protein, 452 aa, Pseudomonas putida KT2440
MSNNLDQLTDWLKEHKITEVECMISDLTGITRGKISPTNKFIAEKGMRLPESVLLQTVTGDYVDDDIYYELLDPADIDMICRPDENAVFLVPWAIEPTAQVIHDTYDKKGNPVELSPRNVLKKVLKLYADKGWQPIVAPEMEFYLTKRSEDPDFPLQPPVGRSGRPETGRQSFSIEAANEFDPLFEDVYDWCELQQLDLDTLIHEDGTAQMEINFRHGDALHLADQILVFKRTMREAALKHNVAATFMAKPMTGEPGSAMHLHQSVVDVATGKNIFSNEDGSMSALFLNHIGGLQKFIPEALPLFAPNVNSFRRFLPDTSAPVNVEWGEENRTVGLRVPDAGPQSRRVENRLPGADANPYLAIAASLLCGYIGMVEGIEASAPVQGRGYERRNLRLPLTIEDALERMENSRALVQYLGKKFITGYVATKRAEHENFKRVISSWEREFLLFAV

SEQ ID NO: 32099 - DNA, 1377 bp, Pseudomonas putida KT2440
  CDS (1)..(1377): transl_table=11
atgtcggtacccccgcgtgccgttcagcttaacgaagcgaacgcgttccttaaggaacatcctgaggttctctacgttgaccttctgattgcagatatgaatggtgtggtgcgtggcaagcgcatagagcgcaccagcctccacaaggtttacgagaaaggcatcaatctgccggcctccctctttgccctggacatcaacggttccaccgtcgaaagcaccgggctgggcctggacatcggcgatgctgaccgcatctgctatccaatccccgacacgctctgtaacgagccatggcaaaagcgccccaccgcccagctgctgatgaccatgcacgagctggaaggcgagccgttcttcgccgacccgcgcgaagtgctgcgtcaggtggtgaccaagttcgacgaactgggcctgactatctgcgccgcattcgagctggagttctacctgatcgaccaggagaacgtgaacggccgcccgcagccaccacgctcgccaatttcgggcaaacgcccgcagtcgacccaggtgtacctgatcgacgacctcgacgaatatgccgactgcctgcaggacatcctcgaaggcgcgaaagaacaaggcatcccggccgacgccatcgtcaaggaaagcgccccggcgcagttcgaagtcaacctgcaccacgtggccgacccgctcaaggcctgcgactacgcggtactgctcaagcggttgatcaagaacatcgcctacgaccatgaaatggacaccaccttcatggccaagccctatccgggccaggcaggcaacggcctgcacgtgcacatttccgtgctggacaaagatggcaacaacatcttcaccagcgaggatcccgagcagaacgccgcgctacgtcacgctgtcggcggtgtgctcgagaccctgcccgcgtccatggccttcctttgcccgaacgtcaactcgtaccgccgctttggcgcgcagttctacgtgccgaacgcgccaagctggggcctggacaaccgcaccgtagcgctacgcgtaccgaccggctcggccgatgccgtgcgcatcgagcaccgcgtcgccggtgccgacgccaacccgtacctgatgatggctgccgtactggctggcgtgcaccatggcctgaccaacaagatcgagccaggcgcgccgatcgaaggcaactcgtacgagcagctggagcagagcctgccgaacaacctgcgcgatgccctgcgcgagctggacgacagcgagatcctgaacaagtacatcgatccgaagtacatcgacatcttcgtcgcgtgcaaggaaagcgagctggaagagttcgagcactcgatctccgacctcgagtacaactggtacctgcataccgtgtaa

SEQ ID NO: 32100 - protein, 458 aa, Pseudomonas putida KT2440
MSVPPRAVQLNEANAFLKEHPEVLYVDLLIADMNGVVRGKRIERTSLHKVYEKGINLPASLFALDINGSTVESTGLGLDIGDADRICYPIPDTLCNEPWQKRPTAQLLMTMHELEGEPFFADPREVLRQVVTKFDELGLTICAAFELEFYLIDQENVNGRPQPPRSPISGKRPQSTQVYLIDDLDEYADCLQDILEGAKEQGIPADAIVKESAPAQFEVNLHHVADPLKACDYAVLLKRLIKNIAYDHEMDTTFMAKPYPGQAGNGLHVHISVLDKDGNNIFTSEDPEQNAALRHAVGGVLETLPASMAFLCPNVNSYRRFGAQFYVPNAPSWGLDNRTVALRVPTGSADAVRIEHRVAGADANPYLMMAAVLAGVHHGLTNKIEPGAPIEGNSYEQLEQSLPNNLRDALRELDDSEILNKYIDPKYIDIFVACKESELEEFEHSISDLEYNWYLHTV

SEQ ID NO: 32101 - DNA, 1383 bp, Pseudomonas putida KT2440
  CDS (1)..(1383): transl_table=11
atgacgtcggtaaccccgtgcgccagttcttccagcgagatgaatgacttcctccaggcccatccggacacgcagtacgtagacctgctgatctccgacatgaatggcgtggtacgtggcaagcgcatcgagcgggccagcctgcacaaggtgtacgagaagggcatcaacctgcccgcatcgctgttcgcccttgatatcaacggttccactgtcgaaagcaccggccttggcctggacatcggcgacgccgaccgcatctgtttcccgatccccggcacgctgtcggacgagccgtggcaaaagcgccccaccgcccagctgctgatgaccatgcacgagctggatggccagccgttcttcgccgacccgcgtgaagtgctgcgccaggtggtgagcaagttcgacgacctgggcctgactatctgcgccgcgttcgagctggagttctacctgatcgaccaggacaacctcaacggccgcccgcagccgccgcgctcgccgatctccggcaagcgcccgcagtcgacccaggtgtacctgatcgacgacctcgacgagtacgccgactgcttgcaggacatgctcgaagcagccaaggaacagggcctgcctgccgacgccatcgtcaaggaaagcgccccggcgcagttcgaggtcaacttgcaccacgtggcggatccgctgaaggcctgcgactatgcgatcctgctcaagcgcctgatcaagaacgtcgcctacgaccatgaaatggacaccaccttcatggccaagccctacccgggccaggcaggcaacggtctgcatgtgcacatttcattgctggacaagaaaaccggcaagaacatcttcgccagtgacgatccgctgcaaagcgatacgctgcgccacgccattggtggcgtgctggaaaccatgccggcgtcgatggccttcctgtgccccaacatcaactcctaccgccgcttcggtgcgcagttctacgttcccaatgcgccgagctggggcctggacaaccgcaccgtggccgtacgcgtgcccaccgacagcagcgaaaacgtgcgccttgagcaccgtgtagccggcgccgatgccaacccgtacctgatgctcgcggcgatccttgccggcgttcaccatggcctgaccaacaaggtcgagcccgaggcgccgatcgaaggcaactcctacgagcagctggagcaaagcctgccgaacaacctgcgcgatgccctgcgcgcgctggatgacagcgaagtcctcaaccaatacatcagcccggactacatcgatatcttcgtggcctgcaaggaaagcgaactggccgagttcgaagtgtcgatttccgatcttgagtacaactggtacctgcacacggtgtaa

SEQ ID NO: 32102 - protein, 460 aa, Pseudomonas putida KT2440
MTSVTPCASSSSEMNDFLQAHPDTQYVDLLISDMNGVVRGKRIERASLHKVYEKGINLPASLFALDINGSTVESTGLGLDIGDADRICFPIPGTLSDEPWQKRPTAQLLMTMHELDGQPFFADPREVLRQVVSKFDDLGLTICAAFELEFYLIDQDNLNGRPQPPRSPISGKRPQSTQVYLIDDLDEYADCLQDMLEAAKEQGLPADAIVKESAPAQFEVNLHHVADPLKACDYAILLKRLIKNVAYDHEMDTTFMAKPYPGQAGNGLHVHISLLDKKTGKNIFASDDPLQSDTLRHAIGGVLETMPASMAFLCPNINSYRRFGAQFYVPNAPSWGLDNRTVAVRVPTDSSENVRLEHRVAGADANPYLMLAAILAGVHHGLTNKVEPEAPIEGNSYEQLEQSLPNNLRDALRALDDSEVLNQYISPDYIDIFVACKESELAEFEVSISDLEYNWYLHTV

SEQ ID NO: 32103 - DNA, 1437 bp, Bradyrhizobium japonicum USDA 110
  CDS (1)..(1437): transl_table=11
gtgactttcgtcgcgcgtcatgcgctgtggtcggatgaacagaaggacgcggcgcaacgcatgcgccgcatcgtcgaggagaagaacctcgaggtcatccgcctcgccttccccgaccagcacggcatcctgcgcggcaagaccatcatcgccgcggaggcgatcgcctcgctggagagcggctgctccatcaccaccaccatgctcgccaaggacacctcgcaccgcacggtgttcccggtgttcacatcgggcggcgggttcggcatgaaggagatggagggcgcagccgacgtgctgatggttgccgatcccaccaccttccgcgtgctgccatgggcgccgaccacgggctgggtgctgtgcgatctccatttcaatgacggccgccccgtgccgttcgcaacgcgcgggctttatcgcaaggtgctcgatgagcttgctggccgcggccacgatttcgtcgccgggctcgaggtcgagttccacatcttcaagctcgacgatccgcatatgcgtgcggaggacgccggccagcccgggacgccgccctcggtgagcctgctcagccacggctaccagtacctcaccgagcagcgcttcgatcagatggagccggtgctggagatcctgcgccgcgacgtcgtcgcactcggcctgcccttgcgctcggtcgaggtcgagttcgggccaagccagtgcgagttcaccttcgcgccgaggaagggcctcgagcccgccgacaacatggtgctgttccgctcggccgtgaagcagatcgcgcggcgccacggctatcacgccactttcatgtgccgccccaaactgccgaacctgttcgcgagcggctggcatctgcaccagtcgatcgtctcgcgcaccagcggcgaaaaccagttcatggcgcaggcaggcggcgagccgctcagcgcgttcggccgcgcctaccttgccggcctgctcgaccacgcccgcgcgtccgccgtgttcaccaccccgaccatcaacggctacaagcgctaccgctcctattcgctggcgcccgaccgcgcgatctggggccgcgacaatcgcggcgtgatgatccgcgtgctcggggctgccggcgatgccgccacgcgccttgagaaccgcatcggcgagccggctgccaatccctatctctacatggcctcgcaaatcctctccggcctcgacggcgtcgatcgcaagctcgatcccggcccgtcggccgacacgccctacgaaaccaaggcgccgctgctgccgaagtcactgcgcgatgcggttgcggcgctgaaggaggatccgttcttccgcgagaagttcggtgcggagttcgtcgactactacacccacatcaagaacgccgagatcgaccgcttcctcgccgaggtcaccgactgggagcaccgcgaatatttcgagatgttctga

SEQ ID NO: 32104 - protein, 478 aa, Bradyrhizobium japonicum USDA 110
MTFVARHALWSDEQKDAAQRMRRIVEEKNLEVIRLAFPDQHGILRGKTIIAAEAIASLESGCSITTTMLAKDTSHRTVFPVFTSGGGFGMKEMEGAADVLMVADPTTFRVLPWAPTTGWVLCDLHFNDGRPVPFATRGLYRKVLDELAGRGHDFVAGLEVEFHIFKLDDPHMRAEDAGQPGTPPSVSLLSHGYQYLTEQRFDQMEPVLEILRRDVVALGLPLRSVEVEFGPSQCEFTFAPRKGLEPADNMVLFRSAVKQIARRHGYHATFMCRPKLPNLFASGWHLHQSIVSRTSGENQFMAQAGGEPLSAFGRAYLAGLLDHARASAVFTTPTINGYKRYRSYSLAPDRAIWGRDNRGVMIRVLGAAGDAATRLENRIGEPAANPYLYMASQILSGLDGVDRKLDPGPSADTPYETKAPLLPKSLRDAVAALKEDPFFREKFGAEFVDYYTHIKNAEIDRFLAEVTDWEHREYFEMF

SEQ ID NO: 32105 - DNA, 1410 bp, Xylella fastidiosa Temecula1
  CDS (1)..(1410): transl_table=11
atgtcgctggaaaatgttgaaaagcttgtcaaggataaaaagatcgaattcgtcgatttgcgctttgttgatatgcgcggcgtacaacagcacgtcacctttccggtgaacattcttgaacaatcgctgttcaaggatggaaagatgttcgacggtagctcgattgctggttggaaggggatcaatgagtcggacatggtactgctgcctgacgctagcaccgcttatctggatcctttttacgctgatccaacgctggtcatgacatgcgacatccttgatccagcgacgatgcagagttatgtgcgtgatccccgaggtatcgccaaacgtgccgaaatctacttaaattctttaggtattgctgaccaagcatttttcggtccggaacctgaattttttatcttcgattcagtccgttttgctaatgatatgggtcatgcttttttccaaattgcttccgaagaggctgcctggaacacaggcgctgagtttgagggaggtaacagtggttaccgcccgacggtaaagggtggatacttcccagttccaccgactgactcgctgcacgatttgcgtgccgagatggtgaagaccctggagcaggttggcattgagaccgaggtgcatcatcacgaagtcgccactgctggacaatgtgagatcggcactaagttcgactcattggtcaaaaaggctgatcagctgatgacgatgaaatacatccttaaaaacgttgcttaccgcaatgggaagactgtcacctttatgcctaaaccgatcgttggtgataacggttctggcatgcatgtacatcagtcgctctctaaaggaggggtcaacttgttctccggtgacgaccatgctggtttgtcgcagctggcactgtattacatcggcggtattttcaagcacgctcatgcgatcaacgcgttttccaattcgggaacaaatagctataagcgtttggttccgggcttcgaagcacccgtaatgttggcttattcggcacgtaaccgctcggcctcgtgccgtattccatgggtttctagcccgaaggcacgccgcattgaaatgcgtttccccgatccattgcagtctggttacctcacctttactgcgctgatgatggctggactggatggcattaaaaacaagatccatccaggcccacccaatgacaaagatctgtatcacctgccgcctgaagaggaaaaattgatcccgcaggtttgttcaagtttggatcaggctcttgaagcattggacaaagaccgcgatttcttgaaggcaggcagtgtgatgagtgacgattttattaacggctatattgcgctgaagatgcaggaagtgacgcagttccgcgcggccacacatccgctggaataccagatgtactacgccaactaa

SEQ ID NO: 32106 - protein, 469 aa, Xylella fastidiosa Temecula1
MSLENVEKLVKDKKIEFVDLRFVDMRGVQQHVTFPVNILEQSLFKDGKMFDGSSIAGWKGINESDMVLLPDASTAYLDPFYADPTLVMTCDILDPATMQSYVRDPRGIAKRAEIYLNSLGIADQAFFGPEPEFFIFDSVRFANDMGHAFFQIASEEAAWNTGAEFEGGNSGYRPTVKGGYFPVPPTDSLHDLRAEMVKTLEQVGIETEVHHHEVATAGQCEIGTKFDSLVKKADQLMTMKYILKNVAYRNGKTVTFMPKPIVGDNGSGMHVHQSLSKGGVNLFSGDDHAGLSQLALYYIGGIFKHAHAINAFSNSGTNSYKRLVPGFEAPVMLAYSARNRSASCRIPWVSSPKARRIEMRFPDPLQSGYLTFTALMMAGLDGIKNKIHPGPPNDKDLYHLPPEEEKLIPQVCSSLDQALEALDKDRDFLKAGSVMSDDFINGYIALKMQEVTQFRAATHPLEYQMYYAN

SEQ ID NO: 32107 - DNA, 1359 bp, Pseudomonas syringae pv. tomato str. DC3000
  CDS (1)..(1359): transl_table=11
atgagtaccaacctcgaccagctcaccgattggttgaaagaacacaagattaccgaagtcgaatgcatggtgtccgacctcactggcatcacgcgtggcaagatctcgccgaccaacaagttcatcgctgaaaagggcatgcgcctgcctgaaagcgtgctgttgcagacagtgaccggcgactacgtagaagacgacatctactacgaactgctcgacccggcagacatcgacatgatctgccgccccgaccagaacgcggtgtatctggtgccctgggccgtcgagcccactgcgcaggtgatccacgacacctacgacaagcagggcaaccccatcgagctgtcgccgcgcaacgtattgaagaaggtgctcaaactctacgccgatcaaggctggcagccgatcgtggcgccggagatggagttttacctgaccaagcgcagcgacgacccggattacccgttgcaaccgcccatcggtcgctccgggcgccctgagaccggtcgccaatcgttctctatagaagcggcaaacgaattcgacccgctgtttgaagacgtctatgactggtgcgaactgcagaacctggacctcgacacgctgattcacgaagacggcacagcgcagatggaaatcaacttccgtcacggcgatgccctgtcgctggccgatcagattctggtgttcaagcgcaccatgcgtgaagccgcgctcaagcacgacgtggcggcgaccttcatggccaagcccatgaccggcgaaccgggcagcgccatgcacctgcaccagagcatcatcgacatcgagaccggcaagaacatcttctccaatgaagacgggaccatgagcgagctgtttctaaaccacgtcggtggcctgcagaagttcatccccgagctgttgccgctgttcgcgcccaacgtcaactcgttccgccgttttctgcccgacacctcggcacccgttaacgtcgaatggggcgaagaaaaccgcaccgtcggcctgcgcgtaccggatgcagtgccgcagaaccgccgtgtggaaaaccgtctgccgggtgcagatgccaacccttatctggcgattgccgccagcctgctgtgcggtttcatcggcatggtcgaaggcatcaacccgagtgcgccggtggtcgggcgtggctacgagcggcgcaatctgcgcttgccgttgaccatcgaagacgcgctggaacgcatggaaaacagcaagaccatcgagaagtacctgggcaagaaattcatcatcggttatgtcgcggtcaagcgtgccgagcatgaaaacttcaagcgtgtgatcagttcgtgggagcgagaattcctgctcttcgctgtctga

SEQ ID NO: 32108 - protein, 452 aa, Pseudomonas syringae pv. tomato str. DC3000
MSTNLDQLTDWLKEHKITEVECMVSDLTGITRGKISPTNKFIAEKGMRLPESVLLQTVTGDYVEDDIYYELLDPADIDMICRPDQNAVYLVPWAVEPTAQVIHDTYDKQGNPIELSPRNVLKKVLKLYADQGWQPIVAPEMEFYLTKRSDDPDYPLQPPIGRSGRPETGRQSFSIEAANEFDPLFEDVYDWCELQNLDLDTLIHEDGTAQMEINFRHGDALSLADQILVFKRTMREAALKHDVAATFMAKPMTGEPGSAMHLHQSIIDIETGKNIFSNEDGTMSELFLNHVGGLQKFIPELLPLFAPNVNSFRRFLPDTSAPVNVEWGEENRTVGLRVPDAVPQNRRVENRLPGADANPYLAIAASLLCGFIGMVEGINPSAPVVGRGYERRNLRLPLTIEDALERMENSKTIEKYLGKKFIIGYVAVKRAEHENFKRVISSWEREFLLFAV

SEQ ID NO: 32109 - DNA, 1389 bp, Vibrio parahaemolyticus RIMD 2210633
  CDS (1)..(1389): transl_table=11
ttggttatttctaatttctactcgtcaggctatttggagaagaaaatggaatcgtatctacaggaagtacaaaattttaaacagaaatggcccgatatagagtttatcgaccttatctttaccgatatcaatgccactccaagaggaaagcgcatcccgatagacgcactagagaagcttgataaaggggtagcactccccctctcgaccatcaccctcgatactaaaggtaacgtcgttgaaactgcggggttgggcgaagatctcggagagccagatcacctctgttacccaatcagtggtactttgatgccaacggcaaaggaacaagttggccaactactgcttagtatgatggatgaaaccgggcaacaccctaacccactgttcatccgcaacattctcgcgtctatgttgcaaacgctgcatgccaaagatcagtacccatgtgtcgcgctagaactagaattctatttaatcgacaaaactcgtggggaaaatggcgaaccattaacggcaattaatccaacgaagaaaacacgagaaaaagacaccgaggtttacgaccttgatggattagatgactacgcggatttcttgaccgatcttaatcgaatcgcattagaacaagggttgaatacgtccggcgctctttctgagtctgcaccgggacagtttgaaatcaacttcaaccattccaaagatgtactgcgagcgtgtgatgaaatcatcattgcaaaacgtttgattcgccaagtggctcaccagcacgggtttgatgcgacatttatggcgaagccatttggtgaacaagcgggtaatggcatgcacattcacctcagcttggttgataaagatggtaacaaccactttagtcaaaccgatggtcaacctagccccttcttctatcaaaccatggcagccatgttgtcacaaacctccgatgccatgggtttgatttgtccgaacgttaactccttccgccgctttttaccgggtgcatatgtgccaacaaaagctgactggggagaaaaccaccgaggcgtggcgctgcgtgtgccgattagcgacagtaaaaaccgtcgtattgagcatcgtatcgctggcgctgacgttaacccttacattctcgctgcagtagtactttccgcagtattagcgagtgataactacaccaaagaccaatgtccgccaaccttaagtgacgatgctgttgaactgccgctgcgtatgtcagaagcgctagagcgactggagcacagcgagttagctcaatacatctcacaagactttattgacttgtatctagcttgcaagcggagtgaactcgcagaatttgagcgagcgattactccattggaaatcgactggatgttgcactcggcataa

SEQ ID NO: 32110 - protein, 462 aa, Vibrio parahaemolyticus RIMD 2210633
MVISNFYSSGYLEKKMESYLQEVQNFKQKWPDIEFIDLIFTDINATPRGKRIPIDALEKLDKGVALPLSTITLDTKGNVVETAGLGEDLGEPDHLCYPISGTLMPTAKEQVGQLLLSMMDETGQHPNPLFIRNILASMLQTLHAKDQYPCVALELEFYLIDKTRGENGEPLTAINPTKKTREKDTEVYDLDGLDDYADFLTDLNRIALEQGLNTSGALSESAPGQFEINFNHSKDVLRACDEIIIAKRLIRQVAHQHGFDATFMAKPFGEQAGNGMHIHLSLVDKDGNNHFSQTDGQPSPFFYQTMAAMLSQTSDAMGLICPNVNSFRRFLPGAYVPTKADWGENHRGVALRVPISDSKNRRIEHRIAGADVNPYILAAVVLSAVLASDNYTKDQCPPTLSDDAVELPLRMSEALERLEHSELAQYISQDFIDLYLACKRSELAEFERAITPLEIDWMLHSA

SEQ ID NO: 32111 - DNA, 1389 bp, Chromobacterium violaceum ATCC 12472
  CDS (1)..(1389): transl_table=11
atgcccgcaggctgggaagctcgggcaaacacagctgacagaggatttatggacagtgcccttatcatcaaccaatggctggacgaacaccatatcaccgaggtggaatgtctgatcccggacatgaccggcctcgcccgcggcaagatcgtgccgcgccacaagtacgaccccgccgtcggattgcgcctgcctgaggcggtgctgtcgatgacggtgaccggcgactaccccgaccgcgacttcacctccgtcgccgaccccgacatgaagctgctgcccgatctgagcaccttgcgcccggtgccgtggaacaaggagcccaccgcgcagatcatccatgattgctattccttcgccggcgacgcggtggacctggcgccgcgcaacgtgctcaagcgcatcctgaaactgtacgaggaccagggttggaagccggtgatcgcgccggagatggaattctacctggtggagatccagccggacgaggacttgccgctgcgcccgccggtgggccgcacccgccgcaccgaggcggggatgcagagcttttccatcgacgcggtcaacgaatacgacgacatcttcgacgtgatgtacgactggtgcgaggcccagggcctggcgctggacacgctgatccacgagatgggcaccgcgcagatggagatcaacctggaccacggcgatccgctgcaactggccgaccaggtgttcctgttcaagcgcaccgtgcgcgaggtggcgatccgcaacaatatgtacgccaccttcatggccaagccgatgcagggccagcccggcagcgcgatgcacatgcaccagagcgtggtggacatcgccagcggcggcaacatcttcagcctggacgatggccagccgtctgaggccttcctgcacttcatcggcggcctgcagcgctatctgccggcggcgatgccgttcttcgcgccctacgtcaattcctaccgccgcctcagccgctacacctcggcgccgatcaatctcagttggggctacgacaaccgtacctgcggtttgagggtgccgcactccgatccggaggcgaggcgggtggagaaccggctggccggtgtggacgtcaatccttacctggcgatggcggccagcctggcctgcggctacctgggcatgcgcgaccgcatcgatccgtccgagcctttgtccggcagcgcctacgagcagccccatcagttgccgcgccacctggacgacgccatcgacatgctgctgcgctgccggccgctatccgagctgttcggcgagcacttcatcgagacctacgccgcgatcaaggaggcggagtaccgcgagtacttcgacgtgatcagcccgtgggagcgccgcttcctgctgctgcacgtctag

SEQ ID NO: 32112 - protein, 462 aa, Chromobacterium violaceum ATCC 12472
MPAGWEARANTADRGFMDSALIINQWLDEHHITEVECLIPDMTGLARGKIVPRHKYDPAVGLRLPEAVLSMTVTGDYPDRDFTSVADPDMKLLPDLSTLRPVPWNKEPTAQIIHDCYSFAGDAVDLAPRNVLKRILKLYEDQGWKPVIAPEMEFYLVEIQPDEDLPLRPPVGRTRRTEAGMQSFSIDAVNEYDDIFDVMYDWCEAQGLALDTLIHEMGTAQMEINLDHGDPLQLADQVFLFKRTVREVAIRNNMYATFMAKPMQGQPGSAMHMHQSVVDIASGGNIFSLDDGQPSEAFLHFIGGLQRYLPAAMPFFAPYVNSYRRLSRYTSAPINLSWGYDNRTCGLRVPHSDPEARRVENRLAGVDVNPYLAMAASLACGYLGMRDRIDPSEPLSGSAYEQPHQLPRHLDDAIDMLLRCRPLSELFGEHFIETYAAIKEAEYREYFDVISPWERRFLLLHV

SEQ ID NO: 32113 - DNA, 1335 bp, Chromobacterium violaceum ATCC 12472
  CDS (1)..(1335): transl_table=11
atgaatcaccagatcaacgagtggttgcgagagcaccgcatcaccgaagtcgaatgcatcgtgccggacatgaccggcatcgcccgcggaaagatcgtgcccaaggacaagttcgtttccgacccggaaatgcgtctgcccgaggcggtgctgatccagaccgtgaccggcgactatcccgacgacagcctgctggatctgaccgatccggacatggtgctggagcccgatccgaataccttgcgctacgtgccgtgggcggtggacccgaccgcgcaattgatttacgactgctgccgcgccgacggcagcccggtggacgtggcgccgcgcaatgtgctcaagcgcgtgctgggcctgttcgacgagatgggtctggagccggtgctggcgccggagatggagttctacctgctgtcgcccaaccccgacccggacatcccgctggccgcgccgatcggccgcaccggtcgggcggaattcggccgtcgttcctactcgatcgacgcagtcaacgagttcgacccgctgttcgaggacatctacgactattgccacgcgcagaacctggaagtggacacgctgatccacgagatcggcactgcgcagatggaaatcaacttcctgcatggcaatccgctggagctggccgaccaggtgttcctgttcaagcgcaccgtgcgcgaggcggcgttccgccacaatatgtacgccactttcatggccaagccgatggagaacgagccgggcagcgccatgcacatccaccagagcctggtggacaagaacaccggccgcaacgtgttcaccaacgaggacggcagcccgtccgacatctttttccatttcatcgccggcctgcagaaatacgtgccgcagaccatgccgctgttcgccccctacgtgaactcattccgtcgtttgtctcgctacaccgcggcgccgaccaatgtcgaatggggttacgacaaccgcaccgtcgggctgcgcatcccgcattcgtcgccggccgcgcgccgcatcgaaaaccgggtgcccggcgtcgacgtcaatccctatatcgcgatcgcggccacgctggcctgcggctacctgggcatggtgaacaagctgcggccgaccgagcccaggcagaccgacgcttacgagctgccctaccaattccccaacagctcggaagagtcgctgctgcagctggccggctgcagcgagatcgccgaggtgttggggccgcgcttcgtcaagatgtacgtggcgatgaaggagaaggagttttccgagtatttccgcgtgatcagcccgtgggagcgcaagttcctgctgctgcacgtgtga

SEQ ID NO: 32114 - protein, 444 aa, Chromobacterium violaceum ATCC 12472
MNHQINEWLREHRITEVECIVPDMTGIARGKIVPKDKFVSDPEMRLPEAVLIQTVTGDYPDDSLLDLTDPDMVLEPDPNTLRYVPWAVDPTAQLIYDCCRADGSPVDVAPRNVLKRVLGLFDEMGLEPVLAPEMEFYLLSPNPDPDIPLAAPIGRTGRAEFGRRSYSIDAVNEFDPLFEDIYDYCHAQNLEVDTLIHEIGTAQMEINFLHGNPLELADQVFLFKRTVREAAFRHNMYATFMAKPMENEPGSAMHIHQSLVDKNTGRNVFTNEDGSPSDIFFHFIAGLQKYVPQTMPLFAPYVNSFRRLSRYTAAPTNVEWGYDNRTVGLRIPHSSPAARRIENRVPGVDVNPYIAIAATLACGYLGMVNKLRPTEPRQTDAYELPYQFPNSSEESLLQLAGCSEIAEVLGPRFVKMYVAMKEKEFSEYFRVISPWERKFLLLHV

SEQ ID NO: 32115 - DNA, 1461 bp, Rhodopseudomonas palustris CGA009
  CDS (1)..(1461): transl_table=11
atgaacgtgcaccagcgatacgcaatgggcgacagcctggcggccaagcacgggctgtggtccgaggagcagatcgacgcggcggcgcgcgtccgccgcatcgccgaagagcaggggctcgaaaccatccggttctcgttccccgatcagcacggcatcctgcgcggcaagacgctggtggcgtccgaagcgctgaactgcctcgacaacggcgccaccatcaccaccacgatgctggccaaggacacatcgcacaagacggtgtttccggtgtttcaggccggcggcggcttcggcatgtcggagatgcagggcggcgccgacgtcgtcatgctgcccgatccgaccacgttccgcgtactgccctgggcgccgaccaccggttgggtattgtgcgatctgtacttcgccgacggccgtccggtgcagttcgccacccgtaacatctatcgtgcggcgctgcagaagctcgctgcccgcggctacgactacaaggcggggcttgaggtcgaatttcacgtcttcaaggtggtggacagcaagatgcggccggagcacgccggccagcccggcgagccgccggaggtcagcctgctgtcgcacggctatcagtatctgaccgagcagcgctacgatcagatggagccggtgctcgaattgatccgccgcgatgtcgtcgcgctcggcctcccgctgcgctcgatcgaggtcgagttcggcccgagccagtgcgaattcaccttccagccgacggtcggtctgctgccggccgatctgatggtgctgttccgcgccgcggtgaagcagatctgccggcgtcacggttatcacgccaccttcatgtgccggccgcgaattcccaacgtggtgtcgtcgggctggcatctgcaccagtcagtcgtggcacgcgacggcggccgcaacgccttcatgtcggacagcgacgtactatcggatttcggcaggcattatctggccggcctgatgacgcacgcgcgggccgcgacggtgttcaccacgccgactatcaacggctacaagcgttatcgctcctattcgctggcgccggatcgggcgatttgggggcgggataatcgtggtgtgatgctgcgcgtgttgggcggggcgggcgacaaggcgacgcggatcgagaaccgcgtcggcgagccggccgccaatccgtatctgtacatggcgtcgcagatcctgtccggcctcgacggtgtcgaccgcgcgctcgatccggggccctcggcggatacgccttatgagaccaaggcggatttgttgccgaaatcgctgcgcgaggcgatcttcgcgctgcgcgacgatccgttcttccgtaccgcgctgggcgacgagttcgtcgactattataccttcatcaagaatgccgagatcgagcgcttccaggcggaagtcaccgagtgggagcagcgcgaatatttcgagatgttctag

SEQ ID NO: 32116 - protein, 486 aa, Rhodopseudomonas palustris CGA009
MNVHQRYAMGDSLAAKHGLWSEEQIDAAARVRRIAEEQGLETIRFSFPDQHGILRGKTLVASEALNCLDNGATITTTMLAKDTSHKTVFPVFQAGGGFGMSEMQGGADVVMLPDPTTFRVLPWAPTTGWVLCDLYFADGRPVQFATRNIYRAALQKLAARGYDYKAGLEVEFHVFKVVDSKMRPEHAGQPGEPPEVSLLSHGYQYLTEQRYDQMEPVLELIRRDVVALGLPLRSIEVEFGPSQCEFTFQPTVGLLPADLMVLFRAAVKQICRRHGYHATFMCRPRIPNVVSSGWHLHQSVVARDGGRNAFMSDSDVLSDFGRHYLAGLMTHARAATVFTTPTINGYKRYRSYSLAPDRAIWGRDNRGVMLRVLGGAGDKATRIENRVGEPAANPYLYMASQILSGLDGVDRALDPGPSADTPYETKADLLPKSLREAIFALRDDPFFRTALGDEFVDYYTFIKNAEIERFQAEVTEWEQREYFEMF

SEQ ID NO: 32117 - DNA, 1386 bp, Rhodopseudomonas palustris CGA009
  CDS (1)..(1386): transl_table=11
atgctgaagacgatcgatacgccgcaggtccgcgatgccacgccgaaactgaagctgtactcgcgcgaggaggcggatgcttttgtcgccaaggtgaaggccgccggctacgactacgtgcggttcgaatttcccgatatggccgggctgtctcgggggaagaccattccgatcgggcacgtctctagttatatgcgctctggcctcaatctgtatggcggcacggtggcgctcgacagttattcgatcccggtccgtgattccggctacaatgaggaaatgaactacaccgattgcgtgatggtggtcgacaccgacacgctgacgccggtgccgtggctggagaagaccggtcgagtgatctgcgacacgatgtggtacgacggcacgccgcaaatggcgacgccgcggctgctgctcaagaagatgctgaacgtcgcggcctcgatgggctatacggtgaagtcgggacacgaatacgaattctacgtcgtcgaccacgcgacgcgcgcgccgctgttcggtggccagccgatcttcgtgacctcgcgcacccatcagacacctgctatcgacgacctgatccgcgtgctcgaagcccagggcatcgacatcatcacttggaacgtcgagcatggtccgggccagatcgagatcaactactcggcactcgacgatatcgcggccgccgatcgggcctttgtgttcaagggcaccgtcaaggagtatctcgccaagcacggtctgctcgcgacgttcatgaccaagccctacaaggggctgtctggaagctgctcgcactttcacatctcgctgctcgacagcaagaccggcgaaaacgccttcctggacaaggaagccgagaacggtctatcccgcctgatgcgcagcttcattcagggaatcctcgatcacacccgtgcctgcatggcgctgtggagtccgaccccgaattgctatcgccggatccggccccgcacctatgcaccctcgaacatctcctggggcattcaggatcgttccgcgagcatccgggtcaaggcgagttacgatcaggcgacgcatctcgaagttcgggtgccgtcggcgctgtcgaatccctatctcgtctctgcctcggtgatcgcctccggcctgctcggtgtgatgcagaaccgcgagctgtcaccggcggcggcgggtcctaaggaagacgatgcgcgcttcgagaagctgccgaccgctatcgaggacgccctcgaagcgttcgaggccgacgtcgccttgcgcgagatgctgggcgatgagtttgccaaggtctatctcgcgatgaagtggcaggaagccgcgcgcctgcgtgacgaaatcccggccgccgaaaccaatgaatatttcgagctttactga

SEQ ID NO: 32118 - protein, 461 aa, Rhodopseudomonas palustris CGA009
MLKTIDTPQVRDATPKLKLYSREEADAFVAKVKAAGYDYVRFEFPDMAGLSRGKTIPIGHVSSYMRSGLNLYGGTVALDSYSIPVRDSGYNEEMNYTDCVMVVDTDTLTPVPWLEKTGRVICDTMWYDGTPQMATPRLLLKKMLNVAASMGYTVKSGHEYEFYVVDHATRAPLFGGQPIFVTSRTHQTPAIDDLIRVLEAQGIDIITWNVEHGPGQIEINYSALDDIAAADRAFVFKGTVKEYLAKHGLLATFMTKPYKGLSGSCSHFHISLLDSKTGENAFLDKEAENGLSRLMRSFIQGILDHTRACMALWSPTPNCYRRIRPRTYAPSNISWGIQDRSASIRVKASYDQATHLEVRVPSALSNPYLVSASVIASGLLGVMQNRELSPAAAGPKEDDARFEKLPTAIEDALEAFEADVALREMLGDEFAKVYLAMKWQEAARLRDEIPAAETNEYFELY

SEQ ID NO: 32119 - DNA, 1338 bp, Lactobacillus johnsonii NCC 533
  CDS (1)..(1338): transl_table=11
atgagtaaaactattactgcagaagatattaaaaaaagtgttaaagataacgatgttcgttttctaagattagcctttaccgatattaacggaacatctaaagccgtcgaagttccaactagccaattagataaagttttaactaatgatattcgttttgacggttcttcaattgatggctttgttcgtctagaggaaagtgacatggttttatacccagacttttctacttgggcagttttgccttggggagatgaaaagggtggaaagatcggtcgtttagtatgttcagttcacaagacaaatggtgaaccttttgaaggtgatccaagaaacaacttgaagcgtgttcttaaagaaatgaaagaaaagggctttactgattttgatattggttttgaagcagaatttcatttatttaagttaggtgaggatggtaactggactactgaagttcctgatcatgcttcatactttgatatgacttctgacgatgctggtgcaagatgtcggcgtgatattgttgaaactttagaaagtattggttttgaagttgaagctgctcaccacgaagtaggtgatggtcaacaagaaattgactttagatttgatgatgctttaactactgctgaccgtgttcaaacatttaagatggttgttcgtgaagtagcaagaaagcatggtttgtatgctacatttatggctaagcctgtagaaggtcaagctggaaacggaatgcacactaatatgtctttatttaaagatggtaaaaacgtattctatgataaagatggtgaattccacttatcagatacagctctctatttcttaaatggaattttggaacatgcccgtgcaattacagcaattggtaatccaactgttaactcatataaacgtctaattcctggttttgaggctcctgtttatatttcctgggcttctaagaaccgttcaccacttgttcgtattccagatgctgaagaaattaacactcgtctagaaatgcgttcagctgatccaactgctaatccatatcttctccttgcagcttgtttaactgctggactaaatggtattaaagaggctaagaagccaatggctcctattacttctaatgtttttgaaatgtctgaagaagaaagagctaagcgaggcattaaaccacttccatctactttgcataatgctgtaaaagcttttaaggctgacccactaattcaagaagctttaggtgaacacttgactcaaagctttattgattctaagaaccttgaatggtctaagtacactcaatcagtttctgattgggaaagagaccgttacatggggtattaa

SEQ ID NO: 32120 - protein, 445 aa, Lactobacillus johnsonii NCC 533
MSKTITAEDIKKSVKDNDVRFLRLAFTDINGTSKAVEVPTSQLDKVLTNDIRFDGSSIDGFVRLEESDMVLYPDFSTWAVLPWGDEKGGKIGRLVCSVHKTNGEPFEGDPRNNLKRVLKEMKEKGFTDFDIGFEAEFHLFKLGEDGNWTTEVPDHASYFDMTSDDAGARCRRDIVETLESIGFEVEAAHHEVGDGQQEIDFRFDDALTTADRVQTFKMVVREVARKHGLYATFMAKPVEGQAGNGMHTNMSLFKDGKNVFYDKDGEFHLSDTALYFLNGILEHARAITAIGNPTVNSYKRLIPGFEAPVYISWASKNRSPLVRIPDAEEINTRLEMRSADPTANPYLLLAACLTAGLNGIKEAKKPMAPITSNVFEMSEEERAKRGIKPLPSTLHNAVKAFKADPLIQEALGEHLTQSFIDSKNLEWSKYTQSVSDWERDRYMGY

SEQ ID NO: 32121 - DNA, 1347 bp, Strongylocentrotus purpuratus
  CDS (1)..(1347)
atggagctcataaagaaacgtctacaggataatggcattacctcggttcgtttcgaacaatctgacatgtatgggatcccacactgcagatccattccaaccaggcatttcgaaaggatggcaacgaagggagttaacatctccatgggttttatggctttcgaccccaagggccaagtcgccaagaacactggatatggagaggagattcacaacgctgattgcctcgcctttccagacctggatacctttcagatcttgccttggtgtacgaagacggctagggtcttgatagaaggggtttacaatggtgagaaggtggctgtctacccaagggttgtggctagacgacagttagaaaggctggagaaacacgggttgtcgctttggtcggcgcacgagcacgagttctttgtggtcaaagaagacaccctgaaaccgttgcatgatcagacaaatgccattgcggttattcccatggccgcgtacgagtcgtttttccagcagatactcaatgacctacctcaggctggtgttgacgttgaatgctacggtgttgaatccgggcagtcacaactggaaatcacctaccgcccagagtttgggatcaaagctgccgacactgctcacacgtacaagctgggtatcaaggagattgcgctgaagcacggattagtggcaacgttcatgtcaaaaccatggccggacgtagctggtagttcagcacatttctgccactcgctctgggacgttgacgggaaggtgtccaagctctatgatgctggaagcccgactgggttgtcggagattgggcaacactgggtggctggactccttgctcacgcccgagccatagccgtgctgatggcaccaacaaccaactgcctcaagagattcaagcggcattcttttgctccttggaacgccacatggggtcccgacaaccgaacctgcgccatccgcgtcaaggcaaacggcaaaactggcacatacgtcgagaaccggatgggagccagtgcatgcagtccttacatcagcatggctgcgactattgcagcaggtttagacggtatcatcaacaaactcccgcttccagaaggcatcgatggagcaggggatgcatacgaggaggaatacatcccacccgggacacagacgctaccggacaacatggaagaagccattgatgccttgctctctgacgatgctatcactgcggcccttggaccagagtttatcaagtgcttcgttgctactaaaaggcatgaagtgaaactagaaaaggaggccatttcaaaaggaacagttgaggagtgggagagagattacctctttttcattatgtaa

SEQ ID NO: 32122 - protein, 448 aa, Strongylocentrotus purpuratus
MELIKKRLQDNGITSVRFEQSDMYGIPHCRSIPTRHFERMATKGVNISMGFMAFDPKGQVAKNTGYGEEIHNADCLAFPDLDTFQILPWCTKTARVLIEGVYNGEKVAVYPRVVARRQLERLEKHGLSLWSAHEHEFFVVKEDTLKPLHDQTNAIAVIPMAAYESFFQQILNDLPQAGVDVECYGVESGQSQLEITYRPEFGIKAADTAHTYKLGIKEIALKHGLVATFMSKPWPDVAGSSAHFCHSLWDVDGKVSKLYDAGSPTGLSEIGQHWVAGLLAHARAIAVLMAPTTNCLKRFKRHSFAPWNATWGPDNRTCAIRVKANGKTGTYVENRMGASACSPYISMAATIAAGLDGIINKLPLPEGIDGAGDAYEEEYIPPGTQTLPDNMEEAIDALLSDDAITAALGPEFIKCFVATKRHEVKLEKEAISKGTVEEWERDYLFFIM

SEQ ID NO: 32123 - DNA, 1347 bp, Strongylocentrotus purpuratus
  CDS (1)..(1347)
atggaaaagatcttgaaatcactgaaagaaaatggcatcaagactgtccgatttgaacaatcgcagacctacggaattcctcataatcgatctatcccggtcaaacacttcgagcatatggctacctgtggagtcaacatgtcacttacctacatggcatttgatccgaagggggtgcctattcagaacaccggctatggcgaagaggtccactatgctgactgcaaggcattccctgacctagacaccttccagattctaccatggtgttccaacactgctcgggtcttgatcgaaggagaatacaatgggcagaaggtacctgtttaccctagggttgttgccaaacaacaacttgagcgcttgaaggagttagatctgtccatttggtcagcccatgagcacgaattttacctcgtgaacaaagaaactctgaagccaatggactctgagacattctgtttagcaacagtttgctcgtcggtctacgattctttcttccagcaggttatcaccgatcttcctaaggctggtgttgacatcgagtgtttcgggtgtgaagccggagaaggacagttggagatcacctaccgtccagagtttgggatcaaggctgccgacacagctcataccttcaaactgggaatcaaggagatcgcacttcagcacggatacatcgcttcgttcatgtctaagccatggccagatcaatacggttcatcagcgcactactgccactcgctctgggatgctgatggtaagattccgaaactctacgatgcctctagccctactggtttgtcggagattggacagtactgggtggctggactcattgagcacgccagagctatcaccgtcttcatggcacccaccacaaactgcctcaagagattgagacgcaattccatggctccctggaacgtcacttggggtcctgacaaccgaacctgcgccatcagggtcaaggaacaaggagaaaaaggcacctacatcgagaatcggataggagcaagcgcatgtaatccgtacgtcagtatggccgcaaccattgctgcaggattagatggtatcatcaagaaactcccgcttccagaaggcattgatggtgaaggagatgcgtataatgacgagcatgttccagaaggaactcagaagctacctgagaccatggaagaggcagtggaagctttgctggaagacaaagtcatcattgaagcactcggccctgagttcatcaaatgctttgtggcagcaaagagacacgatattaagttggaaaaggaggcaatagccaaaggacaatgcggagagtgggagaggaaatatctattttatatgatgtaa

SEQ ID NO: 32124 - protein, 448 aa, Strongylocentrotus purpuratus
MEKILKSLKENGIKTVRFEQSQTYGIPHNRSIPVKHFEHMATCGVNMSLTYMAFDPKGVPIQNTGYGEEVHYADCKAFPDLDTFQILPWCSNTARVLIEGEYNGQKVPVYPRVVAKQQLERLKELDLSIWSAHEHEFYLVNKETLKPMDSETFCLATVCSSVYDSFFQQVITDLPKAGVDIECFGCEAGEGQLEITYRPEFGIKAADTAHTFKLGIKEIALQHGYIASFMSKPWPDQYGSSAHYCHSLWDADGKIPKLYDASSPTGLSEIGQYWVAGLIEHARAITVFMAPTTNCLKRLRRNSMAPWNVTWGPDNRTCAIRVKEQGEKGTYIENRIGASACNPYVSMAATIAAGLDGIIKKLPLPEGIDGEGDAYNDEHVPEGTQKLPETMEEAVEALLEDKVIIEALGPEFIKCFVAAKRHDIKLEKEAIAKGQCGEWERKYLFYMM

SEQ ID NO: 32125 - DNA, 1449 bp, Strongylocentrotus purpuratus
  CDS (1)..(1449)
atgacaccggatcacttgagcttggaggggaatctgctagagacaccaggccatcacctcagcgatactgagggaagtcagttggaaacttgtggagctatcatggaaaagatcttgaaatcactgaaagaaaatggcatcaagactgtccgatttgaacaatcgcagacctatggaattcctcataatcgagctatcccggtcaaacacttcgagaatatggctacccatggagtcaacatgtgccttacctacatggcattggatccgaaagggatgcctattcagaacaccggctatggcggagaggtccactatgctgactgcaaggcattccctgacctagacaccttccagattctaccatggtgtaccaacactgctagagtcttgatcgaaggagaatacaatgggcagaaggtacctgtttaccccagggttgttgccaaacgacaaattgagcgcttgaaggagctcggtctgtctatttggtcagcccatgagcacgaattttatctcgtgaacaaagaaacactggagcccatggactctgagacattcgttttagcaacaatttgctcgtcggtctacgattctttcttccagcaggttatttccgatcttccacaggctggtgttgacatcgagtgttacgggtgtgaagccggagaaggacagttggagatcacctaccgtccagagtttgggatcaaggctgccgacacagctcataccttcaaactgggaatcaaggagatcgcacttcagcacggatacatcgcttcgttcatgtctaagccatggccagatatattcggttcatcagcgcactactgccattcgctctgggatgctgatggtaagattccgaaactctacgatgcctctagctctaccggtttgtcggagatcgggcagtactgggtggctggactcattgcgcatgccagagctatcaccgttttaatggcaccgaccacaaactgcctcaagagatttcaacagaattctgctgctccttggaacgccacttggggtcctgacaaccgaacctgcgccatcagggtcaaggcagatggagagacgagcacctacatcgagaatcggataggagcaagcgcatgtaatccgtacatcagtatggctgcaaccattgctgcaggattagatggtatcatcaagaaactcccgcttccagaaggcattgatggtgaaggagatgcgtataatgacgagcatgttcccgaaggaacccagaagctacctgagaccatggaagaggcggtggaagctttgctggaagacaaagtcatcactgaagcccttggccccgagttcattaaatgctttgtggcagcaaagaggcacgatattcagttggaaaaggaagcaatagccaaaggaaaatgcgaagagtgggagaggaaatatctattttatatgatgtaa

SEQ ID NO: 32126 - protein, 482 aa, Strongylocentrotus purpuratus
MTPDHLSLEGNLLETPGHHLSDTEGSQLETCGAIMEKILKSLKENGIKTVRFEQSQTYGIPHNRAIPVKHFENMATHGVNMCLTYMALDPKGMPIQNTGYGGEVHYADCKAFPDLDTFQILPWCTNTARVLIEGEYNGQKVPVYPRVVAKRQIERLKELGLSIWSAHEHEFYLVNKETLEPMDSETFVLATICSSVYDSFFQQVISDLPQAGVDIECYGCEAGEGQLEITYRPEFGIKAADTAHTFKLGIKEIALQHGYIASFMSKPWPDIFGSSAHYCHSLWDADGKIPKLYDASSSTGLSEIGQYWVAGLIAHARAITVLMAPTTNCLKRFQQNSAAPWNATWGPDNRTCAIRVKADGETSTYIENRIGASACNPYISMAATIAAGLDGIIKKLPLPEGIDGEGDAYNDEHVPEGTQKLPETMEEAVEALLEDKVITEALGPEFIKCFVAAKRHDIQLEKEAIAKGKCEEWERKYLFYMM

SEQ ID NO: 32127 - DNA, 1548 bp, Strongylocentrotus purpuratus
  CDS (1)..(1548)
atgggagtagacagtgttactgatatcgtcggagtgatcgaagtgcgcagacgacacaggggattcattttggcgggagaacgatacgctgagctcgacgatatcggaaagctggagttttcattgtatttcgacgtcgttgtcacgttcatcgccattgatataggagcaggaaaagagctagaggttctcgacgtcaccaggagcatggagagggcgctgaagctgatcgatctgtttggcatcacctcagttcgcttcgagcaaactgattactatggtatcccacactgcaaggtgatcccggtaaagcacttccgggacaaggcgatacacggccagaacttttgcctcgggtacctgtcgttcaacccccatggccaacccatcggaggcacaggatacggcgaggagattcactacgaagacgccgtctgctttccagacttggcttcctttcaggtattaccttggtgtaagaagacggcacgggttctcgtagagggcgtctacgaagggaaggttgttgagggataccccagggttgtcgcacgtaggcaacttgagcgtcttgaggagatgggatactcactattctccgctcatgaatttgagttctacatggtcgatgagaagacgcaagaaccgatcgataattccactaacgccaacgcgacatcgcgcctctttaaaattcgggacttcacggaagacgtgttggaaggactacctcaggcaggtgtggatttggagttcattgggagcgagtcggccacggggcagttcgagatcacctaccgtccaagttttggcattcgtgctgcagacaatgcccacacctacaagatgggcatcaaggaaatcgcacagaaacatggatacatcgccagtttcatgtccaaaccttggccggacaaaagtggctcatcggcgcatttctgtcattctctttgggacgtcaccggggaaatacccctgctctacgacccgtctcaaccattacagctctcaaagctgggtcagtactgggtagctggtctgcacgcacacgcatgtgcgctagctgttctaatgggtccgacagtgaattgtctcaaacgctacaagccattcagcttcgccccaagtaacgcaacgtgggggatggataaccgaacttgcgccatccgcgtccgggtccaaggtgccaaaggaacctacatcgagaacagaatgggagcgagcgcgtgcaacccttacatcagcctagcggcaacggttgcggccggaatcgatggtatcgtccgaaggttacctctacccgagcgggtcatcggagatgcctacaaagacgaggatatcccaccgctgacgcccaaattaccaaacaacatggcggaagcgttagactgcttgctgaatgatgaggtcatggtatcttccttaggacaagacttcattaagtgtttcgttgcgggaaagcgaaatgagctggaactcgagagagcagcaattgagaggggtgaactgcacaaatgggagcatgactatttctttgaagtaatgtaa

SEQ ID NO: 32128 - protein, 515 aa, Strongylocentrotus purpuratus
MGVDSVTDIVGVIEVRRRHRGFILAGERYAELDDIGKLEFSLYFDVVVTFIAIDIGAGKELEVLDVTRSMERALKLIDLFGITSVRFEQTDYYGIPHCKVIPVKHFRDKAIHGQNFCLGYLSFNPHGQPIGGTGYGEEIHYEDAVCFPDLASFQVLPWCKKTARVLVEGVYEGKVVEGYPRVVARRQLERLEEMGYSLFSAHEFEFYMVDEKTQEPIDNSTNANATSRLFKIRDFTEDVLEGLPQAGVDLEFIGSESATGQFEITYRPSFGIRAADNAHTYKMGIKEIAQKHGYIASFMSKPWPDKSGSSAHFCHSLWDVTGEIPLLYDPSQPLQLSKLGQYWVAGLHAHACALAVLMGPTVNCLKRYKPFSFAPSNATWGMDNRTCAIRVRVQGAKGTYIENRMGASACNPYISLAATVAAGIDGIVRRLPLPERVIGDAYKDEDIPPLTPKLPNNMAEALDCLLNDEVMVSSLGQDFIKCFVAGKRNELELERAAIERGELHKWEHDYFFEVM

SEQ ID NO: 32129 - DNA, 1341 bp, Strongylocentrotus purpuratus
  CDS (1)..(1341)
atgagtctgagtaaagtacttgaggaaatcaaggagaaggggatcactgcagtcagatttgagcagaccgacttacatggcatagcccggtcgaagctgatacctgcccgtcacttcaaggaaaaagcaacgggaggggtgaactgttacttgggtcatctcggtatgagtctccaagcggatgtgatcccagggactgggtatgctgaggaagtcggatttgctgatgccgtcctgttcccggattacagtacattcacggtgcttccttgggctgagaacacggctcgtattctgattgaaccaacttataaaggggaatacgtatctgctcacccaagggtcttggcacgcaagcagctggagaagctcaagaacctaggttattccctgtattctgctcacgaacacgagttctacgttgtggataaggagaccaagaaacctatcaacaatgatgtcaatattcgatccactttgaggatgtttccgatccggaactttgtcaagcaggttatggaggatatgcccattgtcggtgttgatatagaagcagttgaatctgaatatggccctggacaggtggagatatcctacaaaccagctttcgggatcagggctgcagacaatgctttcactttcaagactagtatcaaagagattgcacttctccaagggtttcaagcgtctttcatgtcaaagccgttccccaaccagagtggatcctgtacccacttttgccattccttgtacgatgcagatgagaaaacccctgtgttttacgatcccaacagtcccattggtctgtcggaggtttgtcagaactgggctgcaggaatacttgcacatgcccctgcgattgaagtcctcatggctcccacagtaaactgtctgaagcgagttggaggagcattctctccgatgaacgccacttggggtatggacaaccgctccgccttgcttcgtgtcaaggtcaacggagacaagggcacctacttagagaaccgtgggggagccgctggtgctaactgctacctggtgttggctgcaacagttgcagcaggaatggatggtatcatcaacaagtacaagcttcctgcagaggttacagggatagcttctaatcctgaagacatcccgcccaagacgcccaatctgcctaacaccatggagaccgcgttggaggctcttattaatgatgaggtaattagggatgcctttggagaggatttcatcaagtgcttcagtgctgtgaagatgcatgaagtgaagctagcaagagaggcccaggctaaaggccaagatgattgggactttgatttctactttgagtatctgtga

SEQ ID NO: 32130 - protein, 446 aa, Strongylocentrotus purpuratus
MSLSKVLEEIKEKGITAVRFEQTDLHGIARSKLIPARHFKEKATGGVNCYLGHLGMSLQADVIPGTGYAEEVGFADAVLFPDYSTFTVLPWAENTARILIEPTYKGEYVSAHPRVLARKQLEKLKNLGYSLYSAHEHEFYVVDKETKKPINNDVNIRSTLRMFPIRNFVKQVMEDMPIVGVDIEAVESEYGPGQVEISYKPAFGIRAADNAFTFKTSIKEIALLQGFQASFMSKPFPNQSGSCTHFCHSLYDADEKTPVFYDPNSPIGLSEVCQNWAAGILAHAPAIEVLMAPTVNCLKRVGGAFSPMNATWGMDNRSALLRVKVNGDKGTYLENRGGAAGANCYLVLAATVAAGMDGIINKYKLPAEVTGIASNPEDIPPKTPNLPNTMETALEALINDEVIRDAFGEDFIKCFSAVKMHEVKLAREAQAKGQDDWDFDFYFEYL

SEQ ID NO: 32131 - DNA, 1446 bp, Magnaporthe grisea 70-15
  CDS (1)..(1446)
atggcgtccatcacactcgagtccctccccgatgtcttggccaacgataccaaggtcaaactcgcgggcatcgacgtcgatggtatcctgcgcggcaagcttgtgtccaagaagaagttcctctccatagccaaggatggctttggtttctgttccgtcatctttggctgggacatgcacgaccagacctacttccgcgagctggaaatcagcaacgccggcaatggctaccgtgacctcgtcgccattcccgacctcgccagcttccgtcgcgtgccctgggagaacgacatcccgttcttcctcgtcagctttcacgacccggacactatggaacccatctgtgcttgccccaggggcctgctgcggactcagcttgataagatcaagagcgaaggatatggagccatggctggagccgagtatgaattctaccagttcaggacaccatcgtccgacccggctgcttccagcgccccttcaactgccgcatacctccgcgaaaaccctccgcattcccttcccgctttgaccgagggaatgtttggttacagtctcacgaggccagtgcacaaccaagactacttctacgacatatttgacacttgcgaaaagttcaactgcaacattgagggctggcacaccgagagtgggccgggcgtgttcgaggccgcgctcgaatttggagagatcactggcatggcagaccgtgcgagcctattcaaatacgccgtcaagtcggttgcgacaaagtacggcatcacaccttgcttcatggcaaagcctaagcaaggtctccctggcaacagcggtcacatgcacatatctctggttgacaactcgggcaagaacctgttcgcccgcgaaactccggacgagaatgcgccgtggcccgacgttgctcagctctcggacattggccgtcacttcctggctgggctcctcgaaggcttgcccgacgttatgccaattgtcgcccccaccatcaacagctataagcgcttggtggagaacttttgggcgcccgtgacggtctcatggggcctggagcaccgcgccgctagtattcgcctgatcgccccaccgacctccaagccgggggcaacacgctttgaggtccgggtaccgggagcagacacaaacccctcgcttgtcctggccgctatcctggctctgggctggcgcggtgtgcagaagaagctcgagattccttgcccacccctcggcaagggcgagcaggtcggcggtgagagtgacactggcatcaggctggccaagagtcttcgtgaggccaccgaccgatttatgaggaaagaaagcgtcgcgagggaggctttcggtgatgcttttgtcgaccactatggcggcaccagggagcacgagatcaggcagtgggatgaggctgtaacggattgggaaatgaagaggtacatcgaaacagtttag

SEQ ID NO: 32132 - protein, 481 aa, Magnaporthe grisea 70-15
MASITLESLPDVLANDTKVKLAGIDVDGILRGKLVSKKKFLSIAKDGFGFCSVIFGWDMHDQTYFRELEISNAGNGYRDLVAIPDLASFRRVPWENDIPFFLVSFHDPDTMEPICACPRGLLRTQLDKIKSEGYGAMAGAEYEFYQFRTPSSDPAASSAPSTAAYLRENPPHSLPALTEGMFGYSLTRPVHNQDYFYDIFDTCEKFNCNIEGWHTESGPGVFEAALEFGEITGMADRASLFKYAVKSVATKYGITPCFMAKPKQGLPGNSGHMHISLVDNSGKNLFARETPDENAPWPDVAQLSDIGRHFLAGLLEGLPDVMPIVAPTINSYKRLVENFWAPVTVSWGLEHRAASIRLIAPPTSKPGATRFEVRVPGADTNPSLVLAAILALGWRGVQKKLEIPCPPLGKGEQVGGESDTGIRLAKSLREATDRFMRKESVAREAFGDAFVDHYGGTREHEIRQWDEAVTDWEMKRYIETV

SEQ ID NO: 32133 - DNA, 1377 bp, Yarrowia lipolytica CLIB122
  CDS (1)..(1377)
atgaactgggaatccgaactcgaaaacgacacggccgtcaaggtggcgggaatcgacattgacggcattgtgcggggcaagtccatctccaaagccaagttcctcagcgtcatctccaagggatttggcttctgcggcgtgattttcggatgggacatgcacgacaaaaactacaccaaggagctgactgtcagcaacaaggacaatggctaccgcgacctgctggccatcatcgacctgtcgtcgttccggcggctgccgtgggaaaacaacatccccttctttcttgtgcatttcaaggactcggtcacccaggaggaaatcgcgccgtgtccgcgctcgctgctcaccgccgttaccggactctacttcaaggacaagatgaaggccatggccggagcagagctcgagttctacaacttttgcctcgacagaaaagacctgccggactcgttcgcaaaactgccccccatctctacaggcatgtttggatactcggtccagcgcccagccctcaacggagactacttccaggccgtctgggacaccgccctcaagattgacgcgcccctggagggctggcacacagaaacaggaccaggagtgctcgaagcagccattgcgttcgacgaggtcaacaaactggccgacaagacttcgttgttcaaactcatggtcaaatccatcgccccacagtacaaggtgatcccctgcttcatggccaagccccagcagggcatgccgggcaattccggccatctgcacgtgtctctggtggaccaggagtccgggaaaaacctgtttgcacgtgatcagcccgaccccaaccccgagtggcccgacgtcgagtacctgtctgatttgggccgccattttctcgccggagtgcttgacggcctcccagacattatgcccatgtttgcgcccaccatcaactcgtacaagcgtctggtggagaacttttgggcgccggtgacagtgagctggggtctggagcaccggattgcgtccatccgactcattgcaccccccacaggttctgccagtgccacccggtttgaaatccgaactcccggagccgatgtgcaaccccatttcgctctggccgccattctagcgctgggacaccgaggaatcgccaaaaagatgcccctgaccgtgcctcccatgggcgacagttctccagacaagtttgaacggctgcccagggacttgatgcgggccacggagcatttcatgagacccgacagtttggccagggagctgtttggcgacaagtttgtcgagcactatggagagacgagattgcatgaatgtcgagagtttatggagtcggtcaccgcgtgggaggttgatcggtacattgagacggtctaa

SEQ ID NO: 32134 - protein, 458 aa, Yarrowia lipolytica CLIB122
MNWESELENDTAVKVAGIDIDGIVRGKSISKAKFLSVISKGFGFCGVIFGWDMHDKNYTKELTVSNKDNGYRDLLAIIDLSSFRRLPWENNIPFFLVHFKDSVTQEEIAPCPRSLLTAVTGLYFKDKMKAMAGAELEFYNFCLDRKDLPDSFAKLPPISTGMFGYSVQRPALNGDYFQAVWDTALKIDAPLEGWHTETGPGVLEAAIAFDEVNKLADKTSLFKLMVKSIAPQYKVIPCFMAKPQQGMPGNSGHLHVSLVDQESGKNLFARDQPDPNPEWPDVEYLSDLGRHFLAGVLDGLPDIMPMFAPTINSYKRLVENFWAPVTVSWGLEHRIASIRLIAPPTGSASATRFEIRTPGADVQPHFALAAILALGHRGIAKKMPLTVPPMGDSSPDKFERLPRDLMRATEHFMRPDSLARELFGDKFVEHYGETRLHECREFMESVTAWEVDRYIETV

SEQ ID NO: 32135 - DNA, 1437 bp, Aspergillus nidulans FGSC A4
  CDS (1)..(1437)
atgtccgccacagaagtcacgtccgaaaacgtcgcgcaaatcttgcagaatgacacacgggtgaagctggctggcgtcgacgccgacggcatgcttcgcggcaagctggtctccaagaagaaattcctctcggtcgtcgatgagggattcggtttctgctcggtcatttttggctgggatatgcatgatagaacatatttccgcgagcttgggatcagcaacaaagagaacggttaccgggatctcctggccaaaccggatctctccagtttccgccgcatcccctgggagaataacgtgcctttcttcctcgtcagcttctatgacccggatacgaaggagccgttgtttgcatgtcctcggagcttgctgaggatggctctgcgcaagcccgaggcgcaagggtatcgtgcgatggcgggtgcggaatatgagttttaccagttcgcaacacccaatcgcaatgcctcgtccacggcatccttcttgaaagagaacccggtcgaggcgctcccgtcgatcacagacgggatgttcggatacagtttgacgcgtccgattcataaccaagactactactacggcatctttgatgcctgcgagcaatttaactgtgagatcgaggggtggcacaccgagagcggaccgggcgtttatgaagcggccttacagttcggcgaagccaaggggatggcggataaagcaggacttttcaaatatgtcgtcaaatccatcggcacgaaacatggcatcacgccgaccttcatggcaaagccgcgcgagggcttaccgggcaacagtggccacatgcacatttcgctggtgaacagtgatgacacgaatgcgttccaccgttcaaccccggatccctctcctccgtaccccgacgtggcttacctttctgacctgggacgatgtttcctggctgggatccttacggggcttccggacattatgccaatgttcgcgccgactgtcaactcctacaagcgcttagtggagaacttctgggccccggtaaccgtgtcttggggcttagagcaccgggccgcatctattcgtcttattacgccgccaaccgcgagcccgaaggccactcggctggaggtacgtgtgcctggagccgatgcgaacccgcatttcgtgctggcagccatagtcgcattgggatggtggggtgtggagaagaaactcgagattcctgtcccgccgctatccaagggtgaggatatggggggcgagagcgataagggagtacggcttgctaagaatttgggtgcggcgatcgccacgtttacgcgaaaagacagtgtcgcacgggaagtctttggcgatgctttcgttgatcactttggtgggactcgggaacatgaactgcgcttgtgggaagaggccgtaacggactgggaggtgcgacggtatattgagacagtctag

SEQ ID NO: 32136 - protein, 478 aa, Aspergillus nidulans FGSC A4
MSATEVTSENVAQILQNDTRVKLAGVDADGMLRGKLVSKKKFLSVVDEGFGFCSVIFGWDMHDRTYFRELGISNKENGYRDLLAKPDLSSFRRIPWENNVPFFLVSFYDPDTKEPLFACPRSLLRMALRKPEAQGYRAMAGAEYEFYQFATPNRNASSTASFLKENPVEALPSITDGMFGYSLTRPIHNQDYYYGIFDACEQFNCEIEGWHTESGPGVYEAALQFGEAKGMADKAGLFKYVVKSIGTKHGITPTFMAKPREGLPGNSGHMHISLVNSDDTNAFHRSTPDPSPPYPDVAYLSDLGRCFLAGILTGLPDIMPMFAPTVNSYKRLVENFWAPVTVSWGLEHRAASIRLITPPTASPKATRLEVRVPGADANPHFVLAAIVALGWWGVEKKLEIPVPPLSKGEDMGGESDKGVRLAKNLGAAIATFTRKDSVAREVFGDAFVDHFGGTREHELRLWEEAVTDWEVRRYIETV

SEQ ID NO: 32137 - DNA, 1443 bp, Ustilago maydis 521
  CDS (1)..(1443)
atgtcccaaaccaaaatcaagtacagcgatctggaagagctgctgaagaatgacaacaaagtcaaggtagccggcgtggacgtcgacggcatcgtgcggggcaagtacgtttccaagaaaaagtttctctctgcggccaaaccggactcggactttggcttctgctcggtcatctttggttgggatatgcacgatcaggtgtaccccaccgagctgctcgtctcgaacaaggccaacggataccgcgatctatcggccaagatcgacttggacacgtaccgtcgtattccatgggaggacaatttgccgttcttcctgattcgctacttcaacgcggatggcagcgcgcttgcggtttgtccgaggaacttgcttcgttcggtgacgagcaaagtggaggctcaactcggattgctctgcatggcgggcgccgagtttgagtacttccagtttgccgaaaccgcgcagacgctcgacgacaagcgatttgtcaagctcaatgcgttgacgccgggcaatcacggctattcgatgctgcgaacttcgctgaacaaggactactttctgcagctctttgacgctgccgaagcgtttgggatcgacgtcgagggtcatcacaccgagacggggccgggcgtatacgagacggcgctcgcgtataccgaggtgacgcgcatggcggatatggcggtgctgtacaagctgcttgcgaaatcgatcggcatgcagcacggcatcacgcctacatttatggctaagccgtgggcgaatttggcgggatgttccggtcacatccacgtctcgcttcgcgatgcgtcgacgggcaagaacgtgtttggcctgagtgccgaacagatcgcggctggaggacgtgccgatgccgagtacgacgatgtcaagtacctttccgaaatcggagagcaatttctggcgggcctgatgacgggtttgccagacatcatgccactgttgtgcccgacgatcaactcgtacaagcggctcaccacgggcgaggcgtactgggcgcccaacatctgttcgtacggctatgattcacggcttgcgtcggtgcgcatccttggtccgcccgacgtgccagactacggtacacgcttcgaggtgcgcgttcccggcgccgatctgaacgcgccgtacgcgtttgcggccgtgtttgctttggggctgtacggtattcagaacaagctgaaactgccgtttgcgcccatggacgcgagtcggagcgtcaaggagcagaagctcgtctacctgcccacctcgctcgaagcagcaacgcatcggttcatgcatgcgcacagcctcgccaggaaggtgctcggcgatacgcttgtcgatcactttggcggcacacgtctgcacgaagttagcttgttcaaccagaccgtgaccaactgggagatggagaggtacatggagttgatctga

SEQ ID NO: 32138 - protein, 480 aa, Ustilago maydis 521
MSQTKIKYSDLEELLKNDNKVKVAGVDVDGIVRGKYVSKKKFLSAAKPDSDFGFCSVIFGWDMHDQVYPTELLVSNKANGYRDLSAKIDLDTYRRIPWEDNLPFFLIRYFNADGSALAVCPRNLLRSVTSKVEAQLGLLCMAGAEFEYFQFAETAQTLDDKRFVKLNALTPGNHGYSMLRTSLNKDYFLQLFDAAEAFGIDVEGHHTETGPGVYETALAYTEVTRMADMAVLYKLLAKSIGMQHGITPTFMAKPWANLAGCSGHIHVSLRDASTGKNVFGLSAEQIAAGGRADAEYDDVKYLSEIGEQFLAGLMTGLPDIMPLLCPTINSYKRLTTGEAYWAPNICSYGYDSRLASVRILGPPDVPDYGTRFEVRVPGADLNAPYAFAAVFALGLYGIQNKLKLPFAPMDASRSVKEQKLVYLPTSLEAATHRFMHAHSLARKVLGDTLVDHFGGTRLHEVSLFNQTVTNWEMERYMELI

SEQ ID NO: 32139 - DNA, 1449 bp, Cryptococcus neoformans var. neoformans B-3501A
  CDS (1)..(1449)
atgtccccgtcaccaacagagaacgccccaaccaacctcgaagaactcgaggagctgttgaagaacgacaacaaggtcaaagtagcaggcgtggatgttgaaggtgtgctcagaggcaagatcatgagcaaggcaaagctgctttcatcggtcaagtctgaaggcttcaacttttgtagcgttatctttggatgggatatccatgaccaggcttacaacaaggaactccttgtcgccaactgggataatggatatcgtgatttgttcgctgttatcgacctttctacctttcgccgattgaaatgggaaaaggatattccttttttcttgtgccgatttgtcattccggaaacgggagaagtcctccctgttgaccccagaagcctgattgcaaaggtcacggacaagggggaagctatggggtacaagtgcatgagtggtgccgaattcgaatactttcagttcgccgaaactaccaaatcattggcagacaagaatttcaggaatctaaaccctcttacccctggcatgcacggttattctatcttacggcctacacttaatatggactatttccacgatctgtatgacatggccgttaactttggaatcgaggtcgaaggacatcacacggaaaccggccccggagtgtttgaaaccgcactcggatacactgatgcttccagaatggccgataatgcctgcttattcaagcttgtcgccaagagcatcggtatgaaatacggtatctctcctactttcatggctaaaccttggggagatcttcctggatgctctggccacattcacgtttcactgcaagacaagaacggcaaaaacatctttgcagtctctgatgaggaggcggccaatggtggcagaaaggacgctgctttcgaggacctcaagtatctatcacaagaaggagagtggttcctggccggcttgcttgaaggcatgcctgacgtggtgccgatgttctgccctaccatcaactcctacaaacggttacaagggggacaggctatgtgggctcctgacacagcgacatacggctatgactctcgagcagcctctgtacgattactcacggccccaggcgtgccgggttatgctacccgatttgaagttcgagtacccggtgccgacatgaacccttactttgccatgtcagccatcttcgctctcggtcttcgtggtattgagcaaaaacgagttttgccttacggccccatcggctcttccggcgtctctcgcgatactgtgaagcaccttcctacatcgttggacagtgcaacggaggcatttatgaaaaaggatagtttagcgagagaggtttttggtaacttttttgtggaccattacggagggaccagggagcacgaggttgagctgcatagaaaggctgttactgattgggaggttgctcgttactttgagttggtgtaa

SEQ ID NO: 32140 - protein, 482 aa, Cryptococcus neoformans var. neoformans B-3501A
MSPSPTENAPTNLEELEELLKNDNKVKVAGVDVEGVLRGKIMSKAKLLSSVKSEGFNFCSVIFGWDIHDQAYNKELLVANWDNGYRDLFAVIDLSTFRRLKWEKDIPFFLCRFVIPETGEVLPVDPRSLIAKVTDKGEAMGYKCMSGAEFEYFQFAETTKSLADKNFRNLNPLTPGMHGYSILRPTLNMDYFHDLYDMAVNFGIEVEGHHTETGPGVFETALGYTDASRMADNACLFKLVAKSIGMKYGISPTFMAKPWGDLPGCSGHIHVSLQDKNGKNIFAVSDEEAANGGRKDAAFEDLKYLSQEGEWFLAGLLEGMPDVVPMFCPTINSYKRLQGGQAMWAPDTATYGYDSRAASVRLLTAPGVPGYATRFEVRVPGADMNPYFAMSAIFALGLRGIEQKRVLPYGPIGSSGVSRDTVKHLPTSLDSATEAFMKKDSLAREVFGNFFVDHYGGTREHEVELHRKAVTDWEVARYFELV

SEQ ID NO: 32141 - DNA, 1374 bp, Strongylocentrotus purpuratus
  CDS (1)..(1374)
atggagtgcgtggaagagatttgtgggaatcccagtttagacgacatcagaaaagaaatcgacaaaaaggacgtcgagtttgtccgcttcgaattcggcgacctccacggtattgcgaggtcaaagattataccagcacgtcacttccgggaaaagtcatgcaaaggcatcaacattccgattgcgcaccttggtatggactgccgagggagcccggtagctgaggcaaaatacatcagccaaggggattactgcgatgcagtatggacacccgacctatcgacctttcgagttttgccatggtgtgacaacacggccagggtgattttagaacccactctgaaaggaaaaccagttgatatgtttcctcgaactctggcaaggaaacaggtggatcgcctcacgaagatggggctgtccttgcttacggcccatgagcatgagttctacatcgtggacagaaagacggggcagccactgacccaagattacaaccttcgagcaacggtgcgtaactacacggatcctctcctgattagatcgcttatgcaagctttaacagctgttggtgttgatgcggagatgatggacacagagaagagcccaggtcaggtcgagatcacatacaaaccagcattcggtatccaggcggcagacaatgcgtatacctacaagacaaccatcaaggaagttgcgatgcagagagggtatgtggctagcttcatgagtaaaccgtgggccgaactgaacggaagctctgcccatgtgtgccactccttgtgggacagcacccagcaacgccctctactttacgctgaagatcaacccttcggcttgtccaagattggttgtcactggatagctggtctgttggtgcatgctccagctcttagtatcctaatggcaccaaccgtgaactgcctcaagagattcgaagccaattccttcgcgccctacaatgtcacttggggactcgacaacagaacctgtgcgttgcgtgtcaaggtcggcggtggcgcagatacgtacatcgagaatagaatgggtgccagcggcagcaacccctacctcaccctcgcagccacaatcgctgcaggcatcgacggcatcaagcgggaactcgtcccaccgcaacccatcgcaaacaacgcctatcttccaggcaatgtacctgcggacaccgccatcttgcccgcgaccatggacgaagctttggaagcgttttcccaagatgacgttattaggtcagctctaggtgaggagttcatgaatgagttctgcgtactcaaaatgcatgaaatgaaagagtacaatgaggcgaagctaaaacaagactctaaatgggagtataagatgtactttgaatacatctaa

SEQ ID NO: 32142 - protein, 457 aa, Strongylocentrotus purpuratus
MECVEEICGNPSLDDIRKEIDKKDVEFVRFEFGDLHGIARSKIIPARHFREKSCKGINIPIAHLGMDCRGSPVAEAKYISQGDYCDAVWTPDLSTFRVLPWCDNTARVILEPTLKGKPVDMFPRTLARKQVDRLTKMGLSLLTAHEHEFYIVDRKTGQPLTQDYNLRATVRNYTDPLLIRSLMQALTAVGVDAEMMDTEKSPGQVEITYKPAFGIQAADNAYTYKTTIKEVAMQRGYVASFMSKPWAELNGSSAHVCHSLWDSTQQRPLLYAEDQPFGLSKIGCHWIAGLLVHAPALSILMAPTVNCLKRFEANSFAPYNVTWGLDNRTCALRVKVGGGADTYIENRMGASGSNPYLTLAATIAAGIDGIKRELVPPQPIANNAYLPGNVPADTAILPATMDEALEAFSQDDVIRSALGEEFMNEFCVLKMHEMKEYNEAKLKQDSKWEYKMYFEYI

SEQ ID NO: 32143 - DNA, 1350 bp, Unknown
  Unidentified
  CDS (1)..(1350)
atgagtctgagtaaggtgttagagaccatcagtgacaaccatcttgagtttattcgtatggaggtctcagatgtctacggcatcgctcgatcacggactgtaccggcccgccattttgaaaacacatgcaagtcgggtctcttcatgccgttggccacctattgtttcaatggcgcaggagctgacgcagataaatatgactgcgggttgtgttgggaggtaggatatggggatgtgaagctgcatccagacctagagacatttcaagtcataccatggtgcgagaataccgggcgagtgctgatgaatgcagaactcggcggtaaacccatgatggtgtgccctcgaggaatcgcaaacattcagctgcagaagttggaggagatgggttattctcttttttcggcccacgaatatgagttctatgtggtggatgccaagacacgtgagccactactgaaggatgggaatctgctgtcaaccctgcggacatacaccgacaccaagctacttcatcagctcatgagagacctgccaaaggttggagtcgacatcgaaagtgcagaaggtgagggtggtgtcggccagatggaaatcacataccgtccagcgttcggactacgctccgccgataacgcacacacatacaagttatcggtgaaagagattgctagacaacatggctacatggcatccttcatgtcaaaaccgtggccaaacaggagtggtagttcctctcacttctgtcactctctctgggatgccaagaccaaagaacctctcgtttatggcaaggacagtccatgtgggatgtctgaagtcgctcagcactgggttgcgggactactagaacacgcaccagctcttacaatccttgcctcaccaactgtcaactgtctgagccgtcttaaaccaaacacgttcgctcctgtcaactcgacctggggcattgacaaccgtacaaccgccatgcgaatcaaaataaacggacagaaaggcaccttcattgagaatcgtatcggtgccagcgggagcaacccttatctcctcttagctggtaccgtaatagcgggaatggacgggatcaaaagaaagcttcctcttcctcaggaatccacaggaaactcatatgaggcgaatggtgttcatccctgcggtcaagatctcccgaatactatggagagagcagtagaggcgctcaaggcagacaaggtgatggtcgaagctctaggacccgacttcatcaagtgtttcttggcaatgaagaaaaaagaacttgtagaatcacgacaggccgttactaacaaagacgatgaatgggaaaggaagatgttttttgaatatctgtga

SEQ ID NO: 32144 - protein, 449 aa, Unknown
  Unidentified
MSLSKVLETISDNHLEFIRMEVSDVYGIARSRTVPARHFENTCKSGLFMPLATYCFNGAGADADKYDCGLCWEVGYGDVKLHPDLETFQVIPWCENTGRVLMNAELGGKPMMVCPRGIANIQLQKLEEMGYSLFSAHEYEFYVVDAKTREPLLKDGNLLSTLRTYTDTKLLHQLMRDLPKVGVDIESAEGEGGVGQMEITYRPAFGLRSADNAHTYKLSVKEIARQHGYMASFMSKPWPNRSGSSSHFCHSLWDAKTKEPLVYGKDSPCGMSEVAQHWVAGLLEHAPALTILASPTVNCLSRLKPNTFAPVNSTWGIDNRTTAMRIKINGQKGTFIENRIGASGSNPYLLLAGTVIAGMDGIKRKLPLPQESTGNSYEANGVHPCGQDLPNTMERAVEALKADKVMVEALGPDFIKCFLAMKKKELVESRQAVTNKDDEWERKMFFEYL

SEQ ID NO: 32145 - DNA, 1368 bp, Mycobacterium sp. JLS
  CDS (1)..(1368): transl_table=11
atggggacccgaaccggcatgttggcgcaggccgacctcgaacgcatggtgtccgagcgcgagatcgacacggtcatcgtcgcgttcaccgatatgcagggccgactcaccggcaaacgcatctcggcgcgcctgttcgtcgacgacgtcgccgcacacggcgcggagtgctgcaactacctgctggccgtcgacgtcgacaacaacaccgtctgcggatacgcgatctccagttgggagaccggctacggcgacatggtgatgacgccggacttcgacacgctgcgcctgctcccgtggctgccgggcaccgcgctggtgatggccgacctgtcgtggaccgacgggcggcccgtgacccaggcgccgcgcagcatcctcaaccgccagatcgaccggctcgcggagcgggacctggtgccctatgccagcaccgaactcgagttcatggtgttcgacgactcgttccgcgcggcgtgggcggcgggctaccggggcctcacggcggccaccgactacaacatcgactacgcgatgctggcctccacccggatggagccgctgctgcgcgacatccggctcgggatggagggcgccgggatgtactgcgaaggtgtcaagggggagtgcaacctcggccagcaggagatcgggttccgctacgaccacgcgcgggtgacgtgcgacaaccacaccatctacaagaacggcgcgaaggagatcgccgaccagcacggcaagagcctgacgttcatggcgaaattcgatgagcgcgaaggcaacagctgtcacatccacatctcgctgcgcggcagcgacggtagtaccgtcttcgccgacgaggacgccgaagacggtatgacaccgctgttccgcagcttcatcgccggccagatcgcgacgatgcgcgagttctcgctgtgctatgcgccgaacatcaactcctacaagcggttcgccgaaggcagctttgcgccgacggcgatcgcctggggtttcgacaaccgcacctgcgcgctgcgcgtcgtcgggcagggggcgggtatgcggatggagaaccgcgcgcccggcggcgacgtcaaccagtacctcgcggtgtcggcgctcatcgccggcgggctgtacggcatcgagaacgaactcgaactgccggatccggtgaagggcaacgcctacaccagtggggccgaacgcctgcccaccacgctgtccgaggcggccgaactgttcgaccgctccgagatcgcccgcgaggcgttcggcgacgacgtcgtcgaccactatctgaactacgcgcgcgtggagctgaacgcgttcaacgccgcggtgaccgactgggaaagggtgcgcggttttgagcggctctga

SEQ ID NO: 32146 - protein, 455 aa, Mycobacterium sp. JLS
MGTRTGMLAQADLERMVSEREIDTVIVAFTDMQGRLTGKRISARLFVDDVAAHGAECCNYLLAVDVDNNTVCGYAISSWETGYGDMVMTPDFDTLRLLPWLPGTALVMADLSWTDGRPVTQAPRSILNRQIDRLAERDLVPYASTELEFMVFDDSFRAAWAAGYRGLTAATDYNIDYAMLASTRMEPLLRDIRLGMEGAGMYCEGVKGECNLGQQEIGFRYDHARVTCDNHTIYKNGAKEIADQHGKSLTFMAKFDEREGNSCHIHISLRGSDGSTVFADEDAEDGMTPLFRSFIAGQIATMREFSLCYAPNINSYKRFAEGSFAPTAIAWGFDNRTCALRVVGQGAGMRMENRAPGGDVNQYLAVSALIAGGLYGIENELELPDPVKGNAYTSGAERLPTTLSEAAELFDRSEIAREAFGDDVVDHYLNYARVELNAFNAAVTDWERVRGFERL

SEQ ID NO: 32147 - DNA, 1338 bp, Burkholderia vietnamiensis G4
  CDS (1)..(1338): transl_table=11
atgcaatccgaactgagcgaattcctgcgtcagcaccgcatcaccgaggtcgaggcgatcattccggacatggccggcattgcgcgcggcaagatcattccgcgcaacaagttcgaatccggcgagtcgatgcggctgccgcaggccgtgatggtgcagacggtcacgggcgattatccggaggacggctcgctgaccggcgtgaccgatcccgacatggtgtgcgtgcccgatccgtcgacgatctgcctgattccgtgggccgtcgatccgaccgcgcaggtgatccacgactgcgtacacttcgacggttcgccggtcgagatctcgccgcgctatgtgctgcggcgcgtgctggatctctacgaggcgaagggctggaagccggtggtcgcgccggagctggagttctatctggtcgacatgaacgccgatcccgacttgccgttgaggccgccggtcggccgcacggggcgcgcggagacggggcgtcagtcgtattcgatcgaggcggtcaacgagttcgatccgctgttcgaggacatctacgaatactgcgagatgcaggggctcgacatcgagacgctgattcacgaagtgggcgccgcgcagatggagatcaacttcatgcacggcgacgcgctgtcgcttgcggatcaagtgttcctgttcaagcgcacggtgcgcgaggccgcgttgcgccacaacatgtacgcgacgttcatggccaagccgatggaagacgagccgggctcggcgatgcacattcaccagagcctcgccgatgcgcgcaccggccgcaacctgttcgccgacgaaggcggcgacgtgtcgccgatgttccagagctatctcgccgggctgcagaagtacacgccggcgctgatgccgatcttcgcgccgtacatcaactcgtatcgccggctgtcgcgcttcatggccgcgccgatcaacgtgcagtggggctacgacaaccgcacggtcggctttcgcattccgcagtcggcgcctgcggcgcggcgcatcgagaaccggattccgggcgtcgactgcaatccgtacctcgcgttcgcggcgacgctcgcggccggttatctcggtctcacgcagcagctcgcgccgaccgagccgatcgcttcggatggctacgacctgccgtatcaactaccgcgcaatctcgaggagggcatctcgctgatggccgcgtgcacaccgctcgccggcattctcggcgacaagttcgtgaaggcgtatctggcgttgaaggagacggagtacgaggcgttcttccgcgtgatcagttcgtgggagcgccgtcatttgctgcttcatgtgtga

SEQ ID NO: 32148 - protein, 445 aa, Burkholderia vietnamiensis G4
MQSELSEFLRQHRITEVEAIIPDMAGIARGKIIPRNKFESGESMRLPQAVMVQTVTGDYPEDGSLTGVTDPDMVCVPDPSTICLIPWAVDPTAQVIHDCVHFDGSPVEISPRYVLRRVLDLYEAKGWKPVVAPELEFYLVDMNADPDLPLRPPVGRTGRAETGRQSYSIEAVNEFDPLFEDIYEYCEMQGLDIETLIHEVGAAQMEINFMHGDALSLADQVFLFKRTVREAALRHNMYATFMAKPMEDEPGSAMHIHQSLADARTGRNLFADEGGDVSPMFQSYLAGLQKYTPALMPIFAPYINSYRRLSRFMAAPINVQWGYDNRTVGFRIPQSAPAARRIENRIPGVDCNPYLAFAATLAAGYLGLTQQLAPTEPIASDGYDLPYQLPRNLEEGISLMAACTPLAGILGDKFVKAYLALKETEYEAFFRVISSWERRHLLLHV

SEQ ID NO: 32149 - DNA, 1338 bp, Burkholderia vietnamiensis G4
  CDS (1)..(1338): transl_table=11
atgcaagacatcgaagactttctgaagcagcaccggatcaccgagatcgaagcgatcattcccgacatggccggcatcgcacgcggcaagatcacgccgcgcaacaagttcacgtccggcgaatcgatgcggctgccgcaggccgtgatggtgcagacggtcaccggcgagtatccggaagacggttcgctgaccggcgtgaccgaccccgacatggtgtgcgtgcccgacacgtcgaccatccgcctgattccgtgggccgtcgatccgaccgcgcaggtgatccacgactgcgtgcactttgacggctcgccggtcgagatctcgccgcgctacgtgctgcgccgcgtgctcgagctgtacaaggcgaagggctggaagcccgtggtcgcgcccgagctggagttctacctggtcgacatgaacaaggatccggacctgccgctgcgtccgccggtcggccgcacgggccgccccgagacgggccgccagtcgtattcgatcgaggccgtcaacgagttcgatccgctgttcgaggacatctacgaatactgcgaaatgcagaacctcgacatcgacacgctgatccacgaagtgggcgccgcgcagatggagatcaacttcatgcacggcgacgcgctgtcgcttgcggaccaagtgttcctgttcaagcgcacggtgcgcgaggccgcgctgcgccacagcatgtacgcgaccttcatggccaagccgatggaaggcgagccgggctccgcgatgcacgtgcaccagagcatcgtcgacgaggaaacgggccgcaacctgttcacgtcgccggagacgggcggcgcgacgtcgctgttctacaactacctcgccgggctgcagaagtacacgcccgcgctgatgccgatcttcgcgccgtacatcaactcgtatcgccggctgtcgcgcttcatggccgcgccgatcaacgtgcagtggggctacgacaaccgcacggtgggcttccgcattccgcattcggggccggccgcgcgccgcatcgagaaccgcattccgggcgtcgactgcaacccgtatctcgcgctcgcggcgacgctcgcagccggctacctcgggatgacgcagcgcctcgagccgaccgagccgctcgtcagcgacggctactcgctgccgtaccagctgccgcgcaacctggaggaagggctcacgctgatggccgcgtgcgagccgctcgccggcatcctcggcgacaagttcctgaaggcgtatttcgcgctgaaggaaaccgaatacgaagcgttcttccgcgtgatcagctcgtgggaacgccgtcatctgctgctgcacgtgtaa

SEQ ID NO: 32150 - protein, 445 aa, Burkholderia vietnamiensis G4
MQDIEDFLKQHRITEIEAIIPDMAGIARGKITPRNKFTSGESMRLPQAVMVQTVTGEYPEDGSLTGVTDPDMVCVPDTSTIRLIPWAVDPTAQVIHDCVHFDGSPVEISPRYVLRRVLELYKAKGWKPVVAPELEFYLVDMNKDPDLPLRPPVGRTGRPETGRQSYSIEAVNEFDPLFEDIYEYCEMQNLDIDTLIHEVGAAQMEINFMHGDALSLADQVFLFKRTVREAALRHSMYATFMAKPMEGEPGSAMHVHQSIVDEETGRNLFTSPETGGATSLFYNYLAGLQKYTPALMPIFAPYINSYRRLSRFMAAPINVQWGYDNRTVGFRIPHSGPAARRIENRIPGVDCNPYLALAATLAAGYLGMTQRLEPTEPLVSDGYSLPYQLPRNLEEGLTLMAACEPLAGILGDKFLKAYFALKETEYEAFFRVISSWERRHLLLHV

SEQ ID NO: 32151 - DNA, 1299 bp, Bradyrhizobium sp. ORS278
  CDS (1)..(1299): transl_table=11
atgtcgagtagtctccatgccgtcgcgtgcgaacgaggcataaaatatttcctgatctcctacaccgacctgttcggcgtgcagcgcgccaagctcgtgccggctgcggcaatcgacggcatggtcaagaccggcgctggtttcgccggcttcgcgacctggctcgacatgacgccggcggatcccgacgtgttcgcgatgccggatccggcgagcctgatccagctgccatggaagccggaagtcggctggctcgccgccgatccttggatgaacggcaagcccgtggcccacgcgccacgcaacctgctcaagcacatgatcgccgatgcggcggcgcaaggctatgagctgaaatcgggcgtcgaatgcgagttcttcctgatctcgcccgacggcaccgagctgtccgatgcggcggaccggcaatcgaagccctgctacgaccagcaggcactgatgcgccgatacgaggtgatcgccgaaatctgcgacgccatgctggcgctcggctggaagccgtatcagaacgatcacgaggatgccaacggccagttcgagatgaactgggagttcgacacggcgctgaagacggccgaccgtcacgcgttcttcaaatacatggtgcgctcgatcgccgagaagcacgggctgcgtgccaccttcatgccgaagccgttcgttgatctcaccggcaatggctgccatgctcacgtctcggtatggaaggacggccgcaatctgttcgaggacgaggccggcgagctcggcgtgtccaagctgggctatcaattcctcggcggcatcatgcattccgctgatgcgctcgccgcgctcttcaaccccacggtcaactcatacaaacgcatcaatgcggcgcgcacgacatcgggcgcgacctgggcgccgaactcagtgacctattccggcaacaaccggacccatctgatccgcattccggaagccggccgcttcgaggtccgtctcgccgatggcgccgccaatccgtatctgctgcaggccgggctgctcgctgcgggtctcgacggcatcgcccatgagcgtcatccgggcacgcgtctcgacatcaacatgtacaccgatggccatacggtgacgaccggcaagaagctgccgctcaatctgctggacgccatccgcgcgttggaagcgtcgactgtgctcggcgagaagctcggcgatttcattccctgctatgtcaagctcaagaccgaggaatggaatgcctatgcgcgccatctgacgcagtgggagcgcgacacgacgctggattgctga

SEQ ID NO: 32152 - protein, 432 aa, Bradyrhizobium sp. ORS278
MSSSLHAVACERGIKYFLISYTDLFGVQRAKLVPAAAIDGMVKTGAGFAGFATWLDMTPADPDVFAMPDPASLIQLPWKPEVGWLAADPWMNGKPVAHAPRNLLKHMIADAAAQGYELKSGVECEFFLISPDGTELSDAADRQSKPCYDQQALMRRYEVIAEICDAMLALGWKPYQNDHEDANGQFEMNWEFDTALKTADRHAFFKYMVRSIAEKHGLRATFMPKPFVDLTGNGCHAHVSVWKDGRNLFEDEAGELGVSKLGYQFLGGIMHSADALAALFNPTVNSYKRINAARTTSGATWAPNSVTYSGNNRTHLIRIPEAGRFEVRLADGAANPYLLQAGLLAAGLDGIAHERHPGTRLDINMYTDGHTVTTGKKLPLNLLDAIRALEASTVLGEKLGDFIPCYVKLKTEEWNAYARHLTQWERDTTLDC

SEQ ID NO: 32153 - DNA, 1422 bp, Bartonella quintana str. Toulouse
  CDS (1)..(1422): transl_table=11
atgaaaaatggtaaacaaatgaaaagtaaaggttctaaacctgtttctcagtttctcaaaaatttacgcggtgtcgataattgggagcaagtttcgcagtggcttgctttgcgtaatgtagaagatattgaatgtattacgcctgatcaagcgggggtagcgcgtggcaagatgatgctttctaaaaaatttatatcggaaacatcattggcattgccttcagcggtttttatggcgacaatttcaggagattatcctgaggatggtcatggttttgaatatcccaaaacagatggtgatttacgccttgagcctgatctttctacgttaagcattgttccatgggaagaagctcctacagcacaagtgatttgtgatcttgtgtatcaaaatgggcaaggtgttgattatacaccgcgaaatgttttgcgaaaagtgattaatttttacacgaaaatgggtctaaaacccgttgtttcaccagaaattgaattttatttggtagagaaaaatcccgatcctgattatcctttagttcctccaattggtcggtctggacgttcaattggtgggggacaggggtattcgattgctggtgtgaatgaatttgatgatctgattgatgatatttatcatttttcggaagcacaagggctagaaattgatacgctcattcatgaggaaggggctggtcagtttgaaatcaatttacgccatggcgatccgatcgaattagctgatcaggtttttatatttaaacgaacaattcgtgaagtggcactgaaacataatatgtatgcaacttttatggccaagcctattcaagggcaaccagggtctgctatgcatattcaccaatcggttgttgataagaaaacaggtatgaacatttttacacaggaggatggtaaagaaaatatccgttttcgccattttattggtggattacaaagacatatacctggggttcttgtgatgcttgctccttatgtgaattcttataggcgtcttgtgcctgatctttcggcgcctgttaacttgcgatggggatatgataatcgtactacagcttttcgtgtgccgcgttcttctccccagggacggcgtgttgagaataggcttccttcatcagatgctaacccttatttagcgcttgcggcttctttggcttgtggtctcattgggttgcagcaagagcttgaaccggatgagccaacaacaaagaatgtgaatactgataacattgaattaccgcgtggactcattgaggctgttaacttatttgaacaagatacggcgatacgtgctattttaggagatgtatttgtcagtacttatgctgcaatcaaacgccaagagtttgaaacttttatggaagtcattagcccgtgggagcgtgaatatctcttgctgaatgtttaa

SEQ ID NO: 32154 - protein, 473 aa, Bartonella quintana str. Toulouse
MKNGKQMKSKGSKPVSQFLKNLRGVDNWEQVSQWLALRNVEDIECITPDQAGVARGKMMLSKKFISETSLALPSAVFMATISGDYPEDGHGFEYPKTDGDLRLEPDLSTLSIVPWEEAPTAQVICDLVYQNGQGVDYTPRNVLRKVINFYTKMGLKPVVSPEIEFYLVEKNPDPDYPLVPPIGRSGRSIGGGQGYSIAGVNEFDDLIDDIYHFSEAQGLEIDTLIHEEGAGQFEINLRHGDPIELADQVFIFKRTIREVALKHNMYATFMAKPIQGQPGSAMHIHQSVVDKKTGMNIFTQEDGKENIRFRHFIGGLQRHIPGVLVMLAPYVNSYRRLVPDLSAPVNLRWGYDNRTTAFRVPRSSPQGRRVENRLPSSDANPYLALAASLACGLIGLQQELEPDEPTTKNVNTDNIELPRGLIEAVNLFEQDTAIRAILGDVFVSTYAAIKRQEFETFMEVISPWEREYLLLNV

SEQ ID NO: 32155 - DNA, 1407 bp, Propionibacterium acnes KPA171202
  CDS (1)..(1407): transl_table=11
atgtcagcagtctaccgaagccatgaccaaccttgttaccagctcgaaacacataacgggcacactggaaaggtgagcaggcagactgaattcgtcctgcgttctatggaggaacgcaacatccgtttcgtaaggctgtggttcacggacgtgctgggatccctgaaatctgttgccatcgccccggctgaagttgagggagctttcgttgaaggcgtgggcttcgacggctcagctatcgaggggtatgcccgcgtctacgaggcagatatggtggcccaccccgatccggccaccttccaagttctgccatggcgttctggcaccagcacggccaggatgttctgcgatatcaccaatcctgacggaacctcctctgcagctgatcctcgtcacgtcctcaagaggacgatgggtcgtgccgcagaaatgggttttaccttctatgttcacccagagattgagttctacctgcttaacgatgagcatcatcctggggaatccccggtggcgctggacaacggtggctacttcgaccacaccaccttgggagcgggcaccgacttccgtcgcgacgccatcaacgtcctggaacagatgggtatttcggtagagttcagccaccacgaggccgctcctggacagcacgaaattgaccttcgttacgccgatgcgctgacgatggccgacaacatcatgaccttccgggtagtcattcgggagatcgcttccctcaaggggatcaaggccaccttcatgcctaagccttttaccgatcacgccgggtcaggtatgcattctcacgtctccctctttgagggggacaccaatgccttctatgacgcggctgacgaggctcgcatgtcgccggttgcgaagtatttcgtcgccggtcttttgcaccatgctccggagatcatcgccgtgacgaaccagtgggttaactcctaccgtcggctttccggtgggggagaggcgcctaactacatttgctggggtcgcaataatcgttcagcactggttcgtattccgatgtataagcccgacaaggcttcctcggctcgggtggagttgcgttctatcgattctgctgccaacccatatctggcgtattccttggtacttgctgctggtttggacggcatcgagaaggagctaccgcttccagaggaggcatccgacgacgtgtggcagttgtcagctcgcgagcgtcacgcactggggatcaagcagctgccgcaaagtctgggtgctgcgatccgctgcatggaggagtccgagctcgtggctgagaccctcggcgaacacgtctacgattatttcttacgcaataagagggcggaatttgaggagtacaaccggcaggtcagccagttcgagcttgatcgctacctgccacacctctaa

SEQ ID NO: 32156 - protein, 468 aa, Propionibacterium acnes KPA171202
MSAVYRSHDQPCYQLETHNGHTGKVSRQTEFVLRSMEERNIRFVRLWFTDVLGSLKSVAIAPAEVEGAFVEGVGFDGSAIEGYARVYEADMVAHPDPATFQVLPWRSGTSTARMFCDITNPDGTSSAADPRHVLKRTMGRAAEMGFTFYVHPEIEFYLLNDEHHPGESPVALDNGGYFDHTTLGAGTDFRRDAINVLEQMGISVEFSHHEAAPGQHEIDLRYADALTMADNIMTFRVVIREIASLKGIKATFMPKPFTDHAGSGMHSHVSLFEGDTNAFYDAADEARMSPVAKYFVAGLLHHAPEIIAVTNQWVNSYRRLSGGGEAPNYICWGRNNRSALVRIPMYKPDKASSARVELRSIDSAANPYLAYSLVLAAGLDGIEKELPLPEEASDDVWQLSARERHALGIKQLPQSLGAAIRCMEESELVAETLGEHVYDYFLRNKRAEFEEYNRQVSQFELDRYLPHL

SEQ ID NO: 32157 - DNA, 1335 bp, Bacillus licheniformis ATCC 14580
  CDS (1)..(1335): transl_table=11
atggcaaagtatacaagagacgacattgttaaactagtaaatgaggagaatgtaaaatatattcgccttcagtttacagacattcttggaacgattaaaaacgttgaaattcctgtgagccagctggaaaaagcacttgataataaagtcatgttcgacggctcttcaatcgagggattcgtccgcattgaagaatccgatatgtacttataccctgacttagatacatttgtgattttcccatggaccgccgaaaaaggtaaagtagcccgcttcatctgcgatatttataatccggacggcacgccgtttgaaggtgatccgcgcaacaacttaaaacgcattttgaaagaaatggaagacatgggcttctcagatttcaatcttggaccagagccggaattcttcctgttcaagctagacgaaaaaggcgagcctacgcttgaactgaacgacaaaggcggatatttcgaccttgcgccgactgatcttggcgaaaactgccgccgcgacatcgtacttgagctcgaagaaatgggctttgaaatcgaagcgtctcaccacgaagttgcacctggacagcacgaaatcgacttcaaatacgccggagccatccgcgcttgcgatgacatccaaacgttcaagctcgttgttaaaacaatcgcgcgcaaacacggcctgcacgcaacattcatgccaaaaccgttgttcggcgtaaacggatcaggcatgcactgcaatctatcactcttccgaaacggcgccaacgccttctttgacaaagacgccgatcttcagctgagtgaaacggcaaagcaattcatcgccggcatcgtcaagcacgcaacaagctttacagctgtgacaaacccgactgtcaactcttacaagcgccttgttccaggctatgaagcaccttgctatgtggcatggagcgcgcaaaacagaagcccgttaatccgcatcccggcttcccgcggcatcagcacgcgcgtagaagtcagaagcgtagacccttctgcgaacccgtaccttgccttgagcgtacttcttgcagcaggacttgacggcatcaaaaacaagctggaagcaccggctccgatcgaccgcaacatctatgtcatgacaaaagaagagcgcctcgaaaacggaatcgtcgaccttcctgcgacactcgcagacgctctcgaagaattcaaatcaaacgaagtcatggtcaaagccctcggcgaccatctattcgaacacttcgtcgaagcaaaagaaatcgaatgggatatgttccgcacacaagtccatccttgggagcgcgagcagtatatgtctcagtattaa

SEQ ID NO: 32158 - protein, 444 aa, Bacillus licheniformis ATCC 14580
MAKYTRDDIVKLVNEENVKYIRLQFTDILGTIKNVEIPVSQLEKALDNKVMFDGSSIEGFVRIEESDMYLYPDLDTFVIFPWTAEKGKVARFICDIYNPDGTPFEGDPRNNLKRILKEMEDMGFSDFNLGPEPEFFLFKLDEKGEPTLELNDKGGYFDLAPTDLGENCRRDIVLELEEMGFEIEASHHEVAPGQHEIDFKYAGAIRACDDIQTFKLVVKTIARKHGLHATFMPKPLFGVNGSGMHCNLSLFRNGANAFFDKDADLQLSETAKQFIAGIVKHATSFTAVTNPTVNSYKRLVPGYEAPCYVAWSAQNRSPLIRIPASRGISTRVEVRSVDPSANPYLALSVLLAAGLDGIKNKLEAPAPIDRNIYVMTKEERLENGIVDLPATLADALEEFKSNEVMVKALGDHLFEHFVEAKEIEWDMFRTQVHPWEREQYMSQY

SEQ ID NO: 32159 - DNA, 1374 bp, Legionella pneumophila subsp. pneumophila str. Philadelphia 1
  CDS (1)..(1374): transl_table=11
atgctaaacccaagagagatccgaaccatagaagatgcaaaacgcatcgtggaagaaagacaattaactcatgttaaggttggtctttttgatatcgatggtgtgatgctgggcaagtacatgagccgtaacaagtttttttcggctttggagcatggttttgctttttgtgatgtcattttaggatgggattctaaagataagctttatgataatgtgaaatatacgggttggcatacgggttaccctgacgcctcagtgcgaattgttccttcaacctgtcgtgaaatactatttgaagaaaatcaactgttgtttatggctgaattttcacaagcagcagaagccatctgtcctcgcgggatcttgcgtcgtgtaatcaataaagctgcgggtatggggtatgatgtttatgccgcattggaatatgaattttttgtatttgatgaaacacctgacagcgtgcgtgcaaaaggatttcgtaatctaaagcctgttactcctgataattttggctactcaattattcgtaatacggtacatgctgaattttatcatcaaattctcactatggcggaaaaaatggatttccccattgaaggtttacatactgaaacaggcccgggagttctggaagcagcaatagcggttgatgatgccgaggccgcaggagataaagcggctttgtttaaaacatttatgaaaattctcgcgcaacgcaataataaaatggcaacttttatggctaaatggtcaggtgattaccctgggcaaagtggtcatattcatctgtctttgcgagatagagatggtggcaagtctgctttttatgaatcaggcagagaatataatatgagcaaaattcaacgccattttttagccgggcagcaaaagttgatgcctgaatttttagccatgttatccccgactgtgaatagctattccagactaattcccggctattgggctccaacagaggcaacatggggtgtcgagaaccgcaccactgctttacgagtgattcccggcagtgataagtcacagcgtattgaatatcgcttgggttctgcagatgcgaacccatatctggcgttggctgctgccatagggtcgggtttatatggcattgagaatgagttggagcctgaggctgaggtaaaagggaattcctacgagcaacatcatagtccggcattggcgttgcctcgcacattatgggaatcggcacaaaatttaaaaaactcttccgctgcttacgaattatttggtcaagaatttgttgagcattttgctgcttcaagagaatgggaagagagagagtttagaaaacatattactgattgggaactcgacaggtattttgaaattatttaa

SEQ ID NO: 32160 - protein, 457 aa, Legionella pneumophila subsp. pneumophila str. Philadelphia 1
MLNPREIRTIEDAKRIVEERQLTHVKVGLFDIDGVMLGKYMSRNKFFSALEHGFAFCDVILGWDSKDKLYDNVKYTGWHTGYPDASVRIVPSTCREILFEENQLLFMAEFSQAAEAICPRGILRRVINKAAGMGYDVYAALEYEFFVFDETPDSVRAKGFRNLKPVTPDNFGYSIIRNTVHAEFYHQILTMAEKMDFPIEGLHTETGPGVLEAAIAVDDAEAAGDKAALFKTFMKILAQRNNKMATFMAKWSGDYPGQSGHIHLSLRDRDGGKSAFYESGREYNMSKIQRHFLAGQQKLMPEFLAMLSPTVNSYSRLIPGYWAPTEATWGVENRTTALRVIPGSDKSQRIEYRLGSADANPYLALAAAIGSGLYGIENELEPEAEVKGNSYEQHHSPALALPRTLWESAQNLKNSSAAYELFGQEFVEHFAASREWEEREFRKHITDWELDRYFEII

SEQ ID NO: 32161 - DNA, 1371 bp, Burkholderia mallei ATCC 23344
  CDS (1)..(1371): transl_table=11
gtgacggccgtcgacgcttatcgaagagaggctcacatgcaagacatcgatgattttttgaggcagcaccggatcaccgaagtggaagcgatcattcccgacatggcgggcatcgcgcgcggcaagatcattccgcgcaacaagttcgaaaccggcgaatcgatgcgcctgccgcaagcggtgatggtgcagaccgtcaccggcgattatccggaggacggcacgctcacgggcgtcacggatcccgacatggtatgcgtggccgacgcgtcgacgatctgcctgattccgtgggcagtcgaccccaccgcgcaggtgatccacgattgcgtgcatttcgacggctcgcccgtcgaaatctcgccgcgctacgtgctgcgccgcgtgctcgacctgtatcgcgcgagggggtggaagcccgtcgtcgcgccggagctcgagttctatctggtcgacatgaacaagggcccggacctgccgctgcggccgcccgtcggacgcacggggcgcgcggaaacggggcggcagtcgtactcgatcgaagcggtcaacgaattcgatccgctcttcgaggacatctacgagtactgcgagctgcagggcctcgacatcgacacgctgattcacgaagtcggcgccgcgcagatggaaatcaacttcctgcacggcgatgcgctatcgctcgccgaccaggtgtttctgttcaagcgcacggtgcgcgaggcggcgctgcgccacaacatgtacgccaccttcatggcaaagccgatggagagcgagcccggctcggcgatgcacattcatcagagcgtcgtcgacatcgagaccgggcgcaatctcttcatcggcgcgagcggcgacgtgacgccgatgttccgcagctatctcgccgggctgcagaagtacacgcccgcgctgatgccgatcttcgcgccgtacatcaactcgtaccggcggctgtcgcgcttcatggccgcgccgatcaacgtgcaatggggctacgacaaccgcacggtcggcttccggattccgcactcggcggccgccgcgcggcggatcgagaaccggattccgggcgtcgactgcaacccgtacctcgcgatcgcgggcacgctcgcggcgggctacctcggcgtcacgcaggggctcgagccgaccgagccgctcgcgagcgacggctacagcctgccgtatcaactgccgcgcaatctggaggaagggctcacgctgatgagcgcatgcgcgccgcttgccgagatgctcggcgagaaattcgtgaaagcctatctcgcattgaaggaaacggagtacgaagcatttttccgcgtgatcagctcgtgggagcgcaggcacctgctgctgcacgtttga

SEQ ID NO: 32162 - protein, 456 aa, Burkholderia mallei ATCC 23344
MTAVDAYRREAHMQDIDDFLRQHRITEVEAIIPDMAGIARGKIIPRNKFETGESMRLPQAVMVQTVTGDYPEDGTLTGVTDPDMVCVADASTICLIPWAVDPTAQVIHDCVHFDGSPVEISPRYVLRRVLDLYRARGWKPVVAPELEFYLVDMNKGPDLPLRPPVGRTGRAETGRQSYSIEAVNEFDPLFEDIYEYCELQGLDIDTLIHEVGAAQMEINFLHGDALSLADQVFLFKRTVREAALRHNMYATFMAKPMESEPGSAMHIHQSVVDIETGRNLFIGASGDVTPMFRSYLAGLQKYTPALMPIFAPYINSYRRLSRFMAAPINVQWGYDNRTVGFRIPHSAAAARRIENRIPGVDCNPYLAIAGTLAAGYLGVTQGLEPTEPLASDGYSLPYQLPRNLEEGLTLMSACAPLAEMLGEKFVKAYLALKETEYEAFFRVISSWERRHLLLHV

SEQ ID NO: 32163 - DNA, 1359 bp, Silicibacter pomeroyi DSS-3
  CDS (1)..(1359): transl_table=11
atggccgactggacagacaatctccccgaggccgcacaggcctatctggaaaaccgccgcctggacgaggtggaatgcatcatctcggacctgcccggcattgcccgcggcaaggcggttcccgccagcaaattcgcacggcaggactatttccacctgcccgacagcatcttttaccagaccatcaccggtgactggggcgatgccgccggcgaagagggttttatcgagcgcgacatgatcctgcgccccgattactcgaccgccaccgccgcgccctggaccggcgactggacgctgcaggtaatccatgacgcctatgaccgcgacggcgatccgatcccgttcagcccgcgcaacgtgctgcgccgggtggtctctctctatcatgcgcagggctggaaaccggtcgtggcgcccgagatggaattctttctcgtcgcccgcaacctcgacccggccaaggaaatcgagccgatgatgggccgttcgggccgtcccgcggccgcgcggcaggcctattcgatgaccgcggtcgacgagttcggcccggtgatcgacgacatctatgattttgccgaggcgcagggcttcgagatcgacggcatcactcaggaaggcggcgccggccagctggaaatcaacctgcggcacggcagcccggtgcggctggccgacgaggtgttctatttcaagcggctgatccgcgaggcggcgctgcgccacaattgtttcgccaccttcatggccaagccgatcgagaacgagccgggcagcgccatgcatatccaccattcgatcgtggacatggagaccggcgagaacatcttttccggcccgcaggggggcgaaacggacgccttctatcacttcatcgccggtttgcagaaccacctgccctcggggctggcggtgatggcgccctatgtgaactcgtaccgccgctacgtgaaggaccacgccgcgcccatcaacctggaatggggccgcgacaaccgcaccaccggcattcgcgtgcccctgtccggaccagccgcgcgccggatcgagaaccggctggcgggcatggactgcaacccctatctgggcatcgcggtctcgctggcctgcggctatctgggcctgatggaagagttgcgcccgcgcaagcagttcaaaggcgatgcctatgtcggcgagggcgatatcccgcaggtgatgggcgacgcgctggacctgttcgacgaggccaaggccctgcacgaggtgctcggccccgaattcgcgcgcgtctacagcatcgtgaaacgcgccgaatacaacgagttcctgcaggtgatttcgccctgggaacgcgaacacttgctgatgaacgtctaa

SEQ ID NO: 32164 - protein, 452 aa, Silicibacter pomeroyi DSS-3
MADWTDNLPEAAQAYLENRRLDEVECIISDLPGIARGKAVPASKFARQDYFHLPDSIFYQTITGDWGDAAGEEGFIERDMILRPDYSTATAAPWTGDWTLQVIHDAYDRDGDPIPFSPRNVLRRVVSLYHAQGWKPVVAPEMEFFLVARNLDPAKEIEPMMGRSGRPAAARQAYSMTAVDEFGPVIDDIYDFAEAQGFEIDGITQEGGAGQLEINLRHGSPVRLADEVFYFKRLIREAALRHNCFATFMAKPIENEPGSAMHIHHSIVDMETGENIFSGPQGGETDAFYHFIAGLQNHLPSGLAVMAPYVNSYRRYVKDHAAPINLEWGRDNRTTGIRVPLSGPAARRIENRLAGMDCNPYLGIAVSLACGYLGLMEELRPRKQFKGDAYVGEGDIPQVMGDALDLFDEAKALHEVLGPEFARVYSIVKRAEYNEFLQVISPWEREHLLMNV

SEQ ID NO: 32165 - DNA, 1344 bp, Pseudomonas syringae pv. syringae B728a
  CDS (1)..(1344): transl_table=11
atgacaggcaatgacccccattcgcagaaagaaatgctgatgggcattgatgaagtggagtgtgtaaccccggatttgaacggtgtaccgcgcggcaaggtaatgacggctgaaggttttctcgaaggtcgccgtttgcaactggcgcgcggcgtgttgctgcaatgcatcatgggcgggtatccgccggcgcgcttttacggcagtgacgacggcgatctggcactgatcagtgatccgcagcagctccaccgtctgccctggagcacgtcgccgcgagccttggccatctgcgatgcgcaggacctcgatggccagccctgcatgctctctacccgtaatcagctcaaggctgttatcgcccgttacgttgcgcaggggctggtgccagtggtggccaccgaactcgagttttttgtcttcgcgcccaatcccgagccgctttatccattcgagccgccgaccgggctggacgggcgacgcgaacaggggcactcggcattcagcgtcagctccaacaacggcttgcggactttttttgccgaggtgtatgcctgcatggcagcgctggggctgccgcgtgacacggtgatgcacgagatgggtgtcagccagttcgagatcaacctgctgcatggcgatccgctgctgctggccgatcagacttttctgttcaagcacctgctcaaggaggttgcgctcaaacacgggctcatcgtggtgtgcatggccaaaccgctcgcccatacggcgggcagttcgatgcatatccatcagagcgtggtggcagcagagggcgcagtgaatgtattcagtgatgcgcagggtgagccgagcgacacgtttggtcatttcattgccggccagcaagcctgcatggcggacttcaccgcgctgttcgcgcccaatgtgaattcctaccagcgcctgtgccatccttatgcatcgcccaacaacgcttgctggtcctacgacaatcgcgctgccggattacgtattccgtcgagtgcagcggcggccagaagggtggagaatcgtctgccgggcgctgacgccaatccctatctggccatcgctgcaagtctggcggccgggttgcacggcatcgagcagcgactggaaccgacgccgccgctgcagggcgaactggaggtgccggaagaattgttactgccgtgtaccttgcacgctgctctggagcgtctgaaaagcagtcagttggccaaggaactgtttggtcatgaattcatcgaaggctacattgcgtcgaaggccctggaactgaccagttttttcgacgagataaccccctgggaacggcgcgtgctggctgctcaggtttaa

SEQ ID NO: 32166 - protein, 447 aa, Pseudomonas syringae pv. syringae B728a
MTGNDPHSQKEMLMGIDEVECVTPDLNGVPRGKVMTAEGFLEGRRLQLARGVLLQCIMGGYPPARFYGSDDGDLALISDPQQLHRLPWSTSPRALAICDAQDLDGQPCMLSTRNQLKAVIARYVAQGLVPVVATELEFFVFAPNPEPLYPFEPPTGLDGRREQGHSAFSVSSNNGLRTFFAEVYACMAALGLPRDTVMHEMGVSQFEINLLHGDPLLLADQTFLFKHLLKEVALKHGLIVVCMAKPLAHTAGSSMHIHQSVVAAEGAVNVFSDAQGEPSDTFGHFIAGQQACMADFTALFAPNVNSYQRLCHPYASPNNACWSYDNRAAGLRIPSSAAAARRVENRLPGADANPYLAIAASLAAGLHGIEQRLEPTPPLQGELEVPEELLLPCTLHAALERLKSSQLAKELFGHEFIEGYIASKALELTSFFDEITPWERRVLAAQV

SEQ ID NO: 32167 - DNA, 1359 bp, Pseudomonas fluorescens Pf-5
  CDS (1)..(1359): transl_table=11
atgagtaacaacctcgaccagctcaccgattggttgaaagaccacaagatcacagaagtcgaatgcatgatcggcgatttgaccgggatcacccggggcaagatctcgccgaccaacaagttcattgccgaaaaaggcatgcgcctgcccgagagcgtgctactgcagaccgtgaccggcgactatgtcgaagacgacatctattacgaactgctggacccggccgacatcgacatggtctgccgcccggaccagaacgcggtgtaccttgtgccctgggccatcgagcctactgcccaggtgatccatgacacctacgacaagcagggcaaccccatcgagctgtcgccgcgcaacgtcctgaagaaggtcctgaaactctacgccgaccacggctggcagcccatcgtggcgccggaaatggagttctacctgaccaagcgcagcgacgatccggactacccgttgcagccgccgatcggccgctccggccgcccggagaccgggcgccagtcgttctccattgaagctgcgaacgaattcgacccgctgttcgaagacgtctatgactggtgcgaactgcaggagctggacctggacacgctgatccacgaggacggcacggcgcagatggagatcaacttccgtcacggcgatgccctgtccctggccgaccagatcctggtgttcaagcgcaccatgcgcgaagccgcgctcaagcacgacgtggccgccaccttcatggccaagcccatgaccggcgagcccggcagcgccatgcacctgcaccagagcatcatcgacatcaacaccggcaagaacgtcttctccaatgaagacgggaccatgagccagctgttcctcaaccacatcggtggtttgcagaagttcattcccgagctgctgccgctgttcgcccccaacgtcaactcgttccgtcgtttcctgcccgatacctcggcgccggtgaacgtcgagtggggcgaagagaaccgcaccgtgggcctgcgggtgccggatgccgggccacagaaccgtcgcgtggaaaaccgcctgccgggcgccgacgccaacccgtacctggccatcgccgccagcctgctgtgtggctacatcggcatggtcgaaggccacaacccgagcgcgcccgtggtgggccgtggctacgagcgccgcaacctgcgcctgccactgaccatcgaagacgcgctggagcgtatggaaaacagcaagaccatcgagaagtacctgggccagaagttcatcaccggctatgtcgcggtgaagcgggccgagcacgaaaacttcaagcgcgtgatcagttcgtgggagcgggagttcctgttgttcgccgtctga

SEQ ID NO: 32168 - protein, 452 aa, Pseudomonas fluorescens Pf-5
MSNNLDQLTDWLKDHKITEVECMIGDLTGITRGKISPTNKFIAEKGMRLPESVLLQTVTGDYVEDDIYYELLDPADIDMVCRPDQNAVYLVPWAIEPTAQVIHDTYDKQGNPIELSPRNVLKKVLKLYADHGWQPIVAPEMEFYLTKRSDDPDYPLQPPIGRSGRPETGRQSFSIEAANEFDPLFEDVYDWCELQELDLDTLIHEDGTAQMEINFRHGDALSLADQILVFKRTMREAALKHDVAATFMAKPMTGEPGSAMHLHQSIIDINTGKNVFSNEDGTMSQLFLNHIGGLQKFIPELLPLFAPNVNSFRRFLPDTSAPVNVEWGEENRTVGLRVPDAGPQNRRVENRLPGADANPYLAIAASLLCGYIGMVEGHNPSAPVVGRGYERRNLRLPLTIEDALERMENSKTIEKYLGQKFITGYVAVKRAEHENFKRVISSWEREFLLFAV

SEQ ID NO: 32169 - DNA, 1371 bp, Colwellia psychrerythraea 34H
  CDS (1)..(1371): transl_table=11
atgataaaagttggacagacaacagaggtagaaaattttctctccaatcacccagaagttgaggctatagatgtcctcatttctgatttagtcggctttgctcgaggaaagcgcattgaaaaaagtagtttagaaaaaatttatagcagtggcttaaatatgcccgctacgatattttccatgaatgtacttggagaaactattgaagagtgtgggctcgggcaagacattggcgagccggatatggtctgtaaacctattgcgaacacccttcatatggcctcttggcatgatcgcccaatcgcgcaagtattaatgagcatgttcaaccacgatggaacgcctttttttgccgacccacgtaatatcttaagtaacgttgttagacaattagcagaaataaatttataccctgttgttgccgttgaattagaattttatctattagataaaaataaagataacaaaggaaatttacaagctcctatctcacctaaaacaggtaaaagagatgaacatactcaagtttactccgtcgatactctgaatgattacagtgcattattagacgatattaatagagtatgtattgagcaaaatgtacctgcagataccgcagtagctgagtgtgcgcctggacaatttgaaataaatttaaaacatgaagccgatccagtcgctgcttgtgataatgcaattttgttaaagcgtattatcaaaacagtggctgataagcataattttgatgcgacctttatggctaagccttattcaaatgaagccggtagtggtatgcatgtccacgccagtcttttagatgagtgcggtaacaatgtctttgctgatgagcataatgattataatgaaacattagaacatgccatcggtggcatgcttgaactaatgccagcttccatgccgttgttatgtcctaacgtgaattcttatcgtcgatttatgccagggtactatgttgcaatggcaaaaaattggggagtagacaacagaacagttgcacttcgccttcctcgaggacataaaaatgcaacgcgtatagaacatcgagtttctggcgctgatgctaacccctatttagtgatggctgtgattttagcctctattcatcatggtataaccaataaaatcaaacctataaatcctacggtaggaaacgcgtttgatgacgactgtgaagcactgccattaaaattggatagagcacttgcagaattagaaaaagatcaaatacttacaagctatttaggcgaagaatttactaaaaactatcacactgttaaacaaaaagagttagagcaatttgatatgcatattagtgagctagaagttaaatggtacttatctaatagctaa

SEQ ID NO: 32170 - protein, 456 aa, Colwellia psychrerythraea 34H
MIKVGQTTEVENFLSNHPEVEAIDVLISDLVGFARGKRIEKSSLEKIYSSGLNMPATIFSMNVLGETIEECGLGQDIGEPDMVCKPIANTLHMASWHDRPIAQVLMSMFNHDGTPFFADPRNILSNVVRQLAEINLYPVVAVELEFYLLDKNKDNKGNLQAPISPKTGKRDEHTQVYSVDTLNDYSALLDDINRVCIEQNVPADTAVAECAPGQFEINLKHEADPVAACDNAILLKRIIKTVADKHNFDATFMAKPYSNEAGSGMHVHASLLDECGNNVFADEHNDYNETLEHAIGGMLELMPASMPLLCPNVNSYRRFMPGYYVAMAKNWGVDNRTVALRLPRGHKNATRIEHRVSGADANPYLVMAVILASIHHGITNKIKPINPTVGNAFDDDCEALPLKLDRALAELEKDQILTSYLGEEFTKNYHTVKQKELEQFDMHISELEVKWYLSNS

SEQ ID NO: 32171 - DNA, 1407 bp, Pseudomonas fluorescens PfO-1
  CDS (1)..(1407): transl_table=11
atgaaatcgcttttcccccgcgtcaacaaaaccaacgacgaggtctttatgaatgcccctttcgatcagctgttcacgtggctgaaagatcacaagattaccgaagtggaatgcgtggtcagcgacctgaccggcatcgcccgcggcaagatcgcaccgaccaacaagttcctgcatgagcgaggcatgcgcctgccggaaagtgtgctgctgcaaacggtaaccggggattttgtcgacgacgacatctactacgacctgctcgacccggccgacatcgacatggtctgcaaaccggtgagcgacgcggtgtacgtgatcccgtgggccatcgagccgaccgccatcgtcatccacgacaccttcgacaagttcggcaacccgatcgaactgtcgccgcgcaacgtgctgaagaaagtcctgcagctgtacaccgacaaaggctggaagccgatcgtggcgccggaaatggagttctacctgacccagcgctgcgaagacccggacttgccattgaaagcaccgctgggccgttccggtcgcgccgaaagcggtcgtcagtcgttctccatcgacgccgccaacgaattcgatccattgttcgaagacgtctacgactggtgcgaactgcaaggcctggacctggacacgctgatccacgaagacggcccggcgcagatggaaatcaacttccgccacggcgacgcgctcgatctggccgaccagatcaccgtgttcaagcgtaccctgcgtgaagccgccctcaagcacaacgtgaccgcgactttcatggccaagccgatcggcgacgagcccggcagcgccatgcacctgcatcagagcgtggtcgagatcgccagcggccagccaattttcgccaatgccgacggcagcatgagcgacctgttccgccatcacatcggcggcctgcagaagtacattccgaaggtgctgccgatgttcgcgccgaacgtgaactcgttccgccgcttcctgccggacacctcggcaccggtcaacgtcgaatggggcgaagaaaaccgcaccgtcggcctgcgggtgccaacctccggacctgaggcgatgcgggttgagaaccgtctgcccggcgccgacgccaacccgtacctggccatcgccgcgagcctgctatgcggctacatcggtatggtcgaaggcgtcgaaccgagcgccgccgtcgaaggccgggcttacgagcgccgcaacctgcgcctgccgatcaccatcgaagaagccctgacccagatggaagagtgcgacaccgtcgcgcaatacctgggcagcaagttcgtacgcggctacgtcgcggtgaaacgcgccgagcacgaaaacttcaagcgcgtgatcagttcctgggagcgggagttcctgttgctgagcgtttaa

SEQ ID NO: 32172 - protein, 468 aa, Pseudomonas fluorescens PfO-1
MKSLFPRVNKTNDEVFMNAPFDQLFTWLKDHKITEVECVVSDLTGIARGKIAPTNKFLHERGMRLPESVLLQTVTGDFVDDDIYYDLLDPADIDMVCKPVSDAVYVIPWAIEPTAIVIHDTFDKFGNPIELSPRNVLKKVLQLYTDKGWKPIVAPEMEFYLTQRCEDPDLPLKAPLGRSGRAESGRQSFSIDAANEFDPLFEDVYDWCELQGLDLDTLIHEDGPAQMEINFRHGDALDLADQITVFKRTLREAALKHNVTATFMAKPIGDEPGSAMHLHQSVVEIASGQPIFANADGSMSDLFRHHIGGLQKYIPKVLPMFAPNVNSFRRFLPDTSAPVNVEWGEENRTVGLRVPTSGPEAMRVENRLPGADANPYLAIAASLLCGYIGMVEGVEPSAAVEGRAYERRNLRLPITIEEALTQMEECDTVAQYLGSKFVRGYVAVKRAEHENFKRVISSWEREFLLLSV

SEQ ID NO: 32173 - DNA, 1359 bp, Pseudomonas fluorescens PfO-1
  CDS (1)..(1359): transl_table=11
atgagtaacaacctcgaccagctcaccgattggttgaaagaccacaagatcacagaagtcgaatgcatgatcggcgacttgaccggcatcacccggggcaagatctcgccgaccaacaagttcatcgccgaaaaaggcatgcgcctgccagagagcgttctgttgcagaccgtgaccggcgactacgtcgaagacgacatctattacgaactgctcgacccggccgacatcgacatgatctgccgccccgaccagaacgccgtgtacctggtgccgtgggccatcgagccgaccgcccaggtgatccacgatacctacgacaagcaaggcaacccgatcgagctgtcgccgcgcaacgtcctcaagaaagtcctgaaactctatgccgacaagggctggcagccgatcgtggcgccggaaatggagttctacctgaccaagcgcagcgacgaccctgactatccgttgcagccgccagtcggccgctccgggcgtccggagatcggtcgtcagtcgttctccatcgaagcggcgaacgaattcgatccgctgttcgaagacgtctacgactggtgcgaattgcaggaactggacctcgacacgctgatccacgaggacggcacggcgcagatggaaatcaacttccgtcacggcgatgccctgtcgctggccgaccagatcctggtgttcaagcgcaccatgcgcgaggccgccctcaagcacaacgtggccgcgaccttcatggccaagccgatgaccggcgagccgggcagtgcgatgcacctgcaccagagcatcatcgacatcgagactggcaaaaacgtgttctccaatgacgacgggaccatgagccagctgttcctgcaccacatcggtggcctgcagaaactgatccctgagctgttgccgctgttcgcaccgaacgtcaactcgttccgccgcttcctgccggacacctcggcgccggtgaacgtggagtggggcgaagaaaaccgcaccgtgggcctgcgcgtaccggatgccggcccgcagaaccgccgggtggaaaaccgcctgccgggcgccgacgccaacccgtacctggcgattgccgcgagcctgctctgcggctacatcggcatggtcgaaggcatcaacccgagcgcgccggtcgtgggccgtggttacgagcgccgcaacctgcgcctgccgctgaccatcgaggacgcgctggagcgtatggaaaacagcgcgaccatcgagaagtatctgggcaagaccttcatcaccggctacgtcgcggtcaagcgggccgagcatgaaaacttcaagcgcgtgatcagttcctgggagcgtgagtacctgctcttcgccgtctga

SEQ ID NO: 32174 - protein, 452 aa, Pseudomonas fluorescens PfO-1
MSNNLDQLTDWLKDHKITEVECMIGDLTGITRGKISPTNKFIAEKGMRLPESVLLQTVTGDYVEDDIYYELLDPADIDMICRPDQNAVYLVPWAIEPTAQVIHDTYDKQGNPIELSPRNVLKKVLKLYADKGWQPIVAPEMEFYLTKRSDDPDYPLQPPVGRSGRPEIGRQSFSIEAANEFDPLFEDVYDWCELQELDLDTLIHEDGTAQMEINFRHGDALSLADQILVFKRTMREAALKHNVAATFMAKPMTGEPGSAMHLHQSIIDIETGKNVFSNDDGTMSQLFLHHIGGLQKLIPELLPLFAPNVNSFRRFLPDTSAPVNVEWGEENRTVGLRVPDAGPQNRRVENRLPGADANPYLAIAASLLCGYIGMVEGINPSAPVVGRGYERRNLRLPLTIEDALERMENSATIEKYLGKTFITGYVAVKRAEHENFKRVISSWEREYLLFAV

SEQ ID NO: 32175 - DNA, 1356 bp, Rhodobacter sphaeroides 2.4.1
  CDS (1)..(1356): transl_table=11
atgtccgactggaccgacagacttcccgaagccgcccgcgcctacatcgcagaccgccgggtggacgaagtggagtgcatcctctccgacatcgcgggcgtggcgcgcggcaaggccatgcccgccttcaagttcggcaagcagacgagcttcttcctgccgaactcgatcttcctgcagaccatcaccggcgaatgggccgacaatccctcgggcgccttcaccgagcccgacatgatcctgatcccggactattccaccgcgaccgctgcgccctggacggcggatatcaccttgcaggtgatccacgatgcggtggaccagcagggccggccggtgcccgtctcgccgcgcaacgtgctgcggcgggtggtcgagctttacaatgcggaaggctggacgccgatcgtggcgccggagatggagttcttcctcgtcgcgcgcaacatcgaccccaacatgccggtcatgccgcccatgggccggacgggccgccgtgcggcggccaagcaggcctattccatgtccgcggtggacgaatacggcaaggtcatcgacgacatctacgatttcgccgaggcgcagggcttcgagatcgacgggatcctgcaggagggcggcgcgggtcaggtcgagatcaacctcgctcatggcgacccggtggctctggccgaccagatcttcttcttcaagcggctgatccgcgaggccgcgctgcgccacgactgtttcgcgaccttcatggccaagcccatcgagggcgagcccggctcggccatgcacatccaccattcggtcgtcgacagcgcgagcaagctcaacatcttctcggatgccaagggcggcgaaaccgaggccttcctccatttcattgcgggcatgcagacgcacctgcccgcggcggtcgcgctgcttgcgccctacgtcaacagctaccgccgctacgtcccggacttcgcggccccgatcaacctcgaatggggacgcgacaaccgcacgacagggctgcgcgtgccgatctcggggcccgaggcgcggcggctcgagaaccggctggccggcatggactgcaacccctacctcgggctcgcggcctcgctcgcctgcggctatctggggctgaaggagcggaagatgccgcagcccgaatgcacgggcgacgcctacatgtccgagacggatctgccctacaacctcggcgatgcgctcgacctgctcgaggaggacgcggccctgcgcgacgtgctggggcccgagttctgcggcgtctacgattcggtcaagcgcaacgaatacaaggagttccttcaggtcatcagcccgtgggagcgcgagcatctgctgctgaacgtatga

SEQ ID NO: 32176 - protein, 451 aa, Rhodobacter sphaeroides 2.4.1
MSDWTDRLPEAARAYIADRRVDEVECILSDIAGVARGKAMPAFKFGKQTSFFLPNSIFLQTITGEWADNPSGAFTEPDMILIPDYSTATAAPWTADITLQVIHDAVDQQGRPVPVSPRNVLRRVVELYNAEGWTPIVAPEMEFFLVARNIDPNMPVMPPMGRTGRRAAAKQAYSMSAVDEYGKVIDDIYDFAEAQGFEIDGILQEGGAGQVEINLAHGDPVALADQIFFFKRLIREAALRHDCFATFMAKPIEGEPGSAMHIHHSVVDSASKLNIFSDAKGGETEAFLHFIAGMQTHLPAAVALLAPYVNSYRRYVPDFAAPINLEWGRDNRTTGLRVPISGPEARRLENRLAGMDCNPYLGLAASLACGYLGLKERKMPQPECTGDAYMSETDLPYNLGDALDLLEEDAALRDVLGPEFCGVYDSVKRNEYKEFLQVISPWEREHLLLNV

SEQ ID NO: 32177 - DNA, 1338 bp, Burkholderia sp. 383
  CDS (1)..(1338): transl_table=11
atgcaacccgaactgagcgaattcctgcgacagcaccgcatcaccgaggtcgaggcgatcattcccgacatggccggcattgcgcgcggcaagatcattccgcgcaacaagttcgaatccggcgaatcgatgcgcctgccgcaggccgtgatggtgcagaccgtcaccggcgactatccggaggacggcacgctgaccggcgtgaccgaccccgacatggtgtgcgtgcccgatccgtcgacgatctgcctgattccgtgggccgtcgacccgaccgcgcaggtgatccacgactgcgtgcacttcgacggctcgccggtcgagatctcgccgcgctatgtgttgcgacgcgtactcgatctttacaaggagaagggctggcagccggtcgtcgcgcccgagctcgagttctatctcgtcgacatgaatgccgatcccgacctgccgctgcgtccgccggtcggccgcaccgggcgtgcggagaccggccggcagtcgtattcgatcgaggccgtgaacgagttcgattcgctgttcgaggatatctacgaatattgcgagatgcaggggctcgatatcgagacgctgatccacgaggtcggtgccgcgcagatggagatcaacttcgtgcacggcgatgcgctgtcgctcgccgaccaggtgttcctgttcaagcgcaccgtgcgcgaggcggcgctgcgccacaacatgtacgcgaccttcatggcgaagccgatgcaggacgagcccggctccgcgatgcacatccaccagagcctggccgacgcgcgcacggggcgcaacctgttctccagcgaggacggtgccgtgtcgccgatgttccacagctatctcgcggggctgcagaagtacacgcccgcgttgatgccgatctttgcgccgtacatcaactcgtatcgccgcctgtcgcgcttcatggcggcgccgatcaacgtgcagtggggttacgacaaccgcacggtcggtttccgcattccgcagtcgggcgcatcggcccgccgcatcgagaaccggatcccgggcgtcgactgcaatccgtatctcgccttcgccgcgacgctcgcggccggctatctcggcttgacccagcagctcgcaccgaccgagccgattgcgtcggacggctacaagctgccgtaccagctgccgcgcaatctcgaggagggcatctcgctgatggcggcctgcacgccgctggccggcattctcggcgacaagttcgtgaaagcgtacctggcgctgaaggacaccgaatacgaggcgtttttccgcgtgatcagctcgtgggaacgcaggcatctgctgctgcacgtgtga

SEQ ID NO: 32178 - protein, 445 aa, Burkholderia sp. 383
MQPELSEFLRQHRITEVEAIIPDMAGIARGKIIPRNKFESGESMRLPQAVMVQTVTGDYPEDGTLTGVTDPDMVCVPDPSTICLIPWAVDPTAQVIHDCVHFDGSPVEISPRYVLRRVLDLYKEKGWQPVVAPELEFYLVDMNADPDLPLRPPVGRTGRAETGRQSYSIEAVNEFDSLFEDIYEYCEMQGLDIETLIHEVGAAQMEINFVHGDALSLADQVFLFKRTVREAALRHNMYATFMAKPMQDEPGSAMHIHQSLADARTGRNLFSSEDGAVSPMFHSYLAGLQKYTPALMPIFAPYINSYRRLSRFMAAPINVQWGYDNRTVGFRIPQSGASARRIENRIPGVDCNPYLAFAATLAAGYLGLTQQLAPTEPIASDGYKLPYQLPRNLEEGISLMAACTPLAGILGDKFVKAYLALKDTEYEAFFRVISSWERRHLLLHV

SEQ ID NO: 32179 - DNA, 1338 bp, Burkholderia sp. 383
  CDS (1)..(1338): transl_table=11
atgcatgacatcgaagattttctgaagcagcaccggatcactgaagtcgaagcgatcattcccgacatggccggcatcgcgcgcggcaagatcacgccgcgcaacaagttcacttccggcgaatcgatgcgcctgccgcaggccgtgatggtgcagaccgtcaccggcgaatacccggaagacggctcgctgaccggcgtgaccgaccccgacatggtgtgcgtgcccgacgcatcgacgatccgcctgatcccgtgggccatcgacccgaccgcgcaggtcatccacgactgcgtgcacttcgacggctcgccggtcgagatctcgccgcgctacgtgctgcgccgcgtgctcgacctgtacaaggcgaagggctggaagcctgtcgtcgcgcccgagctcgagttctacctggtcgacatgaacaaggatcccgacctgccgctgcgcccgccggtcggccgtacgggccgccccgaaacgggccgccagtcgtattcgatcgaggccgtcaacgagttcgacccgctgttcgaggacatctacgagtactgcgaagcgcagaacctcgacatcgacacgctgatccacgaagtcggcgccgcgcagatggagatcaacttcatgcacggcgacgcgctgtcgctggccgaccaggtgttcctgttcaagcgcacggtgcgtgaggccgcgctgcgtcacaacatgtacgcgacgttcatggccaagccgatggaagacgaaccgggttcggcgatgcacgtgcaccagagcatcgtcgacgaggaaacgggccagaacctgttcacgtcgcaggaaaccggcggcgcgacgtcgatgttctacaactacctcgcggggctgcagaagtacacgccggcgctgatgccgatcttcgcgccgtacatcaactcgtatcgccgcctgtcgcgcttcatggccgcgccgatcaacgtgcagtggggctacgacaaccgcacggtcggcttccgcatcccgcactcgggcccgtcggcacgccgcatcgagaaccgcattccgggcgtcgactgcaatccgtacctcgcgctcgccgcgacgctcgcggccggctatctcggcatgacccagcgcctggagccgaccgagccgctcgtcagcgacggctacgacctgccgtaccagctgccgcgcaacctcgaggaagggctgacgctgatggccgcctgcgagccgctcggcgagatcctcggccacaagttcctgaaggcgtatttcgcgctgaaggaaaccgaatacgaagcgttcttccgcgtgatcagctcgtgggaacgccgccatctgctgctgcacgtctga

SEQ ID NO: 32180 - protein, 445 aa, Burkholderia sp. 383
MHDIEDFLKQHRITEVEAIIPDMAGIARGKITPRNKFTSGESMRLPQAVMVQTVTGEYPEDGSLTGVTDPDMVCVPDASTIRLIPWAIDPTAQVIHDCVHFDGSPVEISPRYVLRRVLDLYKAKGWKPVVAPELEFYLVDMNKDPDLPLRPPVGRTGRPETGRQSYSIEAVNEFDPLFEDIYEYCEAQNLDIDTLIHEVGAAQMEINFMHGDALSLADQVFLFKRTVREAALRHNMYATFMAKPMEDEPGSAMHVHQSIVDEETGQNLFTSQETGGATSMFYNYLAGLQKYTPALMPIFAPYINSYRRLSRFMAAPINVQWGYDNRTVGFRIPHSGPSARRIENRIPGVDCNPYLALAATLAAGYLGMTQRLEPTEPLVSDGYDLPYQLPRNLEEGLTLMAACEPLGEILGHKFLKAYFALKETEYEAFFRVISSWERRHLLLHV

SEQ ID NO: 32181 - DNA, 1305 bp, Synechococcus elongatus PCC 7942
  CDS (1)..(1305): transl_table=11
atggattctttggcagccttggcgcgcgatcggggcattcgttactttctgattgccttcaccgatctatttggcgtacagcgagccaagctggtgccagccagcagcatcgacctcatggccactagtggtgcgggctttgccggttttgcagcttggcttgatctcagcccagcggatgcggacgttttagccattcccgatcgcgacagtctgttccaactgccttggcaaccggaagtcgcttggatgccagcagatctctacctcaacgatcaaccgctggagcaagcgccgcgctgggtactaaagcgggttctctcggtggctgagtccctcggctatcgccccaaaacaggggtggagtgtgagttcttccttctggatgaaaccggagatgcgatcgctgatccgcgcgatcgccaggcgaaaccttgctacgaccagcagtccctgatgcggcgctacgacctgattacccagatcagtgaagcgatggaggaactgggctgggggccgtatcaaagtgatcatgaagatgccaacggtcagtttgaaatgaactggacctatgcggatgcgctagtcactgccgatcgccaggctttcttcaagtacatggtcaaaactctcgcggaacggcaaggattaagggctacctttatgcccaagcccttcgcggatttgaccggcaatggttgccacatgcacctttcactctggaatcgggagggcacaaccaatacttttgtcgatccggttgcgactgctcccctctcgaccctgggctatcagtttattggtggattgctgcattcggcggcatccctctgcgccctcaccaacccaaccatcaactcctataagcggattaatgcaccggcgacgacctcgggtgcgacttggtctccgaacggtattagctacagtggcaacaaccgcacccacctgatccgtattcccgatgccggtcgctttgagttgcgactcgccgatggggctgctaacccttacctgttgcctgctgccgcgatcgctgccggcttagatggtattcagaacaaacgcgatccaggcccccgctacgacaatgacaactatgctcagcccttaccacccggcacagttccgaccttgcccgagcatttgctggatgccctgcgatcgctacaagaaagcactgttctcaccgaaggtttgggagctgcgttcacaagtgcatacctcaagcttaagcatcaggaatggcgcagtttttgtgctgaaattaccccttgggagcgcgctacaaccttggattgctag

SEQ ID NO: 32182 - protein, 434 aa, Synechococcus elongatus PCC 7942
MDSLAALARDRGIRYFLIAFTDLFGVQRAKLVPASSIDLMATSGAGFAGFAAWLDLSPADADVLAIPDRDSLFQLPWQPEVAWMPADLYLNDQPLEQAPRWVLKRVLSVAESLGYRPKTGVECEFFLLDETGDAIADPRDRQAKPCYDQQSLMRRYDLITQISEAMEELGWGPYQSDHEDANGQFEMNWTYADALVTADRQAFFKYMVKTLAERQGLRATFMPKPFADLTGNGCHMHLSLWNREGTTNTFVDPVATAPLSTLGYQFIGGLLHSAASLCALTNPTINSYKRINAPATTSGATWSPNGISYSGNNRTHLIRIPDAGRFELRLADGAANPYLLPAAAIAAGLDGIQNKRDPGPRYDNDNYAQPLPPGTVPTLPEHLLDALRSLQESTVLTEGLGAAFTSAYLKLKHQEWRSFCAEITPWERATTLDC

SEQ ID NO: 32183 - DNA, 1365 bp, Rhodospirillum rubrum ATCC 11170
  CDS (1)..(1365): transl_table=11
atgaaaaccgcagaaccgcagactatcgacgatctcgaacggtggatcaaaagccgtggcatcaccgaggtcgaatgtctcgtgcccgatctatcgggaatcccccggggcaagatcctgcccgcgcgcaaattcctctcgtgcttgcgcgaccgggggttgcgcttgcccgagtcggtcttcacccagacggtgaccggcgaataccccgaggatgatccggtcgatatcgccgattcggacgtttacctgcgccccgacccccggaccatccgcgtcgtcccctggtacgaggagccgacggcccaggtgatcaacgattgcttccaccgcgatcgctccgaggtgcattgcgccccccgtcaggtgttgcgcaacatcctggcgctttatgaaaagcaggggtggaagccggtggtcgcgccggaactggaattctatctggtgcggatcaacgccgatcccgattatccgctggaaccgccgatcggccgctcgggccgggccgaaaccgggcgtcaggcctatggcatcgacgccgtcaacgaattcgatccgttgttcgaggacatctacgattacgccgaggaacagaacctcgaccttgataccctgcaccatgaatcgggctcggcgcagatggagatcaattttctccatggcgatccgatggaactggccgatcaggtgttcttgttcaagcgcacggtgcgtcaggccgcccttcgccataacgtctatgccaccttcatggccaagccgctggccggtcagccgggcagcgccatgcacctgcaccaaagcatcaccgatgccgaaagcgggcggaatatcctggtcaagaagaacggcgaggattcggatctgttccgctggcacatcggcggcctgcagaaatacctgccccactgcatgctgatgctggcgcccaacgtcaacagctaccggcgcttcctgcccgatcagtcggcgccgatcaacatgcattggggccatgacaaccgcacggtgtcgttgcgcgtgccctatgccgacgccagcgcccgccgggttgaaaaccgcctgtcgggggccgatgccaacccctatctggcgatcgccgcctcattggcctgcggctatctggggatgatcgaaaagatcgaacccaccgcgccgatcaccggcagcgcctatacccgtgcccacaacctgccgcgccatctgcccgatgccatcgaacgcttcgaacgggcccggccgctgcatgaattgctcaacgccgatttcgtccgcgtctacgcctcggtgaaatgggcggaatgggatgcctaccagcatgtgatttcaagctgggaacgcgaatacttgctgcttaacgtctga

SEQ ID NO: 32184 - protein, 454 aa, Rhodospirillum rubrum ATCC 11170
MKTAEPQTIDDLERWIKSRGITEVECLVPDLSGIPRGKILPARKFLSCLRDRGLRLPESVFTQTVTGEYPEDDPVDIADSDVYLRPDPRTIRVVPWYEEPTAQVINDCFHRDRSEVHCAPRQVLRNILALYEKQGWKPVVAPELEFYLVRINADPDYPLEPPIGRSGRAETGRQAYGIDAVNEFDPLFEDIYDYAEEQNLDLDTLHHESGSAQMEINFLHGDPMELADQVFLFKRTVRQAALRHNVYATFMAKPLAGQPGSAMHLHQSITDAESGRNILVKKNGEDSDLFRWHIGGLQKYLPHCMLMLAPNVNSYRRFLPDQSAPINMHWGHDNRTVSLRVPYADASARRVENRLSGADANPYLAIAASLACGYLGMIEKIEPTAPITGSAYTRAHNLPRHLPDAIERFERARPLHELLNADFVRVYASVKWAEWDAYQHVISSWEREYLLLNV

SEQ ID NO: 32185 - DNA, 1371 bp, Burkholderia thailandensis E264
  CDS (1)..(1371): transl_table=11
gtgacggccgtcgacgcttatcgaagagaggctcacatgcaagacatcgatgattttctgaggcagcaccggatcaccgaagtggaggcgatcatccccgacatggcgggcatcgcgcgcggcaagatcattccgcgcaacaagttcgaaaccggcgaatcgatgcgcctgccgcaagcggtgatggtgcagaccgtcaccggcgactatccggaggacggcgcgctcacgggcgtcaccgatcccgacatggtgtgcgtggctgacgcgtcgacgatctgcctgattccgtgggcggtcgatccgaccgcgcaggtgattcacgattgcgtgcatttcgacggctcgcccgtcgagatctcgccgcgctacgtgctgcgccgggtgctcgatctgtatcgcgcgaaaggatggaagcccgtcgtcgcgccggagctcgagttctatctggtcgacatgaacaaggatccggacctgccgctgcggccgcccgtcggccgcacggggcgtgcggagacggggcgccagtcgtattcgatcgaggcggtcaacgaattcgatccgctcttcgaggacatctacgaatactgcgagctgcaggggctcgacatcgacacgctgattcacgaggtcggcgccgcgcagatggagatcaacttcctgcacggcgacgcgctgtcgctcgccgaccaggtgttcctgttcaagcgcaccgtgcgcgaagcggcgctgcgccacaacatgtacgcaacgttcatggcgaagccgatggagaacgagccgggttcggcgatgcacattcatcagagcgtcgtcgacatcgagacgggccgcaacctcttcatcggcgcgagcggcgacgtcacgccgatgttccgcggctatctcgccggactgcagaagtacacgcccgcgctgatgccgatcttcgcgccgtacatcaactcgtatcgccggctgtcgcgcttcatggccgcgccgatcaacgtgcagtggggttacgacaaccgcacggtcggcttccggattccgcattcggccgccgccgcgcggcgaatcgagaaccggattccgggcgtcgactgcaatccgtatctcgcgatcgcggccacgctcgcggccggctatctcggcgtcacgcaggcgctcgagccgaccgagccgctcgcgagcgacggctacagcctgccttatcaactgccgcgcaatctggaggaggggctcacgctgatgagcgcgtgcgcgccgctcgccgagatgctaggcgagaagttcgtgaaggcctatctcgcgttgaaggaaacggagtacgaagcatttttccgcgtgatcagctcgtgggagcgcaagcacctgctgctgcacgtttga

SEQ ID NO: 32186 - protein, 456 aa, Burkholderia thailandensis E264
MTAVDAYRREAHMQDIDDFLRQHRITEVEAIIPDMAGIARGKIIPRNKFETGESMRLPQAVMVQTVTGDYPEDGALTGVTDPDMVCVADASTICLIPWAVDPTAQVIHDCVHFDGSPVEISPRYVLRRVLDLYRAKGWKPVVAPELEFYLVDMNKDPDLPLRPPVGRTGRAETGRQSYSIEAVNEFDPLFEDIYEYCELQGLDIDTLIHEVGAAQMEINFLHGDALSLADQVFLFKRTVREAALRHNMYATFMAKPMENEPGSAMHIHQSVVDIETGRNLFIGASGDVTPMFRGYLAGLQKYTPALMPIFAPYINSYRRLSRFMAAPINVQWGYDNRTVGFRIPHSAAAARRIENRIPGVDCNPYLAIAATLAAGYLGVTQALEPTEPLASDGYSLPYQLPRNLEEGLTLMSACAPLAEMLGEKFVKAYLALKETEYEAFFRVISSWERKHLLLHV

SEQ ID NO: 32187 - DNA, 1359 bp, Frankia sp. CcI3
  CDS (1)..(1359): transl_table=11
atggacaaacagcaggagttcgttctccggactctggaggagcgggacatccgcttcgttcggctctggttcaccgacgtactcgggtacctgaagtcggtggagatcgcccccgcggagctggagggggcgctggcggagggtatcggtttcgacggatccgccattgagggctttgcgcgggtacacgaggccgacatgctggcccggcccgacccctccaccttccaggtgcttccctggcgcggtgaacatccgcttacggcccggatgttctgcgacctcgtgatgccggacggcacgcccgccgccgccgactcgcgctgggtgctgcggagcgcgctggccagggcggccgacgcggggttcacgttctacacccatccggagatcgagttcttcctgctcagggagccgccgaagcggggtggcccggtgcccccgccggtggacgaatcaggctacttcgacctgacccccaatgacatcagccatgatttccggcaacaggccatcagcatgctcgaacggctgggcatctcggtggagttcagccaccacgaggtggcccccggccagcaggagatcgatcttcgctacgccgacgccctcaccatcgccgacaacatcatgaccttccgccaggtggtcagggaggtggcgttgcggcagggtatttacgccaccttcatgcccaagccgttcggtaaccaggccgggtcggggatgcacacccatctgagccttttcgagggcgaccgtaacgcctttcacgacccgaccgacgactatcagctgtccaaggtggcgaaggccttcatcgccgggctcctcgcgcacgccgccgaaatcaccgcggtgaccaaccagtgggtgaactcctacaagcggctcatcggcgaccagcgggtcggcgaggtgctggaggcgccggcctatgtgtgctggggccacaacaaccgttcggcgctcgtgcgggttccgctctacaagctccacaaatccaacgccacccgggtggagttccggctgccggacagcgcgtgcaacccgtatctcaccttcgccctggtgctggcagccggcctgcggggtgtccagggcggttatgagctgccaccggcttcggcggacgatgtctggacgctcaccgacacgcagcgccgtgagcgcgggatcaccgccctgcccggctcgctcgccgaggcggtcaaggtgatggagcattccgcgcttgtgcgggagaccctcggcgacgagttgttcgacttcttcctgcggaacaagcgggccgagtggctggaataccgtcggcaggtgaccccgttcgagatcgaccggtacctgccggtgctatga

SEQ ID NO: 32188 - protein, 452 aa, Frankia sp. CcI3
MDKQQEFVLRTLEERDIRFVRLWFTDVLGYLKSVEIAPAELEGALAEGIGFDGSAIEGFARVHEADMLARPDPSTFQVLPWRGEHPLTARMFCDLVMPDGTPAAADSRWVLRSALARAADAGFTFYTHPEIEFFLLREPPKRGGPVPPPVDESGYFDLTPNDISHDFRQQAISMLERLGISVEFSHHEVAPGQQEIDLRYADALTIADNIMTFRQVVREVALRQGIYATFMPKPFGNQAGSGMHTHLSLFEGDRNAFHDPTDDYQLSKVAKAFIAGLLAHAAEITAVTNQWVNSYKRLIGDQRVGEVLEAPAYVCWGHNNRSALVRVPLYKLHKSNATRVEFRLPDSACNPYLTFALVLAAGLRGVQGGYELPPASADDVWTLTDTQRRERGITALPGSLAEAVKVMEHSALVRETLGDELFDFFLRNKRAEWLEYRRQVTPFEIDRYLPVL

SEQ ID NO: 32189 - DNA, 1380 bp, Methylobacillus flagellatus KT
  CDS (1)..(1380): transl_table=11
atgaagatagtagatggaaggttcacatgtcagccaggtacgccggctgagcaattggcggctgcgaagaagttcctggccgacaaccatgtgaaatacgtattggcgcagttcgtggatatccacggggtcgccaaggtgaagtcggtgcctgctgcgcatctcgaatccattctcaaggatggcgcggggttcgccggtggggcgatctggggcatgggcatcctgcccaatggtccggactacatggcagtgggtgatttgtccacgctgagtctgcttccctggcagcccggctatgcgcgcatcatctgcgacggccatgtcgaccagaagccttacgagtacgactcgcgcgtggtgctgaagaagcaggtcgaacgtctgtcggcgcaaggctggacgctctacaccggtctggagccggagttctcgctgctcaggcgcgacgaaaagggcgcactgcacccttgcgacgagaccgatacgctgcaaaagccctgttatgactacaagggcatgacgcggcaggcggtgttcctcgaaagactgaccgaagcgctgatcgcggccgggctggatgtgtaccagatcgaccacgaagatgccaacggccagttcgagatcaattacacctatgccgactgcctcaagagcgcggacgactatatcctgttcaagatggcggccagccatatcgccaacgagctcggcatgacctgttccttcatgcccaagccgttcggcaaccgccccggcaacggcatgcacatgcatatgtcgatcggcgacggcaacaagagcctgtttcatgatgacagcgatagcaccggccacggcctgtcaccgctggcctatcacttcctgggcggcatcctgcatcacgccccggcattgaccgcgctcgctgcgcctaccgtcaattcgtacaagcgcctggtggtcagccagtcgctcaccggctcgacctgggcgccagcctatatttcctatggcaacaacaaccgctcgaccatggtgcgcattccctatggccgcctggagctgcgcctgccggacggtagctgtaacccctacctgaccacggcggcggtgatcgcagccggcctcgacggcgtcaagcgcgagctgcatccaggccctggccattccaccaatttgttcgacctgagcctggcggaaatgaaggagcaaggcatcggcatcctgccgcaaaacctcaatgagtcgctggaccagctcgaagccaaccaggtgttgcgcgatgcgctgggcaatgcgctcaccgaggagttcatcaagctcaagcgcgctgaatgggtcgattatcagcgccatgtgtcggattgggagatcaaccgctatatcgaatttttctag

SEQ ID NO: 32190 - protein, 459 aa, Methylobacillus flagellatus KT
MKIVDGRFTCQPGTPAEQLAAAKKFLADNHVKYVLAQFVDIHGVAKVKSVPAAHLESILKDGAGFAGGAIWGMGILPNGPDYMAVGDLSTLSLLPWQPGYARIICDGHVDQKPYEYDSRVVLKKQVERLSAQGWTLYTGLEPEFSLLRRDEKGALHPCDETDTLQKPCYDYKGMTRQAVFLERLTEALIAAGLDVYQIDHEDANGQFEINYTYADCLKSADDYILFKMAASHIANELGMTCSFMPKPFGNRPGNGMHMHMSIGDGNKSLFHDDSDSTGHGLSPLAYHFLGGILHHAPALTALAAPTVNSYKRLVVSQSLTGSTWAPAYISYGNNNRSTMVRIPYGRLELRLPDGSCNPYLTTAAVIAAGLDGVKRELHPGPGHSTNLFDLSLAEMKEQGIGILPQNLNESLDQLEANQVLRDALGNALTEEFIKLKRAEWVDYQRHVSDWEINRYIEFF

SEQ ID NO: 32191 - DNA, 1368 bp, Silicibacter sp. TM1040
  CDS (1)..(1368): transl_table=11
atgccgaccccgacgcgctggcaggaaaaactgcccgaagctgccacgacctatctggagggccgtcgtctcgacgaggttgaatgcgttatctcggacttgccgggcatcgcccggggcaaggcggtgccagcgtcgaaatttgccaagcaggactatttttacctgcccgacagcatcttttatcagaccatcaccggggattgggccgaagccgccgacgaggacggctggatcgaaaaggacatgctgctgcgcccggacatgagcaccgcaaccgccgccccctggaccggcgactggactctgcaggtcatccacgatgcctatgaccgcgacggcaacccgatccccttcagcccgcgcaacgtgctgaaacatgtggtgagcctctatgaggcgcagggctggaaacccgtggtggcgccggagatggaattctatctcgtggcccgcaacgtcgaccccgcgcgcgacatccagcccatgatgggccgctctggccgtccggcggcggcgcgtcaggcctattcgatgacagcggtggacgaatttggccccgtcatcgacgacatctatgattttgccgaggcgcaaggctttgaaatcgacggcatcacccaggaaggcggtgccgggcagctggaaatcaacctgcgccatggctcgccggtgaagctagccgatgaggtgttttacttcaaacgcctgatccgcgaggccgcgctgcgccatgattgctttgccaccttcatggcaaaaccgatcgctgatgagccgggctctgccatgcatatccaccactcggtgatcgacatcgagagcggcgagaacatcttttccggtccccaaggtggtgaaacggatgcgttttatcactttatcggcgggctgcagaaccaccttcctgccggtctcgcggtgatggcgccctatgtgaattcctatcgccgctatgtgaagaaccacgccgcgccgatcaatctggaatgggcgcgcgacaaccgcaccaccggcattcgggtgccgctctccagttccgcctcgcgccgggttgaaaaccgcatcgccgggatggattgcaacccctatctcggtatcgcggtatcgctggcctgcggctacctcggcctgatggaagagcgccgccccacccgccagttcaaaggcgatgcctatgagggcgaaggtgactttccgcaggtcatgggtcaggcgctcgatctctttgacgagtccaaggcgcttcacgaggtgctcggccccgaattcgcccgggtctacagcacggtgaagcgcgcagaatacgaagagttcctgcaagtgatctcgccgtgggagcgtgagcacctgttgctcaacgtctga

SEQ ID NO: 32192 - protein, 455 aa, Silicibacter sp. TM1040
MPTPTRWQEKLPEAATTYLEGRRLDEVECVISDLPGIARGKAVPASKFAKQDYFYLPDSIFYQTITGDWAEAADEDGWIEKDMLLRPDMSTATAAPWTGDWTLQVIHDAYDRDGNPIPFSPRNVLKHVVSLYEAQGWKPVVAPEMEFYLVARNVDPARDIQPMMGRSGRPAAARQAYSMTAVDEFGPVIDDIYDFAEAQGFEIDGITQEGGAGQLEINLRHGSPVKLADEVFYFKRLIREAALRHDCFATFMAKPIADEPGSAMHIHHSVIDIESGENIFSGPQGGETDAFYHFIGGLQNHLPAGLAVMAPYVNSYRRYVKNHAAPINLEWARDNRTTGIRVPLSSSASRRVENRIAGMDCNPYLGIAVSLACGYLGLMEERRPTRQFKGDAYEGEGDFPQVMGQALDLFDESKALHEVLGPEFARVYSTVKRAEYEEFLQVISPWEREHLLLNV

SEQ ID NO: 32193 - DNA, 1350 bp, Myxococcus xanthus DK 1622
  CDS (1)..(1350): transl_table=11
gtggacacgctgcgccgctggctggatgagaagggcgtccagaaggtgaaggtgggcgcggtggacgtcgatggcgtctggcgcggcaagtacatctccctggagaagttcctcagcgccgccaaaggcggcctgggcttctgtgacgtcgtcttcggctgggacttgagcgacgacttgctcgacaacacccaggtgacgggctggcacaccggttacccggatgcccacgcgaaggtggacccgtccaccggccgcgtcattccctgggagccggacaccgcggcgttcctgctcgacttcgaaaaccccgacggcacgcctttcgaggcgagcccccggcagttgctccagaaggtggccgcccgcgcgcgctcgctggggtacctgccgcgcttcggcgcggagtacgagttcttcatcttcaaggagcagccgcagagcctgcgcgacaaggacttccaggggctgacgccgctgacgccaggcatgttcggctattcgtggctgcgcacgtcgctcaacgcgccgctggtgcatgcgctcatcgacgggtgcaacgccttcggcctgggcatcgagggcttccacacggagacggggccgggcgtcttcgaggcggccatccgctacgacgacatcgagaagtcggcggacaaggccgcgctcttcaagacggtggtgaaggagatttgcgcccgccacggcgtcaccgcgtgcttcatggcgaaggtggacgcgaagctgccggggtgctcggggcacgtccaccagtcgctgtgggatttggacggggagcagaacctcttccacgacgcgaaggcgccccacggcatgagcaagctgctgcgccactacatcggcgggcaggtggcgctgatgccggagctcaccgcgctctactggcccaccatcaacagctacaagcgcagcgtggagaatacctgggcgcccaccaccgtgacgtggggcctggagaaccgcaccaccgccatccgcgtcatcggtgagagcgccaaggcgatgcgcctggagtaccggcagttgggcgcggacatgaatgcgtacatcggcatggcggtcagcctggccgcgggcctgtggggcatcgagaacgaggtggagcctcccgcgccctgcgagtccaacgcctacgcgaagaacgacgcgccgcccttgccccgcaacctcaaggacgcggtggcgctgctgaagggcagcgagcgcgcgcgggagttgctgggctacggcttcgtggaccacttcgtgcgcacgcgcgagtgggaggtgcgtcagtacgagcgcgccgtcaccaactgggagttggagcgttacctggagctcatctga

SEQ ID NO: 32194 - protein, 449 aa, Myxococcus xanthus DK 1622
MDTLRRWLDEKGVQKVKVGAVDVDGVWRGKYISLEKFLSAAKGGLGFCDVVFGWDLSDDLLDNTQVTGWHTGYPDAHAKVDPSTGRVIPWEPDTAAFLLDFENPDGTPFEASPRQLLQKVAARARSLGYLPRFGAEYEFFIFKEQPQSLRDKDFQGLTPLTPGMFGYSWLRTSLNAPLVHALIDGCNAFGLGIEGFHTETGPGVFEAAIRYDDIEKSADKAALFKTVVKEICARHGVTACFMAKVDAKLPGCSGHVHQSLWDLDGEQNLFHDAKAPHGMSKLLRHYIGGQVALMPELTALYWPTINSYKRSVENTWAPTTVTWGLENRTTAIRVIGESAKAMRLEYRQLGADMNAYIGMAVSLAAGLWGIENEVEPPAPCESNAYAKNDAPPLPRNLKDAVALLKGSERARELLGYGFVDHFVRTREWEVRQYERAVTNWELERYLELI

SEQ ID NO: 32195 - DNA, 1428 bp, Mesorhizobium sp. BNC1
  CDS (1)..(1428): transl_table=11
atgttagatgacagcaaggcaggccgcaccaacagaggcggacgccggacgcccgcttttttgaagaatttgcgcggagttaagggctggaaagaagcgcgagcctggctcgaatggcgcggtatcgaggatatcgaatgcattgcgccggaccaagcaggcgtcgcgcgcggcaagatgatgccgtcgaagaagttcatttcgaacacgtccctcgctcttccgtccgccgttttcatggcaaccatctccggcgaatatcctgaagacggcaacgggttcacctatcccgaggacgacggtgacctgaaactcgtgccggatctctctaccctctcagtggttccatgggagacggacccgaccgcccaggtgatctgcgacctggcgcatcaggacgggcgagcggtcgaattcagcccgcgcaacgtcctgaggcgggtcgtcgccaaatatgcggagcacggcctgaagccgattgtcgcccctgagatcgaattctatctcgttcacaagaatcctgatcccgactacccgctgacgcctcctgtcgggcgttcgggaaggccgatcggtggcggacagggctattcgatcgcgggtgtcaacgagttcgacgaactcattgacgacatctaccacttctccgaaggccaggggctggagatcgatacgctcatccacgaagagggcgcggggcaactggagatcaatctgcgccacggcgacccggttgaacttgccgatcaggtcttcctcttcaagcggacaatccgggaagccgcgctcaaacacgagatgtacgccaccttcatggccaagccgatccaggatcagccgggctcggcgatgcatatccatcaatccgtggtaacgttgaagggggggcgcaacgtcttctccgatgagaacggcgaagaaacagacgtttttcgtcacttcatcggcggcttacagcagcatatcccgaacgcgctgatcatgctggcgccttatgtgaactcctacaggcggctgacacaggcgggctcggcgccggtcaacacgcgctggggttatgacaacaggacgactgcctttcgcgtgccccgctcggatccgaactccaggcgcgtggaaaaccgcataccctcctccgatgccaatccttatttggcgcttgccgcctccctggcgtgcggactgatcggaatactccaaaagatcgaacccgacgcaccggccggcacagcggtcaacacggacgtgatcaacctgccccgcggtctcctcgaggcggtcgccctgtttgaagcggacgagagcctcaggaatattgtcggcgatcttttcgcgagcacctatgccgcaatcaagcgggctgaattcgagacgttcatgaaggtcatcagcccttgggagcgggagtatctgttgttgaatgtgtga

SEQ ID NO: 32196 - protein, 475 aa, Mesorhizobium sp. BNC1
MLDDSKAGRTNRGGRRTPAFLKNLRGVKGWKEARAWLEWRGIEDIECIAPDQAGVARGKMMPSKKFISNTSLALPSAVFMATISGEYPEDGNGFTYPEDDGDLKLVPDLSTLSVVPWETDPTAQVICDLAHQDGRAVEFSPRNVLRRVVAKYAEHGLKPIVAPEIEFYLVHKNPDPDYPLTPPVGRSGRPIGGGQGYSIAGVNEFDELIDDIYHFSEGQGLEIDTLIHEEGAGQLEINLRHGDPVELADQVFLFKRTIREAALKHEMYATFMAKPIQDQPGSAMHIHQSVVTLKGGRNVFSDENGEETDVFRHFIGGLQQHIPNALIMLAPYVNSYRRLTQAGSAPVNTRWGYDNRTTAFRVPRSDPNSRRVENRIPSSDANPYLALAASLACGLIGILQKIEPDAPAGTAVNTDVINLPRGLLEAVALFEADESLRNIVGDLFASTYAAIKRAEFETFMKVISPWEREYLLLNV

SEQ ID NO: 32197 - DNA, 1437 bp, Rhodococcus sp. RHA1
  CDS (1)..(1437): transl_table=11
gtggcgttcaccacggccgaagaggtcatcaagttcatcaaggacgagaacgtcgaatatgtcgacatccggttcagcgacctgccgggcgtgcagcagcacttctcgatcccggcgtccgcgttcaaccaggacgtcttcgaggacggcctcgcgttcgacggttcgtccgtccgcggcttccagtcgatccacgagtcggacatgatgctcctccccgacgtcgccaccgcccagctcgacccgttccgcgcggccaagacgctgaacatcaacttcttcgtgcacgacccgttcacgcgtgagtcctacagccgcgacccgcgtaacgtcgcgcgcaaggccgaggaatacctgaagtcgaccggcatcgccgacaccgccttcttcggcgccgaggccgagttctacatcttcgactcggtccgctacgactccggcatcaacggcgcgttctacgagctcgactccatctcgggttcctggaacacgggcaacgacgtgaacgccgacggcagccccaacctgggctacaaggtccgccccaagggtggatacttccccgtcgctccgtacgaccactacgtcgacctgcgcgacgagatctccaccaacctgcagaacgcgggcttcgagctcgagcgcggccaccacgaggtgggcaccggcggccagcaggagatcaactacaagttcaacacgctgctcgcggccgcggacgacctgcagctgttcaagtacatcgtgaagaacaccgcctggcagcacggcaagtcggccaccttcatgccgaagccgctgttcggcgacaacggctcgggtatgcacgtccaccagtcgctgtggaaggacggcaagccgctgttccacgacgaggccggctacgcgggtctgtccgacatggcgcgtcactacatcggcggcatcctgcaccacgcaccgtcgctgctggcgttcaccaacccgacgatcaactcgtaccaccgtctggtgccgggctacgaagcccccatcaacctcgtgtacagccagcgcaaccgctcggcggccgtgcgtatcccgatcaccggcaacaacccgaaggccaagcgcctcgagttccgcgcccccgactcctcgggtaacccctacctgaacttcgcggcgcagatgatggccggcctggacggcatcaagaacaagatcgagccgcaggctcccgtcgacaaggacctctacgagctcccgccggaggaggcccgcaacatcccgcaggctcccaccagcctgtcggccgtcatcgatcgcctcgaggctgatcacgactacctcaccgagggtggcgtgttcacgtccgacctgatcgagacgtggatctcgctgaagcgtgagcaggagatcgctccggtcaacctgcgtccgcacccctacgagttccagctgtactacgacgtgtga

SEQ ID NO: 32198 - protein, 478 aa, Rhodococcus sp. RHA1
MAFTTAEEVIKFIKDENVEYVDIRFSDLPGVQQHFSIPASAFNQDVFEDGLAFDGSSVRGFQSIHESDMMLLPDVATAQLDPFRAAKTLNINFFVHDPFTRESYSRDPRNVARKAEEYLKSTGIADTAFFGAEAEFYIFDSVRYDSGINGAFYELDSISGSWNTGNDVNADGSPNLGYKVRPKGGYFPVAPYDHYVDLRDEISTNLQNAGFELERGHHEVGTGGQQEINYKFNTLLAAADDLQLFKYIVKNTAWQHGKSATFMPKPLFGDNGSGMHVHQSLWKDGKPLFHDEAGYAGLSDMARHYIGGILHHAPSLLAFTNPTINSYHRLVPGYEAPINLVYSQRNRSAAVRIPITGNNPKAKRLEFRAPDSSGNPYLNFAAQMMAGLDGIKNKIEPQAPVDKDLYELPPEEARNIPQAPTSLSAVIDRLEADHDYLTEGGVFTSDLIETWISLKREQEIAPVNLRPHPYEFQLYYDV

SEQ ID NO: 32199 - DNA, 1356 bp, Shewanella sp. MR-4
  CDS (1)..(1356): transl_table=11
atgaataagctaatcgcttttttaaaagaacgaaaaatcacagaagtcgaatgtgttatcagcgatatgacaggtatcgcccgcggaaaaattgccccagtggataaattcctcgatgaaaaaggcatgcgtttacccgaaagcgtgttgctgcaaaccgtgaccggtgactttgttgacgatgatatttattacagtttgctcgacgacgccgacatcgattttgtctgtgtccccgatgaaaatgccgtgtttatgctgccttggaccattgaagccacagctcaagtgatccacgattgctacgacagaatgggcaatcccatcgaattatcgccacgtaacgtgttgaagaaagtgctttcgctatacgagcaaaaaggctgggagccagttattgcacctgagatggagttttatctcaccagccgtagcgatgaccacgatttaccccttaagccacctattggtcgctcgggcagacccgaagcgggacgtcagtctttctcgattgatgcggctaacgaatacgacccgcttttcgaagatatgtacgactggtgcgagctgcaaggtttagatatcgatacgctgatccacgaagacggcccagcgcaaatggagattaacttcagccatggtaatccattatctcttgcggatcaggtgtttgtattcaagcgtaccctgcgtgaggcggcattaaagcacaatgtgtgcgccacctttatggctaaacctgtgaccgatgagcctggcagtgccatgcacattcatcaaagcgtgattaataaggaaacaggcaaaaacatcttcaccaatgaagacggtactcaaagcccattattcctgagctatatcgctggtttacagaagtttattcctgaactcttgccgttgatggctcctaatgccaactcgttccgccgtttcttaccgggcacctctgcgccagtaaacttggaatggggcgttgagaacagaacctgcggcctgcgtattcctgagtcttcaccgcaaaaccgccgcattgaaaaccgtattcctggggcggatgcaaactgctatttagccatcgcggcgagcttactctgcggttacatcggtatggtggaagggttaaaaccttcgacaccagtacagggtaaatcgaacgaaagccgtagcaacaatccacattgcctgccgttgaccttagaagaagcgttagcggcgatggaagagagtgatgcctgtaaggaatatttaggtgaagcctttactaccggctttgtggcggtcaaacaggccgagcttgaaaacttccgccgtgtcgtgagttcgtgggagcgtgagttcctgttactcagtgtgtaa

SEQ ID NO: 32200 - protein, 451 aa, Shewanella sp. MR-4
MNKLIAFLKERKITEVECVISDMTGIARGKIAPVDKFLDEKGMRLPESVLLQTVTGDFVDDDIYYSLLDDADIDFVCVPDENAVFMLPWTIEATAQVIHDCYDRMGNPIELSPRNVLKKVLSLYEQKGWEPVIAPEMEFYLTSRSDDHDLPLKPPIGRSGRPEAGRQSFSIDAANEYDPLFEDMYDWCELQGLDIDTLIHEDGPAQMEINFSHGNPLSLADQVFVFKRTLREAALKHNVCATFMAKPVTDEPGSAMHIHQSVINKETGKNIFTNEDGTQSPLFLSYIAGLQKFIPELLPLMAPNANSFRRFLPGTSAPVNLEWGVENRTCGLRIPESSPQNRRIENRIPGADANCYLAIAASLLCGYIGMVEGLKPSTPVQGKSNESRSNNPHCLPLTLEEALAAMEESDACKEYLGEAFTTGFVAVKQAELENFRRVVSSWEREFLLLSV

SEQ ID NO: 32201 - DNA, 1356 bp, Shewanella sp. MR-7
  CDS (1)..(1356): transl_table=11
atgaataagctaatcgcttttttaaaagaacgaaaaatcacagaagtcgaatgtgttatcagcgatatgacaggtatcgcccgcggaaaaattgccccagtggataagttcctcgacgaaaaaggcatgcgcttacccgaaagcgtgttgctgcaaaccgtgaccggtgactttgtcgacgatgatatttattacagcttgctcgacgatgccgacatcgattttgtctgtgtccccgatgaaaatgccgtatttatgctgccttggaccattgaagccacagcgcaagtgatccacgattgctacgacagaatgggcaatcccatcgaattatcgccacgtaacgtgttgaagaaagtgctttcgctatacgagcaaaaaggctgggagccagttattgcacctgagatggagttttatcttaccagtcgtagcgatgaccacgatttaccccttaagccacctattggtcgctcgggcagacccgaagcgggacgtcagtctttctcgattgatgcggctaacgaatacgatccgcttttcgaagatatgtatgactggtgtgagctgcaaggtttagatatcgatacgctgatccacgaagacggccctgcgcaaatggagattaacttcagccacggtaatccattatctcttgcagatcaggtgtttgtattcaagcgtaccctgcgtgaggcggcattaaaacacaatgtgtgcgccacctttatggctaaacctgtgaccgatgagccaggcagtgcgatgcacattcaccaaagcgtgattaataaggagacgggcaaaaacatcttcactaatgaagacggtactcaaagcccattattcctgagctatatcgctggtttacaaaagtttattcctgaactcttgccgttgatggcgcctaatgccaattcgttccgtcgtttcttaccgggcacctctgcgccagtaaacttggaatggggcgttgagaacagaacctgcggcctgcgaattcctgagtcatcaccgcaaaaccgccgcattgaaaaccgtattccaggggcggatgcaaactgctatttagccatcgcggcgagcttactctgcggttacatcggtatggtggaagggttaaaaccttcgacaccagtgcagggtaaatcgaacgaaagccgtagcaacaatccacattgcctgccgttaaccttagaagaagcgttagcggcgatgcaagagagtgatgcctgtaaggaatatttaggtgaagcctttaccaccggctttgtggcggtcaaacaggccgagcttgaaaactttcgccgcgtcgtgagttcgtgggagcgggagttcctgttactcagtgtgtaa

SEQ ID NO: 32202 - protein, 451 aa, Shewanella sp. MR-7
MNKLIAFLKERKITEVECVISDMTGIARGKIAPVDKFLDEKGMRLPESVLLQTVTGDFVDDDIYYSLLDDADIDFVCVPDENAVFMLPWTIEATAQVIHDCYDRMGNPIELSPRNVLKKVLSLYEQKGWEPVIAPEMEFYLTSRSDDHDLPLKPPIGRSGRPEAGRQSFSIDAANEYDPLFEDMYDWCELQGLDIDTLIHEDGPAQMEINFSHGNPLSLADQVFVFKRTLREAALKHNVCATFMAKPVTDEPGSAMHIHQSVINKETGKNIFTNEDGTQSPLFLSYIAGLQKFIPELLPLMAPNANSFRRFLPGTSAPVNLEWGVENRTCGLRIPESSPQNRRIENRIPGADANCYLAIAASLLCGYIGMVEGLKPSTPVQGKSNESRSNNPHCLPLTLEEALAAMQESDACKEYLGEAFTTGFVAVKQAELENFRRVVSSWEREFLLLSV

SEQ ID NO: 32203 - DNA, 1437 bp, Rhizobium leguminosarum bv. viciae 3841
  CDS (1)..(1437): transl_table=11
atgtccccaaaaaagacgacgctgaagcctgccagaaacgtacccgcctcgaaaaaaactcccccggagcccggatccctgcgcggcgttgcgaactggaaggaagcagcgcggtggctgaggcacaggggcatcgaagacatcgaatgcatcacgccggaccttgccggcgttgcgcgcggcaagatgatgccgagctcgaaattcacctccaacacctcgctggcgctgccttcggcaatctaccggcacacgatttcgggcgaatatcccgacgagacggagagcttccgctatgagccgcgcgacagcgacctgaagctgatgcccgacctttcgacgctttccgtcgtgccctgggagaccgacccgacggcgcaggtaatctgcgatatcgtcgattcggacggcggggaagtgccctatacgccgcgcaacgtgttgaagcggatcatgagcctctatcatgagcgcggctggaaaccgatcgtggcgcccgagatcgaattctacctcgtcgccaagaacgacgatccagactatccgctccacccgccgaaaggccggtccggccgctcgatcctcggcggccagggctattcgatcgccggcatcaacgagttcgacgagctgatcgacgacgtctatcatttctcggaaaagcaggggttggagatcgatacgctgatccatgaagagggaccggcgcagctcgagatcaacctgcgccacggcaatccgatcgagcttgccgaccaggtgttcctgttcaagcggacgatccgcgaggcggcgctgaaacacgacatctacgcgaccttcatggcaaagccgatgcagggccaaccgggttcggcgatgcatatccaccagtcggtggtcgatatcgagaccggcaagaacatcttctccaatgccgatggctcggcttcgaaggaattcttccatttcatcggcggcatgcagaaattcgtgccgagcgcgatggcgatgctggcgccctatgtgaattcctaccggcgcctgcagcccgatatgtcctgcccggtcaacaatgcctggggttacgacaaccggacgacggccttccgtgtcccggtctccgatccgcaggcgcggcgcgtggaaaaccggctgccgagctcggatgccaatccctatctcgcgctcgccgcttcgctcgcctccggcctgctcggcatcataaagcagatcgagccgacggcgccgaccgaggattcggccaatgagggttcgatcgatctgccgcgcggcctgctggaagccgtggcgctgctcgaggacgaacccgccttcgaggagatattcggcaagcagttcatcggcctttatgccggcgtcaagcgcggcgagttcgagaccttcatgcaggtgatcagcccctgggagcgggaattccttctgctcaacgtgtga

SEQ ID NO: 32204 - protein, 478 aa, Rhizobium leguminosarum bv. viciae 3841
MSPKKTTLKPARNVPASKKTPPEPGSLRGVANWKEAARWLRHRGIEDIECITPDLAGVARGKMMPSSKFTSNTSLALPSAIYRHTISGEYPDETESFRYEPRDSDLKLMPDLSTLSVVPWETDPTAQVICDIVDSDGGEVPYTPRNVLKRIMSLYHERGWKPIVAPEIEFYLVAKNDDPDYPLHPPKGRSGRSILGGQGYSIAGINEFDELIDDVYHFSEKQGLEIDTLIHEEGPAQLEINLRHGNPIELADQVFLFKRTIREAALKHDIYATFMAKPMQGQPGSAMHIHQSVVDIETGKNIFSNADGSASKEFFHFIGGMQKFVPSAMAMLAPYVNSYRRLQPDMSCPVNNAWGYDNRTTAFRVPVSDPQARRVENRLPSSDANPYLALAASLASGLLGIIKQIEPTAPTEDSANEGSIDLPRGLLEAVALLEDEPAFEEIFGKQFIGLYAGVKRGEFETFMQVISPWEREFLLLNV

SEQ ID NO: 32205 - DNA, 1359 bp, Pseudomonas aeruginosa UCBPP-PA14
  CDS (1)..(1359): transl_table=11
atgactaccaagttagaccagctgaccagctggctgaaggaacgcaagatcaccgaagtggaatgcctgatttccgatctgacaggcatcgcccgcggcaagatctcgccgaccaacaaattcatcgcggaaaagggcatgcgcctgccggagagcgttctgctgcagaccgtcaccggcgactacgtggaagacgacatttactacgacctgctcgacccggccgacatcgatatggtctgccgcccggacgagaatgccgtgttcctcgtcccctgggccatcgagcccaccgcgatggtgatccacgacaccttcgacaagctcggcaatcccatcgagctgtcgccgcgcaacatcctcaagcgcgtgttgaagatgtatgccgacaagggctggcggccgatcgtggcgccagagatggagttctacctgaccaagcgcagcgacgaccccgactatccgctgcaggccccggtgggccgctccggacgccaggaaaccgggcgccagtcgttctccatcgacgccgccaacgagttcgacccgctgttcgaggacatgtacgactggtgcgaggcccagggccttgacctggatacgctgatccacgaggaaggcaccgcgcagatggagatcaacttccgtcatggcgacgccctcgacctggccgaccagatcctggtgttcaagcgcaccatgcgcgaggccgcgctcaagcacaacgtcgccgcgaccttcatggccaagccgatgaccggcgagccgggcagcgcgatgcacctgcaccagagcatcgtcgacgtgaagaccggcaagaacatcttctccaatgccgacggcaccatgagcgagctgttcctgcaccatatcggcggcctgcagaagttcatcccggaagtgctgccgctgttcgcgcccaacgtgaactcgttccgccgcttcctgcccgatacctcggcgccggtgaacgtcgagtggggcgaagagaaccgtaccgtcggcctgcgcgtgccggactccagcccggagaaccgccgggtcgagaaccgtctcgccggcgccgacgctaacccttacctggcgctggctgccagcctgctgtgcggctacatcggcatggtcgaaggcatcaagccgagcgcccaggtcaaaggtcgcggctatgaacgccgcaacctgcgcctgccgctgacgatcgaagcggcgctggagcgcatggagaactgcaagcccctcgagcagtatctcggcagcaagttcatcagcggctacgtcgcggtgaagcgtgcggagcacgagaatttcaagcgggtaatcagctcctgggagcgggaattcctcctgctttccgtttga

SEQ ID NO: 32206 - protein, 452 aa, Pseudomonas aeruginosa UCBPP-PA14
MTTKLDQLTSWLKERKITEVECLISDLTGIARGKISPTNKFIAEKGMRLPESVLLQTVTGDYVEDDIYYDLLDPADIDMVCRPDENAVFLVPWAIEPTAMVIHDTFDKLGNPIELSPRNILKRVLKMYADKGWRPIVAPEMEFYLTKRSDDPDYPLQAPVGRSGRQETGRQSFSIDAANEFDPLFEDMYDWCEAQGLDLDTLIHEEGTAQMEINFRHGDALDLADQILVFKRTMREAALKHNVAATFMAKPMTGEPGSAMHLHQSIVDVKTGKNIFSNADGTMSELFLHHIGGLQKFIPEVLPLFAPNVNSFRRFLPDTSAPVNVEWGEENRTVGLRVPDSSPENRRVENRLAGADANPYLALAASLLCGYIGMVEGIKPSAQVKGRGYERRNLRLPLTIEAALERMENCKPLEQYLGSKFISGYVAVKRAEHENFKRVISSWEREFLLLSV

SEQ ID NO: 32207 - DNA, 1374 bp, Mycobacterium smegmatis str. MC2 155
  CDS (1)..(1374): transl_table=11
atgagccgtaaccccggcatgctgacacaggacgaacttgtgcagctcgtcacagacggtgagatcgacacggtgatcgtcgcgttctgcgacatgcagggcaggctgacgggcaaacgggtgtcggctcggctgttcgtcgaagaggtcgccgccaacggctgcgagtgttgcaactacctgcttgccgtggacgtcgacatgaacaccgtcgacggatacgcggtctcgagttgggagaccggctacggcgacatggtgatgacgcccgacttctcgacgttgcgccgcatcccgtggttgcccggcacggccatggtgatggccgatctgtcctggctcgacggcaaccctgtcgcggtcgcgccgcgcagcatcctcaaccaccagatcgaccggctcgccgaacgcggactcgtgcccttcgtgggcaccgagttggagttcatggtgttcgacgacagcttccgtcaggcctggtcgtcgggataccacaacctcaccccggccaccgactacaacgtcgactacgccatccacgcctccacccgcatggaaccgttgctgcgtgacatccgccgcggcatggagagtgccggcatgtactgcgagggcgtcaagggcgagtgcaacctgggccagcaggagatcgcgttccgctacgaccacgccagggtgacgtgcgacaaccacacgatctatcgcaacggcgccaaggaaatcgccgaccagcacggcaagagcctcacgttcatggcgaaatacgatgaacgcgagggcaatagctgccacatccacatctcgctgcgcggggcgggcgagaacggcgacgcggtgttcgccgacgagtccgacccgcacgggatgtcgccgttgttccgcagtttcatcgcgggcatcctcgcgacgctgcgtgagctcaccctgttctacgcgccgaacatcaactcctacaagcggttcgtggacggcagcttcgcgcccaccgcggtggcgtggggcttcgacaaccgcacgtgtgcgttgcgcgtcgtcgggcacggccacggcatgcgcgtcgagtgccgcgcgcccggcggcgacgtcaaccagtacctcgcggtgtcggcgctgatcgcgggcgggctctacggcatcgagcgtgacctcgaactccccgaaccgatggcgggcaacgcctacaccagcggggccgagcggctgcccaccaccctggccgaggcggccgatctcttcgcgaagtccgaggtggcgcgcgcggcgttcggggacgacgtcgtcgagcactacctgaactacgcgcgcgtcgagatggcggcgttcaacgcggccgtgacggactgggagagggtgcgcggttttgagcgactctga

SEQ ID NO: 32208 - protein, 457 aa, Mycobacterium smegmatis str. MC2 155
MSRNPGMLTQDELVQLVTDGEIDTVIVAFCDMQGRLTGKRVSARLFVEEVAANGCECCNYLLAVDVDMNTVDGYAVSSWETGYGDMVMTPDFSTLRRIPWLPGTAMVMADLSWLDGNPVAVAPRSILNHQIDRLAERGLVPFVGTELEFMVFDDSFRQAWSSGYHNLTPATDYNVDYAIHASTRMEPLLRDIRRGMESAGMYCEGVKGECNLGQQEIAFRYDHARVTCDNHTIYRNGAKEIADQHGKSLTFMAKYDEREGNSCHIHISLRGAGENGDAVFADESDPHGMSPLFRSFIAGILATLRELTLFYAPNINSYKRFVDGSFAPTAVAWGFDNRTCALRVVGHGHGMRVECRAPGGDVNQYLAVSALIAGGLYGIERDLELPEPMAGNAYTSGAERLPTTLAEAADLFAKSEVARAAFGDDVVEHYLNYARVEMAAFNAAVTDWERVRGFERL

SEQ ID NO: 32209 - DNA, 1425 bp, Nocardioides sp. JS614
  CDS (1)..(1425): transl_table=11
atgttccagaacagcgacgagctgctcaagtacgtcaaggacgagggcgttgagatgatcgacgtccgcttctgcgacctgcccggcatcatgcagcacttcacggtcccggtgtcctcgttcgaccagtcggtcttcgacgacgggctgggcttcgacggctcgtcgatccgtggcttccaggccatccacgagtccgacatgtcgctgttcccggatccgaccacggcgtacctcgacccgttccgcaccgccaagaccctggtcgtcaacttcttcatccacgacccgctgaccggcgaggcctactcccgcgacccgcgcaacatcgcgcgcaaggcgatggcctacctgggcaccaccggcatcggcgacaaggcgtacttcgcccccgaggccgagttctacgtcttcgacaacgtgcgcttcgagaccaaggccaacgcgggctactacgagatcgactcctcggccggcgcctggaacaccggcgcggcgttcgagaacgacaaccgcggctacaaggtgaagtacaagggcggctacttcccggtcgcgcccaccgaccacttcggcgagctccgcgacgagatggtcatcgagctggagcgggccggcctgcaggtcgagcgcgcccaccacgaggtcggcaccgccggccaggccgagatcaactaccgcttcgacgagctgctcaaggccgccgacgacgtgatgaagttcaagtacatcatcaagaacgtcgcgtggcgcaacggcaagaccgcgaccttcatgccgaagccgatcttcggcgacaacggctcgggcatgcactgccaccagtcgatctggaacgccggcgagccgctgttctacgacgagaccgggtacggcggcctctccgacaccgcccgctggtacatcggcggcctgctcaagcacgccccgtcgctgctggccttcaccaacccgacggtcaactcctaccaccggctggtgccgggcttcgaggccccggtctcgctggtgtactcccagcgcaaccgctccgcctgcgtccggatcccgatcaccggctcgaacccgaaggccaagcggatcgagttccgctgccccgacccctcggccaacccctacctcgcgttctcggcgctgctgctggccggcctcgacggcatcaagaacaagatcgagcccgccgccccgatcgacaaggacatctacgagctcccgccggacgagatggccgacatcgagcaggtcccggcctccctcgacgccgtgctgaacaacctcgagaccgaccacgagttcctcaccgccggcaacgtcttcacctcggacctgatcgagacctggatcgactacaagcgccagaacgagatcctgccggtccagcagcgcccgcacccgcacgagttcgagctctactacgacatctaa

SEQ ID NO: 32210 - protein, 474 aa, Nocardioides sp. JS614
MFQNSDELLKYVKDEGVEMIDVRFCDLPGIMQHFTVPVSSFDQSVFDDGLGFDGSSIRGFQAIHESDMSLFPDPTTAYLDPFRTAKTLVVNFFIHDPLTGEAYSRDPRNIARKAMAYLGTTGIGDKAYFAPEAEFYVFDNVRFETKANAGYYEIDSSAGAWNTGAAFENDNRGYKVKYKGGYFPVAPTDHFGELRDEMVIELERAGLQVERAHHEVGTAGQAEINYRFDELLKAADDVMKFKYIIKNVAWRNGKTATFMPKPIFGDNGSGMHCHQSIWNAGEPLFYDETGYGGLSDTARWYIGGLLKHAPSLLAFTNPTVNSYHRLVPGFEAPVSLVYSQRNRSACVRIPITGSNPKAKRIEFRCPDPSANPYLAFSALLLAGLDGIKNKIEPAAPIDKDIYELPPDEMADIEQVPASLDAVLNNLETDHEFLTAGNVFTSDLIETWIDYKRQNEILPVQQRPHPHEFELYYDI

SEQ ID NO: 32211 - DNA, 1398 bp, Azoarcus sp. BH72
  CDS (1)..(1398): transl_table=11
gtgaaacccgacctgacctcgcagctggttcaatcgccgcctggcgacctcgtcgcgccgccgcgcttcaccagcgtggagcaggcgcaggagtacctgcgcgcgcgcggcgtgagctacgtcctggcccagttcgtcgatattcacggtgtcgccaaggccaagtccgtcccggtatcccacctgccttcggtggtgagcagcggcgccggctttgccggcttcgccatctggggcgtcggcatcgaaccgcacggtccggacttcatggcggtgggggatctgtcgacgctgagcgtggtgccctggcagccggggctcgcgcgcatcgtctgcgaaggccatgtcgacggaaaagcctgggactacgacagccgggtgacgctgaggaagcaggtggcgcggctggcggagcgcgggtggacgctgttcaccggcctggagccggagttctcgctactgcgccgcggtgaagacggcagcctgctgccggccgaccccagcgacacgctggacaagccctgctacgactacaagagcctgtcgcgcacgcgggaattcctcgagcgcctgtccaacgacatgcgcgccagcggcatcgacgtctatcagatcgaccacgaggacgcgaacggccagttcgagctgaacttcacctacgccgactgcctgacctcggccgaccatttcgtgttcttcaagatggcggcgagcgagatcgccaacgagctgggctacatctgctccttcatgcccaagcccttcgccaaccggcccggcaacggcatgcacatgcacgtctcgatcggcgacggccagcgcaacctgttcgaggacaagtccgatccgcgcgggctgaacctgtcgcagctcgcctaccacttcctcggcggcctgctcgcccacgcaccggcgctgaccgcgctatgcgcgccctcggtcaattcctacaagcggctggtggtggggcgttcgctgaccggcgccacctgggcgccggcctatgtcagctatggcgacaacaaccgctccagcatgatccgcgtgcccaagggccggctggagctgcgcctgcccgatggctccgccaacccctatctcgccaccgccgcggtgatcgccgccggcctggacggcatcgagcgccgcctcgatccgggcgatccgcacaacgtcaacctgtacgagtggagcccccagcagctcgccgacgcgggcatcggcctgctgccgcagagcctgatcctggccctcgacagcctggaagcggacagcgtgatctgcgacgcgctcggcccggtggccaaggagttcctcaagctcaagcgcatggagtgggtggaataccagcgccacgtctcggaatgggaaatcaagcagtacctggagttttactga

SEQ ID NO: 32212 - protein, 465 aa, Azoarcus sp. BH72
MKPDLTSQLVQSPPGDLVAPPRFTSVEQAQEYLRARGVSYVLAQFVDIHGVAKAKSVPVSHLPSVVSSGAGFAGFAIWGVGIEPHGPDFMAVGDLSTLSVVPWQPGLARIVCEGHVDGKAWDYDSRVTLRKQVARLAERGWTLFTGLEPEFSLLRRGEDGSLLPADPSDTLDKPCYDYKSLSRTREFLERLSNDMRASGIDVYQIDHEDANGQFELNFTYADCLTSADHFVFFKMAASEIANELGYICSFMPKPFANRPGNGMHMHVSIGDGQRNLFEDKSDPRGLNLSQLAYHFLGGLLAHAPALTALCAPSVNSYKRLVVGRSLTGATWAPAYVSYGDNNRSSMIRVPKGRLELRLPDGSANPYLATAAVIAAGLDGIERRLDPGDPHNVNLYEWSPQQLADAGIGLLPQSLILALDSLEADSVICDALGPVAKEFLKLKRMEWVEYQRHVSEWEIKQYLEFY

SEQ ID NO: 32213 - DNA, 1491 bp, Nostoc punctiforme PCC 73102
  CDS (1)..(1491): transl_table=11
atgaaaagacctggatttattgagcgtcatcacctgtggacagaaatccaaaaagaagcatctgaaaaaattaagactattgttaaagaacaggatttattgttgattcgtaccgcttggtcagaccagcatggcattgttcgcagtaagtcactcttaccccaagcttttttcagcgccctggaaaacggtatgcaaatcagcacagggacattcctgttagatactggtggtgcaatagtatttaacccatttgttcccggtggtagtttagatatgcctttgatgacaggtgcgccaaatcttgtggctgttcctgatcctgatacattcaaaattgtgccttgggcaaaacgtactggctttattctctgtgatgagtactttcagaatggtcagccaatgcccttttctagtcgcggtattttgcgccaatcattgatagatttacatcaaagaggattggagcatattgtcggcttagaagttgagtggtatctagcaaagttggaagatccgatgttagcgatcgctaatgttggtagttctggaaaacccggtgaacctgctaaagttagcgctgtagaccatagcttccaataccttttagaatcacacaatccagagattcaagatttgctgggccttctggcagagaatttagttgaaatgaaattgcctttaaggagtgtagaaaacgaagggggtgttggtcaatttgaatttacttttgacccgattcctgcattgcaagctgccgatacaatgatgatatttcgaatggcaaccaagcaaatctgtcgtcaacaaggttacatcgcatcatttatgtgtcgtccaggattgcaaggttcttcttctaatggctggcatttgcaccaatcccttgtagaccttaccacaggcgagaacgcttttatgtctgcaaactcccaaaccctcacgtcagatttagctaaacacttcgttggtggtcttcttaaacacgccaatgctgcttctgtattcacaaccccaacaattaacggctacaaaagatttagaccttattccctagcccctgaccgtgcggggtggggattggaaaaccgaggggcaatgattagattacaaggcggttttgatgaccccagtacccacattgaaaaccgagttggagaaccagcagccaatccctatctctatatggcatcgcaattgatttctggtttagatggtgtagattgtaaacttgatcctggctctccaacagaggaaccttatactacagaaaatccgatcttacccaaaagtttgtcagaggcgatttcatatttgagccaaagcgaactttttcctcaaaaaatggggcagcagttcataaacttcatcattaagatgaaagagagtgaaattaatcgctttttgcagtccgtcgccgatcagccaccagaagagtatttaaagcaggtgactaattgggagcaaagagaatattttgaattgttttaa

SEQ ID NO: 32214 - protein, 496 aa, Nostoc punctiforme PCC 73102
MKRPGFIERHHLWTEIQKEASEKIKTIVKEQDLLLIRTAWSDQHGIVRSKSLLPQAFFSALENGMQISTGTFLLDTGGAIVFNPFVPGGSLDMPLMTGAPNLVAVPDPDTFKIVPWAKRTGFILCDEYFQNGQPMPFSSRGILRQSLIDLHQRGLEHIVGLEVEWYLAKLEDPMLAIANVGSSGKPGEPAKVSAVDHSFQYLLESHNPEIQDLLGLLAENLVEMKLPLRSVENEGGVGQFEFTFDPIPALQAADTMMIFRMATKQICRQQGYIASFMCRPGLQGSSSNGWHLHQSLVDLTTGENAFMSANSQTLTSDLAKHFVGGLLKHANAASVFTTPTINGYKRFRPYSLAPDRAGWGLENRGAMIRLQGGFDDPSTHIENRVGEPAANPYLYMASQLISGLDGVDCKLDPGSPTEEPYTTENPILPKSLSEAISYLSQSELFPQKMGQQFINFIIKMKESEINRFLQSVADQPPEEYLKQVTNWEQREYFELF

SEQ ID NO: 32215 - DNA, 1347 bp, Streptococcus suis 89/1591
  CDS (1)..(1347): transl_table=11
atggttgtcacaacagcggatattaaacgtgatattaaagagaaaaatgttacatttctacgtctcatgttcactgatattatgggagtgatgaaaaacgtagagattcctgcgacagaagagcaggttgaaaaagttttatcaaataaagttatgtttgatggttcgtctattgaaggttttgtacgtattaatgaatctgatatgtacctttatccagatttaaacacatggactatttttccttggggagatgaaaatggccgtgtggcaggcttgatttgtgatatttatacgactgaaggtgaaccgtttgcgggagatcctcgtggaaacttgaaaaaatctcttcgtcggatggaaaaagaaggattctcatcctttaaccttggtccagaaccagaattcttcttgttcaaaatggatgagcaggggaatccaactcttgaagtgaatgacaagggtggttactttgacttggcgcctacagatcttgcggacaatactcgtcgtgaaattgtaaatgttttgactgaaatgggatttgaagttgaagcgagccaccacgaagtagcggttggtcagcatgaaatcgactttaaatatgcggatgttttgaaggcgtgtgataatatccaaatctttaagttggttgttaagacgattgcacgaaaacatggcttgtacgctacatttatggctaaacctaaatttggaattgctggttcaggtatgcactgtaacatgtcactctttgataaagacggtaataatgccttctttgatccagaagatcctcgtggcatgcaattgtcagagacagcttatcacttcctcggtggtttgattaaacatgcttataactacactgcaattaccaaccctacagtaaactcatacaaacgtttggtacctggttttgaagctcctgtttatattgcttgggcaggcaaaaaccgttctccattggttcgtgtacctgcatcacgtggaatgggaactcgcttagaattgcgttctgtagatccaacggctaacccatatttggctatggcagttcttttggaagttggattagatggtatcgaacacaagattgaggctcctgctccagtagaatcaaatatttatgcaatgtcagatgaagaacgtcgcgaagctggtattacagatcttccatcaactcttcacaatgcgcttaaagccttgagaaaagatgatgttgttcgttcggcattgggtgatcatatctatactaacttcttggaagctaagaaaatcgaatgggcaagctatgcaacctacgtttctcaatgggaaattgacaactatttggatatgtattaa

SEQ ID NO: 32216 - protein, 448 aa, Streptococcus suis 89/1591
MVVTTADIKRDIKEKNVTFLRLMFTDIMGVMKNVEIPATEEQVEKVLSNKVMFDGSSIEGFVRINESDMYLYPDLNTWTIFPWGDENGRVAGLICDIYTTEGEPFAGDPRGNLKKSLRRMEKEGFSSFNLGPEPEFFLFKMDEQGNPTLEVNDKGGYFDLAPTDLADNTRREIVNVLTEMGFEVEASHHEVAVGQHEIDFKYADVLKACDNIQIFKLVVKTIARKHGLYATFMAKPKFGIAGSGMHCNMSLFDKDGNNAFFDPEDPRGMQLSETAYHFLGGLIKHAYNYTAITNPTVNSYKRLVPGFEAPVYIAWAGKNRSPLVRVPASRGMGTRLELRSVDPTANPYLAMAVLLEVGLDGIEHKIEAPAPVESNIYAMSDEERREAGITDLPSTLHNALKALRKDDVVRSALGDHIYTNFLEAKKIEWASYATYVSQWEIDNYLDMY

SEQ ID NO: 32217 - DNA, 1359 bp, Sulfitobacter sp. EE-36
  CDS (1)..(1359): transl_table=11
atgtccgactggcttgaagagcttccccccgcagcacgcgaatatctggagggcaagcggctcgacgaagttgaatgtatcatccccgacctccccggcattgctcgcggcaaagcggtgcccgccacaaaattcgcacggcaggaatattttcacctgcccgacagcatcttctaccagaccatcaccggtgaatggggcgacgccgccggtgccgatgggttcatcgaaaaagacatgatcctgcgccccgatatctcgaccgcgaccgccgccccctggaccggcgactggacactgcaagtgatccacgacgcctttgaccgcgacggcaatccggtggaatattcgccgcgcaatgtcctgaaacgcgttgtcgatctttatcgcgcgcaagggtgggagccggttgtcgcccccgagatggaattctttctggtcgcgcgcaaccttgaccccgcgcatgagatcaaaccgatgatgggccgctccggccgccctgctgccgcgcgtcaggcctattccatgaccgccgtcgatgaattcggccccgtgatcgacgacatctacgactttgccgaggcacagggattcgagattgacggtatcacccaggaaggcggcgcgggccagcttgagatcaacctgatccacggtgacccggtgcggctggccgacgaggtgttctatttcaaacgtctgatccgcgaagccgccctgcgccacgattgctacgccaccttcatggcgaaacccatcgccaacgaacccggcagcgccatgcatatccaccattcggtgctggatgccacgacgggcaagaacatcttctctggcccgcaagggggcgagacggacgcgttttaccactttatcgccggcatgcagaaccacatgcccgacgcgctggccgtcattgcgccctatgtgaacagctaccggcgctacgtcaaagaccatgccgcgccgatcaatctggaatggggccgcgacaaccgcaccaccggcatccgcgtgcccctctccggccccgcgtcgcgccgggtcgagaaccgcctcgccgggatggactgcaacccctacctcggcatcgccgcctcgctcgcctgcggctatctgggcctgattgaacagaaaaagcccaaagccgaattcaagggcgacgcctatgacggcgacggggatatcccgcaggtgctgggatccgcgctggatctgtttgaagaggccacgaccctgcacgaggtgttgggccccgagttcgcccgcgtctacgccatcgtcaaacgcgcggaatacgaagagttcctgcatgtgatttccccctgggaacgcgagcacctgttgatgaacgtctag

SEQ ID NO: 32218 - protein, 452 aa, Sulfitobacter sp. EE-36
MSDWLEELPPAAREYLEGKRLDEVECIIPDLPGIARGKAVPATKFARQEYFHLPDSIFYQTITGEWGDAAGADGFIEKDMILRPDISTATAAPWTGDWTLQVIHDAFDRDGNPVEYSPRNVLKRVVDLYRAQGWEPVVAPEMEFFLVARNLDPAHEIKPMMGRSGRPAAARQAYSMTAVDEFGPVIDDIYDFAEAQGFEIDGITQEGGAGQLEINLIHGDPVRLADEVFYFKRLIREAALRHDCYATFMAKPIANEPGSAMHIHHSVLDATTGKNIFSGPQGGETDAFYHFIAGMQNHMPDALAVIAPYVNSYRRYVKDHAAPINLEWGRDNRTTGIRVPLSGPASRRVENRLAGMDCNPYLGIAASLACGYLGLIEQKKPKAEFKGDAYDGDGDIPQVLGSALDLFEEATTLHEVLGPEFARVYAIVKRAEYEEFLHVISPWEREHLLMNV

SEQ ID NO: 32219 - DNA, 1359 bp, Roseovarius nubinhibens ISM
  CDS (1)..(1359): transl_table=11
atggcccaatggaccgactccctgcccgaagccgcgaatgcctatctcgaaggccgccggcttgacgaagtcgaatgtatcgtctccgacctgcccggcattgcccgcggcaaggcggtgcccgcatcgaaattcgcccgtcaggattactttcacctgccggattcgatcttttaccaaaccatcaccgggggctgggccgaggccgccggcgacgaaggctttatcgagcgcgacatgctcttgcgcccggatatgagcaccgccaccgccgcgccctggacggcggactggacgctgcaagtgatccatgacgcctttgacaagaccggcgcaccgatcccctattcgccgcgcaacgtgctcaaacgggtggtgcagctctatcgcgatcagggtctcgaacccgttgtcgccccggagatggaatttttcatcgtcgcgcgcaacatcgacccggcacaggaaattcagccgatgatgggccgctccggccgtcccgccgccgcgcgccaatcctattcgatgaccgccgtcgacgaattcggccccgtcatcgacgacatctatgatttcgccgaggcgcaaggctttgaaatcgacggcatcacccaagagggcggcgcaggccagctcgagatcaatctcaaccacggcgatcccgtggcgctggccgatgaggtcttttacttcaagcggctgatccgcgaggcggcgctgcgccacggcagtttcgcgaccttcatggccaaacccatcgccgacgagccgggcagcgccatgcatatccaccaatccgtcctcgatctgaaaaccggcgagaacatcttttccacccccgagggcgaagaaaccgatgccttccgccatttcctcggcggcatgcagaaacacctgcccgcggccatcgcggtgctcgccccttacgtcaattcctaccgccgctacgtcaaggatcacgccgccccgatcaacctcgcctgggcgcgcgacaaccgcaccacggggctgcgcatcccgatctcgggccccaaggcacggcgcatcgaaaaccgcctcgccgggatggattgcaacccctatctcggcatcgcggccagcctcgcctgcggccttctcggcatgatgaacaaggtcgagcccgccgccgaattccatggcgacgcctatgagggcgacgaggacatcccgcgcgtgcaaggcgaggcgctcgatctcttcgaggaggccaccgatctgcacgaggtgctgggccgcgagtttgcccgcgtctatgccatcgtgaaacgcgccgaatatgacgagttcctgcaggtcatctcgccttgggaacgggaacatctgctgctcaacgtctag

SEQ ID NO: 32220 - protein, 452 aa, Roseovarius nubinhibens ISM
MAQWTDSLPEAANAYLEGRRLDEVECIVSDLPGIARGKAVPASKFARQDYFHLPDSIFYQTITGGWAEAAGDEGFIERDMLLRPDMSTATAAPWTADWTLQVIHDAFDKTGAPIPYSPRNVLKRVVQLYRDQGLEPVVAPEMEFFIVARNIDPAQEIQPMMGRSGRPAAARQSYSMTAVDEFGPVIDDIYDFAEAQGFEIDGITQEGGAGQLEINLNHGDPVALADEVFYFKRLIREAALRHGSFATFMAKPIADEPGSAMHIHQSVLDLKTGENIFSTPEGEETDAFRHFLGGMQKHLPAAIAVLAPYVNSYRRYVKDHAAPINLAWARDNRTTGLRIPISGPKARRIENRLAGMDCNPYLGIAASLACGLLGMMNKVEPAAEFHGDAYEGDEDIPRVQGEALDLFEEATDLHEVLGREFARVYAIVKRAEYDEFLQVISPWEREHLLLNV

SEQ ID NO: 32221 - DNA, 1362 bp, Oceanicola batsensis HTCC2597
  CDS (1)..(1362): transl_table=11
atgagcgacgactggaccacgcagatcccggcggccgcgcaggcctatctggaaaaccgccgcctcgacgaggtggagtgcatcatctcggacctgccgggcatcgcccgcgggaaggccgtgccggcttccaagttcgcgcgccagcagttcttccatctgcccaattcgatcttcttccagaccatcaccggcgactggggcgaagccgccggcgacgagggcttcatcgagcccgacatgaccctgcgccccgatctctccaccaccagcgccgcgccctggaccggcgactggacgctgcaggtgatccacgacgcctacgaccgcaagggtaatccgatcccgttctcgccccgcaacgtgctgaaacgggtggtcagcctctacgaggcgcagggctggaaaccggtggtcgcgcccgagatggaattctatctcatcgcgcgcaatctcgacccggccaagccgatcctgccgatgaccggccgctcggggcggcccgccgccgcgcgccaggcctattccatgaccgccgtggacgaattcggcccggtgatcgacgacatctacgactttgccgaggcgcaggggttcgagatcgacggcatcacccaggagggcggggccggccagctcgagatcaacctgcgccacggcaacccggtcaagctggcggacgaagtcttctatttcaagcgtctgatccgcgaggccgcgctgcgccacgactgcttcgccaccttcatggccaagccgatcggggacgagcccggcagcgccatgcatatccaccactcgatcctcgatctcgagaccgggcggaacatcttcaccggcccccagggcggcgagacggacgccttctacagcttcatcggcgggctgcagcaccacctgccgcaggtgatcccgctgctggcaccctacgtcaacagctaccgccgctacgtcaaggatcacgccgcgccgatcaacctcgaatggggtcgcgacaaccggaccacgggcatccgggtgccgatctccgaccccgccgcgcgccgggtcgagaaccgggtggcggggatggactgcaacccctatctcggaatcgccgcctcgctcgcggcgggctatctcggcctgatgcgcgaggaacgggccgaaaagcagttccgcggcgacgcctacgaaggcgaaggcgactttccccgcaccctgggcgaggccctgaacgaaatggaagaggcgaccggcatcgccgaagtcctgggcgaggaattcctgcgcgtctactccatcgtgaaacgcacggaatacgaggaattcctcggcgtcatcagcccatgggagcgggaacacctcctgctcaacgtctga

SEQ ID NO: 32222 - protein, 453 aa, Oceanicola batsensis HTCC2597
MSDDWTTQIPAAAQAYLENRRLDEVECIISDLPGIARGKAVPASKFARQQFFHLPNSIFFQTITGDWGEAAGDEGFIEPDMTLRPDLSTTSAAPWTGDWTLQVIHDAYDRKGNPIPFSPRNVLKRVVSLYEAQGWKPVVAPEMEFYLIARNLDPAKPILPMTGRSGRPAAARQAYSMTAVDEFGPVIDDIYDFAEAQGFEIDGITQEGGAGQLEINLRHGNPVKLADEVFYFKRLIREAALRHDCFATFMAKPIGDEPGSAMHIHHSILDLETGRNIFTGPQGGETDAFYSFIGGLQHHLPQVIPLLAPYVNSYRRYVKDHAAPINLEWGRDNRTTGIRVPISDPAARRVENRVAGMDCNPYLGIAASLAAGYLGLMREERAEKQFRGDAYEGEGDFPRTLGEALNEMEEATGIAEVLGEEFLRVYSIVKRTEYEEFLGVISPWEREHLLLNV

SEQ ID NO: 32223 - DNA, 1347 bp, Oceanospirillum sp. MED92
  CDS (1)..(1347): transl_table=11
atggaagccgttaccaggtttctcgaagagaacgcgattaccgaagtagaatccaccctaccggacatgacaggtaatgcccgcggtaagttctacccaacccagaaattcctcgctgaaaaaggcggccgtatcccggaaaccctgctggtacagaccgtcaccggagactgggcagacaaccattacgacatcgtcgatgccagtgaccgtgatatggtcctgaagcccgacccgaatacactgcgcctggtgccctgggctaacgaacccaccgcacaggtaatcaacgactgctacaccgttgatggggaacttcacccgctctcttgccgttcggtactgcgcaaagtactggcgctttatgagaaggaaggcctgaaaccggtgatcgcaccggaagtcgagttctacctgatccagaaaaacaccgatccggactatgagctaaagccggcaattggtcgctccgggcgtcgtgaaaccgcccgccagtcttacagtattgatgcggtaaacgagttcgatccaattatcgacacgttatatgactactgcgaagcgcagggactggacgtagataccctgatccatgaaactggtgcggcacagatggagatcaacttcctccacggcgacccgctggatctggccgatcaggtattcacctttaaacgcaccctgcgtgaaaccggcatgaagcacggtgtctatgccacctttatggctaagccgatgcaggttgagccgggtagctccatgcatattcaccagagcctggtggatatcgaaaccggcgaaaacatctttgccggtaaagagggcgagcgtttctctgaacagttctaccactacctgggcggcttgcagaagtttacgccgaacgcgatcagcttctttgcgccgaatgttaactcctaccgtcgtttcacgccggagatgtccgcaccggtgaacatgaaatggggtatcgataaccgcaccaccgggcttcgtgcaccggaagcagtaccagcagccacccgtatcgagaaccgcttcccgggtgctgactgcaacccttatctggccattgcggccaccctcgcctgcggctacctgggcctgaagaacaagcttcagccaaccaagcctacaaccgatgcggcagcggaagaaggcgatgcagtggaactggcccgcaccctggaagaggcacttcgcctgctggaagagtgcccggaactgcgtgaaatcatggggtctgaatttgttgaagcctatatcggcgtgaaacgtgccgagtttgaaaccttccacaaagtgatcagctcctgggaacgtgagtacctgcttctgaacgtttaa

SEQ ID NO: 32224 - protein, 448 aa, Oceanospirillum sp. MED92
MEAVTRFLEENAITEVESTLPDMTGNARGKFYPTQKFLAEKGGRIPETLLVQTVTGDWADNHYDIVDASDRDMVLKPDPNTLRLVPWANEPTAQVINDCYTVDGELHPLSCRSVLRKVLALYEKEGLKPVIAPEVEFYLIQKNTDPDYELKPAIGRSGRRETARQSYSIDAVNEFDPIIDTLYDYCEAQGLDVDTLIHETGAAQMEINFLHGDPLDLADQVFTFKRTLRETGMKHGVYATFMAKPMQVEPGSSMHIHQSLVDIETGENIFAGKEGERFSEQFYHYLGGLQKFTPNAISFFAPNVNSYRRFTPEMSAPVNMKWGIDNRTTGLRAPEAVPAATRIENRFPGADCNPYLAIAATLACGYLGLKNKLQPTKPTTDAAAEEGDAVELARTLEEALRLLEECPELREIMGSEFVEAYIGVKRAEFETFHKVISSWEREYLLLNV

SEQ ID NO: 32225 - DNA, 1353 bp, Oceanobacter sp. RED65
  CDS (1)..(1353): transl_table=11
atggaaaaaataaccaagtggttaaaagataaaaagatcactgaagttgaatgcataatgtcagaccaaactggcattgcccgcggcaaaataatgccaactaataaatttatacaggaggctggcattcgccttcctgaaagtgttttattgcaaacggctactggcgactatcccgacgacgatatctactacaagttacttgacccgaaagatatcgatatgattttaaagcctgatgaagatgcgatttttactgttccttgggcaatagagccatccgcacaagccatacatgattgttacgattctatgagcaacctcatcgatctagcaccgcgtactattttgaaacgtgtattagagctatataaaaagaaaggcttacaaccgatcgtcgctccagaagtagagttctatttaacgaaacgctgtacggatccagatcttcctcttgaaccaccaatcggtcggtctggacgacaagaaagtggtcgccaatcctttagcattgatgctgcaaacgaattcgatcctatcatcgaagatatttacgattggtgtgaagacatggggctggacattgacacagtaatccatgaagaaggtatggcccagttagagtttaacttccgtcacggtgatccattgaaactagcggatcaagtttttatttttaaacgcacggtacgcgaggcggcattgaaacataacatcagtgcaacctttatggctaaacccatttctggtgaacccggtagctctatgcatatacaccaatctattttggacgcaaaaacgggtaagaatattttctctaaaaaagatggtactgccagcgatgaattccatcactacattggcggtatgcaaacgtttatccctcagctaatgcctatattcgcgcctaatgtgaacagctatcgtcgctatcagtcttgcggtgaaggcaatgcaccaatgaatatcgaatggggtgaagagaatagaaccgttggtttacgtgtgccaaaggcaccaccagctgcccgtcgtgtcgagaaccgtttacctgggtccgataccaatccgtatttggcaatggccggcaatcttgtatgtggtttattgggcatggaaaaacaaatcaagcctcgcaaacctattagcggtcgtgccgaagaggaattagatgaggcactacacacgaacatcgaatcggctcttgaagcaatggacgaatcacaagaaattcgtgccatttttggtgataactttgtggatggatacatagctacaagagaagccgaatatgaaggttttaaacgagtgatcagctcatgggaacgagaattcctgctgagcacggtttaa

SEQ ID NO: 32226 - protein, 450 aa, Oceanobacter sp. RED65
MEKITKWLKDKKITEVECIMSDQTGIARGKIMPTNKFIQEAGIRLPESVLLQTATGDYPDDDIYYKLLDPKDIDMILKPDEDAIFTVPWAIEPSAQAIHDCYDSMSNLIDLAPRTILKRVLELYKKKGLQPIVAPEVEFYLTKRCTDPDLPLEPPIGRSGRQESGRQSFSIDAANEFDPIIEDIYDWCEDMGLDIDTVIHEEGMAQLEFNFRHGDPLKLADQVFIFKRTVREAALKHNISATFMAKPISGEPGSSMHIHQSILDAKTGKNIFSKKDGTASDEFHHYIGGMQTFIPQLMPIFAPNVNSYRRYQSCGEGNAPMNIEWGEENRTVGLRVPKAPPAARRVENRLPGSDTNPYLAMAGNLVCGLLGMEKQIKPRKPISGRAEEELDEALHTNIESALEAMDESQEIRAIFGDNFVDGYIATREAEYEGFKRVISSWEREFLLSTV

SEQ ID NO: 32227 - DNA, 1386 bp, marine gamma proteobacterium HTCC2143
  CDS (1)..(1386): transl_table=11
atgaaagttatgaatgccagagacgtaaagacggtcgctgatgcgcggcagcttgttgagcaacgaggtttacagcatatcaaagttggcctatttgatgttgacggtattttacgaggtaagtatatgagcaaagagaagttcttctctgcgcttgaagggggctttgctttctgtgatgtggtgctgggctgggattctaatgatcaactttaccagacgccggatgtaaaaattacgggttggcatactggataccccgatgcgcccgtgcggatagtccctgaaagctgcagagagcttcctatggaaaatgacggcttgttatttttatgcgactttgagggagaagcagcgaatatttgcccccgttcaacacttgaaaaagtggttaaaaaggccgaaaacatgggctatgacgcccttgccggatttgaatacgaattctttttgtttgacgagacgcctgacacagtccgagaaaaaggctttcgcaatctgaaacccattagccctgggtttttcggctattcggtactgcgtaactcggtgcattcagaaatatatcaggagctactatctctagctcaagagatggattttccgatagagagtttgcatacggaaacaggtcccggcgttttagaggctgcaataaccgttgactcagcgcgcgcagcagccgataaggcggccctatttaaaacctttgttaaggtgtgggctcagcggcgcaagatgatggcaacgtttatggctaaatggtcgaatgattatcctgggcaatcaggtcacattcatctgtctctgcgccgaagggatggttccggttcggctttttatgacccgtcccagcctatgaacatgagtgctactcagcgccattttatcgcgggtcagcagcgtctaatgccggagttattagcaatgtatgcgcaaactgtaaattcctattcacgcatggtaccgggcttttgggcaccaacagacgcgacttgggggtgtgaaaatcgtacaaccgcattgcgagttattcctggtagtgataagtctcaacgcacagaatttcgtctgggttcggccgacgctaatccctatattgcgctagcggcggccctcgggtcagggctgtatgggatagagcacaaaatggaaccgactgagatggtgcgtggcaatgcctatgaacaaaaacacccggtggaattggctcttggcagagatatttatacagcggcagcggcgttaagtgctagcgcggcagcgcgtgaactgtttggcgacgcctttgtggagcattatgcggcgacaagagaatgggaggggaaggagttctctcgtcatgtaacggactgggagatggcccgttattttgagattatttga

SEQ ID NO: 32228 - protein, 461 aa, marine gamma proteobacterium HTCC2143
MKVMNARDVKTVADARQLVEQRGLQHIKVGLFDVDGILRGKYMSKEKFFSALEGGFAFCDVVLGWDSNDQLYQTPDVKITGWHTGYPDAPVRIVPESCRELPMENDGLLFLCDFEGEAANICPRSTLEKVVKKAENMGYDALAGFEYEFFLFDETPDTVREKGFRNLKPISPGFFGYSVLRNSVHSEIYQELLSLAQEMDFPIESLHTETGPGVLEAAITVDSARAAADKAALFKTFVKVWAQRRKMMATFMAKWSNDYPGQSGHIHLSLRRRDGSGSAFYDPSQPMNMSATQRHFIAGQQRLMPELLAMYAQTVNSYSRMVPGFWAPTDATWGCENRTTALRVIPGSDKSQRTEFRLGSADANPYIALAAALGSGLYGIEHKMEPTEMVRGNAYEQKHPVELALGRDIYTAAAALSASAAARELFGDAFVEHYAATREWEGKEFSRHVTDWEMARYFEII

SEQ ID NO: 32229 - DNA, 1431 bp, marine gamma proteobacterium HTCC2080
  CDS (1)..(1431): transl_table=11
atgagttccaagctctcgggtgagaccaatacagaaacccgcattcacagtcctgaaaatgccagcggatcccttctgatacctccggaggaaatggcgacaattacggcctggctcaaggagcacaaaatttcggaggttgagtgtattgttcctgacctcaccggtaacgcgcggggcaaatttataccggcgcatcagttcaccgaacaattggaacagaagctaccggaatctattttggttcagacggtcaccggcgagtacaccgatgatcattgggattttgtcgaacctaccgataccgacatgatgttgcgtcccgatgcctcgacgttacgtcgcgtgccttgggctcgtgaacccactgcacagattattgcagactgcctcaaagcagatggcactccccatccactatcctcacgaaacgtgttgcgttatgtcctagggctctatgaggaagcggggctaaagcctgttattgcccccgaagttgagttttatctggtccataaaaatacagaccctgattacgaatgtatgccgcctaaagggcgctcagggcgtcgtgaagtggcgcgcctttcttacagtattgacgccgtcgctgaatttgaagatttcgtagaggatatgtatgactacgctgatgcgcagtcgctggcagtagatacccttatccacgaaaacggcgctgcgcagatggagatcaattttcgtcatggtgatccattggccatggcggatcaggtgttcgcctttaagcggacggtgcgggaaacggccctaaaacacgacatgtacgccacgtttatggctaagcccatgcagcgtgagcccggtagtgcgctgcatatccaccagtctattttatccctcgaagatggcagtaacatttttgcgggcaaagacggcaaaccaacagctgccatgatgcattacctgggcgggttgcagcgatacaccccggagctgattagtttttacgcccccaacgtaaattcctatcgccgattggcccctgatatctcggcacctatcaatttgagttggggttttgataaccgcaccacggcttttcgagtgcctaacagtacgccggaaaacttgcgtattgaaaatcgttttcccggggtagacgccaacccttatctcgcaataacggcaacgcttgcgagtggcttgttgggaatgcgtcaaggtctacagccgactgaaccccatcagggcaccgcgaacgatgaagccgtagtggtggcgcgtactttggaggagggtgtgcgacagttaaacgatacacccgagttacagcaaatgattggcgagctgtttatgcgcgcttacgccgcagtaaagcttgacgaattcgaggaattcaaccgagtaatcagctcttgggagcgtgaacacctgttattgcaggtgtag

SEQ ID NO: 32230 - protein, 476 aa, marine gamma proteobacterium HTCC2080
MSSKLSGETNTETRIHSPENASGSLLIPPEEMATITAWLKEHKISEVECIVPDLTGNARGKFIPAHQFTEQLEQKLPESILVQTVTGEYTDDHWDFVEPTDTDMMLRPDASTLRRVPWAREPTAQIIADCLKADGTPHPLSSRNVLRYVLGLYEEAGLKPVIAPEVEFYLVHKNTDPDYECMPPKGRSGRREVARLSYSIDAVAEFEDFVEDMYDYADAQSLAVDTLIHENGAAQMEINFRHGDPLAMADQVFAFKRTVRETALKHDMYATFMAKPMQREPGSALHIHQSILSLEDGSNIFAGKDGKPTAAMMHYLGGLQRYTPELISFYAPNVNSYRRLAPDISAPINLSWGFDNRTTAFRVPNSTPENLRIENRFPGVDANPYLAITATLASGLLGMRQGLQPTEPHQGTANDEAVVVARTLEEGVRQLNDTPELQQMIGELFMRAYAAVKLDEFEEFNRVISSWEREHLLLQV

SEQ ID NO: 32231 - DNA, 1359 bp, Pseudomonas putida GB-1
  CDS (1)..(1359): transl_table=11
atgaacgcccccttcgatcagctgtccacctggctgaaagaacaccggatcaccgaagtcgaatgcgtgatcagcgacctgaccggcattgcccgcggcaagatcgcgcccaccgccaagttcctccacgagcgcggcatgcgcctgcctgaaagcgtgctgttgcagacggtcaccggcgactacgttgacgatgacatctactacaacctgctcgacgctgccgacatcgacatggtctgccgccccgacccgaccgccgtgtaccagatcccgtgggccatcgagccgaccgcgatcgtgatccacgacaccttcgacaaacaaggcaacccgatcgagctgtcgccgcgcaacgtattgaagaaggtcctcaagctctacgccgacaagggctggcagccgattgtcgcaccagagatggagttctacctgaccaagcgctgcgaagacccggatttgccactgcaggtgccactggggcgttccggtcgtgccgaaagcggccgccagtcgttctcgatcgatgccgccaacgaattcgacccgttgttcgaagacgtctacgactggtgcgagatccagggcctggacctggacacgctgatccacgaagacggcccggcgcaaatggagatcaacttccgccacggcgacgcgctggacctggcggaccagatcaccgtgttcaagcgcaccatgcgcgaggcggcactcaagcacaacgtggccgccacgttcatggccaagccgatcaccgacgaaccgggcagtgccatgcacctgcaccagagcgtggtcgacatcgccaccggcaaaccggtcttcgccaacgaagacggcagcatgagccagctgttcctgcaccacatcggtggcctgcagaagtacatccccaaactgctgccgatgttcgcgcccaacgtcaactcgttccgccgtttcctgccggacacttcggcgccggtcaacgtcgagtggggtgaagaaaaccgcaccgccggcttgcgcgtgcccacgtccagccccgaggcgatgcgcgtggaaaaccgcctgccaggcgccgatgccaacccgtacctggccatcgccgctagcctgctgtgcggctacctgggcatggtggagcggatcgacccgagcgcgccggtacagggccgcgcctatgaacggcgcaacctgcgcctgccgatcaccatcgaggacgcgctgcagcacatggaagactgcgagaccgtacagcagtacctgggcaagcagttcgtccagggctacgtggcggtcaaacgggccgagcacgaaaactacaagcgtgtgatcagctcgtgggagcgtgaattcctgatgctgagcgtctga

SEQ ID NO: 32232 - protein, 452 aa, Pseudomonas putida GB-1
MNAPFDQLSTWLKEHRITEVECVISDLTGIARGKIAPTAKFLHERGMRLPESVLLQTVTGDYVDDDIYYNLLDAADIDMVCRPDPTAVYQIPWAIEPTAIVIHDTFDKQGNPIELSPRNVLKKVLKLYADKGWQPIVAPEMEFYLTKRCEDPDLPLQVPLGRSGRAESGRQSFSIDAANEFDPLFEDVYDWCEIQGLDLDTLIHEDGPAQMEINFRHGDALDLADQITVFKRTMREAALKHNVAATFMAKPITDEPGSAMHLHQSVVDIATGKPVFANEDGSMSQLFLHHIGGLQKYIPKLLPMFAPNVNSFRRFLPDTSAPVNVEWGEENRTAGLRVPTSSPEAMRVENRLPGADANPYLAIAASLLCGYLGMVERIDPSAPVQGRAYERRNLRLPITIEDALQHMEDCETVQQYLGKQFVQGYVAVKRAEHENYKRVISSWEREFLMLSV

SEQ ID NO: 32233 - DNA, 1335 bp, Pseudomonas putida GB-1
  CDS (1)..(1335): transl_table=11
atgttgccagcagaaacccagcgcacgctcgaccaacacggcatcaagtacgtgctggcgcagttcgtcgatattcatggctcggcgaagaccaaatcggtgccggtctccggcctgaagatggtcgccgaagagggcgccggttttgccggcttcgccatctgcggcatgggcatggagccacacggaccggacttcatggcccgcggcgacctgacgaccttgattccggtgccatggcagccgggttatggccgcgtggtatgcgtgggccatgtaaacggccagccgtggccctacgacagccgtcacgtgttgcaacagcaggtgcagcgcctggccgaaaaggggtggacgctgaacaccggccttgagcccgagttcagcctgtttcgccgcgacgagggtggcaagctgcaactggtggatgcctccgacaacctcgacaagccgtgttacgactacaagggcctgtcacgctcgcggctgttcctcgagcgcctgaccgaggcgttgcaaccggtgggtttcgacatctaccagatcgaccacgaagacgccaacggccagttcgagatcaactacacctacagtgacgccatggagtcggccgaccgtttcaccttcttccgcatggccgccggcgagatcgccaacgacctggggatgatctgctcgttcatgcccaagcccgaccccaagcgcgctggcaatggcatgcactttcatctgtcgctggccagcagcaccaacaagaacctgttccacgacccgtccgacagcagcggcatgggcctgtcgaagctggcctaccactttgctgcagggctgctggcccacggcccggcgttgtgtgccttcgcggcgccaacggtcaactcctacaagcgtctggtggtggggcgctcgttgtcgggttcgacgtgggccccggccttcgtagcctggggggccaacaaccgctcggcgatggtgcgcattccttatggtcgcctggaattccgcttgccggacgccggttgcaacccgtacctggtcaccgccgcaatcattgccgccggcctcgatggcatcgaccgccagttggagccaggcgagatgtgcaatgaaaacctctacaacctgagccttgaagacattgccgcgcgcggcatcaaaaccctgccgcaatcgctgaaggaagccgttgacgcacttcaaaccgacccgctgttccgcgaggtgctgggcgccgagatcgtcgacgagttcatcaagctcaagcgcatggagtgggtggagtactgccggcacgtttccgactgggaaatccagcgctacaccgaattcttctga

SEQ ID NO: 32234 - protein, 444 aa, Pseudomonas putida GB-1
MLPAETQRTLDQHGIKYVLAQFVDIHGSAKTKSVPVSGLKMVAEEGAGFAGFAICGMGMEPHGPDFMARGDLTTLIPVPWQPGYGRVVCVGHVNGQPWPYDSRHVLQQQVQRLAEKGWTLNTGLEPEFSLFRRDEGGKLQLVDASDNLDKPCYDYKGLSRSRLFLERLTEALQPVGFDIYQIDHEDANGQFEINYTYSDAMESADRFTFFRMAAGEIANDLGMICSFMPKPDPKRAGNGMHFHLSLASSTNKNLFHDPSDSSGMGLSKLAYHFAAGLLAHGPALCAFAAPTVNSYKRLVVGRSLSGSTWAPAFVAWGANNRSAMVRIPYGRLEFRLPDAGCNPYLVTAAIIAAGLDGIDRQLEPGEMCNENLYNLSLEDIAARGIKTLPQSLKEAVDALQTDPLFREVLGAEIVDEFIKLKRMEWVEYCRHVSDWEIQRYTEFF

SEQ ID NO: 32235 - DNA, 1383 bp, Pseudomonas putida GB-1
  CDS (1)..(1383): transl_table=11
atgacgtcggtaaccccgtgcgccagttcttccagcgagatgaatgacttcctccaggcccatccggacacgcagtatgtagacctgctgatctccgacatgaatggcgtggtacgtggcaagcgcatcgagcgggccagcctgcacaaggtgtacgagaagggcatcaacctgccggcttcgctgttcgccctggacatcaacggctccacggtcgagagcaccggccttggcctggacatcggcgatgccgaccgcatctgcttcccgatccccggcacgctgtcggacgaaccctggcagaagcgccccaccgcgcagctgctgatgaccatgcacgaactggatggccagccgttcttcgccgacccgcgtgaagtgctgcgccaggtggtgagcaagttcgacgacctgggcctggatatctgcgcggcgttcgagctggagttctacctgattgaccaggacaacctcaacggtcgcccacagccgccgcgctcaccgatttccggcaagcgcccgcagtcaacccaggtgtacctgatcgacgacctcgacgaatacgccgactgcctgcaggacatgctcgaagcagccaaggaacaaggcctgcccgccgacgccatcgtcaaggaaagcgccccggcgcagttcgaggtcaacctgcaccatgtggctgatccgctgaaagcgtgcgactacgcgattctgctcaagcgcctgatcaagaacgtggcctacgaccatgaaatggacaccaccttcatggccaagccctacccaggtcaggcaggcaatggtctgcacgtgcacatttcgctgctggacaagaaaaccggcaagaacatcttcgccagtgacgacccgctgcaaagcgacacgctgcgccacgccattggcggcgtgctggaaaccatgccggcgtcgatggccttcctgtgcccgaacatcaactcctaccgccgcttcggtgcgcagttctacgtgcccaatgcgcctagctggggcctggacaaccgcaccgtggcagtacgcgtgcccaccgacagcagcgacaacgtgcgcctggagcaccgtgtggctggcgccgacgccaacccgtacctgatgctcgccgcgatccttgccggtgttcaccacggcctgaccaacaaggtcgagccccaggcgccgatcgaaggcaactcctacgaacagctggagcaaagcctgccgaacaacctgcgcgacgctctgcgcgcgctggatgacagcgaagttctcaaccaatacatcagcccggactacatcgatatcttcgtggcctgcaaggaaagcgaactggccgagttcgaagtgtcgatttccgacctcgagtacaactggtacctgcacacggtgtaa

SEQ ID NO: 32236 - protein, 460 aa, Pseudomonas putida GB-1
MTSVTPCASSSSEMNDFLQAHPDTQYVDLLISDMNGVVRGKRIERASLHKVYEKGINLPASLFALDINGSTVESTGLGLDIGDADRICFPIPGTLSDEPWQKRPTAQLLMTMHELDGQPFFADPREVLRQVVSKFDDLGLDICAAFELEFYLIDQDNLNGRPQPPRSPISGKRPQSTQVYLIDDLDEYADCLQDMLEAAKEQGLPADAIVKESAPAQFEVNLHHVADPLKACDYAILLKRLIKNVAYDHEMDTTFMAKPYPGQAGNGLHVHISLLDKKTGKNIFASDDPLQSDTLRHAIGGVLETMPASMAFLCPNINSYRRFGAQFYVPNAPSWGLDNRTVAVRVPTDSSDNVRLEHRVAGADANPYLMLAAILAGVHHGLTNKVEPQAPIEGNSYEQLEQSLPNNLRDALRALDDSEVLNQYISPDYIDIFVACKESELAEFEVSISDLEYNWYLHTV

SEQ ID NO: 32237 - DNA, 1377 bp, Pseudomonas putida GB-1
  CDS (1)..(1377): transl_table=11
atgtcggtacccccgcgtgccgttcagcttaacgaagcgaacgcgttccttaaggaacatcctgaggttctctacgttgaccttctgattgcagatatgaatggtgtggtgcgtggcaagcgcattgagcgcaccagcctccacaaggtttacgagaaaggcatcaacctgccggcctccctcttcgccctggacatcaacggttccaccgtcgaaagtaccgggctgggcctggacatcggcgatgctgaccgcatctgctatccaatccccgacacgctctgtaacgagccgtggcaaaaacgccccaccgcccagctgctgatgaccatgcacgaactggaaggcgagccattcttcgccgacccacgcgaagtgctgcgtcaggtggtgagcaagttcgatgaattgggcctgactatctgcgccgcattcgaactggagttctacctgatcgaccaggagaacgtgaacggccgcccgcagccaccacgctcgccaatttcgggtaagcgcccgcagtcgacccaggtgtacctgatcgacgacctcgacgaatatgccgactgcctgcaggacatcctcgaaggcgcgaaagagcaaggcatcccagccgacgccatcgtcaaggaaagcgccccggcgcagttcgaagtcaacctgcaccacgtggccgacccgctcaaggcctgcgactacgcggtactgctcaagcggttgatcaagaacatcgcctacgaccatgaaatggacaccaccttcatggccaagccctacccgggccaggcaggcaacggcctgcatgtacacatttccgtgctggacaaagatggcaacaacatcttcaccagcgaggatcccgagcagaacgccgcgctacgtcatgctgtcggcggtgtgctcgagaccctgcccgcgtccatggcgttcctttgcccgaacgtcaactcgtaccgccgctttggcgcacagttctacgtgccgaacgcgccaagctggggcctggacaaccgcactgtcgcactgcgcgtgccaaccggctcggcggacgctgtacgtctcgagcaccgcgtggccggtgccgacgccaacccgtacctgatgatggctgccgtgctggcaggcgtgcaccatggcctgaccaacaagatcgagccaggcgcgccgatcgaaggcaactcgtacgagcagctggagcagagcctgccgaacaacctgcgtgatgccctgcgcgagttggacgacagcgagatcctcaacaagtacatcgatcctaagtacatcgacatctttgtcgcgtgcaaggagagcgagctggaggagttcgaacactcgatctccgacctcgagtacaactggtacctgcataccgtgtaa

SEQ ID NO: 32238 - protein, 458 aa, Pseudomonas putida GB-1
MSVPPRAVQLNEANAFLKEHPEVLYVDLLIADMNGVVRGKRIERTSLHKVYEKGINLPASLFALDINGSTVESTGLGLDIGDADRICYPIPDTLCNEPWQKRPTAQLLMTMHELEGEPFFADPREVLRQVVSKFDELGLTICAAFELEFYLIDQENVNGRPQPPRSPISGKRPQSTQVYLIDDLDEYADCLQDILEGAKEQGIPADAIVKESAPAQFEVNLHHVADPLKACDYAVLLKRLIKNIAYDHEMDTTFMAKPYPGQAGNGLHVHISVLDKDGNNIFTSEDPEQNAALRHAVGGVLETLPASMAFLCPNVNSYRRFGAQFYVPNAPSWGLDNRTVALRVPTGSADAVRLEHRVAGADANPYLMMAAVLAGVHHGLTNKIEPGAPIEGNSYEQLEQSLPNNLRDALRELDDSEILNKYIDPKYIDIFVACKESELEEFEHSISDLEYNWYLHTV

SEQ ID NO: 32239 - DNA, 1359 bp, Pseudomonas putida GB-1
  CDS (1)..(1359): transl_table=11
atgagtaacaacctcgaccagctcaccgattggttgaaagagcacaagatcaccgaagtcgaatgcatgatcagtgacctgaccggcatcacgcgcggcaagatttcgcccaccaacaaattcatcgccgaaaaaggcatgcgcctgcccgagagcgtgttgctgcagacggtgaccggcgactacgtcgacgacgacatctattacgaactgctcgacccggccgacatcgacatgatctgccgccccgacgaaaacgccgtgttccttgtaccgtgggccatcgagccgaccgcccaggtcatccacgacacctacgacaaaaagggcaacccggtcgaactgtcgccgcgcaacgtgctgaagaaagtcctgcagctgtacgccgacaagggctggcagccgatcgtcgcgcccgagatggagttctacctgaccaagcgcagcgaagacccggacttcccgctgcagcccccggtaggccgctccggccgcccagagaccggccgtcagtcgttctccatcgaagccgccaacgaattcgacccgctgttcgaagacgtctacgactggtgcgaactgcagcagctggacctcgacacgctgatccacgaagacggcacggcgcagatggaaatcaacttccgtcacggcgacgccctgcacctggccgaccagattctggtgttcaagcgcaccatgcgcgaggcggcgctcaagcacaacgtggccgccaccttcatggccaagccgatgaccggcgagccgggcagtgccatgcacctgcaccagagcgtggtcgatgtggctaccggcaagaacatcttcagcaatgaagacggcagcatgagcgcgctattcctcaaccacattggtggcctgcagaagttcatccccgaggcgctgccgctgttcgcgcccaacgtcaactcgttccgccgcttcctgcccgacacctcggcgccggtgaacgtggagtggggcgaagaaaaccgcacggtcggcttgcgcgtaccggatgccggcccgcaaagccgccgggtcgagaaccgcctgccgggcgccgacgccaacccttacctggccatcgccgccagcttgctgtgtggctacatcggtatggtcgaaggcatcgaggccagcgcgccggtacagggccgtggttatgagcgccgcaacctgcgcctgccactgaccatcgaagatgccttggaacgcatggaaaacagccgtgcgctggtgcaatacctgggcaaaaaattcattaccggatatgtcgccaccaagcgcgccgagcacgaaaacttcaaacgcgtcatcagttcgtgggagcgtgagttcctgctgttcgctgtctga

SEQ ID NO: 32240 - protein, 452 aa, Pseudomonas putida GB-1
MSNNLDQLTDWLKEHKITEVECMISDLTGITRGKISPTNKFIAEKGMRLPESVLLQTVTGDYVDDDIYYELLDPADIDMICRPDENAVFLVPWAIEPTAQVIHDTYDKKGNPVELSPRNVLKKVLQLYADKGWQPIVAPEMEFYLTKRSEDPDFPLQPPVGRSGRPETGRQSFSIEAANEFDPLFEDVYDWCELQQLDLDTLIHEDGTAQMEINFRHGDALHLADQILVFKRTMREAALKHNVAATFMAKPMTGEPGSAMHLHQSVVDVATGKNIFSNEDGSMSALFLNHIGGLQKFIPEALPLFAPNVNSFRRFLPDTSAPVNVEWGEENRTVGLRVPDAGPQSRRVENRLPGADANPYLAIAASLLCGYIGMVEGIEASAPVQGRGYERRNLRLPLTIEDALERMENSRALVQYLGKKFITGYVATKRAEHENFKRVISSWEREFLLFAV

SEQ ID NO: 32241 - DNA, 1323 bp, Pseudomonas putida GB-1
  CDS (1)..(1323): transl_table=11
atgagcatcgctcagctccagggcatcgatgaaatcgaatgcgtcacccccgacctcaacggcgtcccacgcggcaaggtgatgaccgccgaaggctttcttgaaggccgccgcctgcagatggcccgtggggtgctgctgcaatgcatcatgggcggctacccgccggcgaaattctacggcagtgacgacggcgacctggcgttggtagccgaacccagccaggttcatcgcttgccctggagcgatgacggtcgcgccctggccatctgcgatgccaatgaactggatggccggccctcggcactgtccacccggggccagcttaaggccgtgatcgcccgctacgcagcgttgggtctggcaccggtagtggcgaccgagcttgagttcttcgtgtttgcccccaacagtgacccgcagcagccgttccagccaccgctgggcaccgacggccgccgcgagctgggccattcagcgttcagtgtcagctccaacaacggcctgcgcccgttcttcaaagaggtgtaccagtgcatggccgcgctcggcctgccgcgcgacaccttcatgcacgaaatgggcgtcagccagttcgagatcaacttgctgcatggcgacccgctgctgctggccgaccagacgttcctgttcaagcacctgctcaaggaagtggcgctcaagcatgggctgaccgtggtgtgcatggccaagccgttggcgcgtacgcctggcagttccatgcatatccaccagagcctggtcgaggccagcagcgggcgtaatgtgttcagcgacgagcagggcctgccgaccgataccttctaccacttcatcggcggtttgcaggcgtgcatggccgatttcaccgcgctgttcgctcccaacgtcaattcctatcagcgcctgtgccacccctatgcctcgccgaacaatgcctgctggtccgaggacaaccgtgccgccggtttgcgtattccggccagtgcgccggccgcgcgacgggtcgaaaaccgtttacccggtgccgacgccaacccctacctggccatcgccgccagcctggccgccgggctgcacggcatcgagcagcgcctgcagccgtcgcccgccatccagggcgagttcgaagtgcccgagcacctgagcctgccgtgtaccctgcatgcagcccttgaaaggctcaagcgcagcacactggcacgggaactgttcggcagcgagttcatcgaaggctacatcgccagcaagaccctggaactgaccgatttctacgatgagatcaccccgtgggagcgccgggtgctggcggcacaggcctga

SEQ ID NO: 32242 - protein, 440 aa, Pseudomonas putida GB-1
MSIAQLQGIDEIECVTPDLNGVPRGKVMTAEGFLEGRRLQMARGVLLQCIMGGYPPAKFYGSDDGDLALVAEPSQVHRLPWSDDGRALAICDANELDGRPSALSTRGQLKAVIARYAALGLAPVVATELEFFVFAPNSDPQQPFQPPLGTDGRRELGHSAFSVSSNNGLRPFFKEVYQCMAALGLPRDTFMHEMGVSQFEINLLHGDPLLLADQTFLFKHLLKEVALKHGLTVVCMAKPLARTPGSSMHIHQSLVEASSGRNVFSDEQGLPTDTFYHFIGGLQACMADFTALFAPNVNSYQRLCHPYASPNNACWSEDNRAAGLRIPASAPAARRVENRLPGADANPYLAIAASLAAGLHGIEQRLQPSPAIQGEFEVPEHLSLPCTLHAALERLKRSTLARELFGSEFIEGYIASKTLELTDFYDEITPWERRVLAAQA

SEQ ID NO: 32243 - DNA, 1365 bp, Pseudomonas putida GB-1
  CDS (1)..(1365): transl_table=11
atgcactttgcacccgtagagcaggctacccgtttcctggccgacaaccccgatatcgagctgttcgagctgttcatcctcgacgccaacggcgtaccacgcggcaagctgctgcaccgcgacgaactgctggccgtgtaccagaccggccggccactgcccagcaccatcctcggcctgaccctgaacggcgacgacgtggaaaactcaggccttgtgtgggacgtcggcgatatcgactgccgcgcctacccgcttgacggcagcctggtgcgcctgccctggcgccgggtgcctaccgccgccgtgcaggtgagcatgcacccgagcgagggcctgccggcgagcatcgccgacccacgccatgtgctgctgcgcaccatcgaagcattgaaggccgacggctatcacccggtgatggcctgcgaactggagttctacctgctcgaccagcagcgtgatgcccagggccgcccgcaaccggcgctggacaacgatggcggtcgccctcgcagcactcaggtctatggcttgcgcgaactggagcagatcgagccgtttctcgccgacctgtacgccgcctgcaaggcccagggcatccctgcgcgcacggccatctccgagtacgcccccggccaggtggaaatcaccctcgagcacggcgatgcactgcaggcgatggaccaggcggtgcgctacaagcgcctggtgaaaggtgtggcccatgcccacggcatgcaggcttgtttcatggccaagccattcgcgcaactggccggcaccggcatgcacatgcacctgagcctggccgacagcgcgggcaacaacctgttcgccagcgaagacaaagccggcaccccgttgctgcgccaggcggtggctggcatgctgcgccacctgcgcgactcgctgctgctgttctgccccaacgccaactcgttccgccgcttccaggccaacagctatgcgcccctggcgccgacctggggcgtggacaaccgcaccgtgagcctgcgcgtgccaggcggcccggccaacagccgacatgtggaacaccgcatctgcggcgccgatgccaacccttacctggctgcagccgcgatccttgcagccagccaccgaggcatccgcgaacagctggaccctggcgcaccggtcgaaggcaacggctatgcccaggccaccgaacacctgcccaccgactggctgaccgccctcgacgccctgcaaaactcccattgggcccgtgaagcattgggcgcagacttccttggcgtgtacctgaaggtcaagcgcgccgagtaccgccagttcatggccgaagtcagcgaacaggactggcgctggtacctgcaccaggcctga

SEQ ID NO: 32244 - protein, 454 aa, Pseudomonas putida GB-1
MHFAPVEQATRFLADNPDIELFELFILDANGVPRGKLLHRDELLAVYQTGRPLPSTILGLTLNGDDVENSGLVWDVGDIDCRAYPLDGSLVRLPWRRVPTAAVQVSMHPSEGLPASIADPRHVLLRTIEALKADGYHPVMACELEFYLLDQQRDAQGRPQPALDNDGGRPRSTQVYGLRELEQIEPFLADLYAACKAQGIPARTAISEYAPGQVEITLEHGDALQAMDQAVRYKRLVKGVAHAHGMQACFMAKPFAQLAGTGMHMHLSLADSAGNNLFASEDKAGTPLLRQAVAGMLRHLRDSLLLFCPNANSFRRFQANSYAPLAPTWGVDNRTVSLRVPGGPANSRHVEHRICGADANPYLAAAAILAASHRGIREQLDPGAPVEGNGYAQATEHLPTDWLTALDALQNSHWAREALGADFLGVYLKVKRAEYRQFMAEVSEQDWRWYLHQA

SEQ ID NO: 32245 - DNA, 1347 bp, Pseudomonas putida GB-1
  CDS (1)..(1347): transl_table=11
atgagtgtcatctttccggatctgctggctgaagtgcgctcgttccgagcagaacacccggcattacgctatgtcgacttgattgcactggatatccccgggcatttctatggcaagcgctaccccatcgacatgctggagaaagtcgcagccggtgcgcctttgaagctgccgcagaactgcgtgctgctgggcacccagggtgggctctacccgattggtgactactgcttcgccgacggcgacccggatgccgcgcggcgcctggtaccgggcaccctcaagccggtgcgctgggaaaaggaagtgatcgcccagatgctcatcacctccgacggcactgccaagccgatcgagttcgaaccccgagaagtgctggctcgcgtgcttcagcgcctggccaagcgtggtatccgcccggtggtggcgttcgaactggagttctacctgttcgaccgcaagctcgataacggcctgccgcagtacccgcgcgacacggcgaccggggacgaagacgaccaaccgaacatgcacatcgagcggctgtcgcgcttctcgtcggtgctgcacgagatggtcgatggcgccaacgagcagggcgtgccggcgaacgtgatcaccgcagagctaggccccggccagttcgaaatcaacttctcccacagcgacgatgccctgagcgcggcggactggtcggcgctgttctgccgcagtacccggggtatcgcgatgaagcacggctaccgcgccagcttcatgagcaagccgtacctggacgcgccaggcagcggcatgcatgtgcatgtcagcctgtacgacgacgccggcaacaacatcctggccggtgccgagcagcgcaagctgcgtcatgcggtggcagggtgcctggagctgctgccgcactgcatgccgatctttgcccccaaccacaatgcctaccgccgttatggcgcgatggtcaacgcggcgagcaaggccagctggggcttcgaggaccgtgatgcgtgcattcgcatccctgaatccgacccgcgcaacctgcgcatcgagcaccgcctcgcgggcgccgatgccaacccgtatctggtgctggcggccatcctgaccgggatggagcatggcctggaccgtggcgtggaacccattgcgccgttgaacgacaaccgccagagcggcatcgacttccccaaggatgccctcagcgctctggccgccatgcgtcaccacccggtggtcaacgaaggcctgggcagtgagttcgtgatggtttattgcgaaaacaaataccaggagcaactggacttcatgcgccacatcgatgcccgcgaataccgctggttcctttga

SEQ ID NO: 32246 - protein, 448 aa, Pseudomonas putida GB-1
MSVIFPDLLAEVRSFRAEHPALRYVDLIALDIPGHFYGKRYPIDMLEKVAAGAPLKLPQNCVLLGTQGGLYPIGDYCFADGDPDAARRLVPGTLKPVRWEKEVIAQMLITSDGTAKPIEFEPREVLARVLQRLAKRGIRPVVAFELEFYLFDRKLDNGLPQYPRDTATGDEDDQPNMHIERLSRFSSVLHEMVDGANEQGVPANVITAELGPGQFEINFSHSDDALSAADWSALFCRSTRGIAMKHGYRASFMSKPYLDAPGSGMHVHVSLYDDAGNNILAGAEQRKLRHAVAGCLELLPHCMPIFAPNHNAYRRYGAMVNAASKASWGFEDRDACIRIPESDPRNLRIEHRLAGADANPYLVLAAILTGMEHGLDRGVEPIAPLNDNRQSGIDFPKDALSALAAMRHHPVVNEGLGSEFVMVYCENKYQEQLDFMRHIDAREYRWFL

SEQ ID NO: 32247 - DNA, 1350 bp, Marinobacter sp. ELB17
  CDS (1)..(1350): transl_table=11
atgtctgacaataaggccgaaatttggctggcacagcatccagagattgattccatttttgcctgcgtttgcgatttaaacggcacgatgcgtggcaagcgcgttccggttgatcagttgtccaaggtaatagacggcgggctacggatgccgttgtcgattgttggcatggatgtttggggcgaggatgtcgaaaacagtgagttggttttcgagacgggcgattccgatggcttgtgcgattttaccggccgcccattgatgccgatcacctggaccagtcgcccgacggcgctggcgatgctgtggatgcggcaagaagaaggcgcaccgtttccgggcgacccgcgcagggcccttgcgcgtattgccgagcaatacaagcagcgcggactgacgcctgtggtggcgaccgagctggaattctatctggtcgacccctcggaagattacccgcaggcgccacgatctccggttaccggcaagcgactggaatccgacggcgcgatgtcgctggacgaattgcaacatttcgatgaatttctgaacgacgtttacgatgcctgcgaattgcagggcattcctgccgatgctgcgatttcggaaaacggggcgggccagtttgagatcaacatgcaccacgttgcggaccctctgcgcgccgctgacgatgccgtgctgttcaagcgtctcgtgcgcggcattgcccgcaagcacgggcttgcggctaccttcatggcgaaaccttatggcgacctgtctggcagcgggtttcacacgcatttctcattgatcgatgaaaacgggataaacgtgttcgacaacggcggcgacgaaggcacgcccctgttgttgaacgcggtggccgggttgttggccacgatgcagcaaaacacgctgacatttgcgccgcacgaaaattcgtatcgccgcctgctgcccggcgctcacgcgccgacaagcgtctcttggggctatgagaaccgaaccgcggccatccgtattcccggcggtgatcccatagcgcggcgtatagagcatcgcgtcgcgggcgccgatgccaacccctatctggtgctggccagcattctgggcggggcactgcttggcatcgaaaacgagatgcagccggcggcacccatcaccggcaatgcgtattcgatgaacctcgacaatttgccgctggactgggcaaccgccatcgacgcctttcgcaagggtgccgatgtgccgaccatcttctccaaacggctgcaaaccatgttggtcgaatgcaaaatgcaggaattgcgtaaatttgcccgctacgtgaccaagtttgaatatgacagctacctggagatcgtgtga

SEQ ID NO: 32248 - protein, 449 aa, Marinobacter sp. ELB17
MSDNKAEIWLAQHPEIDSIFACVCDLNGTMRGKRVPVDQLSKVIDGGLRMPLSIVGMDVWGEDVENSELVFETGDSDGLCDFTGRPLMPITWTSRPTALAMLWMRQEEGAPFPGDPRRALARIAEQYKQRGLTPVVATELEFYLVDPSEDYPQAPRSPVTGKRLESDGAMSLDELQHFDEFLNDVYDACELQGIPADAAISENGAGQFEINMHHVADPLRAADDAVLFKRLVRGIARKHGLAATFMAKPYGDLSGSGFHTHFSLIDENGINVFDNGGDEGTPLLLNAVAGLLATMQQNTLTFAPHENSYRRLLPGAHAPTSVSWGYENRTAAIRIPGGDPIARRIEHRVAGADANPYLVLASILGGALLGIENEMQPAAPITGNAYSMNLDNLPLDWATAIDAFRKGADVPTIFSKRLQTMLVECKMQELRKFARYVTKFEYDSYLEIV

SEQ ID NO: 32249 - DNA, 1401 bp, Amycolatopsis mediterranei
  CDS (1)..(1401): transl_table=11
gtgcccactactccagacgacatccagcgcctcatcgccgacgaggacgtcgaagtcatcgacgtccagttctgcgacctgcccggcgtgatgcagcacttcacggtccccgcgaaggccttcaccgaagaggcctacgaagagggtctcgcgttcgacggctcctcggtgcgcggcttccagtccatccacgagtccgacatgctgctgctgccggacgcggcgaccgcgcggatcgaccccttccgcaaggcgaagacgctcgccctcaacttcttcgtgcacgaccccttcacccgtgaggcgtacagccgcgacccgcgcaacatcgcgcgcaaggccgagcagtacatcgccgagtacggcgtcgccgacaacgtctacttcggtcccgaagccgagttctacatcttcgactcgatccgcttcgactccgccgagcacgcctccttccacgagatcgactccgtcgagggctggtggaacacgggcgccgacgaggtcggtggcaaccagggctacaagacgaagttcaagggcggctacttcccggtcccgccggtcgaccacttcgccgacctgcgcgacgacatcgtccgcaacctccagggctccggtttcgagatcgagcgcgcgcaccacgaggtgggcaccgccggccagaccgagatcaactacaagttcaacacgctgctgcacgccgcggacgacctgcagctgttcaagtacatcgtgaagaacacggtgttcgccgcgggcaagacggccacgttcatgccgaagcccctcgccggcgacaacggctcgggcatgcactgccaccagtcgctgtggaaggacggccagccgctgttccacgacgagtcgggctacgccggcctgtcggacaccgcgcgccactacatcggcggcctgctcaagcacgccccgagcctgctggccttcacgaacccgacggtgaactcctaccaccgcctggtcccgggcttcgaggcgccggtttcgctggtctactcgcagcgcaaccgctcggcctgcgtccgcatcccgatcacgggcaacaacccgaaggccaagcgcgccgagttccgctgcccggactcgtcgggcaacccgtacctggcgttctcggcgatgatgatggccggcctcgacggcatccggaacaagatcgagccgccggagccgatcgacaaggacctctacgagctcccgcccgaggaggccaaggacgtcaagctggtcccgggcgacctgggcacagtcctgaacacgctcgagggcggcgtgttcaccccggacgtgatcgagacgtggatctcgtacaagcgcgagaacgagatcgacccgctgcgcctgcgcccgcacccgtacgagttctccctgtactacgacgtgtga

SEQ ID NO: 32250 - protein, 466 aa, Amycolatopsis mediterranei
MPTTPDDIQRLIADEDVEVIDVQFCDLPGVMQHFTVPAKAFTEEAYEEGLAFDGSSVRGFQSIHESDMLLLPDAATARIDPFRKAKTLALNFFVHDPFTREAYSRDPRNIARKAEQYIAEYGVADNVYFGPEAEFYIFDSIRFDSAEHASFHEIDSVEGWWNTGADEVGGNQGYKTKFKGGYFPVPPVDHFADLRDDIVRNLQGSGFEIERAHHEVGTAGQTEINYKFNTLLHAADDLQLFKYIVKNTVFAAGKTATFMPKPLAGDNGSGMHCHQSLWKDGQPLFHDESGYAGLSDTARHYIGGLLKHAPSLLAFTNPTVNSYHRLVPGFEAPVSLVYSQRNRSACVRIPITGNNPKAKRAEFRCPDSSGNPYLAFSAMMMAGLDGIRNKIEPPEPIDKDLYELPPEEAKDVKLVPGDLGTVLNTLEGGVFTPDVIETWISYKRENEIDPLRLRPHPYEFSLYYDV

SEQ ID NO: 32251 - DNA, 1512 bp, Streptomyces ambofaciens
  CDS (1)..(1512): transl_table=11
atgtatgcccggtcatggtccacgcccgcccgcgaaggcagcgtcgggcgcccgtccttcgtcaccgaccacggactgtgggacgaggagcgcctcgccgccgccgaacgtgtcgaagccgccctcgccgacgtcgactacgtccgcctcgtcttcggcgacccgcacggactggcccgctccaagaccctcaccaccgacgccttccgcaccgtgctgcgcaacggcatgaacttcagccccggcccgttcctcttcgacaccggacacgccgtcgccgtcgacttcctgggcgagcacggcatcggcgtcgacgagatctccggcgcgggcaacttcctcctcgtgcccgacccggtcaccttccaggtgctgcccggacgcggcccgcgcaccgcctgggtcctgggcgacgagtacctgcgcgacggcaccccccacccgctgtcctcccgggccgtgctgcgccgcgtcctggagcggtacaccgccctgggcctggaacccgcgctgggcctggaggtcgagtggtacctcacccgccgcctggacgacgaacccggcaaccagggcaacggcttcggactccagggccaggccccgcgcgtggccgcggtcaacgccggctaccagttcaacctcgacgccgcctacgacaccgtcgcccccatcaccggcccgctcggcctgtacctgcaaaagctcggcctgcccctgcgctcgctggaacacgagtccggccccggccaggtcgagaccaccttcagcccgatgtcggccctggacacggccgacgcgatgctgctcttccgcaccgtcaccaagcggtactgcgcccgccgcggccaccacgcctccttcatgtcccagccgcagctggaggccgccgaccccagcggctggcacctgaaccagtccgtcgtggacaccgccaccggccgcaacctcttcagcgccgaaggcctgtccggcggcctgtcacccagcggaaagtcctacgccgaaggactgctgacctgggcacgcgaactgttcctgctgtccgtgcccaccgtcaacggctaccggcgcctggccgccgaacacgccctcgcacccacccgcctgggctggagcttcgaggaccgcaccgcgatgctgcgggtcgtgggcaacggagcgggcgcccacatcgagaaccggatgggcgagccctgcgccaacccctacctgaacatcgccgcccagctgttcgccggactcgagggcctgcaggcacagcccaccgaccccggccccgccgctcccgccggcccgccccagccgcagaccgtgccccagtccctggaggaggccctggacgccttccgcgccggccgcgccgcccggctcctgggagcacccctggccgcctgcatgaccaagctcaaggagagcgaactgcggcgctacaccgcctggagcagcgaacacccgcccgtgcccggacaggtcaccgactgggagcagcgtgagtacttcggcgcgtactga

SEQ ID NO: 32252 - protein, 503 aa, Streptomyces ambofaciens
MYARSWSTPAREGSVGRPSFVTDHGLWDEERLAAAERVEAALADVDYVRLVFGDPHGLARSKTLTTDAFRTVLRNGMNFSPGPFLFDTGHAVAVDFLGEHGIGVDEISGAGNFLLVPDPVTFQVLPGRGPRTAWVLGDEYLRDGTPHPLSSRAVLRRVLERYTALGLEPALGLEVEWYLTRRLDDEPGNQGNGFGLQGQAPRVAAVNAGYQFNLDAAYDTVAPITGPLGLYLQKLGLPLRSLEHESGPGQVETTFSPMSALDTADAMLLFRTVTKRYCARRGHHASFMSQPQLEAADPSGWHLNQSVVDTATGRNLFSAEGLSGGLSPSGKSYAEGLLTWARELFLLSVPTVNGYRRLAAEHALAPTRLGWSFEDRTAMLRVVGNGAGAHIENRMGEPCANPYLNIAAQLFAGLEGLQAQPTDPGPAAPAGPPQPQTVPQSLEEALDAFRAGRAARLLGAPLAACMTKLKESELRRYTAWSSEHPPVPGQVTDWEQREYFGAY

SEQ ID NO: 32253 - DNA, 1440 bp, Aspergillus oryzae
  CDS (1)..(1440)
atggccacaaacgtcacattagagaacctgtcgagtctcctggccgacgacatcaaagtcaaggtcgctggcattgactgcgatggcatcctccgcggcaaagtcatgtccaaggagaaattcctaggcattgcggaaaagggattcgggttcagctctgcagtttttggctgggacatgcaggatgtcctctatacaaccgatgccaacattgcgcccaaggactctgggtatgtggactttatcgcagttccagatttgagcacatttaggaggataccctgggaggatgacatccccttcttcttggtgcggtttattcagaacggtcaaactgtttctgcagatggccggaatatgctcaaattgatatgcgataagcttgcggcagagaactgtcagggaatggccggtgtggaattggagttcatgaacttccaaaccccctcagaagacggatacagcaacggctcccaaacccagaatatcgcagccttcctcgaaaagaacacccctggatctctgcgccctataactgcaggcagtttctcctacagcgcaacgcgaccagtggcgttcaagaaatatttttacgacatcttcaatacctgcgcacaaataaactgtggaatcgaggggtggcatacggagggaggaccaggcgtatatgaagcagccctcaaagtatgcgacgttcgcgaaatggcagacagagtatccttattcaagctactggcgaaatcaataggtgttgagcacggcatcactccctgtttcatggccaagccgatccaaggtcaaccaggcagctccggtcacatccacgtttcgctttgcgatctcgacggcaagaacctgtttgctcgggagactcccgacgacaacgccccctggcctgatgcagttgggctgtcggatctgggccgccaattcctcgctggtcttctggaagctctacccgacatcatgcctctattcgcaccgaccatcaactcctacaaacggctagtggagaacttctgggcgcccgtgaatgtgagctggggtctagaggaccgaatggcctcgatccgtctcattacaccaccggtatgtaagcctggcgcgacgagattcgaggtccgtattcctggagcggacttgcacccccactatgcactcgctgttatcctcgccgcgggctggcgcggtgtacaaaagaagctggagatcaaggtaccgcctgtgtcggccatgaagaaggataacactcgtccggaattattgccaaacactcttgaagaagctttgaagcgcttcaacgctgctgatagtgttgcacgcgagatactggatggggagtttgtggacttcttcaccgcaactcgtgagcatgagttgcgggtgtggagagaggctgtgactgactgggagtttaagcggtacattgagacagtgtag

SEQ ID NO: 32254 - protein, 479 aa, Aspergillus oryzae
MATNVTLENLSSLLADDIKVKVAGIDCDGILRGKVMSKEKFLGIAEKGFGFSSAVFGWDMQDVLYTTDANIAPKDSGYVDFIAVPDLSTFRRIPWEDDIPFFLVRFIQNGQTVSADGRNMLKLICDKLAAENCQGMAGVELEFMNFQTPSEDGYSNGSQTQNIAAFLEKNTPGSLRPITAGSFSYSATRPVAFKKYFYDIFNTCAQINCGIEGWHTEGGPGVYEAALKVCDVREMADRVSLFKLLAKSIGVEHGITPCFMAKPIQGQPGSSGHIHVSLCDLDGKNLFARETPDDNAPWPDAVGLSDLGRQFLAGLLEALPDIMPLFAPTINSYKRLVENFWAPVNVSWGLEDRMASIRLITPPVCKPGATRFEVRIPGADLHPHYALAVILAAGWRGVQKKLEIKVPPVSAMKKDNTRPELLPNTLEEALKRFNAADSVAREILDGEFVDFFTATREHELRVWREAVTDWEFKRYIETV

SEQ ID NO: 32255 - DNA, 1464 bp, Aspergillus oryzae
  CDS (1)..(1464)
atgggctccgtatcctcccctgaagtcacactcgacaatgtcgcggagatcctgcagcgagatactcgtgtcaagttggcaggtgtggatgtcgatgggatgcttcgcgggaagctcgtctctaagaaaaagttcctttccatcgtgtcagaagggtttggattttgctcagttatcttcgggtgggacatgcacgatcagacatacttcaaggagttggctatcagtaacaaggagaacggttatcgggatattgttgccattccagatctgagcagcttccgtcgcattccctgggagaacaacgtcccttttttcctcgttagtttccacgatcccgatactcgggaacccgtatgtgcatgccctcgaggtctggtaaggaccgcactcggcaaggctgaggcggccgggtatcgggcgatggcaggggcggagtatgaattttatcaatttcgtgtaccagaatcccatccatcacccgagcgcagcgcgtcttccacggcgacctttttgagagagaaccccgtggaagcattaccttccctgaccgaggggatgttcgggtacagtttgacccgccctattcataaccaggattattattatggcattttcgatgcgtgcgagcaatttaaatgcgacatcgaaggatggcatacagaaagtgggcccggtgtgttcgaagctgcgctacaatttggagaagccaaggagatggcagataaagcagggcttttcaagtatgttgttaaatcaattggaaccaagcacggtatcacacccactttcatggccaaaccgcgccagggattgcctggaaatagtggccacatgcatatttcgctcgttaccagtgatggaaagaacgcttttctgcgcgataccccggacccatctccaccttaccccgatgtcgcttatctgtccgacttgggtagatatttcttagcaggcgttctcacgggtctccctgatattatgcctatgtttgcgccgaccgtcaattcctacaaacggctcgttgagaatttctgggcccccgtcacagtctcgtggggcctggagcatcgggcggcctctattcgattgattacgccgccaacgggcagcccgaaggccacccgattagaagtgcgagtccccggggcagatgccaatccgcattatgtcttggcggctatagtcgcattgggatggcggggcgtggagaagaagctggagatccctgtgcccccgctgtctaaaggtgaggagatggggggtggcagcgaccagggggtgcgtctggccaagtccctcaaggaagcggtcgccgcgtttacgcgcaagggcagtgtcgcacgggaggtgtttggagatgctttcgtcgaccattttggcggcacccgggaacatgaagtacgcctatgggaagaggccgtcaccgattgggaggtgcggcgatatattgaaacggtctag

SEQ ID NO: 32256 - protein, 487 aa, Aspergillus oryzae
MGSVSSPEVTLDNVAEILQRDTRVKLAGVDVDGMLRGKLVSKKKFLSIVSEGFGFCSVIFGWDMHDQTYFKELAISNKENGYRDIVAIPDLSSFRRIPWENNVPFFLVSFHDPDTREPVCACPRGLVRTALGKAEAAGYRAMAGAEYEFYQFRVPESHPSPERSASSTATFLRENPVEALPSLTEGMFGYSLTRPIHNQDYYYGIFDACEQFKCDIEGWHTESGPGVFEAALQFGEAKEMADKAGLFKYVVKSIGTKHGITPTFMAKPRQGLPGNSGHMHISLVTSDGKNAFLRDTPDPSPPYPDVAYLSDLGRYFLAGVLTGLPDIMPMFAPTVNSYKRLVENFWAPVTVSWGLEHRAASIRLITPPTGSPKATRLEVRVPGADANPHYVLAAIVALGWRGVEKKLEIPVPPLSKGEEMGGGSDQGVRLAKSLKEAVAAFTRKGSVAREVFGDAFVDHFGGTREHEVRLWEEAVTDWEVRRYIETV

SEQ ID NO: 32257 - DNA, 1296 bp, Xanthomonas oryzae pv
  CDS (1)..(1296): transl_table=11
gtggaatgcctggtgccggacatcaccggcaacgcccgcggcaagatcattccggccgacaagttttcgcatgattacggcacgcgccttcccgaaggcatcttcgccaccaccgtgaccggcgatttcccggacgattattacgcactgacctcaccctcggattcggacatgcatctacgcccggatgccagcactgtgcgcatggtgccgtgggcgacagaccccactgcgcaggtcatccacgactgctataccaaggagggcgatccgcacgaacttgccccgcgcaatgtgctgcggcgtgtgctggatgcctatgcgcaggtcaagctgcaaccggtggtggcgccggaactggaattttttctggtgcagaagaataccgaccccgactttccgttgttgccgccggcgggacgctcagggcgcccggaaacggcgcggcagtcgtattcgatcgacgcggtcaacgagttcgacccgatcctggacctgatgtacgactactgcgatgcgatggaactggacgtggataccttgatccacgaatccggtgccgcgcagctggaagtcaacttcacccatgccgatccgctctcgcgtgcggaccaggtcttcctgttcaagcgcaccatgcgcgaggccgcgctgcggcatggcgtgtacgccacattcctggcaaaaccaatggaaaccgagcccggcagtgcgatgcatatccaccagagcctgctgcatgccgacaccggcaaaaacgtgttcagcggcaagcgcgagggcggcttcagcgataccttcgcgcattatctgggcggcctgcagaagtacattccgatggcgatggggctgctggcgccgaacgtcaattcgtatcgccggctgatgttcggcgaagtctcgccgagcaatgtgctgtggggtttcgacaaccgcacctgcgggctgcgcgtgccgatcgatgcaccgcagaacatgcgggtggagagccgtttcgccggctccgatgccaacccgtatctggcgatggcggcgacgctggcgtgcggattattgggcattcgcgaaaatctcgaaccaaccgcgccgatcagcagcaacggcaaggagcaaggttacgatctgccgcgctcgctgggcgaagcgttggatgagctggaaggctgcgatgcgttgcaggagatgctggggcagcgctttgtgcgtgcgtacatctcggtgaagcgcaaagaatatgagacgttttttcgggtgatcagctcttgggagcgggagtttctgttgttgaatgtgtga

SEQ ID NO: 32258 - protein, 431 aa, Xanthomonas oryzae pv
MECLVPDITGNARGKIIPADKFSHDYGTRLPEGIFATTVTGDFPDDYYALTSPSDSDMHLRPDASTVRMVPWATDPTAQVIHDCYTKEGDPHELAPRNVLRRVLDAYAQVKLQPVVAPELEFFLVQKNTDPDFPLLPPAGRSGRPETARQSYSIDAVNEFDPILDLMYDYCDAMELDVDTLIHESGAAQLEVNFTHADPLSRADQVFLFKRTMREAALRHGVYATFLAKPMETEPGSAMHIHQSLLHADTGKNVFSGKREGGFSDTFAHYLGGLQKYIPMAMGLLAPNVNSYRRLMFGEVSPSNVLWGFDNRTCGLRVPIDAPQNMRVESRFAGSDANPYLAMAATLACGLLGIRENLEPTAPISSNGKEQGYDLPRSLGEALDELEGCDALQEMLGQRFVRAYISVKRKEYETFFRVISSWEREFLLLNV

SEQ ID NO: 32259 - DNA, 1482 bp, Comamonas acidovorans
  CDS (1)..(1482): transl_table=11
atgagccagaaattcattgatcggcacggcttgtggtccgacgcccagaaggcggcggccgttgaagtgctgaagaaaatcgagcaggacggcattcagatgattcgcctctcatggccggatcaatatggtctgctgcgcgggaaaatgctgtcggtggcagccttgcgctccgcattcggcagcggctcggaaatcaccatggcgccctttttcttcgacacggtcagcaccttcgtgttcaatcccttttcctcggatggcgggtttggcaacccggagttggcgggcagccctaacgtggtgatggtgcccgaccccaccaccttccgcgtgctgccctgggctgatcgcacgggctggatgctggccgatctgtacatgcgtagcggtcggcccttcccgctgagcccgcgtgccctgttgaagaaagcgctggggcagttggcggatctgggctatgacttccatggtggcctggaggtggagtggtacttgacgcgcatcgtcgacccctgcctggagcccgagacgctgggtggccccggcacaccggcggcaccgcccaaggtgatgccggtcgccaagggctactcctatctgctcgaaaatcacttggacgaggtcgaacccatcatggccgaggtgcgccagcacctgctgacgctgggcatgccgttgcgcagcatcgaggatgaattggggcccagccagatggagaccaccttcgacgtcatgtccggcctggacatggccgacaccatggtgttgttccgcaacgcagtcaagcaaatctgtcggcggcgcggttaccttgccagtttcatgtgcaaacccaagattgagggtttcattgcctcgggctggcatctgcaccagtcgctggcggcgcgcgactccggcgtcaatgccttcgttccgcagacgggcgagccgctgtcggcgctgggccgggcctatgtcggtggcctgctcaaacatgcctgtgcggcctccagcttcaccacccccacggttaacggctaccgacgccgacgcccgttctctctggccccggatcgggtgacctgggccgaggacaaccgcgccgccatggcgcgcgtgatcgccgccccagaagactcagccagccgtgtggaaaaccgggtcggcgagccggcggccaacccctacctgtatctggcctcgcagctcttctcggggatcgatggcattcgtcgccaactcgatcccggccctctgcaggaaacgccctatgccgccgacgttccgatcctgccgcgcaacctggccgaggcgctggacgtgctggagggctccagcttcttccgcgaagccttcggcgaagagttcatccactactggctgcacctgcggcgcagcgaatgggcgcgcttcgtggccgccgaaggcgccgacgtggacatggcgggcgaccccgtcaccgactgggagcatcgcgagtacttcgaactgttctga

SEQ ID NO: 32260 - protein, 493 aa, Comamonas acidovorans
MSQKFIDRHGLWSDAQKAAAVEVLKKIEQDGIQMIRLSWPDQYGLLRGKMLSVAALRSAFGSGSEITMAPFFFDTVSTFVFNPFSSDGGFGNPELAGSPNVVMVPDPTTFRVLPWADRTGWMLADLYMRSGRPFPLSPRALLKKALGQLADLGYDFHGGLEVEWYLTRIVDPCLEPETLGGPGTPAAPPKVMPVAKGYSYLLENHLDEVEPIMAEVRQHLLTLGMPLRSIEDELGPSQMETTFDVMSGLDMADTMVLFRNAVKQICRRRGYLASFMCKPKIEGFIASGWHLHQSLAARDSGVNAFVPQTGEPLSALGRAYVGGLLKHACAASSFTTPTVNGYRRRRPFSLAPDRVTWAEDNRAAMARVIAAPEDSASRVENRVGEPAANPYLYLASQLFSGIDGIRRQLDPGPLQETPYAADVPILPRNLAEALDVLEGSSFFREAFGEEFIHYWLHLRRSEWARFVAAEGADVDMAGDPVTDWEHREYFELF

SEQ ID NO: 32261 - DNA, 1482 bp, Comamonas acidovorans
  CDS (1)..(1482): transl_table=11
atgagccagaaattcattgatcggcacggcttgtggtccgacgcccagaaggcggcggccgttgaagtgctgaagaaaatcgagcaggacggcattcagatgattcgcctctcatggccggatcaatatggtctgctgcgcgggaaaatgctgtcggtggcagccttgcgctccgcattcggcagcggctcggaaatcaccatggcgccctttttcttcgacacggccagcgccatcgtgttcaatcccttttcctcggatggcgggcttggcaacccggagttggcgggcagccctaacgtggtgatggtgcccgaccccaccaccttccgcgtgctgccctgggctgatcgcacgggctggatgctggccgatctgtacatgcgtagcggtcggcccttcccgctgagcccgcgtgccctgttgaagaaagcgctggggcagttggcggatctgggctatgacttccatggtggcctggaggtggagtggtacttgacgcgcatcgtcgacccctgcctggagcccgagacgctgggtggccccggcacaccggcggcaccgcccaaggtgatgccggtcgccaagggctactcctatctgctcgaaaatcacttggacgaggtcgaacccatcatggccgaggtgcgccagcacctgctgacgctgggcatgccgttgcgcagcatcgaggatgaatgggggcccagccagatggagaccaccttcgacgtcatgtccggcctggacatggccgacaccatggtgttgttccgcaacgcagtcaagcaaatctgtcggcggcgcggttaccttgccagtttcatgtgcaaacccaagattgagggtttctgtgcctcgggctggcatctgcaccagtcgctggcggcgcgcgactccggcgtcaatgccttcgttccgcagacgggcgagccgctgtcggcgctgggccgggcctatgtcggtggcctgctcaaacatgcctgtgcggcctccagcttcaccacccccacggttaacggctaccgacgccgacgcccgttctctctggccccggatcgggtgacctgggccgaggacaaccgcgccgccatggcgcgcgtgatcgccgccccagaagactcagccagccgtgtggaaaaccgggtcggcgagccggcggccaacccctacctgtatctggcctcgcagctcttctcggggatcgatggcattcgtcgccaactcgatcccggccctctgcaggaaacgccctatgccgccgacgttccgatcctgccgcgcaacctggccgaggcgctggacgtgctggagggctccagcttcttccgcgaagccttcggcgaagagttcatccactactggctgcacctgcggcgcagcgaatgggcgcgcttcgtggccgccgaaggcgccgacgtggacatggcgggcgaccccgtcaccgactgggagcatcgcgagtacttcgaactgttctga

SEQ ID NO: 32262 - protein, 493 aa, Comamonas acidovorans
MSQKFIDRHGLWSDAQKAAAVEVLKKIEQDGIQMIRLSWPDQYGLLRGKMLSVAALRSAFGSGSEITMAPFFFDTASAIVFNPFSSDGGLGNPELAGSPNVVMVPDPTTFRVLPWADRTGWMLADLYMRSGRPFPLSPRALLKKALGQLADLGYDFHGGLEVEWYLTRIVDPCLEPETLGGPGTPAAPPKVMPVAKGYSYLLENHLDEVEPIMAEVRQHLLTLGMPLRSIEDEWGPSQMETTFDVMSGLDMADTMVLFRNAVKQICRRRGYLASFMCKPKIEGFCASGWHLHQSLAARDSGVNAFVPQTGEPLSALGRAYVGGLLKHACAASSFTTPTVNGYRRRRPFSLAPDRVTWAEDNRAAMARVIAAPEDSASRVENRVGEPAANPYLYLASQLFSGIDGIRRQLDPGPLQETPYAADVPILPRNLAEALDVLEGSSFFREAFGEEFIHYWLHLRRSEWARFVAAEGADVDMAGDPVTDWEHREYFELF

SEQ ID NO: 32263 - DNA, 1410 bp, Enterobacter agglomerans
  CDS (1)..(1410): transl_table=11
atgtccgctgaacacgttctctcgatgatgaacgagcatgaagttaagtttgttgacctgcgttttaccgataccaaaggtaaagaacagcacgttacgatccctgctcaccaggttaacgctgacttcttcgaagaaggcaaaatgttcgatggttcgtctattggcggctggaaaggcattaacgaatcagacatggtgctgatgcctgacgccaccacggcggtcatggatcctttcttcgaagattctacgctgatcatccgttgtgacatcctcgagccaggcaccatgcagggctacgaccgcgatccacgctctatcgctaagcgcgctgaagatttcctgcgctcttccggcatcgctgataccgtactgtttggaccagaaccagaattcttcctgttcgatgacatccgtttcggctcatcgacgtccggttcacacgttgctatcgacgatatcgaagcggcatggaacaccggtaaagagtacgaaggcggtaacaaaggtcaccgtccaggtctgaaaggcggctacttcccggttccaccggttgactcatcacaggacatccgttctgccatgtgtctgaccatggagcagatgggcctggttgttgaagcgcatcaccacgaagtggcgaccgcgggtcagaacgaagtggcaacccgcttcaataccatgaccaaaaaagcggacgaaattcagatttacaaatatgtggttcacaacgttgcgcatgcttacggcaaaaccgcgacctttatgccgaagcctatgtttggcgacaacggttcaggcatgcactgccatatgtcactctccaaaggtggccagaacctgtttgccggcgataagtacggcggcctgtctgaaatggcgctgttctacatcggcggtatcatcaagcacgctaaagcgatcaacgccctggcgaacccgaccaccaactcttacaagcgtctggtcccgggttacgaagcaccggttatgctggcttactctgcccgtaaccgttcagcctcaatccgtattccggttgttgccagcccgaaagcgcgtcgtatcgaagcgcgcttcccggatccagcggctaacccatacctggcgttcaccgcactgctgatggctggcctggatggcatcatcaacaaaatccatcctggcgatgcgatggacaaaaacctgtatgacctgccaccggaagaagaagctgagattccaaaagttgcaggctctctggaagaagcgctgaatgcactgaacgaagaccgcgagttcctgacccgcggcggagtattcactgacgaatcgatcgatgcttacatcgaactgcgtaaagcagagatggatcgcgttcgcatgacgccacacccggttgagttcgagctctactacagcgtttaa

SEQ ID NO: 32264 - protein, 469 aa, Enterobacter agglomerans
MSAEHVLSMMNEHEVKFVDLRFTDTKGKEQHVTIPAHQVNADFFEEGKMFDGSSIGGWKGINESDMVLMPDATTAVMDPFFEDSTLIIRCDILEPGTMQGYDRDPRSIAKRAEDFLRSSGIADTVLFGPEPEFFLFDDIRFGSSTSGSHVAIDDIEAAWNTGKEYEGGNKGHRPGLKGGYFPVPPVDSSQDIRSAMCLTMEQMGLVVEAHHHEVATAGQNEVATRFNTMTKKADEIQIYKYVVHNVAHAYGKTATFMPKPMFGDNGSGMHCHMSLSKGGQNLFAGDKYGGLSEMALFYIGGIIKHAKAINALANPTTNSYKRLVPGYEAPVMLAYSARNRSASIRIPVVASPKARRIEARFPDPAANPYLAFTALLMAGLDGIINKIHPGDAMDKNLYDLPPEEEAEIPKVAGSLEEALNALNEDREFLTRGGVFTDESIDAYIELRKAEMDRVRMTPHPVEFELYYSV

SEQ ID NO: 32265 - DNA, 1383 bp, Pseudomonas aeruginosa
  CDS (1)..(1383): transl_table=11
atgaacgaagaaaacaataagcaagtcctgaaactccaggagttcattgagaaacacaatatcgacacggttaggctgggtgctgttgatatagatggagtctggcgcgggaagcaagtcggagcagagtactttctgaacaaagcggctcttgatggaactcagatctcgaatatcttgtttggatgggatgtcgccgatcaccttgttgatggattggcgtttactggttgggattccgggtatccggatattgctctaatccctgatcttttgactctctcgctggtcccttggcaggcaaaaactgcatccgtcctttgcgatattcagcatctcaatggccagtcgctgaacctttcgcccaggaatctcctgcgcaaagcaaccgaaaaagcagagcagcttggctacaagtgccacgcggcttacgagtttgagttctaccttctgaacgactctattggcagtattgcggcagatcagtggcgcagcattaatccagtggaaaagagtggccactgctacagcatgctccatcactctagttcttcggacatcataggtgaagttcgcaagtacatgcgtgatgccgggatcgtactagaggcgacgaacagtgaacatggcccgggccagtacgagatcaacattaagtatgacgatgcgctcaaagcagcggatgacgcaatttttgtgaaaaacggcatcaaggagatcgctgcaaagcatggcatgacggcgaccttcatggcgaagcccaatgcagagtggtcgggttcgtccggtcatgtccacattagtctgtcgaacttaataacaggtgccccagcatttgccaatcccgagaatcctgctgcgttgtcggaggtcggttataacttcctcgcaggcatggttgagcttgccagagaattttcggccatctatctgccgaatatcaactcctacaagcggacggctggcgcatcctgggcgggtggtaattcgtcttggggattcgacaaccgcactgtgtcgcaccgtgcgatcacatcagccggcgcggccgctcgggtcgagaaccggatccctggtgccgataccaacccttatctggttattgcggccagcctcttgtcgggtctctatggcatcgagaacaaactcaagccgaaagaccccatcctcggtaacgcttacaaagtatcgccggagctcgcacgtccgctcgcggcgtcattggaagaggctaccaatatcttccgcgagagtgaaatggcacgagtgttattccctaaagagttcgttgagcattattcccagatgaaagtttgggagatcaagcaggctaatggtttcgtgaataattgggaattggcgcgttatctcgacattatctga

SEQ ID NO: 32266 - protein, 460 aa, Pseudomonas aeruginosa
MNEENNKQVLKLQEFIEKHNIDTVRLGAVDIDGVWRGKQVGAEYFLNKAALDGTQISNILFGWDVADHLVDGLAFTGWDSGYPDIALIPDLLTLSLVPWQAKTASVLCDIQHLNGQSLNLSPRNLLRKATEKAEQLGYKCHAAYEFEFYLLNDSIGSIAADQWRSINPVEKSGHCYSMLHHSSSSDIIGEVRKYMRDAGIVLEATNSEHGPGQYEINIKYDDALKAADDAIFVKNGIKEIAAKHGMTATFMAKPNAEWSGSSGHVHISLSNLITGAPAFANPENPAALSEVGYNFLAGMVELAREFSAIYLPNINSYKRTAGASWAGGNSSWGFDNRTVSHRAITSAGAAARVENRIPGADTNPYLVIAASLLSGLYGIENKLKPKDPILGNAYKVSPELARPLAASLEEATNIFRESEMARVLFPKEFVEHYSQMKVWEIKQANGFVNNWELARYLDII

SEQ ID NO: 32267 - DNA, 1464 bp, Blumeria graminis
  CDS (1)..(1464)
atgtcgcaggtagatgtcgaaaatatcacagtagaagcgttgcctaagctccttgagaccgattcaagagttaaagttgctggaatcgacgcagatggtatcctgcgaggcaaggtcatttccaaagataaattcctgggcgtggctgctgatggcttcggcttctgctcagtcctctttggctgggatatgcatgaccgcatgtactccaaggagttgaaaatatgcagtgcaagaaatggttgtaacgacatacttgcgcgtcctgatcttagtacattcagaaggattccatgggaagacaacatcccattctttctagttacattcatcgacccagtcactgttaagccaatcattgcttgccctcgtggtctattgaaatgtactattaacaatctcaaaactcaaggaattcaagccatggcgggagtggaaatcgaattctctcaatttaagctaccatctgaaatttcaggcgcccagtcgaaaaatgtatccatagcttcattcttgaaggatcataatatcaacgccttagaaccattgactgatggcatgtttggttacagtctaactcgaatggcacaaaataaagaatatttttacagtatttttgatacttgtgagaaattcagatgtgggattgaaagctggcatactgagagcggtcctggagtttttgaagctgccttgaaattctcagaaattcagcaaatggccgacaaggctaccttgttcaaatatctggtaaaatcgatagctataccgtatggcataacaccctgtttcatggctaaaccacggcaagggatgctaggaaatagtggtcatatacatatctctttgatcgataacaacgggaataatctatttgcgcgtgcggcaagagatgagggagccaaatatcaagatattgcgcacctctctgatttaggacggcagtttcttgctggtatcttggatggtttaacagacatcatgcccatgctggctcccaatatcaactcatacaagcgtcttgtcgaaaacttctgggcacctgtcacagtttcttggggtctggaacatagggcagcgtcaattcgagtaattgcgccgccaacctctaaatctggagctacgcgaatcgaagtgcgagtacctggtgctgatatcaacccatcttacgccctagctgccattttagcccttggttggagaggagtagagaaaaagctagaaatcagtattcccccattacagactggtcttaatgttggagaaacatccgattccgggatacgacttgccaaaagcttaagagaagcaactgagattttcatgagacccgagagtattgctagggaagtttttggaaatgattttgtcgatcattatggaggtacgcgagagaatgagtatcgattatgggatgaagctgtaactgactgggaaacacaacgctacattgagactgtgtga

SEQ ID NO: 32268 - protein, 487 aa, Blumeria graminis
MSQVDVENITVEALPKLLETDSRVKVAGIDADGILRGKVISKDKFLGVAADGFGFCSVLFGWDMHDRMYSKELKICSARNGCNDILARPDLSTFRRIPWEDNIPFFLVTFIDPVTVKPIIACPRGLLKCTINNLKTQGIQAMAGVEIEFSQFKLPSEISGAQSKNVSIASFLKDHNINALEPLTDGMFGYSLTRMAQNKEYFYSIFDTCEKFRCGIESWHTESGPGVFEAALKFSEIQQMADKATLFKYLVKSIAIPYGITPCFMAKPRQGMLGNSGHIHISLIDNNGNNLFARAARDEGAKYQDIAHLSDLGRQFLAGILDGLTDIMPMLAPNINSYKRLVENFWAPVTVSWGLEHRAASIRVIAPPTSKSGATRIEVRVPGADINPSYALAAILALGWRGVEKKLEISIPPLQTGLNVGETSDSGIRLAKSLREATEIFMRPESIAREVFGNDFVDHYGGTRENEYRLWDEAVTDWETQRYIETV

SEQ ID NO: 32269 - DNA, 1434 bp, Corynebacterium glutamicum
  CDS (1)..(1434): transl_table=11
gtggcgtttgaaaccccggaagaaattgtcaagttcatcaagttcatcaaggtcgagttcgttgacgttcgattcaccgaccttcccggcaccgagcagcacttcagcatcccagctgccagcttcgatgcagatacaatcgaagaaggtctcgcattcgacggatcctcgatccgtggcttcaccaggatcgacgaatctgacatgaatctcctgccagacctcggaacggccacccttgatccattccgcaaggcaaagaccctgaacgttaagttcttctttcacgatcctttcacccgcgaggcattctcccgcgacccacgcaacgtggcacgcaaggcagagcagtacctggcatccaccggcattgcagacacctgcaacttcggcgccgaggctgagttctacctcttcgactccgttcgctactccaccgagatgaactccggcttctacgaagtagataccgaagaaggctggtggaaccgtggcaaggaaaccaacctcgacggcaccccaaacctgggcgcaaagaaccgcgtcaagggtggctacttcccagtagcaccatacgaccaaaccgttgacgtgcgcgatgacatggttcgcaacctcgcagcttccggcttcgctcttgagcgtttccaccacgaagtcggtggcggacagcaggaaatcaactaccgcttcaacaccatgctccacgcggcagatgatatccagaccttcaagtacatcatcaagaacaccgctcgcctccacggcaaggctgcaaccttcatgcctaagccactggctggcgacaacggttccggcatgcacgctcaccagtccctctggaaggacggcaagccactcttccacgatgagtccggctacgcaggcctgtccgacatcgcccgctactacatcggcggcatcctgcaccacgcaggcgctgttctggcgttcaccaacgcaaccctgaactcctaccaccgtctggttccaggcttcgaggctccaatcaacctggtgtactcacagcgcaaccgttccgctgctgtccgtatcccaatcaccggatccaacccgaaggcaaagcgcatcgaattccgcgctccagacccatcaggcaacccatacctgggctttgcagcgatgatgatggccggcctcgacggcatcaagaaccgcatcgagccacacgctccagtggacaaggacctctacgaactaccaccagaggaagctgcatccattccacaggcaccaacctccctggaagcatccctgaaggcactgcaggaagacaccgactatcctcaccggtctgacgtcttcaccgaggatctcatcgaggcgtacatccagtacaagtacgacaacgagatctccccagttcgcctgcgcccaaccccgcaggaattcgaattgtacttcgactgctaa

SEQ ID NO: 32270 - protein, 477 aa, Corynebacterium glutamicum
MAFETPEEIVKFIKFIKVEFVDVRFTDLPGTEQHFSIPAASFDADTIEEGLAFDGSSIRGFTRIDESDMNLLPDLGTATLDPFRKAKTLNVKFFFHDPFTREAFSRDPRNVARKAEQYLASTGIADTCNFGAEAEFYLFDSVRYSTEMNSGFYEVDTEEGWWNRGKETNLDGTPNLGAKNRVKGGYFPVAPYDQTVDVRDDMVRNLAASGFALERFHHEVGGGQQEINYRFNTMLHAADDIQTFKYIIKNTARLHGKAATFMPKPLAGDNGSGMHAHQSLWKDGKPLFHDESGYAGLSDIARYYIGGILHHAGAVLAFTNATLNSYHRLVPGFEAPINLVYSQRNRSAAVRIPITGSNPKAKRIEFRAPDPSGNPYLGFAAMMMAGLDGIKNRIEPHAPVDKDLYELPPEEAASIPQAPTSLEASLKALQEDTDYPHRSDVFTEDLIEAYIQYKYDNEISPVRLRPTPQEFELYFDC

SEQ ID NO: 32271 - DNA, 1410 bp, Bradyrhizobium japonicum
  CDS (1)..(1410): transl_table=11
atgaagaccgccaaagacgtcctgaaatcgatcaaggacaacgacgtcaagtacgtcgacctgcgcttcaccgatccgcgcggcaagtggcagcatgtgacgttcgacgtcagcatgatcgatgaagacatatttgccgaagggacgatgttcgacggctcctcgatcgccggctggaaggcgatcaacgagtccgacatgtgcctgatgccggatccggtgaccgcgacgatcgatccgttcttcgccgagaccaccatggtcatcacctgtgacgtgctcgagccgaccaccggcgagccctacaaccgcgacccccgcggcatcgccaagaaggccgaggcgatggtgaagtcgatgggcgtcggcgacaccgtcttcgtcggtcccgaagccgagttcttcgtgttcgacgacgtgcgcttttcctccagcccctacaacaccggcttcaggctcgactcctcggagctgccgaccaacaccgacaccgaatatgaaggcggcaatctcggccaccgcgtccgcaccaagggcggctacttcccggtcccgccgcaggactcggtgcaggacatgcgctcggaaatgctcggcgccatggccaagatgggcgtcaaggtcgagaagcatcaccacgaggtcgcctccgcccagcacgagctcggcatgaagttcgacacgctgacgctgatggccgaccatctgcagatctacaaatactgcatccaccaggtcgcccacatctacggcaagaccgccaccttcatgccgaagccggtctatggcgacaacggctcgggcatgcacgtgcaccagtcgatctggaaggacggcaagccggtgttcgccggcaacaaatacgccgacctgtcggagacctgcctccactacatcggcggcatcatcaagcacgccaaggcgatcaacgccttcaccaacccctcgaccaactcctacaagcgtctggtcccgggctatgaggctcccgtgctgctcgcctattccgcgcgcaaccggtcggcctcctgccgcatcccctacaccgcttcgccgaaggccaagcgtgtcgaggtgcgcttcccggatccgctcgccaatccctatctcggcttcgccgcgatgctgatggccggcctcgacggcatcaagaacaagatcgatccgggtccggcgatggacaaggacctctacgacctgccgaaggaagagctgaagcagatcccgacggtgtgcggcagcttgcgcgaggcgctcgagaacctcgacaaggaccgcgccttcctcaaggccggcggcgtgttcgacgacgacttcatcgacagctacatcgagctgaagatgaccgaagtcgagcgcttcgaaatgaccccgcacccggtcgagttcgacatgtactattcgggctaa

SEQ ID NO: 32272 - protein, 469 aa, Bradyrhizobium japonicum
MKTAKDVLKSIKDNDVKYVDLRFTDPRGKWQHVTFDVSMIDEDIFAEGTMFDGSSIAGWKAINESDMCLMPDPVTATIDPFFAETTMVITCDVLEPTTGEPYNRDPRGIAKKAEAMVKSMGVGDTVFVGPEAEFFVFDDVRFSSSPYNTGFRLDSSELPTNTDTEYEGGNLGHRVRTKGGYFPVPPQDSVQDMRSEMLGAMAKMGVKVEKHHHEVASAQHELGMKFDTLTLMADHLQIYKYCIHQVAHIYGKTATFMPKPVYGDNGSGMHVHQSIWKDGKPVFAGNKYADLSETCLHYIGGIIKHAKAINAFTNPSTNSYKRLVPGYEAPVLLAYSARNRSASCRIPYTASPKAKRVEVRFPDPLANPYLGFAAMLMAGLDGIKNKIDPGPAMDKDLYDLPKEELKQIPTVCGSLREALENLDKDRAFLKAGGVFDDDFIDSYIELKMTEVERFEMTPHPVEFDMYYSG

SEQ ID NO: 32273 - DNA, 1719 bp, Frankia alni
  CDS (198)..(1622): transl_table=11
caagtgctcgtcccacgacgcaagcttatccgccgcaccgacctgcaccaagggttcaccaagggtgataaagtgcgctcccgtaacataaacgaaacgacttcgtgatgtcgcgggtccgccggggcatgaccgaagacacatcgacatgccgtaacctacaggcttgataagcgtgacgggacgctggaggtcgaatgttcacaaaagccgaggacgtgctccgttatatccgcgacgaggacgtgcagttcatcgatgtaagattctgtgatctgcccggaatcatgcagcacttcactattccgacgcaggtcttcgccgagtcggtgttcaccgacgggttgatgttcgacggctcctcaattcgaggtttccaggccatccacgagtccgacatgctgttgctgccggacccgcagaccgccttcgtggatccgttccgtgaacacaagaccctcgcgatgacgttcttcatccacgacccgatcacgaaggagcagtactcccgggacccgcggaacatcgccaagaaggcggagacgtacctgcgtggtaccagcatcgccgacacggcctatttcggacccgaggcggagttctacatcttcgacgacgtccgctatgactacaacccctacgggtcgatgcaccacgtcgactcggtcgaggccgcctggaacacctcccgaaaggaagagggcggcaacctcggttacaagccccgcttcaagggcggctacttcccggtcccgccgaccgatcacttcacggacctccgctcggagatgacgcgggtcctctatgagaccggcatcaccgtcgagatgcagcaccatgaggtcggcaccgccgggcaggcggagatcgacatccgctacgacacgctgttgaagaccgcggacaacctgatgctctacaagtacgtcatccgcaacgtcgcccgcagccggggcaagaccgtcaccttcatgccgaagcccctgttcgaggacaacgggtccggcatgcacgtgcactccagcctgtggaaggacggcgagccgctgttctacagccccaacggctacggcggcctgtcggacaccgcgcgctactacatcggcggcctgctgcaccacgcaccggcgctgctggcgttcaccaacccgaccacgaactcctaccgccggctggtccccggctacgaggcaccggtcaacctcgtctactcggcgcgcaaccgctccgcgtgctgccgcatcccgctcggcggcgactcgcccaaggcgaagcgggtcgagttccgcgtcccggacccgagctgcaacccgtatctggccttcgccgcgatgctcatggccggcctggacggcatccgcaacaagattgacccgccggacccgatcgacaaggacctctacgagctcccgccggacgagctggccgcggtcccgcaggttcccggctcgctggagaaggtgctcgacgcgctcgaggcggacaacgatttcctccgcgagggcgacgtcttcaccaccgatctgatcgagacctggctggagtacaagcggctcaacgaggtcgacgccatccggctccggccgcacccgtacgagttcaccctctactacgacatctgaccgacagcgtcaccttcaccgccggccgggccgagaaacccggccgcgcggccggggcgccgcgcgcgccggccgagaatcggtggagattcccgtc

SEQ ID NO: 32274 - protein, 474 aa, Frankia alni
MFTKAEDVLRYIRDEDVQFIDVRFCDLPGIMQHFTIPTQVFAESVFTDGLMFDGSSIRGFQAIHESDMLLLPDPQTAFVDPFREHKTLAMTFFIHDPITKEQYSRDPRNIAKKAETYLRGTSIADTAYFGPEAEFYIFDDVRYDYNPYGSMHHVDSVEAAWNTSRKEEGGNLGYKPRFKGGYFPVPPTDHFTDLRSEMTRVLYETGITVEMQHHEVGTAGQAEIDIRYDTLLKTADNLMLYKYVIRNVARSRGKTVTFMPKPLFEDNGSGMHVHSSLWKDGEPLFYSPNGYGGLSDTARYYIGGLLHHAPALLAFTNPTTNSYRRLVPGYEAPVNLVYSARNRSACCRIPLGGDSPKAKRVEFRVPDPSCNPYLAFAAMLMAGLDGIRNKIDPPDPIDKDLYELPPDELAAVPQVPGSLEKVLDALEADNDFLREGDVFTTDLIETWLEYKRLNEVDAIRLRPHPYEFTLYYDI

SEQ ID NO: 32275 - DNA, 1410 bp, Streptomyces filamentosus
  CDS (1)..(1410): transl_table=11
atgttccagaacgccgacgaagtgcagaagtacgtcgcggacaacgacgtcaagttcatcgatgtccggttctgcgacctgcccggggtgatgcagcacttcacgatcccggcagcgaccttcgacccggccgaggaactggccttcgacggttcgtcgatccgcggcttccaggccatccacgagtccgacatggcgctgcgcgccgacctgtcgacggctcgggtggaccccttccgccgcgacaagacgatcaacatcaacttcttcatccacgacccgatcacgggcgagcagtacagccgtgacccgcgcaacatcgccaagaaggccgaggcctacctcgcctcgaccggcatcgcggacaccgcgtacttcggcccggaggccgagttctacgtcttcgacaacgtccgcttccagacgtcggcgaacgagagcttctaccacatcgactccgaggccggcgcctggaacaccggtgcggtggagaacaaccggggttacaaggtccgctacaagggcggctacttcccggccccgccggtggaccacttcgccgacctgcgggccgagatctccctggagctggacaagaacggcctccaggtcgagcgccagcaccacgaggtcggcacggccggccaggcggagatcaactacaagttcaacacgctgctcgccgcggccgacgacctgatgctcttcaagtacatcgtgaagaacgtcgcctggcgcaacggcaagaccgcgaccttcatgccgaagccgatcttcggcgacaacggctcgggcatgcacgtgcaccagtcgctgtggcagggcggctcgccgctcttctacgacgagcagggttacgccggcctctcggacaccgcccgctactacatcggcggcatcctgaagcacgccccgtcgctgctggcgttcaccaacccgacggtgaactcctaccaccgcctggtccccggcttcgaggccccggtcaacatggtgtactcgcagcgcaaccgctccgccgcgatgcgcatcccgatcaccggctcgaacccgaaggccaagcgcgtcgagttccgcgccccggacccgtcctccaacccgtacctcgcgttctccgcgctgctgatggcgggcctggacggcgtgaagaacaagatcgagccggccgagccgatcgacaaggacctctacgagctggctcccgaggagcacgccaacgtccagcaggtcccgacgtccctcccggccgtgctcgacgccctggaggcggacaacgagtacctccaggcgggcggcgtcttcacgtcggacctgatcgagacctggatcgactacaagcgcacgaacgagatcgccccgatccagctgcggccgcacccgcacgagttcgagctgtacttcgacatctaa

SEQ ID NO: 32276 - protein, 469 aa, Streptomyces filamentosus
MFQNADEVQKYVADNDVKFIDVRFCDLPGVMQHFTIPAATFDPAEELAFDGSSIRGFQAIHESDMALRADLSTARVDPFRRDKTININFFIHDPITGEQYSRDPRNIAKKAEAYLASTGIADTAYFGPEAEFYVFDNVRFQTSANESFYHIDSEAGAWNTGAVENNRGYKVRYKGGYFPAPPVDHFADLRAEISLELDKNGLQVERQHHEVGTAGQAEINYKFNTLLAAADDLMLFKYIVKNVAWRNGKTATFMPKPIFGDNGSGMHVHQSLWQGGSPLFYDEQGYAGLSDTARYYIGGILKHAPSLLAFTNPTVNSYHRLVPGFEAPVNMVYSQRNRSAAMRIPITGSNPKAKRVEFRAPDPSSNPYLAFSALLMAGLDGVKNKIEPAEPIDKDLYELAPEEHANVQQVPTSLPAVLDALEADNEYLQAGGVFTSDLIETWIDYKRTNEIAPIQLRPHPHEFELYFDI

SEQ ID NO: 32277 - DNA, 1410 bp, Streptomyces viridochromogenes
  CDS (1)..(1410): transl_table=11
atgttccagaacgccgacgaggccaagaagttgatcgcggacgaggacgtcaagttcatcgacgtccgcttctgcgacctgccgggcgtgatgcagcacttcacgatccccgcatcggccttcgacccggccgaggagctggccttcgacggctcctcgatccgcggcttccaggccatccacgagtccgacatggcggtgcgcgcggacctgtcgaccgcccgggtcgacccgttccgccgtgacaagacggtcaacatcaacttcttcatccacgacccgatcacgggcgagcagtactcccgtgacccgcgcaacgtggcgaagaaggccgaggcctacctcgcgtcgaccggtatcggggacaccggctacttcggccccgaggccgagttctacgtcttcgactccgtgcgcttggcgaacagcgcgaccgagtccttctaccacatcgactccgaggccggcgcctggaacaccggtgccctcgagaacaaccgtggttacaaggtccgctacaagggcggctacttcccggtcccgccggtcgaccacttcgccgacctgcgtgcccagatctccctggagctggaccgtgccggtctgcaggtggagcgccacgaccacgaggtgggcaccgccggccaggccgagatcaactacaagttcaacacgctgctcgccgcggccgacgacctccagctcttcaagtacatcgtgaagaacgtggcgtggcagaacggcaagaccgcgaccttcatgccgaagccgatcttcggtgacaacggctcgggcatgcacgtccaccagtccctgtggaccggcggccaggcgctcttctacgacgaggccggttacgcgggcctgtcggacaccgcccgctactacatgggcggcatcctcaagcacgccccgtcgctgctggccttcaccaacccgacggtgaactcgtaccaccgcctggtgccgggcttcgaggcgccggtcaacctggtctactcgcagcgcaaccgctccgcggccatgcgtatcccgatcacgggctcgaacccgaaggccaagcgcgtcgagttccgcgcgcccgactcctccggcaacccgtacctggccttctcggcgctgctgctcgcgggtctggacggcatcaagaacaagatcgagcccgccgagccgatcgacaaggacctctacgagctggcccccgaggagcacgcgggcgtcccgcaggtcccgacctcgctcccggccgtcctcgaccgtctggaggccgaccacgagttcctgctcgcgggcgacgtcttcacgccggacctgatcgagacgtggatcgactacaagcgcacgaacgagatcgccccgctgcagctccgcccgcacccgtacgagtacgagcagtactacgacgtgtga

SEQ ID NO: 32278 - protein, 469 aa, Streptomyces viridochromogenes
MFQNADEAKKLIADEDVKFIDVRFCDLPGVMQHFTIPASAFDPAEELAFDGSSIRGFQAIHESDMAVRADLSTARVDPFRRDKTVNINFFIHDPITGEQYSRDPRNVAKKAEAYLASTGIGDTGYFGPEAEFYVFDSVRLANSATESFYHIDSEAGAWNTGALENNRGYKVRYKGGYFPVPPVDHFADLRAQISLELDRAGLQVERHDHEVGTAGQAEINYKFNTLLAAADDLQLFKYIVKNVAWQNGKTATFMPKPIFGDNGSGMHVHQSLWTGGQALFYDEAGYAGLSDTARYYMGGILKHAPSLLAFTNPTVNSYHRLVPGFEAPVNLVYSQRNRSAAMRIPITGSNPKAKRVEFRAPDSSGNPYLAFSALLLAGLDGIKNKIEPAEPIDKDLYELAPEEHAGVPQVPTSLPAVLDRLEADHEFLLAGDVFTPDLIETWIDYKRTNEIAPLQLRPHPYEYEQYYDV

SEQ ID NO: 32279 - DNA, 1308 bp, Rhizobium leguminosarum bv
  CDS (1)..(1308)
atgacactggaccttgctgcttttgcgagagacaagagcatcaaatatttcatgatcagctataccgacctgttcggcggccaacgcgccaagctggtcccggcagaagccatcgccgacatgcagaaggacggcgccggctttgcaggctttgcaacgtggctcgatctgacgccggcccatcccgacttgtttgcggttcccgatgcttcctccgtcatccaattgccctggaagaaagacgtcgcatgggtcgccgccgactgcgtcatggacgatcggcctgtcgaacaggcgccgcgtgtcgtgctgaaaagactggtggctgaagctgcgaaggaagggctccgggtgaagaccggcgtggagcccgaattctttctcatctctgctgacggttcggtgatttcagaccagttcgataccgccgagaagccttgctacgaccagcaggccgtgatgcgtcggtatgatgtcatcgccgagatctgcgactatatgctggagctcggctggaagccctatcagaacgatcacgaggatgcgaacggccagttcgagatgaactgggaatatgacgatgtcctgaagaccgccgacaagcactccttcttcaaattcatggtcaagtcggtcgccgaaaagcacggccttcgcgctaccttcatgccgaagcccttcaagggcctgaccggaaacggttgccatgcgcacatctcggtctgggacgtcgatggcagggtaaacgccttcgcggacaaggaaatggcctttgggctctcggctcaggggaaaacctttctcggcggcatcatgaagcacgcccccgcgctggccgcgatcaccaatccgacggtcaattcctacaagcgcatcaacgcgccgcgcaccacctcgggtgccacctggtcgcccaacaccgtgacatggacgggcaacaaccgcactcacatggtgcgcgtgccggggcctgggcgcttcgagctgcgcctgccggacggcgcggtcaatccatacctcttgcaggcgatcatcatcgcagccggcctcgagggcatccgcagccaggcagaccccggccagcattacgatatcgatatgtatgctgaggggcacctggtgaaggacgcgccgcgcctgccactcaacctgctcgatgcactgcgcgcctttgatgccgacgaaggcttgaaggcggcaatcggggctgagttttcctccgcctatctcaagctcaagcacctggaatggaatgcctactgctcgcatttcacccagtgggaacgcgacagcacgctcgatatctga

SEQ ID NO: 32280 - protein, 435 aa, Rhizobium leguminosarum bv
MTLDLAAFARDKSIKYFMISYTDLFGGQRAKLVPAEAIADMQKDGAGFAGFATWLDLTPAHPDLFAVPDASSVIQLPWKKDVAWVAADCVMDDRPVEQAPRVVLKRLVAEAAKEGLRVKTGVEPEFFLISADGSVISDQFDTAEKPCYDQQAVMRRYDVIAEICDYMLELGWKPYQNDHEDANGQFEMNWEYDDVLKTADKHSFFKFMVKSVAEKHGLRATFMPKPFKGLTGNGCHAHISVWDVDGRVNAFADKEMAFGLSAQGKTFLGGIMKHAPALAAITNPTVNSYKRINAPRTTSGATWSPNTVTWTGNNRTHMVRVPGPGRFELRLPDGAVNPYLLQAIIIAAGLEGIRSQADPGQHYDIDMYAEGHLVKDAPRLPLNLLDALRAFDADEGLKAAIGAEFSSAYLKLKHLEWNAYCSHFTQWERDSTLDI

SEQ ID NO: 32281 - DNA, 1308 bp, Rhizobium meliloti
  CDS (1)..(1308): transl_table=11
gtgacactggatctctccacattcgcccgcgaaaagggcgtcaaatatttcatgatcagctacaccgatctcttcggcgggcagcgtgccaaactggttcccgcggaagcgatcgccgacatgcagaagggcggcgcaggcttcgcaggttttgccacctggttcgatctcacgcctgcgcatcccgatctcttcgctctcccggatgcgtccgcggtcatccagctcccctggaagaaggacgtcgcctgggtggcggcagactgcatcatggacgacgcgcccgtggaacaggcaccgcgcgtggtgctgaagaagctcgtcgccgaggcggcccaggaagggcttcgcgtcaagaccggcgtcgaaccggagttctttctgatctcgccggatggatcgaagatttccgacacgttcgatacggcggaaaagccttgctatgaccagcaggcgatcatgcgccgctacgacgtgatcgccgagatctgcgactacatgctcgaactcggatggaagccctaccagaacgaccatgaggatgcgaacggccagttcgagatgaactgggagtatgacgacgcgctccggaccgccgacaagcactccttcttcaagttcatggtgaagtcgatcgccgagaagcacgggctgcgcgcgaccttcatgccgaagccgttcaagggtctgacgggcaacggttgccattgccacatttcggtctgggatctggcaggcgaggtgaatgcctttgccgacaacaaggcggagttcggcctttcagccgagggacgccacttcctgggcggcatcatgaaacatgcaagcgcgctcgccgcggtcaccaatccgacggtcaactcctacaagcgcatcaacgcgccgcgcacgatctccggcgcgacctgggcgccgaattcggtgacctggaccggcaacaaccgcacccacatggtgcgcgttcccggccccggccgtttcgagctgcgcctgccggacggcgccgtcaatccctatctcctgcaggcgatcatcattgcggccggcctttcgggcgttcgctccaaagccgatcccggccgtcactacgacatcgacatgtacaaggacggccacaaggtaaccgatgcaccgaagcttccgctgaacctgctcgacgcattgcgggaatacaatcgggacgaggagttgcaggaggccttgggacgagagttctccgcggcctatctgaaactcaagcaaggcgagtggaacacctattgttcgcaattcaccgaatgggaacaccaaaccacgctcgacgtgtag

SEQ ID NO: 32282 - protein, 435 aa, Rhizobium meliloti
MTLDLSTFAREKGVKYFMISYTDLFGGQRAKLVPAEAIADMQKGGAGFAGFATWFDLTPAHPDLFALPDASAVIQLPWKKDVAWVAADCIMDDAPVEQAPRVVLKKLVAEAAQEGLRVKTGVEPEFFLISPDGSKISDTFDTAEKPCYDQQAIMRRYDVIAEICDYMLELGWKPYQNDHEDANGQFEMNWEYDDALRTADKHSFFKFMVKSIAEKHGLRATFMPKPFKGLTGNGCHCHISVWDLAGEVNAFADNKAEFGLSAEGRHFLGGIMKHASALAAVTNPTVNSYKRINAPRTISGATWAPNSVTWTGNNRTHMVRVPGPGRFELRLPDGAVNPYLLQAIIIAAGLSGVRSKADPGRHYDIDMYKDGHKVTDAPKLPLNLLDALREYNRDEELQEALGREFSAAYLKLKQGEWNTYCSQFTEWEHQTTLDV

SEQ ID NO: 32283 - DNA, 1335 bp, Bacillus cereus
  CDS (1)..(1335): transl_table=11
atggctaggtacacaaaagaagatattttccgtttggcgaaagaagagaatgtaaagtatatacgtttacaatttacggaccttttaggagtaattaagaacgtagaaattccagtgagccaattaacaaaagctcttgataacaaaatgatgtttgatggatcttctattgaaggtttcgtacgtattgaagaatctgatatgtacttatatccagacttagatacttgggtgattttcccttggacagctgaaaaaggtaaagtagctcgattgatctgtgatatttacaatgcagatggcactccatttgaaggggatccacgtaacaacttaaaacgtgtattaaaagaaatggaagctttaggattctcagatttcaatcttggaccagagccagaattcttcctattcaaagtagatgaaaaaggaaatccaacattagaattaaacgataacggtggatacttcgaccttgcgccgatggatctaggggaaaactgtcgtcgtgatatcgttcttgaacttgaagaaatgggctttgaaattgaagcgtctcaccatgaggttgctccagggcagcacgaaattgacttcaaatatgcaaatgcaattcgttcatgtgatgacattcaaacattcaaacttgttgtaaaaacaattgctcgtaaacacggtttacacgcaacatttatgccaaaaccattatacggtgtgaacggttcaggtatgcactgtaacttatcactattcaaaaatggtgagaacgtattctatgatcaaaacggtgacttacaattaagtgatgatgctcgtcacttcatcgcaggtattttaaaacacgcaccagcatttacagcggtggcaaacccaactgtaaactcttacaagcgtttagtacctggatacgaagctccttgttacgtagcatggtctgcacaaaaccgtagtccattagtacgtatccctgcatctcgtggtattagtacacgcgtagaagtacgtagtgttgacccagctgcaaacccatatttagtaatggctacattattagcagcaggtcttgatggaattaaaaacaaattaactccaccagctgcagtagatcgtaacatctacgtaatgacaaaagaagagcgcgaagaagcaggtatcgttgacttaccagcaacattagcgcaagctttagttacattacaatctaacgaagtaattagtaacgcattaggagatcacttacttgagcacttcatcgaagcgaaagaatttgagtgggatatcttccgtacgcaagttcaccaatgggaacgcgatcaatatatgtctctttactaa

SEQ ID NO: 32284 - protein, 444 aa, Bacillus cereus
MARYTKEDIFRLAKEENVKYIRLQFTDLLGVIKNVEIPVSQLTKALDNKMMFDGSSIEGFVRIEESDMYLYPDLDTWVIFPWTAEKGKVARLICDIYNADGTPFEGDPRNNLKRVLKEMEALGFSDFNLGPEPEFFLFKVDEKGNPTLELNDNGGYFDLAPMDLGENCRRDIVLELEEMGFEIEASHHEVAPGQHEIDFKYANAIRSCDDIQTFKLVVKTIARKHGLHATFMPKPLYGVNGSGMHCNLSLFKNGENVFYDQNGDLQLSDDARHFIAGILKHAPAFTAVANPTVNSYKRLVPGYEAPCYVAWSAQNRSPLVRIPASRGISTRVEVRSVDPAANPYLVMATLLAAGLDGIKNKLTPPAAVDRNIYVMTKEEREEAGIVDLPATLAQALVTLQSNEVISNALGDHLLEHFIEAKEFEWDIFRTQVHQWERDQYMSLY

SEQ ID NO: 32285 - DNA, 1335 bp, Bacillus subtilis
  CDS (1)..(1335): transl_table=11
atggcaaagtacactagagaagatatcgaaaaattagtaaaagaagaaaacgtgaagtatatccgccttcaatttactgacattcttggaacaatcaagaatgttgagattcctgtaagccagcttggaaaagcgcttgataataaagtcatgtttgacggttcttctattgagggattcgttcgtatcgaagagtcagacatgtacctgtatccagatctaaatacatttgttatcttcccatggacagctgaaaaaggtaaagtagcacgtttcatctgtgatatttacaatccggatggcacaccttttgaaggtgacccgcgaaacaacttaaaacggattctgaaagaaatggaagacctcggcttcagtgattttaaccttgggcctgagcctgaattcttcttattcaaattggacgaaaaaggcgagccgacgcttgaactaaacgacaaaggcggatatttcgacttagctccaactgatttaggagaaaactgccgccgcgatatcgtacttgagcttgaagagatgggctttgaaatcgaagcgtctcaccacgaagtagcacctggtcagcacgaaatcgactttaaatatgctggagcagtccgctcttgtgatgacatccaaacatttaaactagttgtcaaaacaattgcccgtaaacacggcctgcatgcgacatttatgccaaaaccattgttcggtgtaaacggttcaggtatgcactgcaatctatcactcttcaaaaatggtgttaacgcattctttgacgaaaacgcagatcttcagttaagtgaaacagcgaagcacttcattgcaggtatcgtgaagcacgcaacaagctttacagcagtaacaaacccgacagtaaactcttacaaacgtcttgttcctggctatgaagcaccttgttatgtagcatggagcgcgcaaaacagaagcccgcttatccgtatcccggcttctcgcggcatcagcacacgtgttgaagtacgcagtgtagacccagctgcaaacccataccttgcacttagcgtattgcttgctgcaggattagacggaatcaaaaacaaactggaagcgccggctccaatcgaccgcaacatctatgtgatgagcaaagaagagcgcatggaaaacggaatcgttgaccttccagcaacacttgcggaagcactagaagaattcaaatcaaacgaagtcatggtcaaagcgctgggcgagcacctattcgaacacttcatcgaagcaaaagaaatcgaatgggatatgttccgcacgcaagtacatccttgggaacgcgaacagtatatgtctcagtattaa

SEQ ID NO: 32286 - protein, 444 aa, Bacillus subtilis
MAKYTREDIEKLVKEENVKYIRLQFTDILGTIKNVEIPVSQLGKALDNKVMFDGSSIEGFVRIEESDMYLYPDLNTFVIFPWTAEKGKVARFICDIYNPDGTPFEGDPRNNLKRILKEMEDLGFSDFNLGPEPEFFLFKLDEKGEPTLELNDKGGYFDLAPTDLGENCRRDIVLELEEMGFEIEASHHEVAPGQHEIDFKYAGAVRSCDDIQTFKLVVKTIARKHGLHATFMPKPLFGVNGSGMHCNLSLFKNGVNAFFDENADLQLSETAKHFIAGIVKHATSFTAVTNPTVNSYKRLVPGYEAPCYVAWSAQNRSPLIRIPASRGISTRVEVRSVDPAANPYLALSVLLAAGLDGIKNKLEAPAPIDRNIYVMSKEERMENGIVDLPATLAEALEEFKSNEVMVKALGEHLFEHFIEAKEIEWDMFRTQVHPWEREQYMSQY

SEQ ID NO: 32287 - DNA, 1320 bp, Pyrococcus abyssi
  CDS (1)..(1320): transl_table=11
atgaacgttagtgaggttaaaagtggagcaacaaggagcccaaaattcgtccagcttatctttgtcgacataaacggaatgcccaagggaatggagatcccggcgtctaggctacaggaggctatagaagatggcatctcatttgatggttcctcagttcctgggttccagggaattgaggacagtgatttaatatttaaagcggatccagacacgtacgttgaggttccctgggacaacgtggctagggtttacggttacatatacaaagacggaaagccctacggtgctgatcccaggggagttctcaaaagggttatcgaaaagctggctgagatgggtattaaggcgtacataggtccagagccagagttttacctgttcaaaaagaacggaagctgggagcttgaaattcccgacgttggagggtactttgacatactaacgctcgacaaggccaaggatattaaaagagaaatagcggagtacatgccttcttttggccttgttccggaggtcctgcaccacgaagttggaaaagctcagcatgaaatagacttccgctacgatgaggccttgaaaactgctgacaatataataagcttcaagtacatagttaaagctgtagctgaagtgcatgggctctacgctacgttcatgccgaagccgatctatggaatgcctggaaatgggatgcacctccatataagcctttggaaggagggcgagaacattttcaagggtgaagaagggttaagcgaaacggccttacacttcataggtggcctcttaaagcatgcaaaagccttgacggcgataaccaatccgacggttaacagctacaagaggttggttccaggatacgaggctccagtttacataagctggggttacaagaacaggagcgccctcataagggttccagcattctggggtaacggggctaggatagagtatcgctgtccagatccgagtgcaaatccatatttcgccttcgcagcgatattaatggctggactggacggaataaagcacaaggtagagccattcgcctacgttgaggagaacgtttatgagatggatgaggggaaaaggaaagaacttggcatagacactttaccaggaagcttaggtgaggcgttggatgagctggagaaggataaggtcgttagggaagcccttggagaggcttacaagaacttcatagagtacaagagaaaggaatgggagagctatttggagtacctagaggcaaagcaccttccaaaggacacgaagagggtaacagagtgggagcttgagaggtacttcttcatctaa

SEQ ID NO: 32288 - protein, 439 aa, Pyrococcus abyssi
MNVSEVKSGATRSPKFVQLIFVDINGMPKGMEIPASRLQEAIEDGISFDGSSVPGFQGIEDSDLIFKADPDTYVEVPWDNVARVYGYIYKDGKPYGADPRGVLKRVIEKLAEMGIKAYIGPEPEFYLFKKNGSWELEIPDVGGYFDILTLDKAKDIKREIAEYMPSFGLVPEVLHHEVGKAQHEIDFRYDEALKTADNIISFKYIVKAVAEVHGLYATFMPKPIYGMPGNGMHLHISLWKEGENIFKGEEGLSETALHFIGGLLKHAKALTAITNPTVNSYKRLVPGYEAPVYISWGYKNRSALIRVPAFWGNGARIEYRCPDPSANPYFAFAAILMAGLDGIKHKVEPFAYVEENVYEMDEGKRKELGIDTLPGSLGEALDELEKDKVVREALGEAYKNFIEYKRKEWESYLEYLEAKHLPKDTKRVTEWELERYFFI

SEQ ID NO: 32289 - DNA, 1332 bp, Pyrococcus horikoshii
  CDS (1)..(1332): transl_table=11
gtggtgagaaaagtgaacataattaaaggtaatgaggggcaaggaaaaaggataaaattcgtccagctgatcttcgtggatataaatggaatgcccaagggaatggaggttcccattactaggcttgaagaagctatagaggagggaatagctttcgatggctcttcagtcccaggatttcagggaatagaggatagtgaccttgtattcaaggcagacccaagcacttacgttgaagttccctgggataatgttgcgagggtttacggttacatatacaaggatgggaaaccatatgaggccgacccgaggggagttcttaggaggactttagaaaggcttgaaaaactcgggattaaggtttacatagggcctgagccggagttttacctcttcaagaaaaatggaagctgggaacttgaaatacccgatgtcggaggatacttcgatatactgaccttggataaagccaaggatataaagagggagatagccgaatatatgccgtactttggccttaccccagaggttctccatcacgaagttgggaaagctcagcatgagatagacttccgccatgacgaagccctaaaaacggccgacaacatagtgagcttcaagtacatagtcaaggccgttgccgaaatgcatggcttatatgcaaccttcatgcccaaaccgatctatggaatgccaggaaatggaatgcaccttcacataagcctatggaaggatggggagaacattttcaagggtgaagagggccttagtgaaacagcactttacttcataggaggcctactaaagcatgcaaaagctttagccgcagtaacaaatccgactgttaacagctacaagaggctcgttccaggttatgaagctccagtgtacataagctggggctataagaacaggagcgccctgataagagttccagcgttctgggggaatggggccaggatagagtatcgctgtccagatcctagtgcaaactcatacttagcctttgccgcgatcttaatggccggattggatggaataaagcataagatcgagccctttgcttacgttgaggagaacgtttacgaaatggatgagaagaggagggaggagatcggtatagatatgctcccagaaaatttgggtgaagctcttgatgaacttgagagggataaggtagtcaaggaagcccttggaggggcctacagaaacttcgtagggtacaagagaaaggagtgggaagaatatttagattaccttgaggccaagaatttgccaaaggatacgaaaaatgttacagagtgggagcttgagaggtactttttcatctga

SEQ ID NO: 32290 - protein, 443 aa, Pyrococcus horikoshii
MVRKVNIIKGNEGQGKRIKFVQLIFVDINGMPKGMEVPITRLEEAIEEGIAFDGSSVPGFQGIEDSDLVFKADPSTYVEVPWDNVARVYGYIYKDGKPYEADPRGVLRRTLERLEKLGIKVYIGPEPEFYLFKKNGSWELEIPDVGGYFDILTLDKAKDIKREIAEYMPYFGLTPEVLHHEVGKAQHEIDFRHDEALKTADNIVSFKYIVKAVAEMHGLYATFMPKPIYGMPGNGMHLHISLWKDGENIFKGEEGLSETALYFIGGLLKHAKALAAVTNPTVNSYKRLVPGYEAPVYISWGYKNRSALIRVPAFWGNGARIEYRCPDPSANSYLAFAAILMAGLDGIKHKIEPFAYVEENVYEMDEKRREEIGIDMLPENLGEALDELERDKVVKEALGGAYRNFVGYKRKEWEEYLDYLEAKNLPKDTKNVTEWELERYFFI

SEQ ID NO: 32291 - DNA, 1341 bp, Staphylococcus aureus
  CDS (1)..(1341): transl_table=11
atgccaaaacgtactttcactaaagacgacattcgtaaatttgcagaagaggaaaatgtaagatatttaagattacaattcactgatattttaggaacaattaaaaatgttgaagtgcctgtaagccaattagaaaaagtacttgataacgaaatgatgtttgacggttcttctatcgaaggtttcgtacgtatcgaagaatcagatatgtacttacatccagatttagatacttgggtaatcttcccatggactgctggacaaggtaaagttgcacgtttaatttgtgatgtatataaaacagatggaacaccatttgaaggggatcctcgtgcaaacttaaaacgtgtattaaaagaaatggaagatttaggcttcacagactttaacctagggcctgaaccagaattcttcttgtttaagttggatgaaaaaggggaaccaactttagaacttaatgatgatggtggatatttcgatttagcacctacagatttaggtgaaaactgtcgtcgtgatattgttttagaattagaggatatgggcttcgatattgaagctagtcaccatgaagttgcccctggtcaacatgaaattgactttaaatatgcagatgctgttacagcatgtgataatatccaaacatttaaattggttgttaaaacaatcgcacgtaaacataatttacacgcaacatttatgcctaaaccattattcggtgtgaatggtagcggtatgcactttaacgtttcattattcaaaggtaaagaaaatgcattctttgatccaaatactgaaatgggcttaacggaaactgcatatcaatttacagcaggtgtgcttaaaaatgcacgcggatttactgctgtatgtaacccgttagtaaactcatataaacgtttagtacctggttatgaagcaccatgttatattgcatggagtggtaaaaaccgttcaccattaatccgtgtaccatcttcaagaggattatctactcgtatcgaagtacgttcagtagatccagctgcaaacccatacatggcgttagctgcaatcttagaagctggactagatggtattaaaaataaattaaaagttccagaaccagttaaccaaaatatttacgaaatgaaccgtgaagaacgtgaagcagtaggcattcaagacttaccttcaacactttatactgcattaaaagcaatgcgtgaaaatgaagttattaaaaaagctttaggaaatcatatctataatcaatttattaattcaaaatcaattgaatgggattactacagaactcaagtctctgaatgggaaagagatcagtacatgaagcaatattaa

SEQ ID NO: 32292 - protein, 446 aa, Staphylococcus aureus
MPKRTFTKDDIRKFAEEENVRYLRLQFTDILGTIKNVEVPVSQLEKVLDNEMMFDGSSIEGFVRIEESDMYLHPDLDTWVIFPWTAGQGKVARLICDVYKTDGTPFEGDPRANLKRVLKEMEDLGFTDFNLGPEPEFFLFKLDEKGEPTLELNDDGGYFDLAPTDLGENCRRDIVLELEDMGFDIEASHHEVAPGQHEIDFKYADAVTACDNIQTFKLVVKTIARKHNLHATFMPKPLFGVNGSGMHFNVSLFKGKENAFFDPNTEMGLTETAYQFTAGVLKNARGFTAVCNPLVNSYKRLVPGYEAPCYIAWSGKNRSPLIRVPSSRGLSTRIEVRSVDPAANPYMALAAILEAGLDGIKNKLKVPEPVNQNIYEMNREEREAVGIQDLPSTLYTALKAMRENEVIKKALGNHIYNQFINSKSIEWDYYRTQVSEWERDQYMKQY

SEQ ID NO: 32293 - DNA, 1410 bp, Streptomyces coelicolor
  CDS (1)..(1410): transl_table=11
atgttccagaacgccgacgacgtcaagaagttcatcgcggacgaggacgtcaagttcgtcgatgtccggttctgcgacctgccgggcgtcatgcagcacttcacgctgcccgccacggcgttcgaccccgacgccgagcaggccttcgacgggtcctcgatccgcggcttccaggccatccacgagtcggacatgtccctgcgccccgacctgtccaccgcgcgcgtcgacccgttccgccgggacaagaccctcaacatcaacttcttcatccacgacccgatcacgggcgagcagtactcccgcgacccgcggaacgtggcgaagaaggccgaggcgtacctggcctccacgggcatcgccgacacggcgttcttcggtcccgaggccgagttctacgtcttcgactccgtccgcttcgccacccgcgagaacgagtccttctaccacatcgactccgaggccggcgcctggaacaccggtgcgctggaggacaaccgcggttacaaggtccgctacaagggcggctacttcccggtcccgccggtcgaccacttcgccgacctgcgcgccgagatctccctggagctggagcggtccggcctccaggtcgagcgccagcaccacgaggtgggcaccgcgggccaggcggagatcaactacaagttcaacactctgctcgcggccgcggacgacctccagctcttcaagtacatcgtgaagaacgtggcctggaagaacggcaagacggcgaccttcatgccgaagccgatcttcggtgacaacggctcgggcatgcacgtccaccagtcgctgtggtcgggcggcgagccgctcttctacgacgagcagggctacgccggcctgtcggacaccgcccgctactacatcggcggcatcctcaagcacgccccgtcgctgctggccttcaccaacccgacggtgaactcgtaccaccgcctggtgccgggcttcgaggcgccggtgaacctggtgtactcgcagcgcaaccgctcggccgcgatgcggatcccgatcacgggctcgaacccgaaggccaagcgcgtcgagttccgcgccccggacgcctccggcaacccgtacctggcgttctcggcgctgctgctggcgggcctggacggcatcaagaacaagatcgagccggccgagccgatcgacaaggacctctacgagctggctcccgaggagcacgcgaacgtggcgcaggtcccgacctcgctgggcgcggtcctcgaccgcctggaggccgaccacgagttcctgctccagggcgacgtgttcacgccggacctgatcgagacgtggatcgacttcaagcgcgccaacgagatcgcgccgctgcagctgcgtccgcacccgcacgagttcgagatgtacttcgacgtgtga

SEQ ID NO: 32294 - protein, 469 aa, Streptomyces coelicolor
MFQNADDVKKFIADEDVKFVDVRFCDLPGVMQHFTLPATAFDPDAEQAFDGSSIRGFQAIHESDMSLRPDLSTARVDPFRRDKTLNINFFIHDPITGEQYSRDPRNVAKKAEAYLASTGIADTAFFGPEAEFYVFDSVRFATRENESFYHIDSEAGAWNTGALEDNRGYKVRYKGGYFPVPPVDHFADLRAEISLELERSGLQVERQHHEVGTAGQAEINYKFNTLLAAADDLQLFKYIVKNVAWKNGKTATFMPKPIFGDNGSGMHVHQSLWSGGEPLFYDEQGYAGLSDTARYYIGGILKHAPSLLAFTNPTVNSYHRLVPGFEAPVNLVYSQRNRSAAMRIPITGSNPKAKRVEFRAPDASGNPYLAFSALLLAGLDGIKNKIEPAEPIDKDLYELAPEEHANVAQVPTSLGAVLDRLEADHEFLLQGDVFTPDLIETWIDFKRANEIAPLQLRPHPHEFEMYFDV

SEQ ID NO: 32295 - DNA, 1416 bp, Sulfolobus solfataricus
  CDS (1)..(1416): transl_table=11
atgccaagtacagcagaagatgtactcaaattcctaaaggaaaataacataaaatgggtagatctacaattcacagatgttcccggtaggctgcatcatattacaatacctgctgacgagtttgatttagaatccttaaagacgggtttcggaaaattagacggaagcagtataagaggatttacgagcatttatgaaagtgatatggtactcttaccagtaccagagactatgacactaattccttggtctccaggagtagctagagtcttatgcaaagttttttggggagggggaaagggaagatttgaaagagatcctagattcatagccgaggaagccgagaaataccagacagaacaaggctacacttcctactatggtccagaattggaattcttcatgtttgataaggtaaaattagacgtaagtgccccacagtctggaactgggtacaaaatttatgcaagggaggctccgtggagcgatagtggaacctttgtaataagatttaaagagggatattaccctgcaccaccagttgatcagctaatggatgtaagagtagagatagtcgatactttagttaagtactttggatacaccatagaggctacacatcatgaagttgcaactgcaggtcaaggggaaatagatttcagattctctactcttgtagatactgcagacaaggtccaaactttgaagtatgtagctaaaaatattgccgctaaacacggattagtagtaactttcatgccaaaacctatttatggtgataatggaactggtatgcacacgcacctcagtttatggactaaagatggaaagaagaatttaatgtatgatcctaatgacgaatatgcagagataagccaatttggaagatatgtaataggaggtcttttaacacacgctagggctttatctgcaatagtctcacctactgtaaacagttatagaaggttaataccagggtttgaagctccagtttacattgcgtggagtaagggaaacagaagtgccgtaattagagtgccagcatactatagaggaatggaaaaggcaaaaagaatagagtatagacctccagatccatccactaatccgtatctagcatttgctgctttactaatggctgcattagatggtgtaaataagaaaatagatccaggagatccagtggatgagaatatataccatctaactccagagaagagaagacaattgggaataaaagaactacctagatcattaaatgaagctttagatgagttagaaagtgataaagagttcttgaagccagtatttaattcgtcaatattagatacttacatagatttaaagagagatgaggcaagaagcttgcaaggttatccacacccaatggagttatactattatttagattcctaa

SEQ ID NO: 32296 - protein, 471 aa, Sulfolobus solfataricus
MPSTAEDVLKFLKENNIKWVDLQFTDVPGRLHHITIPADEFDLESLKTGFGKLDGSSIRGFTSIYESDMVLLPVPETMTLIPWSPGVARVLCKVFWGGGKGRFERDPRFIAEEAEKYQTEQGYTSYYGPELEFFMFDKVKLDVSAPQSGTGYKIYAREAPWSDSGTFVIRFKEGYYPAPPVDQLMDVRVEIVDTLVKYFGYTIEATHHEVATAGQGEIDFRFSTLVDTADKVQTLKYVAKNIAAKHGLVVTFMPKPIYGDNGTGMHTHLSLWTKDGKKNLMYDPNDEYAEISQFGRYVIGGLLTHARALSAIVSPTVNSYRRLIPGFEAPVYIAWSKGNRSAVIRVPAYYRGMEKAKRIEYRPPDPSTNPYLAFAALLMAALDGVNKKIDPGDPVDENIYHLTPEKRRQLGIKELPRSLNEALDELESDKEFLKPVFNSSILDTYIDLKRDEARSLQGYPHPMELYYYLDS

SEQ ID NO: 32297 - DNA, 1419 bp, Escherichia coli
  CDS (1)..(1419): transl_table=11
atggaaaccaatatcgttgaagtagagaactttgttcagcagtcagaagagaggcggggtagcgcctttacgcaggaagtgaaacgctacctggagcgctacccgaatacgcaatatgttgatgttttacttaccgatttaaatggttgcttccgtggaaagcgtattcctgtttcaagcctgaagaagctcgagaaagggtgttatttcccggcctcggtatttgcaatggatattctgggcaacgtagtagaagaagcaggtctgggtcaggaaatgggcgagccggatcgtacctgtgttcctgttctcggttccttaactccttctgccgccgatccagagtttatcggtcagatgctcctgaccatggtcgatgaagatggcgctccctttgacgttgagccgcggaacgttcttaaccgcctgtggcagcagctgcgccagcgcggattgttcccggtcgtagcggtagagctggagttctatttactggatcgccagcgcgacgctgaagggtatctgcaaccgccctgcgcgcctggcaccgatgaccgcaatacacaaagccaggtttactccgttgataacctcaaccacttcgccgacgtgctcaatgatattgatgaactggcgcagttacagctgattccggcagatggcgcggtcgctgaggcctcgccgggtcagtttgaaatcaacctttaccatactgataacgtgctggaagcctgcgatgatgcgctggcactaaaacgcctggtgcgtctgatggcagaaaagcataagatgcacgccacttttatggcgaagccgtatgaagagcacgcgggcagcggaatgcatatccatatcagtatgcaaaataatcgtggcgagaacgtgctttctgacgcggaaggcgaagattcgccgctgctgaaaaagatgctcgccgggatgattgacctgatgccgtcgtcgatggcgttgctggcaccaaacgtgaactcgtatcgccgcttccagccgggaatgtatgtgccgacgcaggcgtcgtggggccataacaaccgcaccgtcgccctgcgtattccgtgcggcgaccgtcataatcaccgcgtggaatatcgcgtggcgggtgccgatgccaacccatatctggtgatggcagcgatttttgccggtattttgcatggccttgataacgagctgccgttgcaggaagaagtcgaaggcaacgggctggaacaggaaggcttaccctttccgattcgccagagcgatgccctgggtgagtttatcgagaatgatcacctgcgccgctatttaggcgaacgcttctgccatgtctatcacgcctgtaaaaatgatgagctgttgcagtttgagcgcctcatcacagaaacagaaattgagtggatgttgaaaaacgcgtaa

SEQ ID NO: 32298 - protein, 472 aa, Escherichia coli
METNIVEVENFVQQSEERRGSAFTQEVKRYLERYPNTQYVDVLLTDLNGCFRGKRIPVSSLKKLEKGCYFPASVFAMDILGNVVEEAGLGQEMGEPDRTCVPVLGSLTPSAADPEFIGQMLLTMVDEDGAPFDVEPRNVLNRLWQQLRQRGLFPVVAVELEFYLLDRQRDAEGYLQPPCAPGTDDRNTQSQVYSVDNLNHFADVLNDIDELAQLQLIPADGAVAEASPGQFEINLYHTDNVLEACDDALALKRLVRLMAEKHKMHATFMAKPYEEHAGSGMHIHISMQNNRGENVLSDAEGEDSPLLKKMLAGMIDLMPSSMALLAPNVNSYRRFQPGMYVPTQASWGHNNRTVALRIPCGDRHNHRVEYRVAGADANPYLVMAAIFAGILHGLDNELPLQEEVEGNGLEQEGLPFPIRQSDALGEFIENDHLRRYLGERFCHVYHACKNDELLQFERLITETEIEWMLKNA

SEQ ID NO: 32299 - DNA, 2478 bp, Oryza sativa
  CDS (1)..(2478)
atggagatggagtccaagtacgcggcgctgcggcgcgcggcggaggaggcggcggcggtggacgcgcacgcgcacaacctcgtcgccgacggctccgcgttccccttcctccgctgcttctccgaggccgacgccgccgacgccctcgccctcgctccccacaccctctccttcaagagaagcctgagggacatcgctgcattgtacaactgtgaagcttcacttgagaaggtggaggagttcagaagggctgaagggttgtcgtctataagctcaaagtgcttcaaggctgccaacttatctgcaattcttatagatgatggcatagactttgacaagatgcttgaactggaggcacacaaggcgtttgctcctacagttggcagaattctgaggattgaaaagctggcagaaacaattattaatgatgaatcattcagcgcatcaagctggacacttgactcttttactgaaatttttgtcactaagctgaaatcatatcctccccatatagctgcatatagaagtggcttagagattgatccaaatattagcaagacagatgcagaggatggactacgtaaggagttatcaggtcagaggcctcttcggattacaaataagaacctgattgactatctatttacttgcagtcttgaaattgctgtatcatatcacctgccaatgcagattcacacaggatttggagataaggacctggacttgcgaaagtgcaaccctctccatctgcgtgctgttcttgaggacacaagattctctaagtgccaaattgttcttttacatgcctcttatccattttcaaaggaagcatcatatctagcatcagtgtactcccaggtataccttgattttggcttggcaattccaaaacttagtgttcaaggaatgacatcatcaattaaagagctccttgagctagctcccataaagaaggtcatgttcagcacagatggttatgcttttccagagacatattacctagctgcatgtgaagatggtgaccttagcattcaagaagctattgaagcagttgaggacatatttagacgaaatgcattgtatctatacaagttgaatgttgccaacgggtcagtcggtcagataacagcaatagctgacaacggcataccattatctgaacaagatgtgctctttgttcgagtcgtctggattgatacttcaggtcaacataggtgccgcgttgtgccagccggaagattttatgaaattgctaggaaaaagggtattggtctgacttttgcatcgatgggaatgacttcatttactgatggcccagcagatggaacaaaccttactggtgtaggagagatcaggcttatgccggatatgtcaacactattgaggcttccatggtcaagacgcgaagaaatggtaatggctgaaatgcatataaggcctggggaagcctgggaatactgtcccagaaataccttgagaaaagtcacaaaagttctgctagatgagtttaatgtgacaatgatggcaggttttgagaatgaatttttcctacgtaaaaaagtagtaagtggtgaaaaggagctgtgggtcccatttgacaataccccctactgctcaactacagcattcgatggtgcatcatctgtgttgcaagaagtatatacttctcttaaagcggcggaaattgtggttgagcagctgcatgctgaatctggaaaagggcagtttgagatagccttgaagtatgtgttgtgcactcttgctgctgacaaactgatatatgcccgtgagattattaaatcagttgctcgaaagcatgggctacttgcaacttttcttccaaaacctgacttgaatgatattggatccggttctcatgtgcatctgagtttatgggaattcgatcagaatgtgttcatgggatcaagtgaatataattactatggaatgtcaagaatcggagaaagcttccttgctggagtatatctccatcttccatcaatcttggcattcactgctcctcacccaaacagctacaaccgaattcagccaaacacatggagtggtgcatatcagtgctgggggaaggagaacagggaggctccactgagaactgcatgcccacctgggatacctcttgatctcgtcagcaacttcgaaattaaatccttcgatgcgtgcgcaaacccgcacttgggccttgctgctatagttgctgctgggattgatggactcaggagaagccttacgttgcctgaaccaactgaatcaaaccctgcaggttatgcctccaactccaagctcaaaaggatgccgaaggacttgatggaatctgtcgaagcactagctgcagacaaaatcatgcatgaattgatcggcgataaacttgtcactgccgttattgctgtacgaaaggctgagatcgatcactacgagaagaaccctgcagcattcgccgatctcattcaccgttactag

SEQ ID NO: 32300 - protein, 825 aa, Oryza sativa
MEMESKYAALRRAAEEAAAVDAHAHNLVADGSAFPFLRCFSEADAADALALAPHTLSFKRSLRDIAALYNCEASLEKVEEFRRAEGLSSISSKCFKAANLSAILIDDGIDFDKMLELEAHKAFAPTVGRILRIEKLAETIINDESFSASSWTLDSFTEIFVTKLKSYPPHIAAYRSGLEIDPNISKTDAEDGLRKELSGQRPLRITNKNLIDYLFTCSLEIAVSYHLPMQIHTGFGDKDLDLRKCNPLHLRAVLEDTRFSKCQIVLLHASYPFSKEASYLASVYSQVYLDFGLAIPKLSVQGMTSSIKELLELAPIKKVMFSTDGYAFPETYYLAACEDGDLSIQEAIEAVEDIFRRNALYLYKLNVANGSVGQITAIADNGIPLSEQDVLFVRVVWIDTSGQHRCRVVPAGRFYEIARKKGIGLTFASMGMTSFTDGPADGTNLTGVGEIRLMPDMSTLLRLPWSRREEMVMAEMHIRPGEAWEYCPRNTLRKVTKVLLDEFNVTMMAGFENEFFLRKKVVSGEKELWVPFDNTPYCSTTAFDGASSVLQEVYTSLKAAEIVVEQLHAESGKGQFEIALKYVLCTLAADKLIYAREIIKSVARKHGLLATFLPKPDLNDIGSGSHVHLSLWEFDQNVFMGSSEYNYYGMSRIGESFLAGVYLHLPSILAFTAPHPNSYNRIQPNTWSGAYQCWGKENREAPLRTACPPGIPLDLVSNFEIKSFDACANPHLGLAAIVAAGIDGLRRSLTLPEPTESNPAGYASNSKLKRMPKDLMESVEALAADKIMHELIGDKLVTAVIAVRKAEIDHYEKNPAAFADLIHRY

SEQ ID NO: 32301 - DNA, 1836 bp, Oryza sativa
  CDS (1)..(1836)
atgcagattcacacaggatttggagataaggacctggacttgcgaaagtgcaaccctctccatctgcgtgctgttcttgaggacacaagattctctaagtgccaaattgttcttttacatgcctcttatccattttcaaaggaagcatcatatctagcatcagtgtactcccaggtataccttgattttggcttggcaattccaaaacttagtgttcaaggaatgacatcatcaattaaagagctccttgagctagctcccataaagaaggtcatgttcagcacagatggttatgcttttccagagacatattacctaggtgcaaggagggcacgtgatgttgtttatcgtgtactctcagctgcatgtgaagatggtgaccttagcattcaagaagctattgaagcagttgaggacatatttagacgaaatgcattgtatctatacaagttgaatgttgccaacgggtcagtcggtcagataacagcaatagctgacaacggcataccattatctgaacaagatgtgctctttgttcgagtcgtctggattgatacttcaggtcaacataggtgccgcgttgtgccagccggaagattttatgaaattgctaggaaaaagggtattggtctgacttttgcatcgatgggaatgacttcatttactgatggcccagcagatggaacaaaccttactggtgtaggagagatcaggcttatgccggatatgtcaacactattgaggcttccatggtcaagacgcgaagaaatggtaatggctgaaatgcatataaggcctggggaagcctgggaatactgtcccagaaataccttgagaaaagtcacaaaagttctgctagatgagtttaatgtgacaatgatggcaggttttgagaatgaatttttcctacgtaaaaaagtagtaagtggtgaaaaggagctgtgggtcccatttgacaataccccctactgctcaactacagcattcgatggtgcatcatctgtgttgcaagaagtatatacttctcttaaagcggcggaaattgtggttgagcagctgcatgctgaatctggaaaagggcagtttgagatagccttgaagtatgtgttgtgcactcttgctgctgacaaactgatatatgcccgtgagattattaaatcagttgctcgaaagcatgggctacttgcaacttttcttccaaaacctgacttgaatgatattggatccggttctcatgtgcatctgagtttatgggaattcgatcagaatgtgttcatgggatcaagtgaatataattactatggaatgtcaagaatcggagaaagcttccttgctggagtatatctccatcttccatcaatcttggcattcactgctcctcacccaaacagctacaaccgaattcagccaaacacatggagtggtgcatatcagtgctgggggaaggagaacagggaggctccactgagaactgcatgcccacctgggatacctcttgatctcgtcagcaacttcgaaattaaatccttcgatgcgtgcgcaaacccgcacttgggccttgctgctatagttgctgctgggattgatggactcaggagaagccttacgttgcctgaaccaactgaatcaaaccctgcaggttatgcctccaactccaagctcaaaaggatgccgaaggacttgatggaatctgtcgaagcactagctgcagacaaaatcatgcatgaattgatcggcgataaacttgtcactgccgttattgctgtacgaaaggctgagatcgatcactacgagaagaaccctgcagcattcgccgatctcattcaccgttactag

SEQ ID NO: 32302 - protein, 611 aa, Oryza sativa
MQIHTGFGDKDLDLRKCNPLHLRAVLEDTRFSKCQIVLLHASYPFSKEASYLASVYSQVYLDFGLAIPKLSVQGMTSSIKELLELAPIKKVMFSTDGYAFPETYYLGARRARDVVYRVLSAACEDGDLSIQEAIEAVEDIFRRNALYLYKLNVANGSVGQITAIADNGIPLSEQDVLFVRVVWIDTSGQHRCRVVPAGRFYEIARKKGIGLTFASMGMTSFTDGPADGTNLTGVGEIRLMPDMSTLLRLPWSRREEMVMAEMHIRPGEAWEYCPRNTLRKVTKVLLDEFNVTMMAGFENEFFLRKKVVSGEKELWVPFDNTPYCSTTAFDGASSVLQEVYTSLKAAEIVVEQLHAESGKGQFEIALKYVLCTLAADKLIYAREIIKSVARKHGLLATFLPKPDLNDIGSGSHVHLSLWEFDQNVFMGSSEYNYYGMSRIGESFLAGVYLHLPSILAFTAPHPNSYNRIQPNTWSGAYQCWGKENREAPLRTACPPGIPLDLVSNFEIKSFDACANPHLGLAAIVAAGIDGLRRSLTLPEPTESNPAGYASNSKLKRMPKDLMESVEALAADKIMHELIGDKLVTAVIAVRKAEIDHYEKNPAAFADLIHRY

SEQ ID NO: 32303 - DNA, 21 bp, Artificial sequence
  primer
atgagcgccagtggcaagctg

SEQ ID NO: 32304 - DNA, 22 bp, Artificial sequence
  primer
tcacaccgagagcagcaggaag

SEQ ID NO: 32305 - protein, 506 aa, Artificial sequence
  consensus sequence
  Variant (2)..(3): Xaa in position 2 to 3 is any amino acid
  Variant (5)..(38): Xaa in position 5 to 38 is any amino acid
  Variant (39)..(59): Xaa in position 39 to 59 is any or no amino acid
  Variant (61)..(64): Xaa in position 61 to 64 is any amino acid
  Variant (67)..(73): Xaa in position 67 to 73 is any amino acid
  Variant (75)..(94): Xaa in position 75 to 94 is any amino acid
  Variant (95)..(102): Xaa in position 95 to 102 is any or no amino acid
  Variant (105)..(106): Xaa in position 105 to 106 is any amino acid
  Variant (108)..(125): Xaa in position 108 to 125 is any amino acid
  Variant (126)..(127): Xaa in position 126 to 127 is any or no amino acid
  Variant (129)..(129): Xaa in position 129 is any amino acid
  Variant (132)..(179): Xaa in position 132 to 179 is any amino acid
  Variant (180)..(213): Xaa in position 180 to 213 is any or no amino acid
  Variant (215)..(217): Xaa in position 215 to 217 is any amino acid
  Variant (218)..(219): Xaa in position 218 to 219 is any or no amino acid
  Variant (221)..(221): Xaa in position 221 is any amino acid
  Variant (223)..(233): Xaa in position 223 to 233 is any amino acid
  Variant (234)..(234): Xaa in position 234 is any or no amino acid
  Variant (237)..(241): Xaa in position 237 to 241 is any amino acid
  Variant (243)..(248): Xaa in position 243 to 248 is any amino acid
  Variant (250)..(255): Xaa in position 250 to 255 is any amino acid
  Variant (260)..(260): Xaa in position 260 is any amino acid
  Variant (263)..(266): Xaa in position 263 to 266 is any amino acid
  Variant (267)..(268): Xaa in position 267 to 268 is any or no amino acid
  Variant (270)..(272): Xaa in position 270 to 272 is any amino acid
  Variant (274)..(274): Xaa in position 274 is any amino acid
  Variant (276)..(276): Xaa in position 276 is any amino acid
  Variant (278)..(292): Xaa in position 278 to 292 is any amino acid
  Variant (293)..(311): Xaa in position 293 to 311 is any or no amino acid
  Variant (313)..(318): Xaa in position 313 to 318 is any amino acid
  Variant (319)..(320): Xaa in position 319 to 320 is any or no amino acid
  Variant (322)..(334): Xaa in position 322 to 334 is any amino acid
  Variant (336)..(337): Xaa in position 336 to 337 is any amino acid
  Variant (341)..(341): Xaa in position 341 is any amino acid
  Variant (343)..(347): Xaa in position 343 to 347 is any amino acid
  Variant (348)..(356): Xaa in position 348 to 356 is any or no amino acid
  Variant (359)..(362): Xaa in position 359 to 362 is any amino acid
  Variant (364)..(366): Xaa in position 364 to 366 is any amino acid
  Variant (369)..(372): Xaa in position 369 to 372 is any amino acid
  Variant (374)..(377): Xaa in position 374 to 377 is any amino acid
  Variant (378)..(386): Xaa in position 378 to 386 is any or no amino acid
  Variant (388)..(388): Xaa in position 388 is any amino acid
  Variant (390)..(390): Xaa in position 390 is any amino acid
  Variant (392)..(397): Xaa in position 392 to 397 is any amino acid
  Variant (402)..(403): Xaa in position 402 to 403 is any amino acid
  Variant (405)..(409): Xaa in position 405 to 409 is any amino acid
  Variant (411)..(412): Xaa in position 411 to 412 is any amino acid
  Variant (414)..(453): Xaa in position 414 to 453 is any amino acid
  Variant (454)..(466): Xaa in position 454 to 466 is any or no amino acid
  Variant (468)..(476): Xaa in position 468 to 476 is any amino acid
  Variant (477)..(477): Xaa in position 477 is any or no amino acid
  Variant (479)..(480): Xaa in position 479 to 480 is any amino acid
  Variant (481)..(481): Xaa in position 481 is any or no amino acid
  Variant (483)..(491): Xaa in position 483 to 491 is any amino acid
  Variant (492)..(505): Xaa in position 492 to 505 is any or no amino acid
DXXGXXXXXXXXXXXXXXXXXXXXXXXXXXXXXXXXXXXXXXXXXXXXXXXXXXXXXXXDXXXXPDXXXXXXXPXXXXXXXXXXXXXXXXXXXXXXXXXXXXPRXXLXXXXXXXXXXXXXXXXXXXXEXEFXXXXXXXXXXXXXXXXXXXXXXXXXXXXXXXXXXXXXXXXXXXXXXXXXXXXXXXXXXXXXXXXXXXXXXXXXXXXXXXXXXEXXXXXQXEXXXXXXXXXXXXADXXXXXKXXXXXXAXXXXXXATFMXKPXXXXXXGXXXHXHXSXXXXXXXXXXXXXXXXXXXXXXXXXXXXXXXXXXSXXXXXXXXGXXXXXXXXXXXXXPXXNSYXRXXXXXXXXXXXXXXAPXXXXWXXXNRXXXXRXXXXXXXXXXXXXRXEXRXXXXXXNPYLXXAXXXXXGXXGXXXXXXXXXXXXXXXXXXXXXXXXXXXXXXXXXXXXXXXXXXXXXXXXXXXXXGXXXXXXXXXXKXXXEXXXXXXXXXXXXXXXXXXXXXXXE

SEQ ID NO: 32306 - protein, 26 aa, Artificial sequence
  protein pattern
  Variant (2)..(2): Xaa in position 2 is any amino acid
  Variant (4)..(5): Xaa in position 4 to 5 is any amino acid
  Variant (6)..(6): Xaa in position 6 is Ala, Asp, Glu, Gly or Ser
  Variant (7)..(7): Xaa in position 7 is any amino acid
  Variant (8)..(8): Xaa in position 8 is Ala, Cys, Asp, Gly, Ser or Thr
  Variant (9)..(9): Xaa in position 9 is any amino acid
  Variant (11)..(11): Xaa in position 11 is any amino acid
  Variant (14)..(15): Xaa in position 14 to 15 is any or no amino acid
  Variant (17)..(23): Xaa in position 17 to 23 is any amino acid
  Variant (24)..(24): Xaa in position 24 is any or no amino acid
  Variant (26)..(26): Xaa in position 26 is Ile, Leu, Met or Val
EXRXXXXXXNXYLXXAXXXXXXXXGX

SEQ ID NO: 32307 - protein, 17 aa, Artificial sequence
  protein pattern
  Variant (2)..(5): Xaa in position 2 to 5 is any amino acid
  Variant (6)..(6): Xaa in position 6 is Trp or Tyr
  Variant (7)..(7): Xaa in position 7 is Ala, Gly or Ser
  Variant (8)..(9): Xaa in position 8 to 9 is any amino acid
  Variant (12)..(12): Xaa in position 12 is Ala, Ser or Thr
  Variant (13)..(15): Xaa in position 13 to 15 is any amino acid
  Variant (17)..(17): Xaa in position 17 is Ile, Leu or Val
PXXXXXXXXNRXXXXRX

SEQ ID NO: 32308 - DNA, 666 bp, Azotobacter vinelandii
  CDS (1)..(666): transl_table=11
atgagttaccagcaccaatacctcgacggtacgcgcatccactacccgctgggcaaggtggtctgcgtcggccgcaactacgccgagcacgcccgggagctgaacaacccggtgccgaccgagcccctgctgttcatcaagccgggcagttgcacggtgccgctggaaggcggcttcagcattccgcaggaccgtggctcggtgcactacgaggcggaaatcgccgtgctgatcggcaagccgctgtcgcaccagccgggcgccgaggaggtgcgcgacgccatctccggcttcgctccggccctcgacctgaccctgcgcgacgtgcaggccagactcaaggaaaaggggctgccctgggaactggccaagtccttcgacggcgcctatgtgctggcgcccttcgtgtccggcgatgccgtcgaggatctcaccgacatcggcatccgtctgaccatcaacggcgagctgcgccaggacggcaacagccgcgacatgctcaatcccatcatcgcgctgatccagcacatcgccgggcatttcagcctgcagccgggcgacgtggtatccaccggcacgccggccggcgtcggcccgttcgccagcggcgatcgtctggtgctggagctgaccgggctgtcccgcttcgaaagccgggtgctctga

SEQ ID NO: 32309 - protein, 221 aa, Azotobacter vinelandii
MSYQHQYLDGTRIHYPLGKVVCVGRNYAEHARELNNPVPTEPLLFIKPGSCTVPLEGGFSIPQDRGSVHYEAEIAVLIGKPLSHQPGAEEVRDAISGFAPALDLTLRDVQARLKEKGLPWELAKSFDGAYVLAPFVSGDAVEDLTDIGIRLTINGELRQDGNSRDMLNPIIALIQHIAGHFSLQPGDVVSTGTPAGVGPFASGDRLVLELTGLSRFESRVL

SEQ ID NO: 32310 - DNA, 766 bp, Triticum aestivum
  CDS (46)..(723)
  misc_feature (97)..(97): n is a, g, c or t
attacgatttagagggagggaggaagaagaatcagatcggagaaaatgacaatgacgacgtcgatgatacagaggctgttcacgcaaggcaccaagntcgtctgcgtcgggcgtaactacgccgctcacgccaaagaactaggcaacgccgttcccaaggaaccagttatattcttaaagccgacgtcatcatacttagagaacggaggaacgattgagattccacatcctctagaatcactccatcatgaggtggagctcgctgtagtgatgggagagaaggctagagatgtacccgaggcaaccgccatggattacattggaggatatgcggttgctcttgatatgactgctagggaactccaagctactgccaaggcatctggtctcccttggactcttgctaaaggacaggatactttcactccaataagctctgttctgccaaaggcgatggtgcatgatcctgataacctagaactttggctgaaggttgatggtgaaacaagacagaagggtttgacaaaagatatgatcttcaaggttccgtacctcatcagctacataagctctataatgactctctacgaaggagatgtcatcttgacaggtacgccagaaggtgttggacctgtaaagataggacagaagataaccgcagggatcactggtctatctgaagttcagttcgatgttgataggcgtctaaagcctttgagttaattgttttgtttgtgtttcatataatactattaataaaaatgtt

SEQ ID NO: 32311 - protein, 225 aa, Triticum aestivum
  misc_feature (18)..(18): The Xaa at location 18 stands for Ile, Leu, Phe, or Val.
MTMTTSMIQRLFTQGTKXVCVGRNYAAHAKELGNAVPKEPVIFLKPTSSYLENGGTIEIPHPLESLHHEVELAVVMGEKARDVPEATAMDYIGGYAVALDMTARELQATAKASGLPWTLAKGQDTFTPISSVLPKAMVHDPDNLELWLKVDGETRQKGLTKDMIFKVPYLISYISSIMTLYEGDVILTGTPEGVGPVKIGQKITAGITGLSEVQFDVDRRLKPLS

SEQ ID NO: 32312 - DNA, 1152 bp, Zea mays
  CDS (168)..(863)
ccggcccggccatctcaagggccccgccggattttcttaaaaaaaaatctcaatcgcaacaacacaaaaaaggcccgcaatatcgattagcgagagtcgttcctccaccaaccaattcgcttctccgtcaacatcacttcatcgtcgacgcctccggcccaccaaccatgccggcggccatggcggctgcggcggcgcagaggctcctcgcggcgagcacgaaaatcattggcgttgggcgcaactacatagcccacgccaaggagctcggcaatccggtccccaaggagcccgtcctgttcctgaagccgacctcgtcgtttctccacgctggtgtggccaccgccgccgtcgagatcccggagccgctcgagtcgctacaccacgaggtcgagctcgccgtcgtcatctcccggcgcgggcgcgacgttcccgaggcgtccgccatggactttgttggaggttatgcacttgctttggacatgacagcaagggaccttcagtctgttgctaagtctgcaggccttccatggactttggctaaaggacaagacaccttcaccccaattagtgcagtagttccaaaatcagctgtcactaatcccgatgatctcgagctctggctgaaggtagatgatgaactaaggcagaaaggaccgacaagcgacatgctattcaagattccttttctgataagctatatcagttccatcatgacattaatggagggtgatgtgatactaacaggtactcctgagggtgtgggtcctgtccgagtaggtcagaagattacagctggtataactgacctaattgatgttgagttcgatgttcagaggcgcaatcggtcattttccacatgatgcaataagcaagaaagtaatggtgaatacaaagtgcagtactcgtcctcgaccttgaatcgcattactggacctggagccattgcagatagctcttgagccttaccttgatttaatttacctgggttttgagagactatctatgaatatgctaactcgttcgtaaagtatctttttgtcccaattttgattgatggagctttaagcttgcttttctgtatgcaataaaaaaacttatcacatttttctttcaaaaaaaaaaaaaaaaaactcgggggggggcccggta

SEQ ID NO: 32313 - protein, 231 aa, Zea mays
MPAAMAAAAAQRLLAASTKIIGVGRNYIAHAKELGNPVPKEPVLFLKPTSSFLHAGVATAAVEIPEPLESLHHEVELAVVISRRGRDVPEASAMDFVGGYALALDMTARDLQSVAKSAGLPWTLAKGQDTFTPISAVVPKSAVTNPDDLELWLKVDDELRQKGPTSDMLFKIPFLISYISSIMTLMEGDVILTGTPEGVGPVRVGQKITAGITDLIDVEFDVQRRNRSFST

SEQ ID NO: 32314 - DNA, 660 bp, Klebsiella pneumoniae subsp. pneumoniae MGH 78578
  CDS (1)..(660): transl_table=11
atgtaccaacatcataactggcagggtgcgcttctggattatccagtaagcaaagtagtgtgcgtcggcagtaattatgcgaaacacatcaaggaaatgggcagtgcgacgccggaagagccggtgctgtttattaaacctgagactgcgctgtgcgatcttcgtcagccgttggtgcttcctgaggggctgggctcggtgcatcacgaagtcgagctggcggtgcttatcggcagcacgctgcgtcaggcgacggaagagcatgtgctgaaagggattgccggctatggcgtcgcgctggatctcacgctgcgcgacctgcaggcgaaaatgaaaaaagcgggacaaccctgggagaaggccaaaggcttcgataacgcctgtccgatctccggctttatcccggccgctgagttccacggcgacccgcagaatacgtcgttaagtctgaagattaatggcgaagtgcgccagcagggcaccactgccgacatgatccataggattgtgccgctgatcgcctatatgtcgcgcttctttaccctcaaagccggggatgtgatcctcaccggcaccccggaaggcgtggggccgctgcacagcggtgacgagctggaggtcggcttcaacggcctggcgctcactacccgcgtgctgtaa

SEQ ID NO: 32315 - protein, 219 aa, Klebsiella pneumoniae subsp. pneumoniae MGH 78578
MYQHHNWQGALLDYPVSKVVCVGSNYAKHIKEMGSATPEEPVLFIKPETALCDLRQPLVLPEGLGSVHHEVELAVLIGSTLRQATEEHVLKGIAGYGVALDLTLRDLQAKMKKAGQPWEKAKGFDNACPISGFIPAAEFHGDPQNTSLSLKINGEVRQQGTTADMIHRIVPLIAYMSRFFTLKAGDVILTGTPEGVGPLHSGDELEVGFNGLALTTRVL

SEQ ID NO: 32316 - DNA, 690 bp, Xanthobacter autotrophicus Py2
  CDS (1)..(690): transl_table=11
atggtctcttatgtcttcgcgccgcccgccgtccccacccttcccatcgtgggcagcgatgatcacttcccggtccaccgcatctattgcgtcggccgcaacttcgccgaccatgcggtggagatgggccatgatcccaacaaggagccgcccttcttcttccagaagaatccagacaccctggtgcccaacggcgcgaccatcgcctatccgaagatgtcgcaggacgtgcaccatgagatcgagctggtggtggcgctgaaggccggcggcgaggacattccgctggagcgggcgcttgactgtgtgttcggctatgcggtgggcctcgacctcacccgccgcgacctgcagggcgaggccaagaaactcggccgcccgtgggaagtgggcaaggcgtttgaggaagccgcgccctgctcggccctggtgccggcaaccaccatcggccatccggacgcggggcggatcttcctgaagatcaacggtgcagtgaagcaggagggcaacctcaaccagatgatctggaaggtgccggagatgatcgccaccctctccaccctgttccggctcgcccccggcgacctcatcttcgccggcaccccggccggcgtcggccccatctccaagggcgacgtgctggaaggcggcgtcgagggcgtgggcgaactccggctgacggtggtctga

SEQ ID NO: 32317 - protein, 229 aa, Xanthobacter autotrophicus Py2
MVSYVFAPPAVPTLPIVGSDDHFPVHRIYCVGRNFADHAVEMGHDPNKEPPFFFQKNPDTLVPNGATIAYPKMSQDVHHEIELVVALKAGGEDIPLERALDCVFGYAVGLDLTRRDLQGEAKKLGRPWEVGKAFEEAAPCSALVPATTIGHPDAGRIFLKINGAVKQEGNLNQMIWKVPEMIATLSTLFRLAPGDLIFAGTPAGVGPISKGDVLEGGVEGVGELRLTVV

SEQ ID NO: 32318 - DNA, 675 bp, Arabidopsis thaliana
  CDS (1)..(675)
atggcgacttcgatgattcagagattgttcaaacaaggcacaaagatcgtcggcgttggactcaattacgcttctcacgccaaagaacttggcaatgccctcccaaaggacccgattgtgttcttaaagccaacttcgtcgtacctggaaaacggtggaacaatagagatcccacatccactggattcacttcaccatgaggtggaacttgctgtagtaattggacagaaagcaagagatgtcccagaacggttagccatgaattacattggaggatatgcgcttgctcttgatatgactgctagggaactccaagtttctgccatggcatctggtctcccatgtacgcttgctaaaggacaggataccttcacccccatcagctccgttctaccaaaggcaatggtgctggatcccaataacctggaactctggctaaaggtagatgatgagacaagacagaaaggttggacaaaggatatgatcttcaaggtcccatatctcatcagctacataagttctgtaatgacccttttcaaaggagatgtcatattgacaggtacaccagaaggtataggacctgtaaagataggtcagaagataaccgccggaatcaccggtctttctgaagttcagttcgacgtcggtaggcggctaaagccattgttgagatag

SEQ ID NO: 32319 - protein, 224 aa, Arabidopsis thaliana
MATSMIQRLFKQGTKIVGVGLNYASHAKELGNALPKDPIVFLKPTSSYLENGGTIEIPHPLDSLHHEVELAVVIGQKARDVPERLAMNYIGGYALALDMTARELQVSAMASGLPCTLAKGQDTFTPISSVLPKAMVLDPNNLELWLKVDDETRQKGWTKDMIFKVPYLISYISSVMTLFKGDVILTGTPEGIGPVKIGQKITAGITGLSEVQFDVGRRLKPLLR

SEQ ID NO: 32320 - DNA, 669 bp, Arabidopsis thaliana
  CDS (1)..(669)
atggcgacgtcgatgatacagaggatgttcaagcaagggacgaagatcgtctgcgtcggccgtaactacgccgctcacgccaaagaactaggcaacgccgtccccaaggaaccagttatattcttgaagccaacatcatcatacttagaaaatggaggaacaattgagatcccacatcctttggattcacttcaccatgaagtagaactcgctttagtgattggacagaaagctagagatgtacctgaatcaatagccatggattacattggaggatatgcggttgctcttgatatgactgctagggaactccaagcttctgctaaggcatctggtctcccatggacggttgcgaaaggacaagataccttcactcctatcagctctgttctgccaaaggcgatggtgcgtgatcccgataatctagaactttggctcaaggttgatggtgaaacaagacagaagggtttgaccaaagatatgatattcaaggtcccctacctcattagctacataagttctataatgaccctttacggagatgtcatcttgacaggcacaccagaaggtgttggacctgtaaagataggtcagaagataacggccggaatcaccggtctatctgaagttcaattcgatgtggagaggcgtgtaaagcccttgagctaa

SEQ ID NO: 32321 - protein, 222 aa, Arabidopsis thaliana
MATSMIQRMFKQGTKIVCVGRNYAAHAKELGNAVPKEPVIFLKPTSSYLENGGTIEIPHPLDSLHHEVELALVIGQKARDVPESIAMDYIGGYAVALDMTARELQASAKASGLPWTVAKGQDTFTPISSVLPKAMVRDPDNLELWLKVDGETRQKGLTKDMIFKVPYLISYISSIMTLYGDVILTGTPEGVGPVKIGQKITAGITGLSEVQFDVERRVKPLS

SEQ ID NO: 32322 - DNA, 621 bp, Bacillus halodurans C-125
  CDS (1)..(621): transl_table=11
atggacattcgtaacatttattgcattggccgaaactatgcagaccatgcgagggagcttggcaatgcaataccggacaaaccaatcttattttcaaaaccgacccattcccttacgattgccaatggacagatgctagaatttccgagtaaccgtggagagatccatcatgaactagaaatagttttgcatattggtaagccctacgaaaaaggaatttcgctcgaggaactcgttgatgtcatggcgctaggaatcgattttacgcttcgggatgaacaaaatgaattaaagaaaaaaggccacccatggctgcgagcgaaaggatttaagcatgcggcagtggtgaccgacttttggtcatttcctggagaagaaacgtgcaaggctaccgacttttctttattgattcatgatcaggtcgttcagaaaggaaacatacagcagatgctcttttcttttgaacaaatggttgaagaagtgggtgaagcctttggattaggagagggagacctcttgtttacaggaacgccagaaggggttggaccgatccaatcaggagaccagctttcgcttttttgggggacggaacgaaaagggcatttttctgttcgtatgtag

SEQ ID NO: 32323 - protein, 206 aa, Bacillus halodurans C-125
MDIRNIYCIGRNYADHARELGNAIPDKPILFSKPTHSLTIANGQMLEFPSNRGEIHHELEIVLHIGKPYEKGISLEELVDVMALGIDFTLRDEQNELKKKGHPWLRAKGFKHAAVVTDFWSFPGEETCKATDFSLLIHDQVVQKGNIQQMLFSFEQMVEEVGEAFGLGEGDLLFTGTPEGVGPIQSGDQLSLFWGTERKGHFSVRM

SEQ ID NO: 32324 - DNA, 699 bp, Pseudomonas aeruginosa PAO1
  CDS (1)..(699): transl_table=11
atgaaccatctcttcgcgcccgaagcacccgtcagcctcaccatccatggcagcgaccagaccttcccggtgcggcgggtctactgcgtcggccgcaactacgccgcccacgcccgggaaatgggcttcgatcccgagcgcgagccgccgttcttcttctgcaagccggccgacgcggtggtcccggtcgccgccggcagcaccctggagctggcctacccgagccagaccggcaactaccactacgagatcgaactggtggcggcgatcggcaagggcggctgcgacatccccctggagcaggccgaggaacacgtctggggctacgcggtgggcctggacatgacccgccgcgacctgcagatgcgcatgcgcgagatgggccggccctgggagatcggcaaggccttcgaccgctcggcgccgatcggcccgctctaccctgccagccaggtcggccatccgcgccacgccgccatcagcctccaggtcgacggcgaggatcgccagcgcagcgacatcgaccagttgatctggtcggtggcggaaaccgtcagctacctgtcgcgcttcttcgagctgcgccccggcgacctggtcttcaccggcaccccggaaggcgtcggcgcggtcgagcgcggcgagcggatgctcggcgccatcgacggcctcggcgaactcagcgtccgcgtggtctga

SEQ ID NO: 32325 - protein, 232 aa, Pseudomonas aeruginosa PAO1
MNHLFAPEAPVSLTIHGSDQTFPVRRVYCVGRNYAAHAREMGFDPEREPPFFFCKPADAVVPVAAGSTLELAYPSQTGNYHYEIELVAAIGKGGCDIPLEQAEEHVWGYAVGLDMTRRDLQMRMREMGRPWEIGKAFDRSAPIGPLYPASQVGHPRHAAISLQVDGEDRQRSDIDQLIWSVAETVSYLSRFFELRPGDLVFTGTPEGVGAVERGERMLGAIDGLGELSVRVV

SEQ ID NO: 32326 - DNA, 657 bp, Neisseria meningitidis MC58
  CDS (1)..(657): transl_table=11
gtggcttcagtatttttagaaggagaggcagtcgaggtcggcaatattttctgtatcggcaggaactatgccgcacatatcgaagagttaaaaaacgaaataccttccgaacctgtggtgtttatgaagccgtcaggcagcattttgaacagcggcggtacaatcttgctgcccgagtttagtagggatgtgcagtttgagtgcgaactcgtgctgctggtcggtaaggattcagacggcacgggcgagggtaaagatattttgggatgtgtcgcaggatatggtgtagggctggaccttacggcacgggatatccaatgccgtctgaaggaaaaagggctgccctggctgaaggcaaaagggttcaggcattccgcgtgcgtgtcggattttgcggcggcaggcagaatcggcaatcccgagaaggtgttgttttcattaaaacaaaacggcgtattgaaacagcgcggggataccggtttgatgatttacccgattcgggaaattttacacaaactggcggcagattacggtttggggaaaggggatttggtgtttaccggaacgccctccggcgtgggcgcaatcggtgcgggggacaatttggcattggagctggacggcttggtgcgcgcctctttcacggtagggtgttaa

SEQ ID NO: 32327 - protein, 218 aa, Neisseria meningitidis MC58
MASVFLEGEAVEVGNIFCIGRNYAAHIEELKNEIPSEPVVFMKPSGSILNSGGTILLPEFSRDVQFECELVLLVGKDSDGTGEGKDILGCVAGYGVGLDLTARDIQCRLKEKGLPWLKAKGFRHSACVSDFAAAGRIGNPEKVLFSLKQNGVLKQRGDTGLMIYPIREILHKLAADYGLGKGDLVFTGTPSGVGAIGAGDNLALELDGLVRASFTVGC

SEQ ID NO: 32328 - DNA, 735 bp, Halobacterium sp. NRC-1
  CDS (1)..(735): transl_table=11
atgcgctttcgcacgccggccggcgctgtgcgggtcggcgagtacgaccccgatgcggaggtcgtcgccgccgccgggcgtgcgttcgaccgagcgagtgtggacgtgttgccgccgtgtgacccgtcgaaggtcgtctgcgtgggccgcaactacgcggcgcacgccgacgagcgggacgccgacgttccggaccgcccgctgctgtttttgaagccacccactgcggtcgcgggtcacggcgacgccacgccgctcccgccgaacacacgcgtcgaacacgaggcggagctcgcggtcgtcatcggcacccaggcccgcaacctcgacgccggggctgcgatggcggccgtcgaggggtacactgtcgccaacgacgtgtccaaccgcaccgaccaggaccgcgagcagaactgggtccgcggcaaggcgttcgacggatcgtgtccgctcgggccggtggtcgcaactcccgatgaggtgcccgacgatgcgaccgtggcgttggacgtcaacggcgagcgccgccagtccgggtcgatctcgcagttcgtcttcgacgtgcccacgctgctggccgagatcacggcgttcgtgacgctgcagccgggcgacgtggtattgactgggacgccgccgggcgtgggcgagctcaccgacggcgaccgcgttgcggcgtccgtcgagggcgtcggcacgctcgaacacacggttgtgcgcgagccgcccgcgtag

SEQ ID NO: 32329 - protein, 244 aa, Halobacterium sp. NRC-1
MRFRTPAGAVRVGEYDPDAEVVAAAGRAFDRASVDVLPPCDPSKVVCVGRNYAAHADERDADVPDRPLLFLKPPTAVAGHGDATPLPPNTRVEHEAELAVVIGTQARNLDAGAAMAAVEGYTVANDVSNRTDQDREQNWVRGKAFDGSCPLGPVVATPDEVPDDATVALDVNGERRQSGSISQFVFDVPTLLAEITAFVTLQPGDVVLTGTPPGVGELTDGDRVAASVEGVGTLEHTVVREPPA

SEQ ID NO: 32330 - DNA, 789 bp, Deinococcus radiodurans R1
  CDS (1)..(789): transl_table=11
atgaaaaccgccaactttatcgccgggggccgcaccctgaaaggcgaactgcgccaggacggcctgctctacgacgccgccggtgacagccatcaccccgacgacgtgcaattcctgctgccgctgacgcccggcaaggtcatcgcgctggcgctgaattacgccgaccacgtggccgaactcggattcaaggcccccgaggagccggtgatgttcctcaagcccaacaccagcctgctgccgcaccagggcaccgtgatctacccgcgcggtgctaagttcatgcactacgaggtcgaactcggcatcgtcatcggacgcgatgcccggcgcgtgaaggcgaaggacgcggacgattacgtgggcggctacaccatcgccaacgacctggtggtgcgcgattacgtctccaactactaccgcccgcccatgcgcgccaagggctgggacaccttcgggccgctggggccgtatctggtgagcgccgacgaggtgcccgacccctacaacctgggcctgcgcgcctacgtcaacggcgaactgcggcaggaaggcagcacgcgcgacatgattctcaaggcccccgaactgatcgagttcatgagccgcttcatgaccctggaagcgggcgacgtgattctgaccggcacgcccaagggcgtctcgcacgtgcatcccggcgacgtgatgcgtctggaaatcgacggtctgggcgcactggaaaacccagtggcgctggaagacgagagcgctgagcctttgattgcggacgaaggagaaaggaagtag

SEQ ID NO: 32331 - protein, 262 aa, Deinococcus radiodurans R1
MKTANFIAGGRTLKGELRQDGLLYDAAGDSHHPDDVQFLLPLTPGKVIALALNYADHVAELGFKAPEEPVMFLKPNTSLLPHQGTVIYPRGAKFMHYEVELGIVIGRDARRVKAKDADDYVGGYTIANDLVVRDYVSNYYRPPMRAKGWDTFGPLGPYLVSADEVPDPYNLGLRAYVNGELRQEGSTRDMILKAPELIEFMSRFMTLEAGDVILTGTPKGVSHVHPGDVMRLEIDGLGALENPVALEDESAEPLIADEGERK

SEQ ID NO: 32332 - DNA, 702 bp, Escherichia coli O157:H7 EDL933
  CDS (1)..(702): transl_table=11
atgactcaatacgtattcgaaccgcaagcgcccgttaccgtaccggttgttggcagtgatgaacaattccccgtgcgccgcgtttactgcgtcggacgtaactatgccgctcacgcccgcgaaatgggctttgatccggatcgtgaaccgccattcttcttctgcaaaccggcggatgccgttgttccggttgccgctggtgaaacgctggcgctgccgtatccggcacagaccgataactaccattacgaaattgaactggtggtggcgattggtaaaaaaggcagcgatatcccgctggaacacgcccatgaatatgtctggggttatgccacgggtcttgatatgactcggcgtgaccgtcaaatggaaatgcgccagatgggccgcccgtgggaaatcggtaaagcgtttgatctctcagcgcccatcgcgccgctgcacaaagcccgcgatatcggcggtattgataatgcgccaatctggttacaggttaacggcgaagatcatcagcgcagcgatattcgccatctcatctggtcggtgaatgaaaccatctgctatctgtcaggcttctttgagctgcaaccgggcgatctgatcttcaccggtacgccggaaggggttggcccggtagtgaaaggtgatgtgatcacaggcaacgtcgagggcttaacgcctatcgcggtgaagattgtctga

SEQ ID NO: 32333 - protein, 233 aa, Escherichia coli O157:H7 EDL933
MTQYVFEPQAPVTVPVVGSDEQFPVRRVYCVGRNYAAHAREMGFDPDREPPFFFCKPADAVVPVAAGETLALPYPAQTDNYHYEIELVVAIGKKGSDIPLEHAHEYVWGYATGLDMTRRDRQMEMRQMGRPWEIGKAFDLSAPIAPLHKARDIGGIDNAPIWLQVNGEDHQRSDIRHLIWSVNETICYLSGFFELQPGDLIFTGTPEGVGPVVKGDVITGNVEGLTPIAVKIV

SEQ ID NO: 32334 - DNA, 720 bp, Mycobacterium tuberculosis CDC1551
  CDS (1)..(720): transl_table=11
atgacggcccgcgagatcgccgagcacccgttcggtacgccgaccttcaccggacgctcctggccgctggccgacgttcgcctgctggctccgatactggcgagcaaggtggtctgtgtcgggaagaactatgccgatcacatcgccgaaatgggtggccggccgccggcagacccggtgatattcctcaagcccaacaccgcgatcatcggtccgaatacgccaattcgattgcccgccaacgcatcaccggtgcacttcgagggtgagctggcgatcgtgatcggccgggcgtgcaaggatgtcccggccgcccaggccgtcgacaatatcctcggctacaccatcggcaatgacgtgtcggcccgcgatcagcagcaatccgacggtcagtggacgcgagccaaggggcacgacaccttctgcccggtcgggccgtggatcgtcaccgacctcgctccctttgacccggccgatctcgagctgcgcaccgtcgtcaacggcgacgtcaaacagcacgcccgcacctcgctgatgatccatgacatcggcgccatcgtggaatggatctcggcgataatgaccttgctgccaggtgatctcatcctcaccggcacacccgcgggagtcggtcccatcgaggacggcgacaccgtctcgatcaccatcgagggaatcggcaccctcaccaatcccgtagtccgcaaaggaaagccgtga

SEQ ID NO: 32335 - protein, 239 aa, Mycobacterium tuberculosis CDC1551
MTAREIAEHPFGTPTFTGRSWPLADVRLLAPILASKVVCVGKNYADHIAEMGGRPPADPVIFLKPNTAIIGPNTPIRLPANASPVHFEGELAIVIGRACKDVPAAQAVDNILGYTIGNDVSARDQQQSDGQWTRAKGHDTFCPVGPWIVTDLAPFDPADLELRTVVNGDVKQHARTSLMIHDIGAIVEWISAIMTLLPGDLILTGTPAGVGPIEDGDTVSITIEGIGTLTNPVVRKGKP

SEQ ID NO: 32336 - DNA, 816 bp, Agrobacterium tumefaciens str. C58
  CDS (1)..(816): transl_table=11
ttgcgccggcttctacaacaaaggaccgtaaaaagccagttttgcaggcaaggtcattttgaactggaaatcgccccggaatcgcgggacaagacttgcagcttcaagagacgacaggaaatccccatggccgccaccgtcatccccgctccgaaacccgttctgctgcccgtcgaaggcacggacgacatgttccccgtgcggcgggtctactgcgtcggccgcaattatgccgatcacgccatcgagatgggccacgatccctcgcgtgaaccgcccttttatttccagaagaacccggacaatctgctgccagcaggtaatgatttcccctacccgccgctatcctccaacgtgcattacgaagtcgagtgcgtcgtcgtcctgaagagcggcggcgcggatattccggcgtcggaagcgctgaaccacgtctggggttacgccgtcggcatcgacatgacccgccgcgacctgcaggatgggttgaagaaaatggggcgctcatgggaaggcgccaaggcgtttgaacattccgcaccagtctctgccatcgttcccgccgataaaatcggccatcccgctaccggcgcgatctggctcgatgtcaacggcgaacgcaagcagacgggcgatctcgcccagatgatctggaaggtgccggaagtgattgccgagctttccaagctgttcacccttgccgccggggatgtgatcatgaccggcacgccggcgggcgtcggccccattgtgcgtggtgacaggatcgagtgtggcgtcgatggtgtcggcacgctctcggtcaaaatcgcctga

SEQ ID NO: 32337 - protein, 271 aa, Agrobacterium tumefaciens str. C58
MRRLLQQRTVKSQFCRQGHFELEIAPESRDKTCSFKRRQEIPMAATVIPAPKPVLLPVEGTDDMFPVRRVYCVGRNYADHAIEMGHDPSREPPFYFQKNPDNLLPAGNDFPYPPLSSNVHYEVECVVVLKSGGADIPASEALNHVWGYAVGIDMTRRDLQDGLKKMGRSWEGAKAFEHSAPVSAIVPADKIGHPATGAIWLDVNGERKQTGDLAQMIWKVPEVIAELSKLFTLAAGDVIMTGTPAGVGPIVRGDRIECGVDGVGTLSVKIA

SEQ ID NO: 32338 - DNA, 849 bp, Agrobacterium tumefaciens str. C58
  CDS (1)..(849): transl_table=11
atgaaacttcttcgttacggcccccttgggcaggaaaaaccggcggcgctcgacgccgaaggcaacatccgcgatctctcttcggtcatcagcgacatcgccggatacagcctctcacgcagttccctcgacaagctggcgaaaatcgatctttcgtcactgccgagcgtaccatcagatgtgcgcattggcccctgcgtcggtgccgtgggcaattttgtggcggtcggcctcaattacatcgaccatgcgctggaaaccaatacgcctgttcctgacgagccggtgctttttaacaaacatacctcgtgcatttccggaccgaatgatccgatttgcctgttgaaggattcggaaaagaccgactgggaagtggaaattgcgttcgttatcggtgaacctgcctaccatgtgcgagaagaagacgccctctccgtcgtcgcaggtttctgcgtctgccacgatgtctccgaacgcgccttccagatagaacgtggtgggcagtggacgaagggcaaaagcggcccgacatttgggcccctcggcccatggttggtgaccccggatgaaatcagcgatgtgcaaaatcttgacctttggctcgacgttaacgggaagcgcatgcagaccggctcgacatccaggatgatttttccgatagcgacgcttgtgtcttacatcagtcgtttcatgcgtcttatgccaggtgacgtgatcaccacagggacgccgcccggtgtcggccttggcatgaaccctcccgtcttcctaaaagccggcgacgtggtcgaactcggcattgatggccttggcagacagcggcaaatcgtgacagcatttggcgcatga

SEQ ID NO: 32339 - protein, 282 aa, Agrobacterium tumefaciens str. C58
MKLLRYGPLGQEKPAALDAEGNIRDLSSVISDIAGYSLSRSSLDKLAKIDLSSLPSVPSDVRIGPCVGAVGNFVAVGLNYIDHALETNTPVPDEPVLFNKHTSCISGPNDPICLLKDSEKTDWEVEIAFVIGEPAYHVREEDALSVVAGFCVCHDVSERAFQIERGGQWTKGKSGPTFGPLGPWLVTPDEISDVQNLDLWLDVNGKRMQTGSTSRMIFPIATLVSYISRFMRLMPGDVITTGTPPGVGLGMNPPVFLKAGDVVELGIDGLGRQRQIVTAFGA

SEQ ID NO: 32340 - DNA, 687 bp, Sinorhizobium meliloti 1021
  CDS (1)..(687): transl_table=11
atgcagacagccctgacacccccgccgctcatcctgctgccgatctccggcagttccgtcgggtttccggtgcgccgggtctattgtgtcggccgcaactatgcggcccacgcccgcgagatgggtcacgacccggaccgggaggcacccttcttctttcagaagaacgccgacaatcttctgccgccgggcgagaatttcccctatccgacgcgctcttccgacgttcaccacgaggttgaactggtcgtcgcgatgcgcaccggcggagcggacattcccgtctcggaagcggcagatcacatcttcggttatggcgtcggcatcgacttcacccgccgggacctgcaggcggaagcgaagaaggccggcaagccgtggacggccgccaaggcgttcgagcattccgctccggtctccgcgatcgtccccgtcaccgcgatcggtcatcccgcaagcggcaacatatggctcaaggtcaatggcgaactgcgccagcagggcgatcttgatcaaatgatctggaaggtgcccgaaatcatcgccgaactgtcccgcctcttcactctcgcaccgggcgatatcatcatgaccgggacgccatcaggtgtgggtcccgtcacgcaaggcgatgtcgtcgcctgcggcatcgacgggatcggcgcgatctccgtcaatatcgtttga

SEQ ID NO: 32341 - protein, 228 aa, Sinorhizobium meliloti 1021
MQTALTPPPLILLPISGSSVGFPVRRVYCVGRNYAAHAREMGHDPDREAPFFFQKNADNLLPPGENFPYPTRSSDVHHEVELVVAMRTGGADIPVSEAADHIFGYGVGIDFTRRDLQAEAKKAGKPWTAAKAFEHSAPVSAIVPVTAIGHPASGNIWLKVNGELRQQGDLDQMIWKVPEIIAELSRLFTLAPGDIIMTGTPSGVGPVTQGDVVACGIDGIGAISVNIV

SEQ ID NO: 32342 - DNA, 681 bp, Caulobacter crescentus CB15
  CDS (1)..(681): transl_table=11
atgacgacctacgcttttcccccgcacgccatcccgacggtcccggtggagggatcgggcgccctgttcccggtgcgtcgcatcctgtgtgtcggccgcaactacgccgcccaccgccgcgagatggggggcgatgatcgcgacccgccgtttttcttcgccaagcccgccgacgcgatcgcgcagctggccgacgcgatcgcctatccgccggcgaccagcgacctgcatcacgagatcgagctggtcgtggccctaaaggcgggcggcgcggatctgtcgatcgaacaggccctggcctgcgtgttcggctatgcggtcggcgtcgacctgacgcgccgcgacctgcaagctgcggccaaggccaagggccagccctgggaagccggcaaggccttcgatcagagcgccccgatcagcgccatccgggtgatggacgctccggcggccgaagcggcggtcaccctgtcggtcaacggccaggagcgccagcgcggacaggtcggcgacatgatctggaacatcggcgaggtgatcgccaaggccagccagctgtggaccctggccgccggcgacctgatcttcaccggcacgcctgagggcgtcgccgccatcgtccgcggcgacaaggtcgtcggcgagatcgagggcgtcggccgcctggacttcaccctcgtctag

SEQ ID NO: 32343 - protein, 226 aa, Caulobacter crescentus CB15
MTTYAFPPHAIPTVPVEGSGALFPVRRILCVGRNYAAHRREMGGDDRDPPFFFAKPADAIAQLADAIAYPPATSDLHHEIELVVALKAGGADLSIEQALACVFGYAVGVDLTRRDLQAAAKAKGQPWEAGKAFDQSAPISAIRVMDAPAAEAAVTLSVNGQERQRGQVGDMIWNIGEVIAKASQLWTLAAGDLIFTGTPEGVAAIVRGDKVVGEIEGVGRLDFTLV

SEQ ID NO: 32344 - DNA, 831 bp, Synechocystis sp. PCC 6803
  CDS (1)..(831): transl_table=11
atggtccaacgttacgttcgtatccaggctgactctggcaccgtccattatggtttgttccaattggatcacagtgtgattttgctaagtgcggcgccttggttggggggccaagccctagatgttgccgttagtgaaggggattatcggttactagctccctgtgaaccttctaaaatcgtggcggtgggacgcaattaccgggcccatgcggcggaattgggtaacgatgtgccggcggaacccctcttattttttaaacctccttcggcgatcgccgctgaccaggaagaaattgtttatccgtcccagtcccaacgggtggactacgaaggggaattggcagtcattattggcaaacaagtaaaagatattactgaagaagaagcggccagcgccatttggggctacaccattgccaacgatattacggctagggatttgcagcggcaggattcccaatggacgcgggccaagggctttgacggtttttgtcccctggggccctgggtagtacgtcacatcgacccagaggcccatttggaaaccaccgttaatgatgaggaaactccccggcaagccacggccatcagcgatatggtttttactcccccggtattagtgagctacatttcccgagtgatgaccctctaccctggcgatgtaattttgactggtactccggaaggcattagtgccctccaagtgggagacaaagtggaggtggaaattgaaggcattggtaatttaactaatacaatcatcgcgcctcccctaacggccccggagttagcggaaacggtggagttggaagtcgaagcagataattga

SEQ ID NO: 32345 - protein, 276 aa, Synechocystis sp. PCC 6803
MVQRYVRIQADSGTVHYGLFQLDHSVILLSAAPWLGGQALDVAVSEGDYRLLAPCEPSKIVAVGRNYRAHAAELGNDVPAEPLLFFKPPSAIAADQEEIVYPSQSQRVDYEGELAVIIGKQVKDITEEEAASAIWGYTIANDITARDLQRQDSQWTRAKGFDGFCPLGPWVVRHIDPEAHLETTVNDEETPRQATAISDMVFTPPVLVSYISRVMTLYPGDVILTGTPEGISALQVGDKVEVEIEGIGNLTNTIIAPPLTAPELAETVELEVEADN

SEQ ID NO: 32346 - DNA, 879 bp, Salmonella typhimurium LT2
  CDS (1)..(879): transl_table=11
atgaaactggttcaatatcttgtgaacggtggcaaacgctacggcattatgcaggaaaccggaataattgatctctcgcagcggcttggcgacaaatatcccactttgaaatctctcctgtgcgctaatgcgctgacggatgcggcgttatggtgtgatgagccggcggattattactaccaggaagtcacttttctgccggtgattgacgatccgcagaagatcatctgtgtcggaatgaattatgccgataagcgtattgagtttaatgaaaccaacccggccccaaccctttttgtccgctttgcggattctcagaccgggcataatggcctgctgctgaagcctgaaaataccaatgagttcgactacgaaggtgaattagccgtagtgattgggcggcgatgctcccgggtcagcgctgaggatgctttagattatgtcgccggatacagctgctatatggatggttcagtgagggactggcagcatagctggtttacggctggaaaaaactggccttcgacaggatcattcggtccgtgtctggtgaccacagacgacattcccgatccccagatgctacgtttactgacacgactaaacgggcgggaggtgcagaacgaatctacggcaaatatgatccatcctatcgcttcactcattgcttatataagcacatttactctgctttcccctggcgacacgatcctcacagggtcgcctggtggagtgggcaaaaaacgcgttccaccgctgtttttacacgatggtgatgttattgaagttgagattgaacatattggaaccctgcgcaatgtcgtccgggatagccgttatttaacatcctctgttagctggcatgacgggagaaagtga

SEQ ID NO: 32347 - protein, 292 aa, Salmonella typhimurium LT2
MKLVQYLVNGGKRYGIMQETGIIDLSQRLGDKYPTLKSLLCANALTDAALWCDEPADYYYQEVTFLPVIDDPQKIICVGMNYADKRIEFNETNPAPTLFVRFADSQTGHNGLLLKPENTNEFDYEGELAVVIGRRCSRVSAEDALDYVAGYSCYMDGSVRDWQHSWFTAGKNWPSTGSFGPCLVTTDDIPDPQMLRLLTRLNGREVQNESTANMIHPIASLIAYISTFTLLSPGDTILTGSPGGVGKKRVPPLFLHDGDVIEVEIEHIGTLRNVVRDSRYLTSSVSWHDGRK

SEQ ID NO: 32348 - DNA, 660 bp, Salmonella typhimurium LT2
  CDS (1)..(660): transl_table=11
atgtatcaacatcgtaactggcaaggcgccttgcttgattacccggtaagtaaagtggtctgcgtgggcagtaattacgcaaatcacatcaaggagatgggcagcgcgacgccggaagaacccgtgctttttatcaagccggaaaccgcattgtgtgatattcgccagccgctggcgattccggcggatatgggggctgttcatcatgaagttgagcttgctgtgctgattggcgcaacgctccgccaggcgaccgaagatcatgtacgtaaagcgatagccggttatggcgtggcgcttgatttaaccctgcgcgatattcaagggaaaatgaaaaaggccggacagccctgggaaaaagccaaaggttttgataacgcatgtccgatttcaggcttcatccctgtcgcggccttctgcggcgatccgcaaaatacggttatcggacttaacgttaatggcgaggttcgccagcaagggtcgaccgcggatatgattcatcctattgtgccccttatcgcctatatgagccgctattttacgctcaaagccggggacgtggtgctaaccggcacgccggcaggcgtggggccattattaagcggcgatgagctggacattcgttttaatggcgaaacgttgtctacccgcgttctgtaa

SEQ ID NO: 32349 - protein, 219 aa, Salmonella typhimurium LT2
MYQHRNWQGALLDYPVSKVVCVGSNYANHIKEMGSATPEEPVLFIKPETALCDIRQPLAIPADMGAVHHEVELAVLIGATLRQATEDHVRKAIAGYGVALDLTLRDIQGKMKKAGQPWEKAKGFDNACPISGFIPVAAFCGDPQNTVIGLNVNGEVRQQGSTADMIHPIVPLIAYMSRYFTLKAGDVVLTGTPAGVGPLLSGDELDIRFNGETLSTRVL

SEQ ID NO: 32350 - DNA, 702 bp, Salmonella typhimurium LT2
  CDS (1)..(702): transl_table=11
atgaccaaatatgtattccagccgcaggccccggtaacagtacccgtggcgggcagtgatgagcagtttccggtacgtcgcgtttactgcgtgggtcgcaactatgccgcccatgcccgtgaaatgggctttgatcccgatcgcgaaccgccgttcttcttttgtaaaccagcggacgctgtggtcccggtagcggcgggggataccctggaactgccgtatccggcgcagaccgataactaccattatgaaattgagctggtggtggcgattggtaaaaaggggagcgatattccgctggaaaaagcccatgaatatgtctggggatacgccaccggtctggacatgacgcgtcgcgatcgtcagatggaaatgcgtcagatgggacgcccgtgggaaatcggcaaagcgttcgatctctccgcgcccattgcgccattacacaaagccgctgaaacgcataatgtggataacgcccctatttggctacaggttaacggcgaagaccatcaacgcagcgatattcgtcacctgatttggtcggtgaatgaaaccatcagctatttgtccggcttctttgaattgcagccaggcgatttaattttcaccggtacgccagagggggtgggcgcagtggtgaaaggggatgtcatcaccgggaacgtagaaggtctgacgccgattgctgtgaaaattgtctga

SEQ ID NO: 32351 - protein, 233 aa, Salmonella typhimurium LT2
MTKYVFQPQAPVTVPVAGSDEQFPVRRVYCVGRNYAAHAREMGFDPDREPPFFFCKPADAVVPVAAGDTLELPYPAQTDNYHYEIELVVAIGKKGSDIPLEKAHEYVWGYATGLDMTRRDRQMEMRQMGRPWEIGKAFDLSAPIAPLHKAAETHNVDNAPIWLQVNGEDHQRSDIRHLIWSVNETISYLSGFFELQPGDLIFTGTPEGVGAVVKGDVITGNVEGLTPIAVKIV

SEQ ID NO: 32352 - DNA, 774 bp, Nostoc sp. PCC 7120
  CDS (1)..(774): transl_table=11
atggcgcagcgctacgtgcgagttcaaaatcgggaaggtaagatttactatgggttactacaactgtctttcaatgtgcaggttctagatgctccaccgtggctgcatggacaacccacagacttaattttagaaccagattattatcaaattttggctccctgcgctccttctaaaattgtcgcagtcggcaaaaattatgcagaccatgcagccgaaatgggaacgccagttcctagtgaaccactgatttttctgaagccaccaacaacgattattgcctcggaaacagagattaaatatcctctccagtcacaacgagtggattatgaaggagaattagcgttgattattggcgatcgcacttgtaactgtacaccagaggaagcccaaactaaaatttggggatataccattgctaatgatgtcacagcgcgggatttacagcgaaaagatgggcagtggacaagagcgaaaggttttgatactttctgcccattggggccttggattgtccgagaattgagtccaggggcaagattacagacctttctcaatgatgatgctaatcccgtacaatcggcgggaattgatcaaatggtatttgcccctgattttttggtgtcatatatcagtcaggtgatgacattgcttccgggtgatgtgattttaacgggtacgccagagggtgtaggagctttgcaacaaggcgatcgcatccgtgtggaaattgaaggcattggtcgcctagaaaacaccgtagcagcccgttag

SEQ ID NO: 32353 - protein, 257 aa, Nostoc sp. PCC 7120
MAQRYVRVQNREGKIYYGLLQLSFNVQVLDAPPWLHGQPTDLILEPDYYQILAPCAPSKIVAVGKNYADHAAEMGTPVPSEPLIFLKPPTTIIASETEIKYPLQSQRVDYEGELALIIGDRTCNCTPEEAQTKIWGYTIANDVTARDLQRKDGQWTRAKGFDTFCPLGPWIVRELSPGARLQTFLNDDANPVQSAGIDQMVFAPDFLVSYISQVMTLLPGDVILTGTPEGVGALQQGDRIRVEIEGIGRLENTVAAR

SEQ ID NO: 32354 - DNA, 702 bp, Ralstonia solanacearum GMI1000
  CDS (1)..(702): transl_table=11
atgaccgatttcgtcgtcaccccgccggccgtcaccggcattcccgtccgcggcgcagccggcgagtttccggtgcgccgcgtctactgcgtgggccgcaactacgccgcccatgcgcgggaaatgggctccgacccggatcgcgaaccgccgttcttcttctgcaagccggccgatgccgtgcgctacgtcgccgacggcaccaccggccagttcgtctatccgaccgagacccgcgattgccactacgagatcgagctggtcgtcgccatcggcaccggcgggcgcgacatcgcggtggagtcggccgcccagcacatctacggctacgccatcggcctggacatgacccgccgcgacctgcagaacgccgccaagaagggcggccgcccgtgggagaccggcaaggccttcgacggctccgccccgatcggcccgatcgtgccggcccagacggtggccagccccgaccgcggcgccatcacgctgtcggtcaacgacaaggcgcatcagcacggcgacctgtccgatctgatctggtcggtgccggagaccatcgcctacctgtcccgcctgttcgagctgcgccccggcgacctgatcttcaccggcacgcccgagggcgtcggcccggtctcgatcggcgacctgatggtcggccggatcgacggcgtgggcgagctgcacgtgaaggtggtgtga

SEQ ID NO: 32355 - protein, 233 aa, Ralstonia solanacearum GMI1000
MTDFVVTPPAVTGIPVRGAAGEFPVRRVYCVGRNYAAHAREMGSDPDREPPFFFCKPADAVRYVADGTTGQFVYPTETRDCHYEIELVVAIGTGGRDIAVESAAQHIYGYAIGLDMTRRDLQNAAKKGGRPWETGKAFDGSAPIGPIVPAQTVASPDRGAITLSVNDKAHQHGDLSDLIWSVPETIAYLSRLFELRPGDLIFTGTPEGVGPVSIGDLMVGRIDGVGELHVKVV

SEQ ID NO: 32356 - DNA, 843 bp, Agrobacterium tumefaciens str. C58
  CDS (1)..(843): transl_table=11
atgaaattgatgcgtgttggccagcccggccaggaaaaaccagccattctcgatgcggaaggaaaagtccgcgatctgtccgcccatgtgaaagatatcggcggcgacgcgatttctcccgagggtctcaagaagatcgccgcgatcgacctcgccaccctgccggtgttgagcgaagagcgcattggcgcctgcgttgcgggtaccggaaaattcatctgcatcggcctcaacttctccgaccatgcggctgaaacgggtgctaccgtaccgccggaaccggtcattttcatgaaggcgacctcggccatcgtcggtccgaacgataacgtcaccattccgcgcggctcggaaaagaccgactgggaagtcgagcttggcgtcgtcatcggcaagaccgcgaaatacgtctcggaagcggacgccctcgattatgtcgccggttattgcgtatcgcacgacgtttccgagcgcgccttccagacagaacgtgccggtcagtggacaaagggcaagtcctgcgacactttcggccccatcggcccctggctggtgacgaaggacgaaatcaccgatccgcagaacctcggcatgtggctgaaggtcaatggccagaccatgcaggacggttccagcaagacaatggtttacggcgtcgcccacgttgtctcctatctcagccagttcatgtcgctgcatcccggcgatgtcatttccaccggcacccctcccggcgtcggcatgggccaaaagccgccgcgttacctgaagactggtgacgtcgtggaactcggcatcgagggcctcggttcccagaagcagactttcgtcgctgacatctga

SEQ ID NO: 32357 - protein, 280 aa, Agrobacterium tumefaciens str. C58
MKLMRVGQPGQEKPAILDAEGKVRDLSAHVKDIGGDAISPEGLKKIAAIDLATLPVLSEERIGACVAGTGKFICIGLNFSDHAAETGATVPPEPVIFMKATSAIVGPNDNVTIPRGSEKTDWEVELGVVIGKTAKYVSEADALDYVAGYCVSHDVSERAFQTERAGQWTKGKSCDTFGPIGPWLVTKDEITDPQNLGMWLKVNGQTMQDGSSKTMVYGVAHVVSYLSQFMSLHPGDVISTGTPPGVGMGQKPPRYLKTGDVVELGIEGLGSQKQTFVADI

SEQ ID NO: 32358 - DNA, 690 bp, Agrobacterium tumefaciens str. C58
  CDS (1)..(690): transl_table=11
atggccgccaccgtcatccccgctccgaaacccgttctgctgcccgtcgaaggcacggacgacatgttccccgtgcggcgggtctactgcgtcggccgcaattatgccgatcacgccatcgagatgggccacgatccctcgcgtgaaccgcccttttatttccagaagaacccggacaatctgctgccagcaggtaatgatttcccctacccgccgctatcctccaacgtgcattacgaagtcgagtgcgtcgtcgtcctgaagagcggcggcgcggatattccggcgtcggaagcgctgaaccacgtctggggttacgccgtcggcatcgacatgacccgccgcgacctgcaggatgggttgaagaaaatggggcgctcatgggaaggcgccaaggcgtttgaacattccgcaccagtctctgccatcgttcccgccgataaaatcggccatcccgctaccggcgcgatctggctcgatgtcaacggcgaacgcaagcagacgggcgatctcgcccagatgatctggaaggtgccggaagtgattgccgagctttccaagctgttcacccttgccgccggggatgtgatcatgaccggcacgccggcgggcgtcggccccattgtgcgtggtgacaggatcgagtgtggcgtcgatggtgtcggcacgctctcggtcaaaatcgcctga

SEQ ID NO: 32359 - protein, 229 aa, Agrobacterium tumefaciens str. C58
MAATVIPAPKPVLLPVEGTDDMFPVRRVYCVGRNYADHAIEMGHDPSREPPFYFQKNPDNLLPAGNDFPYPPLSSNVHYEVECVVVLKSGGADIPASEALNHVWGYAVGIDMTRRDLQDGLKKMGRSWEGAKAFEHSAPVSAIVPADKIGHPATGAIWLDVNGERKQTGDLAQMIWKVPEVIAELSKLFTLAAGDVIMTGTPAGVGPIVRGDRIECGVDGVGTLSVKIA

SEQ ID NO: 32360 - DNA, 684 bp, Pyrococcus furiosus DSM 3638
  CDS (1)..(684): transl_table=11
atgagttttgttaggcttccttttagagatagctattatgagctaaggccaaccaagataatagctctagcaaagaactatgcagagcatgcaaaagagatgggtgacaatccacccaccgagcccataatatttcttaagcctccttcagcactaattggcccaggagagcccattatacttccaaagattagcaagagagtagaccacgaagtagaattgggagtaattatagggaagaaagccaagaaagttcctgcagaaaaggcttttgactatgtgttgggttatacaattattctcgacataaccgctagggatcttcaggagaaagctagaaaaatgggacacccatggactgtatctaaggggtttgacacatttgctcccgttggtccgaggatagttgacaagagagagctagatccctcagacttggagataggactaaaagttaacggggaagttagacagcttggaaggactagccagatgatattcaagattcctcagctcatcgaatacatatctaatataatgaccctcgagccgggagatataattgctactggaactcctcctggggtagggtcattgaggcatggtgaccacattgaggcgtggatagaaggaataggaaaggtcgagttcgacgttttagctgaggattctatcttatgctga

SEQ ID NO: 32361 - protein, 227 aa, Pyrococcus furiosus DSM 3638
MSFVRLPFRDSYYELRPTKIIALAKNYAEHAKEMGDNPPTEPIIFLKPPSALIGPGEPIILPKISKRVDHEVELGVIIGKKAKKVPAEKAFDYVLGYTIILDITARDLQEKARKMGHPWTVSKGFDTFAPVGPRIVDKRELDPSDLEIGLKVNGEVRQLGRTSQMIFKIPQLIEYISNIMTLEPGDIIATGTPPGVGSLRHGDHIEAWIEGIGKVEFDVLAEDSILC

SEQ ID NO: 32362 - DNA, 840 bp, Corynebacterium glutamicum ATCC 13032
  CDS (1)..(840): transl_table=11
atgcgtcttgcaacaatccgcaccaacggcaccaccattgctgctcgtgttgaatctgaaaacaccgctaccaccatcgagggctttgccaacgtcggtgaattactccaggaatccaactggcgcgagctggcagaaaacgctgctggtgaggctgtgacctttgaaaacaaggagctagatgcagtagttccagcacctaagaagattgtgtgcgtcggccttaactacgccaaccacattaaagaaatgggccgcgacctccctgataccccaaccctttttgttaagttccctgacgcgctcatcggacctttcgatgatgttgtcgttccagagtgggctaacaaggctctcgactgggaaggcgagatggcagttatcattggcaagcgcgcacgccgtgtcaagcaggccgatgctgctgagtacatcgctggctacgcagtgatgaacgattacaccacccgcgatttccagtacgcagcacctgcaaagactccacagtggcaccagggcaagtctttggaaaagtccgctggcttcgggccttggatgactaccccagattcttttgagttcggcggcgagctggcaacctacctcgagggcgagaaggtacagtccacccctaccaatgacctggtctttagcccagaaaagctcatcgaatacatcacccacatctacccattggatgctggcgacgtcattgtcaccggtaccccaggcggcgttggccacgcacgtaacccacagcgctacatcggtgacggcgaaaccgtaaaggttgagattgcgggcctcggcttcattgaaaacaagacggtgtttgaataa

SEQ ID NO: 32363 - protein, 279 aa, Corynebacterium glutamicum ATCC 13032
MRLATIRTNGTTIAARVESENTATTIEGFANVGELLQESNWRELAENAAGEAVTFENKELDAVVPAPKKIVCVGLNYANHIKEMGRDLPDTPTLFVKFPDALIGPFDDVVVPEWANKALDWEGEMAVIIGKRARRVKQADAAEYIAGYAVMNDYTTRDFQYAAPAKTPQWHQGKSLEKSAGFGPWMTTPDSFEFGGELATYLEGEKVQSTPTNDLVFSPEKLIEYITHIYPLDAGDVIVTGTPGGVGHARNPQRYIGDGETVKVEIAGLGFIENKTVFE

SEQ ID NO: 32364 - DNA, 879 bp, Streptomyces coelicolor A3(2)
  CDS (1)..(879): transl_table=11
atgaaactcgtacggctcggagaccccgggcgggaacgccccgccgtcatcgacgaccggggcgtcacccgggacctctcctccctgacctccgacatcgacggcgccttcctcgcggcggacggcatcgcccgcacccgtcgggccctggccgacgacgtcctgcccccgctgcggaccgaggggctgcgcttcggaccacccgtcgcgcggcccggcgcggtggtctgcatcggccagaactacgcggcccacgcggcggagtccggcagcgagccgcccacccgcccggtgatcttcttcaagccgccgaacacggtggtcggcccgaacgacgaggtggagatcccgcgcggctccgccaggacggactgggaggtcgaactcgccgtcgtcatcggccggacggcgcggtacctggactcccccgggcaagccctggagcacgtggccggctacgccgtctccaacgacgtgtccgagcgggacttccagctggagcactccgggggccagtggtccaagggcaagtcctgcgccacgttcaacccgctcggccccttcctggtaccggccgacgaggtgcccgacgtccaggctctgcggctgcggtccttcgtcaacggcgaaccgcggcaggactcgcgcaccgccgacatgatcttctccgtcgcgcagctcgtgtacgacctgagccagtacctggtcctggacccgggcgacgtcatcaacaccggcaccccggagggcgtcgccctgtccgggcgcttcccctacctgcggcccggtgacgtgatggagatcgagatcgagggactggggcgccagcgccaggcgcttgtccccgcacggacctcttctcagtcatcacttgtatga

SEQ ID NO: 32365 - protein, 292 aa, Streptomyces coelicolor A3(2)
MKLVRLGDPGRERPAVIDDRGVTRDLSSLTSDIDGAFLAADGIARTRRALADDVLPPLRTEGLRFGPPVARPGAVVCIGQNYAAHAAESGSEPPTRPVIFFKPPNTVVGPNDEVEIPRGSARTDWEVELAVVIGRTARYLDSPGQALEHVAGYAVSNDVSERDFQLEHSGGQWSKGKSCATFNPLGPFLVPADEVPDVQALRLRSFVNGEPRQDSRTADMIFSVAQLVYDLSQYLVLDPGDVINTGTPEGVALSGRFPYLRPGDVMEIEIEGLGRQRQALVPARTSSQSSLV

SEQ ID NO: 32366 - DNA, 858 bp, Streptomyces coelicolor A3(2)
  CDS (1)..(858): transl_table=11
atgaagctgttgcgagtcggtacggcggggtcggagcggcccgcgctgctcgacgccgacgggaccctgcgagacctgtcgggcgtcgtgacggacatcgacggcgaactgctcgccgacgaggacgcgctcggccggatacggtccgccgccgaggccggtgagctgcccgtcctggacggcaccgggctgcgcgtcgggccgccggtgggacgcatcggcaagatcgtgtgcatcgggctgaactaccacgaccacgcccgcgagaccggcgccgagccgcccgccgaaccggtcgtcttcttcaaggcgccggacacggtggtcgggccgcacgacacggtgctcgtgccgcgcgggtccaccaagaccgactgggaggtggagctggcggtcgtcatcgggcgtacggcccgctacctggagtcggcggaggaggggctcgcgtgtgtcgcggggtacgcggtcgcgcacgacgtgtccgagcgggagttccagatcgagcgcggcggcacctgggacaagggcaagaactgcgagacgttcaacccgctgggcccgtggctggtgaccgccgacgaggtgcccgacccgcagcggctgccgctgcggctgtgggtgaacggcgaactgaagcaggacgggacgaccgcggagcagatcttccccgtgggggaggtcgtccggtacctgagccggttcatggtgctgcgtcccggtgacatcatcaacaccgggacgccggcgggggtggcgatggggcagcccgagccgaagccctacctgcgggcgggggacgtggtggagctggagatcgagggactggggcggcagcggcaggaactcaaggaggcctga

SEQ ID NO: 32367 - protein, 285 aa, Streptomyces coelicolor A3(2)
MKLLRVGTAGSERPALLDADGTLRDLSGVVTDIDGELLADEDALGRIRSAAEAGELPVLDGTGLRVGPPVGRIGKIVCIGLNYHDHARETGAEPPAEPVVFFKAPDTVVGPHDTVLVPRGSTKTDWEVELAVVIGRTARYLESAEEGLACVAGYAVAHDVSEREFQIERGGTWDKGKNCETFNPLGPWLVTADEVPDPQRLPLRLWVNGELKQDGTTAEQIFPVGEVVRYLSRFMVLRPGDIINTGTPAGVAMGQPEPKPYLRAGDVVELEIEGLGRQRQELKEA

SEQ ID NO: 32368 - DNA, 786 bp, Streptomyces coelicolor A3(2)
  CDS (1)..(786): transl_table=11
gtgcgcatcgccaggttctccatcgacgggaacgtcgccttcggcgcggtcgagggcgaccagccggaccagctcgtcctcgacatcatcaagggcatcccgttcgcggactacgagctctccggcaccaaggtgcccctgagtaaggtgcggctcctgccgccggtactccccagcaaggtcgtcgccttcggccgcaactacgccgagcacgcccgcgaactcggcaacgaggtgcccgacgcgccgttcgccttcttcaagccgtccacctccgtgatcggccccggcgacgccgtccagtacccctccttcaccgaggaactgcaccacgaggccgaactggccgtcgtcatcggccgcatgtgccgcgaggtcccgcgcgagcgcgtccaggacgtgatcttcggctacacctgcgccaacgacatcaccgcccgcgacgtgcagcgccgcgagaagcagtgggccagggccaagggcttcgactcctcctgcccgctcggcccctgggtggagacggacctcgacctcgcggccgcgggcgacctcaccgtgcagctcacggtcaacggcgcccagcgccagctcggccgcaccagcgagatgatccactccatcgaggacctgatcgtcaacatctccgaggcgatgacgctgctccccggtgacgtgatcctcacgggcactccggccggcgtcggccccctcaacgtcggcgacgaggtcgccgtcaccatcgaaggcatcggcactctcaccaacaaggttgtcaagcgtggctag

SEQ ID NO: 32369 - protein, 261 aa, Streptomyces coelicolor A3(2)
MRIARFSIDGNVAFGAVEGDQPDQLVLDIIKGIPFADYELSGTKVPLSKVRLLPPVLPSKVVAFGRNYAEHARELGNEVPDAPFAFFKPSTSVIGPGDAVQYPSFTEELHHEAELAVVIGRMCREVPRERVQDVIFGYTCANDITARDVQRREKQWARAKGFDSSCPLGPWVETDLDLAAAGDLTVQLTVNGAQRQLGRTSEMIHSIEDLIVNISEAMTLLPGDVILTGTPAGVGPLNVGDEVAVTIEGIGTLTNKVVKRG

SEQ ID NO: 32370 - DNA, 1002 bp, Streptomyces coelicolor A3(2)
  CDS (1)..(1002): transl_table=11
atgtccgtgaaacctgaagccgcgtccgccctcttcgccggacccttcgccctggccaccctttccgctcccgagggtgctgccttccccgctctcgtcactcccgacgcccgggtgaccgacctgcggtccgccttcgaggacaccggcctcagcatgcgcgggctcctcgacgactgggacgcggtggcgccgcggctggccgcactggccgtcgacgacgccgccgcgcgcaggccactggcggagttccgcgtgcacgcgccggtggagccgcgccaggtgttccagtcgggagccaactaccggcagcacgtcatcgacctgcacgtcgcgcaccgggccccggacgacgaccggccggaggaggagcggcgcgcggaggccgccgagatcatggaccggcgggccgccgaggacctgccgtacgtgttcatcggcctgccgagcgcggtgaccggcccctacgacgacgtcgtactcccggcctgggccgagaagcccgactgggagctggagctggcggcggtgatcggccgcccggcccaccgggtgtccgtcgaggaagccctggaccacgtcgcgggctacacgatcgccaacgacctgaccgaccgtgccacggtcttccgtcgggacatgccgcagatcggcaccgactggctgcgcagcaagaacgcccccgggttcaccccgctcggcccctggatcgtgcccgccgcctcgatcgcgaacccgggcgacctgcgcctcacgctgaggctcaacggcgagaccatgcaggacgagtccaccaaggacatgatcttcaatgtcgcccggatggtctcccacgtctcgcagaccgcccggctgctccccggcgacctggtgctcaccggctcccccgccggcaacggcatgcactggggccggctgctgcgcgacggcgacgtcatggacgcctcgatcaccgggctcggtgcccagcgcacccgctgtgtggcggaggcggcccgatga

SEQ ID NO: 32371 - protein, 333 aa, Streptomyces coelicolor A3(2)
MSVKPEAASALFAGPFALATLSAPEGAAFPALVTPDARVTDLRSAFEDTGLSMRGLLDDWDAVAPRLAALAVDDAAARRPLAEFRVHAPVEPRQVFQSGANYRQHVIDLHVAHRAPDDDRPEEERRAEAAEIMDRRAAEDLPYVFIGLPSAVTGPYDDVVLPAWAEKPDWELELAAVIGRPAHRVSVEEALDHVAGYTIANDLTDRATVFRRDMPQIGTDWLRSKNAPGFTPLGPWIVPAASIANPGDLRLTLRLNGETMQDESTKDMIFNVARMVSHVSQTARLLPGDLVLTGSPAGNGMHWGRLLRDGDVMDASITGLGAQRTRCVAEAAR

SEQ ID NO: 32372 - DNA, 1017 bp, Drosophila melanogaster
  CDS (1)..(1017)
atgcctgcctttatgcacctccttcgcaacttcattcccaagtggtgtctcccacgtccagagaagcatctccagaaccacatattccgtcagctccagacgaatcacccatccgccgcactggtggccatcaaaacaagtgaacaggtgctgcccaagtgcagattcatgcagtaccggcgcgccaatgagcaggtgaagcgattgggcatggtctccgaggatggcagcaagatggcggagctatcgagcatgacctgcgccgcccccaatatgatggacttcatccagcagagatactgcatggttagcctgctggacagtgtgcaattcatgaagatcgaggatgtggaggccgtggatctccgcctgctgccacccatcgattcccccagtaagatcattggcgtggactgcaactatgtggataactgtgatgagcagcacatctcgattccgagggagccgagttttcacgtcaagttcgcctcctcgataaccggagctctggacaacatacgggcgcatagttcggccaaacacattgactatggctgccagttggccgtggttatgggcaaaagatgccgtgaagtttcgcccaaagaggctctgaatcacgtatttggattcatggtggtccaggacatcgtggcaagggactggaatgttccgctgggcggtcactcaatggatactttcctcccactgggacctacaattgtgcacaggtgccatgtgccagacttaaacaatctgtggattaagacaatcatcaatggcgaggagcgccagacgggcaatacccgtaatatgatattcaagatcgacttccttattcaccgcctatcccaatatttaactctctgtccgggcgacattatactaacgggaacacccgccggatcgggtgcatttcgtcatccgtcgtgctttttgaagcccggtgatcttatagagagcgaaattcaaaatttgggcaaaatgtgcaataaagtcgttaattcctattcttga

SEQ ID NO: 32373 - protein, 338 aa, Drosophila melanogaster
MPAFMHLLRNFIPKWCLPRPEKHLQNHIFRQLQTNHPSAALVAIKTSEQVLPKCRFMQYRRANEQVKRLGMVSEDGSKMAELSSMTCAAPNMMDFIQQRYCMVSLLDSVQFMKIEDVEAVDLRLLPPIDSPSKIIGVDCNYVDNCDEQHISIPREPSFHVKFASSITGALDNIRAHSSAKHIDYGCQLAVVMGKRCREVSPKEALNHVFGFMVVQDIVARDWNVPLGGHSMDTFLPLGPTIVHRCHVPDLNNLWIKTIINGEERQTGNTRNMIFKIDFLIHRLSQYLTLCPGDIILTGTPAGSGAFRHPSCFLKPGDLIESEIQNLGKMCNKVVNSYS

SEQ ID NO: 32374 - DNA, 687 bp, Unknown
  Unidentified
  CDS (1)..(687)
atgcaactaactcaaatcctcaggatggcgtgccaaaaccaaaatgccgccaacttcttgagcaatggcaagaaaattgtgggggtggctctcaattacatggacgttgtgctggccaggaacgttcccgtgcccaaggagccgctcgtcttcctcaagcccacatcttcgtacctccaggagggtcagcccattgtgttaccaaaagtctttaccaaggtggcatatgaagtggaactaggcgtggtgattggaaagccctgcaagaacgtatccaaggcagatgccatgagctatgtggcaggatactgcctggctttggatctaactgcccagtgcaatttgggaccagctcgggcggccggtcatccgtggaccttgggcaagggatttgatacttctacgcccgtgtcccagtttatacccatcgaaaaagtgacggacccgcacaacttgccgctttggctcaccgtcaatggagaccttaagcaaaacgggtgcactgcagacttaatattcaaggtgcccgacatcatttcctacgtgtccaagtacatgaccctggaggccaacgatctgatccttaccggaacgcccaatggtgccgatgcgttcaaggcaggcgatgtaattcagtgtggaatggccgatctcgctaaattgaccttccaagtggaggctgaataa

SEQ ID NO: 32375 - protein, 228 aa, Unknown
  Unidentified
MQLTQILRMACQNQNAANFLSNGKKIVGVALNYMDVVLARNVPVPKEPLVFLKPTSSYLQEGQPIVLPKVFTKVAYEVELGVVIGKPCKNVSKADAMSYVAGYCLALDLTAQCNLGPARAAGHPWTLGKGFDTSTPVSQFIPIEKVTDPHNLPLWLTVNGDLKQNGCTADLIFKVPDIISYVSKYMTLEANDLILTGTPNGADAFKAGDVIQCGMADLAKLTFQVEAE

SEQ ID NO: 32376 - DNA, 882 bp, Drosophila melanogaster
  CDS (1)..(882)
atgcaagctgccagaatgaggttcgttcaatacctgcgaaaaggtgacttggccaagcgacttggtctactgtccgaggatcaaaagtcgctggtggaatttgccggcttggagggtgtgcccagcgatctaaagatcctgattgcccaggatcccaatctggaggaactggcgaagaaggccgaaaagcagccgcgactcgaggtgaatgatgatgtcactttgctgccgcctcttaccgatcccggcaagatcatctgcattggtctgaactaccaggaccactgcgatgagcagaacaagccgacccccaaggaaccattgttctttagcaagtttaacaatgccctggtgggtcctcaagataatgtcatcgctcatgcggccagcagcaaaatcgattgggaggttgagctggtctgtgtcattggcaaggtcgcccgccaggtgcccaaatcgcaggccatggactatgtcttcgggtattcggtggcccaggatatctccgcccgcgactggcagaaggaacgcaacggtggtcagttccttatgggcaagtcgatggacacttttctgccgctgggaccggctgtggtgcacaagagtctggtgccggatgtttacaacttgaatctgaaaacctgggtcaacggcgtggagaagcagaacggcaataccggcaacttgatcttcaagctggacgatgtgatcaatcgtctgtcgcagaccattaccctgctgcccggcgacatcatagtcaccggaacgcccaagggcgtgggcatgcatcgcactccgccggaattccttcagcccggtgatgtcgtgcagtcggagattgttggattgggcaagctgtgcaacaagattgtggctccctaa

SEQ ID NO: 32377 - protein, 293 aa, Drosophila melanogaster
MQAARMRFVQYLRKGDLAKRLGLLSEDQKSLVEFAGLEGVPSDLKILIAQDPNLEELAKKAEKQPRLEVNDDVTLLPPLTDPGKIICIGLNYQDHCDEQNKPTPKEPLFFSKFNNALVGPQDNVIAHAASSKIDWEVELVCVIGKVARQVPKSQAMDYVFGYSVAQDISARDWQKERNGGQFLMGKSMDTFLPLGPAVVHKSLVPDVYNLNLKTWVNGVEKQNGNTGNLIFKLDDVINRLSQTITLLPGDIIVTGTPKGVGMHRTPPEFLQPGDVVQSEIVGLGKLCNKIVAP

SEQ ID NO: 32378 - DNA, 714 bp, Chlorobium tepidum TLS
  CDS (1)..(714): transl_table=11
atgaaaacattttcatctctgtcaaaaccagccactcatcgctcgatttactgtgtcggcaaaaactaccctgatcacgctcgtgaaatggcttcatgggagactgacaagcccgagccgctgcatgaaaaggagcctgttatctttatgaaacccggcacggcgctttctactgacggctgcacctcgataccgcggttcgaagggcagctggtgagcagaaaccttcattacgaaggcgagctggtgctgctgattggcgcggacgccgatgaagtatcgcttgccgatgcttcggcgatcatcgccggttacgccgccgggctcgatatgacgctgcgcgatgtacagctcgaagccaaaaatgccggaaatccctggctgaaaagcaaggggtttcgccagagcgcactcgtctcggagttcatcgctccggaatcggctggcccgtgggctgaactcgccatttcgctgcggctgaacggagagcagaagcagtactcgaaggtctcgaaaatgactttttcaccggcctatctggtgcattatttatcgtatatttacgggctgcgagccggagaccttgtctttaccggcactcctgcgggcgtcggaagcgtgctgccgggcgatcgtctcgacgtttcgcttgaaactgccgacgaccattcgcaggcaaaaatactggtatcgctccaggcgactgtttcctga

SEQ ID NO: 32379 - protein, 237 aa, Chlorobium tepidum TLS
MKTFSSLSKPATHRSIYCVGKNYPDHAREMASWETDKPEPLHEKEPVIFMKPGTALSTDGCTSIPRFEGQLVSRNLHYEGELVLLIGADADEVSLADASAIIAGYAAGLDMTLRDVQLEAKNAGNPWLKSKGFRQSALVSEFIAPESAGPWAELAISLRLNGEQKQYSKVSKMTFSPAYLVHYLSYIYGLRAGDLVFTGTPAGVGSVLPGDRLDVSLETADDHSQAKILVSLQATVS

SEQ ID NO: 32380 - DNA, 693 bp, Yersinia pestis KIM
  CDS (1)..(693): transl_table=11
gtgtgtctattagggtataaattcaagagaggcagtatgtatcaacatagagactggcaaggggctttgctggatttccccgtaaataaagtggtttgcgtcggcagtaactatgccgaacatatcaaagagatggggagtactgcctctgtggagcctgtactgtttatcaaacctgaaaccgcattatgcgatatccgccaaccggtatcgataccgaaagattttggctcagtgcatcatgaaattgaattagccgtgttgatcggaacgccgttaaagcaagccagcgaagatagagtcgcacgggcgattgccggttacggtgtggcattggacttaacgctacgtgagctgcaggcaggttttaaaaaagcggggcaaccatgggaaaaagccaaggcgtttgatggttcttgcccgatatccggttttattcccgttgctgagtttggtgatgcacagcaggcagatttatcgctaacgattaatggggaaatccgtcaacagggaaatacccgtgacatgattacaccaattattccgttaatcagttacatgagccgtttctttaccttacgtgctggcgatatcgtgctgaccggtacgccgcaaggcgtagggccgatgcagtcaggtgatatgcttaaaattatgctcaatggcaaaacagtgaatacccgcataatataa

SEQ ID NO: 32381 - protein, 230 aa, Yersinia pestis KIM
MCLLGYKFKRGSMYQHRDWQGALLDFPVNKVVCVGSNYAEHIKEMGSTASVEPVLFIKPETALCDIRQPVSIPKDFGSVHHEIELAVLIGTPLKQASEDRVARAIAGYGVALDLTLRELQAGFKKAGQPWEKAKAFDGSCPISGFIPVAEFGDAQQADLSLTINGEIRQQGNTRDMITPIIPLISYMSRFFTLRAGDIVLTGTPQGVGPMQSGDMLKIMLNGKTVNTRII

SEQ ID NO: 32382 - DNA, 810 bp, Thermosynechococcus elongatus BP-1
  CDS (1)..(810): transl_table=11
atggtggaacggtttgtgcgggtgcagaccacggggggacaaattcattacggcacactgcaactcaatcgggaagtgattatttgggatgcagcaccctggctccacggccaacccactcaccaagtcctcagtcccgatagctaccaactgctggctccctgctccccctcgaaaattgttgctgtggggcgcaactatgtcaaacacgctgcggaaatgggcgatagtgtcccccctgagccattgatttttctgaaaccaccgacaacggttcaagcccccggcggtcccatttggtatccgccccaagtgcagcgcgtcgactatgagggggaattggcggtgatcatgggtcgccgtacccgtgcttgccctgaaaatgaagcccttgagcatatttggggctacacgatcgccaacgatgtcactgctcgggatctccaacagcgggagcagcaatggacacgggctaaggggtttgacacattttgccccctaggtccttggattgtgcgagaggttcccagtgatgcgcggttgcaaacttttatcaatgaggcggcgtcaccggtccaatcagcaacgattgatcaaatggttttctcacccgcaaagttggtgagtttcattagttatgtgatgacgctgctgccgggggatgtggtattgacgggaacacccgcaggaattggtcccttacaagtgggcgatcgcgtgcgcgtcgagatagaaggcattggcagcctgctttcagtcgtcacaacacctgaaaccccctggacaccctccttgggtcgtgcctactag

SEQ ID NO: 32383 - protein, 269 aa, Thermosynechococcus elongatus BP-1
MVERFVRVQTTGGQIHYGTLQLNREVIIWDAAPWLHGQPTHQVLSPDSYQLLAPCSPSKIVAVGRNYVKHAAEMGDSVPPEPLIFLKPPTTVQAPGGPIWYPPQVQRVDYEGELAVIMGRRTRACPENEALEHIWGYTIANDVTARDLQQREQQWTRAKGFDTFCPLGPWIVREVPSDARLQTFINEAASPVQSATIDQMVFSPAKLVSFISYVMTLLPGDVVLTGTPAGIGPLQVGDRVRVEIEGIGSLLSVVTTPETPWTPSLGRAY

SEQ ID NO: 32384 - DNA, 690 bp, Brucella suis 1330
  CDS (1)..(690): transl_table=11
atgacgacttatgtttttgcgccacgcccgcagacgtttctgcccgtgaagggaacggatgcacgctttcccgtgcaccgcatttattgcgtcggccagaactatgccgatcacgctatagaaatgggcggcgatccgacgcgcaacccgcccttcttcttccagaaaaacccggattgccttgtgatcgagggcggcgattttccttatccgccaaagaccgaggatgtgcatcacgagatcgagctggtggtggcgttgaagagcggcggcagcgatatccctgtagaaaaggcgctggaccatgtttacggctatgcggtcggcatcgacatgacgcgccgtgacttgcaggccgtggccaaaaaggcgggccgcccgtgggaagtggccaaggcgtttgaacattcggccccctgttcggctgtcgtgcctgccgctgaaacaggccacccggagcaggcggcgatttcgcttgccatcaacggtgagatgcgccagtccggcaatctcaaccagatgatctggaaagtgccggaaaccatttcctacctgtcgtcgctctttgatctgcaacccggcgatcttatctttacaggtacgcctgcgggcgtcgggccggtgaagcgcggcgaccgtctggagggcaaggtggatggagtgggaatactatccgtaaccgtggtttga

SEQ ID NO: 32385 - protein, 229 aa, Brucella suis 1330
MTTYVFAPRPQTFLPVKGTDARFPVHRIYCVGQNYADHAIEMGGDPTRNPPFFFQKNPDCLVIEGGDFPYPPKTEDVHHEIELVVALKSGGSDIPVEKALDHVYGYAVGIDMTRRDLQAVAKKAGRPWEVAKAFEHSAPCSAVVPAAETGHPEQAAISLAINGEMRQSGNLNQMIWKVPETISYLSSLFDLQPGDLIFTGTPAGVGPVKRGDRLEGKVDGVGILSVTVV

SEQ ID NO: 32386 - DNA, 660 bp, Shigella flexneri 2a str. 301
  CDS (1)..(660): transl_table=11
atgtatcaacatcacaactggcaaggtgcgctgctggattatccggtgagtaaagtagtctgtgttggcagtaactatgccaaacatattaaagagatgggcagcgcagtgcccgaagagccagtgctgtttattaaaccagaaacggcactgtgcgatctgcggcagccattggcgatcccatccgatttcggttcagttcatcatgaagtcgaactggcggtgttgattggcgcgacgctgcgtcaggcaacggaagagcatgtccgcaaagccattgccggttacggcgtggcgcttgatctgacattgcgtgatgttcagggaaaaatgaagaaagccgggcagccgtgggaaaaggctaaagcgtttgataactcttgtccgctttccgggtttatccccgcggcggaatttaccggcgatccacaaaatacaacgctgggcctgagcgtaaacggcgaaaaacgccagcaaggtacgactgcggacatgatccataaaatcgttccgttgatcgcttatatgagcaagttttttaccctcaaggccggtgacgttgtgttgacaggcacgcctgatggcgtcggcccgttgcaaagcggtgatgagctgacagtcactttcgatgggcattctttgacaactcgcgttttgtaa

SEQ ID NO: 32387 - protein, 219 aa, Shigella flexneri 2a str. 301
MYQHHNWQGALLDYPVSKVVCVGSNYAKHIKEMGSAVPEEPVLFIKPETALCDLRQPLAIPSDFGSVHHEVELAVLIGATLRQATEEHVRKAIAGYGVALDLTLRDVQGKMKKAGQPWEKAKAFDNSCPLSGFIPAAEFTGDPQNTTLGLSVNGEKRQQGTTADMIHKIVPLIAYMSKFFTLKAGDVVLTGTPDGVGPLQSGDELTVTFDGHSLTTRVL

SEQ ID NO: 32388 - DNA, 711 bp, Pseudomonas putida KT2440
  CDS (1)..(711): transl_table=11
atgacttacctgttcaacccgccggccatcgtcagcctgccgatccgcggcagcgatgcgcgcttcccggtcggccgggtgttctgcctcggccgcaactacccgtggccggaatcctacggcgcggcgccgcaggagcctgtgtttttcatgaaaccggcaagcaacgtggtcgaggcactgggcgaactgcccttcccgccgcagaccgacgagttctgccatgaaatcgagctggtcgcggccatcgccaaaggcggcgccaacatcgcccgcgagcatgccctggagcacgtgttcggctttgccgccggtctggacatgacccgtcgcgatcatcagcgcaaggccaaggccgagggcctgccgtgggaagccgccaaggtattcgaggcttcggcaccgatgaccgccatcgtccctgccagtgaatgcgactggccgctggatacgtcgctatggctgcaggtcaatggccaggagcgccaacgtgcacacctcagccagcagacctgggcattggctgaagtgatcagcaggctgtctcgccaactgccgctgcgcccgggcgacctgatcatgaccggcagcccgcccggcgtggcaccgctgaacccgggcgacacccttcacgccggcatcgatggtatcggcgaactgcacctgcacgtcggtcctcgccctgtcgggcataccgccaacgccgcctga

SEQ ID NO: 32389 - protein, 236 aa, Pseudomonas putida KT2440
MTYLFNPPAIVSLPIRGSDARFPVGRVFCLGRNYPWPESYGAAPQEPVFFMKPASNVVEALGELPFPPQTDEFCHEIELVAAIAKGGANIAREHALEHVFGFAAGLDMTRRDHQRKAKAEGLPWEAAKVFEASAPMTAIVPASECDWPLDTSLWLQVNGQERQRAHLSQQTWALAEVISRLSRQLPLRPGDLIMTGSPPGVAPLNPGDTLHAGIDGIGELHLHVGPRPVGHTANAA

SEQ ID NO: 32390 - DNA, 666 bp, Pseudomonas putida KT2440
  CDS (1)..(666): transl_table=11
atgagttaccagcaccagtacgtagacggcacgcgcattcacttccccttgggcaaggtggtgtgcatcggccgtaactatgccgagcatgccaaggaactggacaacccgatccccaccgagccgctgctgttcatcaagccaggcagctgcgtggtgccggccgaaggtggcttcaagatcccggccgagcgcgggtcggtgcactatgaggttgaaatcgccgtgctgctgggcaagccgctgtcgacccacccgagcgaggaagaggtgctggacgccatttccggttacgcaccggcgctggacctgaccctgcgcgacgtgcaggccaaactgaaggaaaaggggctgccctgggagctggccaagtgctttgacggcgcttgcgtgctgccaccgttcgtctcggccgccagcttcgaggacgtgacagacatcccggtgcgcctgaccgtgaacggcgaagtacgccaggatggtaatagcgcgatgatgctgaacccgatcgtgccgatgattcagtacatggcagcgcatttctcgctacaagcgggggatgtgatcctcaccggtaccccggccggcgtcgggccgttcaatgtcggtgacgagctggtgctggagctgccgggtgtgagccgcttcgaaagccgggtgctttga

SEQ ID NO: 32391 - protein, 221 aa, Pseudomonas putida KT2440
MSYQHQYVDGTRIHFPLGKVVCIGRNYAEHAKELDNPIPTEPLLFIKPGSCVVPAEGGFKIPAERGSVHYEVEIAVLLGKPLSTHPSEEEVLDAISGYAPALDLTLRDVQAKLKEKGLPWELAKCFDGACVLPPFVSAASFEDVTDIPVRLTVNGEVRQDGNSAMMLNPIVPMIQYMAAHFSLQAGDVILTGTPAGVGPFNVGDELVLELPGVSRFESRVL

SEQ ID NO: 32392 - DNA, 666 bp, Pseudomonas syringae pv. tomato str. DC3000
  CDS (1)..(666): transl_table=11
atgagctaccagcacaaatatgtcgatggaacgagcattcacttcccgctgggcaaagtggtctgcatcggccgcaactatgccgagcacgccaaggaattgggcaacccggtgcccaccgagccgctgctgttcatgaagcctggcagtgcggtagttgcactggaaggcggtttcaccatcccggccgatcgtggctcggtgcattacgaagccgagattgtggtgttgatcggcaagcccctgagcaagaatccgtcccgcgaagaagtgctcgacgcgatcagcggctttgcacccggcctggacctgaccctgcgtgacgtgcagtcccgtctgcgcgagaaaggcctgccgtgggaactggccaagtgcttcgacggcgctgcggtgatccctccattcgtcccggctggcaccttcacggacctgacagacatcggcattcgtctgaccatcaacggcaaagtggtgcaggacggcaacagcagcctgatgctcaaccccatcgtgccgatgattcagcacatggcggccaacttctcgttgcaggccggtgacctgatcatgaccggtacgcctgctggcgtggggccgtttgaagccggtgacgaaatcgttctggaactgaccggtcaaacgccattcaccagcgtcgttcgctga

SEQ ID NO: 32393 - protein, 221 aa, Pseudomonas syringae pv. tomato str. DC3000
MSYQHKYVDGTSIHFPLGKVVCIGRNYAEHAKELGNPVPTEPLLFMKPGSAVVALEGGFTIPADRGSVHYEAEIVVLIGKPLSKNPSREEVLDAISGFAPGLDLTLRDVQSRLREKGLPWELAKCFDGAAVIPPFVPAGTFTDLTDIGIRLTINGKVVQDGNSSLMLNPIVPMIQHMAANFSLQAGDLIMTGTPAGVGPFEAGDEIVLELTGQTPFTSVVR

SEQ ID NO: 32394 - DNA, 777 bp, Streptomyces avermitilis MA-4680
  CDS (1)..(777): transl_table=11
gtgcgcatcgccagattctccatcgacggcaacgtcgctttcggcgcggtcgagggcgacaagccggacgagctcgtcctcgacatcatcaagggcatcccgttcgcggacttcgagctctccggtacgaaggttcccctcaacaaggtgcgcctgctgccgcccgtgctccccaacaaggtcgtggccttcggccgcaactacgcggagcacgccaaggagctgggcaacgaggtgcccgacgccccgttcgccttcttcaagccgtcgacctcggtgatcggccccggcgacccgatccagtacccgtccttctcgaacgagctgcaccacgaggccgagctggcggtggtcatcggccgcatgtgccgcgaggtaccgcgtgagcgcgtcaaggacgtcatcctcggctacacctgcgccaacgacatcaccgcgcgtgacgtccagaagcgcgagaagcagtgggcccgggccaagggcttcgacagctcctgcccgctcggcccctgggtggagacggacctcgacccgagcgacgtcaccatccagctcacggtcaacgggcaacagcggcagctcggccgcaccagcgagatgatccactcgatcgaggatctgatcgtcaacatcaccgaggccatgacgctgctccccggcgacgtgatcctcacgggcaccccggctggggtcggccccctcaacgtcggcgacgaggtcgccgtcaccatcgaaggcatcggcactctcaccaacaaggtgatcaagcgtggctaa

SEQ ID NO: 32395 - protein, 258 aa, Streptomyces avermitilis MA-4680
MRIARFSIDGNVAFGAVEGDKPDELVLDIIKGIPFADFELSGTKVPLNKVRLLPPVLPNKVVAFGRNYAEHAKELGNEVPDAPFAFFKPSTSVIGPGDPIQYPSFSNELHHEAELAVVIGRMCREVPRERVKDVILGYTCANDITARDVQKREKQWARAKGFDSSCPLGPWVETDLDPSDVTIQLTVNGQQRQLGRTSEMIHSIEDLIVNITEAMTLLPGDVILTGTPAGVGPLNVGDEVAVTIEGIGTLTNKVIKRG

SEQ ID NO: 32396 - DNA, 696 bp, Bordetella pertussis Tohama I
  CDS (1)..(696): transl_table=11
atggattacgtatttcccccttcgccgccggcggccgtgccggtggcaggcggcaacgcccgcttcccggtgcgccgcgtctattgcgtgggccgcaactacgccgagcatgccaaggaaatgggcttcaccggccgcgaagatccgttcttcttctgcaagcctgccgacgccatcctgtcggtgggcgatggcgccacgggcgaaatgccgtacccgcccaaaacggccaacctgcactacgaaatggagctggtcgtcgtgctgggcaagggcgggcgcgacctgaccgtcgagcaggccgacgaatgcgtatggggctacgccctgggcctggacatgacacgccgcgacctgcagggcgaggccaagaagcagggccgtccctgggaagtgggcaaggctttcgatctctcggcgccgctcggccccatccatccgcgcagcgccgtcggcacgctggacaaaggcgccatctggctggacgtcaatggcgagcgcaagcaatccagcgacatttcgcagatgatctggaacatccccgaaagcatcgcctatctgtcgggcctgttcgagctgcaaccgggcgacatcattttcaccggcacgccggaaggcgtgggcgcggtggtcaagggagacgtcatcgtcggtggcgtcgagggcctgggcgagctgcgcgtacgcatcgcctga

SEQ ID NO: 32397 - protein, 231 aa, Bordetella pertussis Tohama I
MDYVFPPSPPAAVPVAGGNARFPVRRVYCVGRNYAEHAKEMGFTGREDPFFFCKPADAILSVGDGATGEMPYPPKTANLHYEMELVVVLGKGGRDLTVEQADECVWGYALGLDMTRRDLQGEAKKQGRPWEVGKAFDLSAPLGPIHPRSAVGTLDKGAIWLDVNGERKQSSDISQMIWNIPESIAYLSGLFELQPGDIIFTGTPEGVGAVVKGDVIVGGVEGLGELRVRIA

SEQ ID NO: 32398 - DNA, 696 bp, Bordetella bronchiseptica RB50
  CDS (1)..(696): transl_table=11
atggattacgtatttcccccttcgccgccggcggccgtgccggtggcaggcggcaacgcccgcttcccggtgcgccgcgtctattgcgtgggccgcaactacgccgagcatgccaaggaaatgggcttcaccggccgcgaagatccgttcttcttctgcaagcctgccgacgccatcctgtcggtggccgatggcgccacgggcgaaatgccgtacccgcccaaaacggccaacctgcactacgaaatggagctggtcgtcgtgctgggcaagggcgggcgcgacctgaccgtcgagcaggccgacgaatgcgtatggggctacgccctgggcctggacatgacgcgccgcgacctgcagggcgaggccaagaagcagggccgtccctgggaagtgggcaaggctttcgatctctcggcgccgctcggccccatccatccgcgcagtgccgtcggcacgctggacaaaggcgccatctggctggacgtcaatggcgagcgcaagcaatccagcgacatttcgcagatgatctggaacatcccggaaagcatcgcctatctgtcgggcctgttcgagctgcaaccgggcgacatcattttcaccggcacgccggaaggcgtgggcgcggtggtcaagggagacgtcatcgtcggtggcgtcgagggcctgggcgagctgcgcgtacgcatcgcctga

SEQ ID NO: 32399 - protein, 231 aa, Bordetella bronchiseptica RB50
MDYVFPPSPPAAVPVAGGNARFPVRRVYCVGRNYAEHAKEMGFTGREDPFFFCKPADAILSVADGATGEMPYPPKTANLHYEMELVVVLGKGGRDLTVEQADECVWGYALGLDMTRRDLQGEAKKQGRPWEVGKAFDLSAPLGPIHPRSAVGTLDKGAIWLDVNGERKQSSDISQMIWNIPESIAYLSGLFELQPGDIIFTGTPEGVGAVVKGDVIVGGVEGLGELRVRIA

SEQ ID NO: 32400 - DNA, 882 bp, Bordetella bronchiseptica RB50
  CDS (1)..(882): transl_table=11
atgaagtttgcaagcctcgactatcaaggcaaggcacaggtggcgatcttggacacggaggccggcgtgttctggcctttgtccgggcttttgcgcgacgaaggcgacctggtcgagctgatcagcgcctgggacagtgtgcaccagcggatcgcgccgtcgggcgccggcattgctctcgatcgggcgaccatcctcgccccgatctcatcgccccggcgcaacatcttctgtgtcgggaaaaactaccacgagcacgcagccgagttccagcgctcggggttcgacagcagcgcaaaggatggagagcatgcccccgaagcgccggtggtattcaccaaaccggcctcggcgatcgtggcccccggggccgtcattccccggcatgcccaggtgacgcagcagctggattacgaggccgagctggcggtcgtgatcggcaaggccggacaaggcatcaagaaggctgacgccatgtcgcacgtcttcggctacaccatcatcaacgatgtcacggcccgagaccttcagaaattgcatcgtcagtggttcatcggcaaatcgttggatggcttctgcccgatgggcccgtatatcgtgacggccgatgaagtggatggacaggccctggatgtgcgatgctggatcaatgacgagctgcgacagaacgcgaacacgcggcaactgatcttcgacatcccgaccctgatcgagaccttgtcggccggcatgacgctgcagccgggcgacatcatcgcgaccggcaccccggccggcgtggggataggttttacgcccccacgcttcctgcaatcgggagaccgtgtccgcatcgagatcgcgggattgggcgtactcgaaaacacggtcggtaacgagtaa

SEQ ID NO: 32401 - protein, 293 aa, Bordetella bronchiseptica RB50
MKFASLDYQGKAQVAILDTEAGVFWPLSGLLRDEGDLVELISAWDSVHQRIAPSGAGIALDRATILAPISSPRRNIFCVGKNYHEHAAEFQRSGFDSSAKDGEHAPEAPVVFTKPASAIVAPGAVIPRHAQVTQQLDYEAELAVVIGKAGQGIKKADAMSHVFGYTIINDVTARDLQKLHRQWFIGKSLDGFCPMGPYIVTADEVDGQALDVRCWINDELRQNANTRQLIFDIPTLIETLSAGMTLQPGDIIATGTPAGVGIGFTPPRFLQSGDRVRIEIAGLGVLENTVGNE

SEQ ID NO: 32402 - DNA, 651 bp, Chromobacterium violaceum ATCC 12472
  CDS (1)..(651): transl_table=11
atgtcgagtgtaaaacttggcttacatgccatccgcgtcggcaatattttctgcataggccgcaattacgcggcgcatgccgccgagctgggcaacaaggtggaggacgagccgctggtattcctgaagcccacctcggcgttgctggacgagtcctcgccgatacggcttccggaatattccggcgacgtgcaccacgagtgcgagctggtggcgctgataggcaagggcggcgacgacattccgccggagaaggcgctggatcatgtggccggttatggaatagggctggatctgaccgcgcgcgacgcgcaggcggaggccaagcgcaaaggccagccgtggaccaaggccaagggcttccgcggcgcggcctgcgtgtcgacgctggtgccggcggccagggtggaggatccgcagcggctgaagttcgagctgcgcgtcaacggccagctgcgccagcgcggcgacgccggcctgatgctgttcacgctggccgagcagatcagctacctgtccaggctgtacggcctgtccgacggcgatctgatcttcaccggcacgcccgaaggcgtggcgcgcatcgaatccggcgaccagctggacctcagcctgcacgggcaagtgtcggcgcattggaaggtggcatga

SEQ ID NO: 32403 - protein, 216 aa, Chromobacterium violaceum ATCC 12472
MSSVKLGLHAIRVGNIFCIGRNYAAHAAELGNKVEDEPLVFLKPTSALLDESSPIRLPEYSGDVHHECELVALIGKGGDDIPPEKALDHVAGYGIGLDLTARDAQAEAKRKGQPWTKAKGFRGAACVSTLVPAARVEDPQRLKFELRVNGQLRQRGDAGLMLFTLAEQISYLSRLYGLSDGDLIFTGTPEGVARIESGDQLDLSLHGQVSAHWKVA

SEQ ID NO: 32404 - DNA, 660 bp, Porphyromonas gingivalis W83
  CDS (1)..(660): transl_table=11
atgaagataattgctgtcggcatgaactatggtgcgcatgtcagcgaaatgcgacgtgcggacatccttcccgttgctccctgtccggatggagggggagccgatttttgtgtggaggaacctgtgcttttcctcaaggccgactccttgttgcgcgaagggcatccccttttctatccggatttttctcaggagatccactatgagacggagctggtggttcgtatagatcgtatcggcaagtgcatagccgaacgttttgctcaccgctattacagtgaggttactgtcggtatagacttcacggctcgtgacctccagcgtcgtgccaaagccaaggggttgccctgggcaacggccaaagctttcgacaactccgctgccgtagggcggtgggtgaaaaaagactcgctccggcacggtgtgcaggaattgggcctgcgattggatatagacggacgcacggtgcagcagggcaatacacgggatatgctcttttccgtagatcgtttgatcgcttatgccagtcgtttcttcacacttcgtatgggggatcttatctttacagggactccggcaggggtaggccccattgctatcgggcagcacctcgaagcctatctcgaagagcaaaaactgctcgacatatccatcaaataa

SEQ ID NO: 32405 - protein, 219 aa, Porphyromonas gingivalis W83
MKIIAVGMNYGAHVSEMRRADILPVAPCPDGGGADFCVEEPVLFLKADSLLREGHPLFYPDFSQEIHYETELVVRIDRIGKCIAERFAHRYYSEVTVGIDFTARDLQRRAKAKGLPWATAKAFDNSAAVGRWVKKDSLRHGVQELGLRLDIDGRTVQQGNTRDMLFSVDRLIAYASRFFTLRMGDLIFTGTPAGVGPIAIGQHLEAYLEEQKLLDISIK

SEQ ID NO: 32406 - DNA, 789 bp, Gloeobacter violaceus PCC 7421
  CDS (1)..(789): transl_table=11
atgcacaccgtgcgtttttgccacccgcagcttcccgaccacgctcctcactacggcctgttacaccctgccgggactatcgagcggctcgacggtgccccctggctggggggacaacccaccggcatctggttcgatgtcgagcaaggacaactgctcgccccctgcctgccgggcaaaattgtctgcgtcggcaaaaactaccgcgatcacgccgccgagatggcccagttgcgcggcgacgccggggtgcctcctgaaccgctgctctttctcaaacccccctcggccctcgcggctcccggcgaatccatcgtctatccgccccagtcggagcgcgtcgattacgagggcgaactggctctggtcatcggccgcacctgccgccgggtgccggtggagcgggctctggattatctattcggctacaccgccgccaacgacgtcaccgcccgcgacctgcagggcaaggacaagcagtggacccgcgccaagggtttcgacagcttctgtcctttggggcctctcatcgccacagaacttgctcccgacgcccacctgagcaccaccctcaacggcaagaccgtccagtcgagcagcatcgaccggatggtcttcccgcctgcggttttgatctcctacatcagcgcggtgatgaccctgcagccgggggatgtgatcctcaccggcaccccggcggggatcggtcccatgcagcccggcgacgaggtgggcgtcaccatagacggcgtcggcaccctcaccaacccggtcgtccgtgggctgtga

SEQ ID NO: 32407 - protein, 262 aa, Gloeobacter violaceus PCC 7421
MHTVRFCHPQLPDHAPHYGLLHPAGTIERLDGAPWLGGQPTGIWFDVEQGQLLAPCLPGKIVCVGKNYRDHAAEMAQLRGDAGVPPEPLLFLKPPSALAAPGESIVYPPQSERVDYEGELALVIGRTCRRVPVERALDYLFGYTAANDVTARDLQGKDKQWTRAKGFDSFCPLGPLIATELAPDAHLSTTLNGKTVQSSSIDRMVFPPAVLISYISAVMTLQPGDVILTGTPAGIGPMQPGDEVGVTIDGVGTLTNPVVRGL

SEQ ID NO: 32408 - DNA, 657 bp, Photorhabdus luminescens subsp. laumondii TTO1
  CDS (1)..(657): transl_table=11
atgtatcaacacagagactggcagggggcattactggatcttcctgtcaataaagtggtttgcgttggtagtaattacgctaaacatattaaagagatggggtctaagccagcggaagagccagtcgtttttattaagccggaaactgcactgtgtgatatacatcagccaattgccattccaaaggattttggtgttgttcatcatgaagttgaactggctgtactgattggtacgccgttgaaacaagcaaatgaagagcgagttggtgccgctatcgcgggtttggctgttgcattggatctcaccttgcgtgatttgcaatctaaattcaagcaagcgggtcaaccgtgggaaaaaagtaaggcgtttgatggctcttgcccgatatctgggtttattcgaataagccactttggtgatccacagaatgtccagttttcactgacggtcaataatgagctacggcagaacggtaatagtaacgatatgttgacacccatcgttcccctgatcagccatatgtcgcacttttttactttgcggccgggagatgtgattctcactggtacaccggaaggtgttggcgcactgaaacctggtgatgtgttaaaggttactctgaatgataattcactcactaccagagtgatttga

SEQ ID NO: 32409 - protein, 218 aa, Photorhabdus luminescens subsp. laumondii TTO1
MYQHRDWQGALLDLPVNKVVCVGSNYAKHIKEMGSKPAEEPVVFIKPETALCDIHQPIAIPKDFGVVHHEVELAVLIGTPLKQANEERVGAAIAGLAVALDLTLRDLQSKFKQAGQPWEKSKAFDGSCPISGFIRISHFGDPQNVQFSLTVNNELRQNGNSNDMLTPIVPLISHMSHFFTLRPGDVILTGTPEGVGALKPGDVLKVTLNDNSLTTRVI

SEQ ID NO: 32410 - DNA, 636 bp, Vibrio vulnificus YJ016
  CDS (1)..(636): transl_table=11
gtgtttgttcagggaagagaaatgagccatatccacttcagaaacaaaaccttgcaaccgggcaaagtgctctgcgttgggcgtaattatgttgagcatattgaagagctgcaaaacacaattcccgatcaaatggtgctgtttcacaagccggcgtcggcagtcaccagcacattgcattctttccatcaagagccgcttcattatgaagccgagatctgctttgtgattgaaaatggccagtatacgggggttggcatcggcttagatctcaccaaacgacagacacaaagttatctcaaagcaaaaggcctcccatgggagcgagcgaaagcctttaacggtgctgcggtacttagccgctttatcgaattgaaaggcatcgctagcgatgatctcaacctcgaactgtttattaattgtgtccgcgtacaaaaagggcatgtcaatcaaatgctgtactcaccgcaaacggtactggaagagctcaaaggttacgtgacattggatgatggcgatgtcgtgatgacaggcacacctcagggggtgggcgaagtgcataaaggcgacgtgtttttaggtcgccttaaatgtggtgacaccaccttattggaagttgagtgggtggcctgttaa

SEQ ID NO: 32411 - protein, 211 aa, Vibrio vulnificus YJ016
MFVQGREMSHIHFRNKTLQPGKVLCVGRNYVEHIEELQNTIPDQMVLFHKPASAVTSTLHSFHQEPLHYEAEICFVIENGQYTGVGIGLDLTKRQTQSYLKAKGLPWERAKAFNGAAVLSRFIELKGIASDDLNLELFINCVRVQKGHVNQMLYSPQTVLEELKGYVTLDDGDVVMTGTPQGVGEVHKGDVFLGRLKCGDTTLLEVEWVAC

SEQ ID NO: 32412 - DNA, 657 bp, Geobacter sulfurreducens PCA
  CDS (1)..(657): transl_table=11
atgaaaaccgccaggctttccccgtcggggaatgagtttcccatcggcaagatactctgcatcggccgcaattacgccgagcacatcaaggagttgggcaacgaaactcccgacgcgccggttgttttcatgaagcccgccacggccgtcatcggcgacggggaaaccatcatcatcccctcctattcgcgcgaatgtcaccatgaggccgagctggcgctcctcatcggaaaaggggggaaagacatcccgcccgaacgggcactggagcatgtggccggttacggggttgccatcgatttgacgctgcgggacgtgcaggccgaattgaagaagaaggggttgccctgggagatcgccaagggattcgacacctcctgccccctttcctcttttgtcccggcagaccgggtggccgatccccacgacctgcacattaccctccgggtgaacggagagatgcgccaggacggctcctcttccctcatgatccaccggattccccagatcctcagttacatgtcgggagttttcaccctggaaccgggagacgtgatcctgaccgggacccccgccggcgtcggccccctcgcggcgggagacgccgtggaagccgaggtcgtcggcgtggcggcgatccgggttaccgttaaataa

SEQ ID NO: 32413 - protein, 218 aa, Geobacter sulfurreducens PCA
MKTARLSPSGNEFPIGKILCIGRNYAEHIKELGNETPDAPVVFMKPATAVIGDGETIIIPSYSRECHHEAELALLIGKGGKDIPPERALEHVAGYGVAIDLTLRDVQAELKKKGLPWEIAKGFDTSCPLSSFVPADRVADPHDLHITLRVNGEMRQDGSSSLMIHRIPQILSYMSGVFTLEPGDVILTGTPAGVGPLAAGDAVEAEVVGVAAIRVTVK

SEQ ID NO: 32414 - DNA, 867 bp, Strongylocentrotus purpuratus
  CDS (1)..(867)
atgcggtttgtccagttcgaggagtcgggcaagtccagggtgggagtggaggtagaagccggtggtgattttgtagatctctgcggctctgatcagacgatcccagacaccacattgaagctgattgaaggcggggcggatctcttacaaaaggcacaaaatgtcgttgagtcttcagatcggcgcgttgtgaagagggcagacgttaaactcttgtcccccatcacgaaccctcagaaagtgctttgtatcggcatgaactatcgagaccactgcacagaacagaactaccccatccctaccgagccagtcatcttcagcaagtttgccagcgctatcataggtcctaacgatgatgtcgcctatcctgagctcacagaggctctcgactgggaggtcgagttgacggtggttatcgggaagggcggcaagaacataaaggaggcagatgccatgaaccatgtatttggatacaccgttgcacacgacgtcagcgctagggattggcagatgcaaaagaacggaaagcaatggcttctgggtaaaacgatggatgacttctgtcctcttggtcctgccattgtcacacctgacgctctttcagaccctcacaagctaggactgagatgcagagtcaatggagaaaccatgcaggagagtaacacagagcaattgatcttcaagactgcttccctcatacaatttatttcacaatttataacattgactcctggtgacatcatcttaacgggaacgcccccaggtgtgggtgtcttcaggaagccagaccctgtctatctaaagcgtggtgatgtcgttgaatgtgaaattgatgagatcggaactatcaggaatcgcatcgtttga

SEQ ID NO: 32415 - protein, 288 aa, Strongylocentrotus purpuratus
MRFVQFEESGKSRVGVEVEAGGDFVDLCGSDQTIPDTTLKLIEGGADLLQKAQNVVESSDRRVVKRADVKLLSPITNPQKVLCIGMNYRDHCTEQNYPIPTEPVIFSKFASAIIGPNDDVAYPELTEALDWEVELTVVIGKGGKNIKEADAMNHVFGYTVAHDVSARDWQMQKNGKQWLLGKTMDDFCPLGPAIVTPDALSDPHKLGLRCRVNGETMQESNTEQLIFKTASLIQFISQFITLTPGDIILTGTPPGVGVFRKPDPVYLKRGDVVECEIDEIGTIRNRIV

SEQ ID NO: 32416 - DNA, 870 bp, Nasonia vitripennis
  CDS (1)..(870)
atgaggttcgtacagttcgtgaacaaaaacggaggtccccagcacctgggggtccagctgaagcaaggcggagacataatagccatatcggtacttaattcgcgtatccccaacacactgaagaagttcctcgagggcggcgaggaattccttaaaaaggcaaagaggatagtcgccgagggccgaagcgtcatcccagagaaagatgttacattcctgccaccaatcacgcaaatggacaaactggcctgcgtcggcttaaattacagcggacactgcaaggaacagaatctcgagcctccgtcgactcctgtaatcttcagcaaattccccagcaacatcatcggccctcacgatgatattcacctgcctactatttcagacaaggtcgactgggaggcagagctggcgatcgtcatcggcaagaagtgcaagggtctgaacaacgacgaggccgaggactgcatattcggctacaccgttgctcaggacctgtcggcgcgcgactggcaaaagggcaagcgcaacggcggccaattcctcctgggcaaggcgatggacaacttctgcccactcggaccggccgtcgtcaccaaagagtcgatcgccgatgtgaagaacctcgctgtcaagacttgggtcaacgggcaactcaagcaggacggcaatacctccgagctcatcttcaagaccaacgacatcgtcgcctacctctcgcaattcttcacgctactgcccggtgatgtgatccttactggaactccagctggagttggcttcgcgcgtaatccaccggaattcttgaagaaaggagacgttctggaaaccgagatcgagagccttggacgtttgaagaataacgttctctga

SEQ ID NO: 32417 - protein, 289 aa, Nasonia vitripennis
MRFVQFVNKNGGPQHLGVQLKQGGDIIAISVLNSRIPNTLKKFLEGGEEFLKKAKRIVAEGRSVIPEKDVTFLPPITQMDKLACVGLNYSGHCKEQNLEPPSTPVIFSKFPSNIIGPHDDIHLPTISDKVDWEAELAIVIGKKCKGLNNDEAEDCIFGYTVAQDLSARDWQKGKRNGGQFLLGKAMDNFCPLGPAVVTKESIADVKNLAVKTWVNGQLKQDGNTSELIFKTNDIVAYLSQFFTLLPGDVILTGTPAGVGFARNPPEFLKKGDVLETEIESLGRLKNNVL

SEQ ID NO: 32418 - DNA, 693 bp, Magnaporthe grisea 70-15
  CDS (1)..(693)
atggcgacactacgaaacgcacgcaaggtggtctgcattggtcgcaactacgcagatcacattgccgagttgaacagcgccaagcccaagcagccgtttttcttcctcaagccgccgtcatcaattgttgcgcccggtgctggccccgtgatccgacccaaaggtgtcgatcttcactatgaggtggagctggctctcatcattggcaaggaggtcaagaacttgaaggcagacgacgaccagggtgctttggatgccattgaaagctatgccctcagcatcgacatgacggcccgcaacgtccaaaacgaggccaagaagaagggactcccctgggacattgccaagggcttcgacacgttcctgccgttcagcaacatcatccccaagtcggccatcccggaccctcacaacgtcgagctgtacctcagcgtcaacggtgaggtccgccagcaggactccaccaatctgctcctgttcaggatcccccgcgtcctggccgacatctcgagcgtcatgactctcgagaagggagacattgtgctcactggcacccccaagggcgtcggtcccgtcgtgcccggggacgtcatgcgtgccggaatccgcgtcaatggcaaggagatcgaggaggcccggattgagattcctgtggaggagtctaccagcgactatttttacaaggagacttag

SEQ ID NO: 32419 - protein, 230 aa, Magnaporthe grisea 70-15
MATLRNARKVVCIGRNYADHIAELNSAKPKQPFFFLKPPSSIVAPGAGPVIRPKGVDLHYEVELALIIGKEVKNLKADDDQGALDAIESYALSIDMTARNVQNEAKKKGLPWDIAKGFDTFLPFSNIIPKSAIPDPHNVELYLSVNGEVRQQDSTNLLLFRIPRVLADISSVMTLEKGDIVLTGTPKGVGPVVPGDVMRAGIRVNGKEIEEARIEIPVEESTSDYFYKET

SEQ ID NO: 32420 - DNA, 879 bp, Gibberella zeae PH-1
  CDS (1)..(879)
atggatactacaacatttaagcgtcttgtgcggtttgtccccaagtctgactcaactcgcatcctgatcggtgaaccatcacaagaagatctagatatcggtgttgccacgcgtgatgggaaagatgtcactgtcaatgtattcacggggtcttccgttctttctcctggcactcgaacagacagaaccgaatctattgagaggatcttgtcgcctttggcacaagaggaagtcggaaccattcgctgcattggactaaactatgtccaacacgcgaatgaagtgaagatggacattccaaagatcccaactcttttccttaagcctagcactgctttgggagacccttggcctgctcccacctttcttcccaagataacccaaaatgacggaagtggtgattatgaatcggagctggcagtagttattggcaaaaccgccaagaatgtctctgaggagaacgctatggactacgtcttgggctacacggctgccaacgatgtctcgagtcgtgtttcgcagcttaaccagtctcagtggtgcttctccaagggattcgatggagcatgcccaattgggcctgttcttgtctcaacttcggctgttcctgatccttcgaagctgcacattcgtggcctgaagaacggaaaggtacttcaagactgttcgctggacgatctcatctttagcatccccaagctagtcagtttcttatcacaaggcactacacttccagctggcacagtaattatcacgggcacgcctgctggagtaggaatggggaagagccccaaagagaacttggaacatggtgacgaattcagagttgagattttgcctcacatcggaacgctggttagcaagtttgagaacgagtag

SEQ ID NO: 32421 - protein, 292 aa, Gibberella zeae PH-1
MDTTTFKRLVRFVPKSDSTRILIGEPSQEDLDIGVATRDGKDVTVNVFTGSSVLSPGTRTDRTESIERILSPLAQEEVGTIRCIGLNYVQHANEVKMDIPKIPTLFLKPSTALGDPWPAPTFLPKITQNDGSGDYESELAVVIGKTAKNVSEENAMDYVLGYTAANDVSSRVSQLNQSQWCFSKGFDGACPIGPVLVSTSAVPDPSKLHIRGLKNGKVLQDCSLDDLIFSIPKLVSFLSQGTTLPAGTVIITGTPAGVGMGKSPKENLEHGDEFRVEILPHIGTLVSKFENE

SEQ ID NO: 32422 - DNA, 717 bp, Gibberella zeae PH-1
  CDS (1)..(717)
atggccaacctggcgcctcaagcttcatcaagcctcaagcaagcaggcaaggtcatatgtattggccgcaactttgcggaacatattgccgagctcaacagcgccaagccaaagcagcccttcttcttcctcaagcccacctcatccatcgtgctccctggtgagggtgctgtcctgagacccaagggcattgagatgcactatgaagttgagctggctcttgttatcggcaagctgaccaaagatctccaagcctctgatgttcagggcgctatggatgctgtaaaggcttacgctgttgccattgactttactgcccgcaacgctcagaatgaggccaagaagaagggtcttccgtggtcgattgccaagggcttcgacactttcctgcccatgagcaacatcattcccaagaccgccatccaggaccctcacaacgtggagctcttcctccagctcaacggcgagaccaagcagcagggctcgaccaacctgatgatctaccagatccctcgcattctaagcgacatctcaaaggtcatgactctccacccgggtgacattgtcctcactggtacacctgctggtgttggtcctgctgcgcctggtgacgttgttcgtgctggtctgaggattgacggaaaggaggtggaggagggtgctattgagattcccgtcgaggagtcgcctagttcctacactttctccgagacttaa

SEQ ID NO: 32423 - protein, 238 aa, Gibberella zeae PH-1
MANLAPQASSSLKQAGKVICIGRNFAEHIAELNSAKPKQPFFFLKPTSSIVLPGEGAVLRPKGIEMHYEVELALVIGKLTKDLQASDVQGAMDAVKAYAVAIDFTARNAQNEAKKKGLPWSIAKGFDTFLPMSNIIPKTAIQDPHNVELFLQLNGETKQQGSTNLMIYQIPRILSDISKVMTLHPGDIVLTGTPAGVGPAAPGDVVRAGLRIDGKEVEEGAIEIPVEESPSSYTFSET

SEQ ID NO: 32424 - DNA, 900 bp, Gibberella zeae PH-1
  CDS (1)..(900)
atggcatcatctactcttcagcgcaagttatttatttcactatctagtccttccaagatccttattggccagccagctgacaagaacattgacgttggcgctgccttgcgcaagggtcaagaggttgctgtcaatgtatggtcaggctcatcagttttggccccaggatcatcgactggcactaccgagactatcgaccgcgtcttgtctcctcttgcacagaatgaggttggcactatcagatgtgtcggcttgaactacagaaagcacgctgccgagtgcggacttgagcctccgccaatcccggtcattttcatgaagcccagcacatctctcgtggacccttggcctgctaagggaactgttcccaagctgagccaggtagactcgtctggcgattacgaggcggagctggcagtcgtcattggcaagacagccaagaacgttagtgaagccgaggctttggactatgttctcggatacactgctgccaacgatgtttctagtcgtactcagcaactgaaccagtcccagtggtcattctccaagagcttcgacggggctctccctctcggccctacacttgtcctgaagtcgttgattccagacccttccaaacttcacatgcgaggtcttaagaatggcgaggtgtaccaggagagcggaactgatgatctcatcttctccgtcccaaagattattagctggctgtcgcagggcaccactcttcctcctggaaccgtcatcgttactggtaccccggcgggtgttggaatgggcagaacaccaaaggatgctctgaggcaccgcgacgaatttgcagttgagatcctgccacacattggaacacttaccaacattttcgagaatgagaagagcgagttcatgacgaagctgtaa

SEQ ID NO: 32425 - protein, 299 aa, Gibberella zeae PH-1
MASSTLQRKLFISLSSPSKILIGQPADKNIDVGAALRKGQEVAVNVWSGSSVLAPGSSTGTTETIDRVLSPLAQNEVGTIRCVGLNYRKHAAECGLEPPPIPVIFMKPSTSLVDPWPAKGTVPKLSQVDSSGDYEAELAVVIGKTAKNVSEAEALDYVLGYTAANDVSSRTQQLNQSQWSFSKSFDGALPLGPTLVLKSLIPDPSKLHMRGLKNGEVYQESGTDDLIFSVPKIISWLSQGTTLPPGTVIVTGTPAGVGMGRTPKDALRHRDEFAVEILPHIGTLTNIFENEKSEFMTKL

SEQ ID NO: 32426 - DNA, 846 bp, Gibberella zeae PH-1
  CDS (1)..(846)
atgtcgatccaacgcctcgtccggtttgtgtccagtgatgatggcaagacttattatggtgctgcgaacgaatctctcaagaacgcaagaattcttgaatccggaagccctttttctacttcagctcaaatttccggcaaggagcatacaatccagaagctactatgccccattgatctcaatgatgcccgatctgttgtttgcatcggccttaattacacggatcatgccgaagaggcccagatgcctatccccaaagtccctgttgtctttttcaagcccgtgacggctcttgctggccctcatgatgatcttgtccttcctcatacctcttgggagaagggaagactggactatgaatcagaattggttattgtgattggcaaaaaggcctcgagagtctctaaagatgacgcgctagactacgtctttagttatacattccacgctggaaatgatatctcgaacagggcatggcagctggacccccaactgggtgggggacagtggtgttactcaaagtgtttcgattgctcagcacccatcggtccagccatcgtctcgaaagacattctaggctctgcagtcggacttggaattcgtggcacactcaacgacacacaatcacaagatggcaacaccaacaacatgatttttggagtcgctgagatcgtttcgttcttgagtcaaggcatgacacttctacctggaacattcattttcactggaactccagctggtgttggatttggcaagaagcctcagatcagcgtgaaggaaggcgatgttacacaagtggagattgatggtatcggagccattgtcaataaggtcgtatacgagtaa

SEQ ID NO: 32427 - protein, 281 aa, Gibberella zeae PH-1
MSIQRLVRFVSSDDGKTYYGAANESLKNARILESGSPFSTSAQISGKEHTIQKLLCPIDLNDARSVVCIGLNYTDHAEEAQMPIPKVPVVFFKPVTALAGPHDDLVLPHTSWEKGRLDYESELVIVIGKKASRVSKDDALDYVFSYTFHAGNDISNRAWQLDPQLGGGQWCYSKCFDCSAPIGPAIVSKDILGSAVGLGIRGTLNDTQSQDGNTNNMIFGVAEIVSFLSQGMTLLPGTFIFTGTPAGVGFGKKPQISVKEGDVTQVEIDGIGAIVNKVVYE

SEQ ID NO: 32428 - DNA, 1005 bp, Apis mellifera
  CDS (1)..(1005)
atgccttaccgtggtaaattacgattacttagtagagcttgcttcaccttcagaaactcgtgtgccgagaaaagcaacacgcattttgctactagtatacccggcaggaatttctctaccaatagagcggtcaacatgaggtttgtacaattcactggtaaaaatggtggtcctcaacatttaggagtgcaacttgtccaaggtggtgatataatcgcagtttcggcggtagattcgagaattccaaacacattgaaaaaatttctcgagggtggtgacgatttgttgaaaaaggccaaaagaatagtggcagaaggacgtagcgtaataccggaagtggaggtgaattttctggcgccagttacacgtatggataagttggcttgtgttggtttgaactatattggtcattgtaaagaacaaggtgtatcacctccggaaagccctgtaatttttagtaaattcgcaagtaatatcatcggaccgcgtgataatattatgcttccaccaatttcagataaagttgattgggaagcagaactcgcgatagtaatcgggaaaaagtgtaaagcattgaataacaatgaaggagaggattatatttttggttatacaatagcgcaagacattacggctcgagattggcaaaaatcgaagagaaatggcggtcaatttctattgggtaaagccatggatacattctgtccattgggaccagctgttgttactaaggaagctatttccgatatcaacaatcttaccgtaaaaacatgggtaaatggtaatattaaacaagatggtaataccagcgaactaatatttaagcctcatgaaatcgtcgcttatatttcacaatttatgacactattaccgggagacgtaattctaacgggcacgccatctggtgtgggattcactcgtaaaccgcctgaatatttacagcgtggagatgtattagaaacggaaatacaaggtttaggtcgcttgagaaacaaagttctctga

SEQ ID NO: 32429 - protein, 334 aa, Apis mellifera
MPYRGKLRLLSRACFTFRNSCAEKSNTHFATSIPGRNFSTNRAVNMRFVQFTGKNGGPQHLGVQLVQGGDIIAVSAVDSRIPNTLKKFLEGGDDLLKKAKRIVAEGRSVIPEVEVNFLAPVTRMDKLACVGLNYIGHCKEQGVSPPESPVIFSKFASNIIGPRDNIMLPPISDKVDWEAELAIVIGKKCKALNNNEGEDYIFGYTIAQDITARDWQKSKRNGGQFLLGKAMDTFCPLGPAVVTKEAISDINNLTVKTWVNGNIKQDGNTSELIFKPHEIVAYISQFMTLLPGDVILTGTPSGVGFTRKPPEYLQRGDVLETEIQGLGRLRNKVL

SEQ ID NO: 32430 - DNA, 786 bp, Candida glabrata CBS 138
  CDS (1)..(786)
atgagctacacttacctgaaggacgcaaagaagataatttgtattggtagaaactatgctgcacacatcaaagagttgaacaatgcaactccaaaacagccattcttcttcttgaagccaatgtccagtgttgtaacaccagtcgatgagaaacacgccataaaagagttgcctaagcaagcaagctaccatggtttgaacgatgacggtaccaacccaggcactatccagataccaaaaggtacggtagtccatcatgagattgaagttgcattggtgatggacaagtacatctcgaatgccaacgagtctgaattcactgcagctgatgtttacgattccatcagaggtgtagccctggcgctggacttaactgctcgtaatgttcaggacgaagccaagaagaaaggtctaccgtggtccatcggcaaaggtttcgatacgttcttgcccatgtcacatatgatcccaaagaccaaattcgaagccaataaagaaaatctacaggaagcattcagagttacttgcgatgtcaacggcactcgcagacaagacggtaacacaaacctgatgctatatccactccacaaaatcatccagcatatctcaacaatgatgactttggagccaggcgacatcatcctcacaggtacacctgctggtgtgggcccaattgctgccggtgacaacatcagcggtcagttgtactacacagacgacttgctcattgacttcaatttcgactgcgtagttcgccctggtccttacgaatacaaagaaacttag

SEQ ID NO: 32431 - protein, 261 aa, Candida glabrata CBS 138
MSYTYLKDAKKIICIGRNYAAHIKELNNATPKQPFFFLKPMSSVVTPVDEKHAIKELPKQASYHGLNDDGTNPGTIQIPKGTVVHHEIEVALVMDKYISNANESEFTAADVYDSIRGVALALDLTARNVQDEAKKKGLPWSIGKGFDTFLPMSHMIPKTKFEANKENLQEAFRVTCDVNGTRRQDGNTNLMLYPLHKIIQHISTMMTLEPGDIILTGTPAGVGPIAAGDNISGQLYYTDDLLIDFNFDCVVRPGPYEYKET

SEQ ID NO: 32432 - DNA, 786 bp, Kluyveromyces lactis NRRL Y-1140
  CDS (1)..(786)
atgtcctacgagtacttaaacagggccaaaaaaatcatttgcattggccgcaattatgctgctcatattaaagaattgaacaatgccactcctaagcaaccattcttctttttgaagccaacctcatctttggtgactccagtgggtcctatgtcaaaatccagattgaatccagaagaatccgctaccttcaatggtttaaatgaggatggtagcaaccctggtccaatttatgttcctaagggtactatcattcaccatgaggttgaattagcgttagtggttgataaacatttgagtaatctgaacaaggaaagcttcggccccgaacaagtatgggactcaattagcggtgtttcattggcgctggatctcacggctagaaacgtacaagatgaagctaagaagaaaggtttaccatggactattggtaaagggtttgataccttctgccccatttcacacttcattccgaaggaagaattatttaacaagaccaatctacaggactctttcaggctaagttgctctgttaatggtcaattgagacaaaatgattccacgtcattgatgttgaacccgttgcatactatcttgcagcatatttccactatgatctctttagagcccaacgacattgttttgactggtactccagcgggggttggagagcttcaccctggtgataccattgaatgtgaactataccaagacgacaagctgttggttagttttgaatttgattgtgagcaaagaccaggtccgtacgagtacaaagaagtgtga

SEQ ID NO: 32433 - protein, 261 aa, Kluyveromyces lactis NRRL Y-1140
MSYEYLNRAKKIICIGRNYAAHIKELNNATPKQPFFFLKPTSSLVTPVGPMSKSRLNPEESATFNGLNEDGSNPGPIYVPKGTIIHHEVELALVVDKHLSNLNKESFGPEQVWDSISGVSLALDLTARNVQDEAKKKGLPWTIGKGFDTFCPISHFIPKEELFNKTNLQDSFRLSCSVNGQLRQNDSTSLMLNPLHTILQHISTMISLEPNDIVLTGTPAGVGELHPGDTIECELYQDDKLLVSFEFDCEQRPGPYEYKEV

SEQ ID NO: 32434 - DNA, 870 bp, Debaryomyces hansenii CBS767
  CDS (1)..(870)
atgtcgagttggaacagattaattagatttgaggctaacgacggcaaaatttatagaggagacgctatcgtctcggattctgattatgacattggtaaacaatttgctgaagggaaaaccatcaaagccagggtcgtgattggtagtaatatctttactgacgccaaggtgactgacgaggtattggaagttaagaaattattgggacctcttactggcgaggatgtccctgttgttaaatgtattggaatgaattacaaggaacatctaatgggtataatcgagccaccaccatatccacaactcttttataagccacgcacgagtgtcgctgaccagaatgaggatattccaatcccactgttcgcacaaaatacttgtgattatgaaggtgaattatgtgtcgtcataggaaagacaggtaaaaatataaatgaggaagacgccttgagttatgttgcaggatatgtttcaggaaatgatctatcagctcgggattggcaatacttcccagaatatgcaggaaaagtaccacaattgggattttctaagagttttgatagatacgcacctttgggaccagcaatagtttcttctaaaatcatcaaagatccccatgcacttcaactccaaactagaattaatggcgaccttcgccaaaactgtggtaccgatgatcttttgtttggtatttcaagaatcattgcctttattagtcaagagactactttggaacagggaacagtgattatgacaggtactcctaatggttgcggtggtattgatggaaaatacttaaaagatggggaccttgtagaggttactattgatcaaatcggaacactctctcataagacgaaattcctttaa

SEQ ID NO: 32435 - protein, 289 aa, Debaryomyces hansenii CBS767
MSSWNRLIRFEANDGKIYRGDAIVSDSDYDIGKQFAEGKTIKARVVIGSNIFTDAKVTDEVLEVKKLLGPLTGEDVPVVKCIGMNYKEHLMGIIEPPPYPQLFYKPRTSVADQNEDIPIPLFAQNTCDYEGELCVVIGKTGKNINEEDALSYVAGYVSGNDLSARDWQYFPEYAGKVPQLGFSKSFDRYAPLGPAIVSSKIIKDPHALQLQTRINGDLRQNCGTDDLLFGISRIIAFISQETTLEQGTVIMTGTPNGCGGIDGKYLKDGDLVEVTIDQIGTLSHKTKFL

SEQ ID NO: 32436 - DNA, 705 bp, Debaryomyces hansenii CBS767
  CDS (1)..(705)
atgtcaggattaagatacattgataacgcaaggaaaatattgtgtattgggcgtaattatgccgctcatattaaggaattgaatagtgctaaacctcaacagccattcttcttcttgaagccatcctcgtcgattttgaaaccgaacaatggaccctttttagttccaaaaggtaccgttgtgcatcacgaagttgaattgggtattattttgaataaaacgttggtggacttaccggaaagcttttctcacgagcaagcgttggattgtattgatggttatgcattgtcaatcgatatgacagctagaaatgttcaagatgaagctaagaagaagggtttgccatggtcaattggtaaggggtttgacactttcttgccattgtcgcagtttatccctaagtcacaaatccctgatccatatgatgttgaattgagtttaagcatcaatggacaagtcaagcagaaagatagaaccgatcttatgattttcccaatccacaaaatattgtctcatatgtcggcaatcatgactttggaaaaaggtgatcttatcttgactggtactccaaaaggggttggtccagttgttcctggtgataaaatcaaggctactattacagcgggcggtacggttttaaacgatgcaaccattgagatagataccgaacaaaaacctggtccttatgaatttaaagaaacctag

SEQ ID NO: 32437 - protein, 234 aa, Debaryomyces hansenii CBS767
MSGLRYIDNARKILCIGRNYAAHIKELNSAKPQQPFFFLKPSSSILKPNNGPFLVPKGTVVHHEVELGIILNKTLVDLPESFSHEQALDCIDGYALSIDMTARNVQDEAKKKGLPWSIGKGFDTFLPLSQFIPKSQIPDPYDVELSLSINGQVKQKDRTDLMIFPIHKILSHMSAIMTLEKGDLILTGTPKGVGPVVPGDKIKATITAGGTVLNDATIEIDTEQKPGPYEFKET

SEQ ID NO: 32438 - DNA, 702 bp, Yarrowia lipolytica CLIB122
  CDS (1)..(702)
atggctacccgatttgcccagcaggcccgaaaaatcctgtgcattggccgaaactacgtcgagcacatcaaggagctcaataacacggctccctccaagcccttcttcttcctcaagccctcgtcttccatcctgctccccaacgagggtcccatgctcgtgccctcgggaactgttgtgcactacgaggtagagctggctgcaattctcggcaaggagctcaagaacctcaaccccaagactttcactgagcaggacgccattgacgccattgatggctacgctctggctgttgacatgactgctcgaaacgtgcaggacgaggcgaagaagaagggtctgccctggtcaattggcaaggggttcgataccttcctgcccatctccaacttcattcccaagagccagatccccgatcctcacaacgtgcatcttcaccttgaaatcaacggacaaactaaacagtccgataacaccaacctgatgatcttcaagctgccccagattctgtccaccatgagcagcatcatgactcttcagcccggtgatattattctcactggaacccccaagggagtgggtcctgttaaccctggagatcgaatgaccgccggtatctctgttgatggaaaggagctcgaggccaaggtcgatgttcaggttgagcagaagcctggtccttacgtttattctcagatctaa

SEQ ID NO: 32439 - protein, 233 aa, Yarrowia lipolytica CLIB122
MATRFAQQARKILCIGRNYVEHIKELNNTAPSKPFFFLKPSSSILLPNEGPMLVPSGTVVHYEVELAAILGKELKNLNPKTFTEQDAIDAIDGYALAVDMTARNVQDEAKKKGLPWSIGKGFDTFLPISNFIPKSQIPDPHNVHLHLEINGQTKQSDNTNLMIFKLPQILSTMSSIMTLQPGDIILTGTPKGVGPVNPGDRMTAGISVDGKELEAKVDVQVEQKPGPYVYSQI

SEQ ID NO: 32440 - DNA, 690 bp, Aspergillus nidulans FGSC A4
  CDS (1)..(690)
atggcagcttcgataaaatcaaattgccgcaagctgactctagatcgcagcgaccacatcgcagagctcaacaacacaaaacccaagcagcctttcttcttcctgaagccctcctcttcaatactctgccctggcgaaggtccagtcttgcgccccaaaggcacaagcctccactatgaggtggaattggctttggtaatgggcaagaaagttcgcgacctcgatccaaacgatgacaagggagcgttggatgcgatccagagctacctcctcgccattgacatgaccgcgcgcaatgtccaagatgaagccaagaagaaaggtcttccttggactatcgcaaagggtttcgacaccttcctccccatatcgcaggagattttgaagtctcaaattcccgatccacacaacgcattccttcgtctgagcgtcaactcgcagcagcgtcaggctgattcctcagggctgatgctgtaccgtattcccaggttgctggcggagatctcgcgcgtgatgacgttggagaagggagatctggttttaacggggacgcctaagggcgttggggaggtgaagagtggtgatgtgatgaaggcgtcgattgaggttgatgggaaggagatcgagcagggacggattgaggttgaggtgcaggatcgggagggcaggtacgagtactgcgagacttag

SEQ ID NO: 32441 - protein, 229 aa, Aspergillus nidulans FGSC A4
MAASIKSNCRKLTLDRSDHIAELNNTKPKQPFFFLKPSSSILCPGEGPVLRPKGTSLHYEVELALVMGKKVRDLDPNDDKGALDAIQSYLLAIDMTARNVQDEAKKKGLPWTIAKGFDTFLPISQEILKSQIPDPHNAFLRLSVNSQQRQADSSGLMLYRIPRLLAEISRVMTLEKGDLVLTGTPKGVGEVKSGDVMKASIEVDGKEIEQGRIEVEVQDREGRYEYCET

SEQ ID NO: 32442 - DNA, 696 bp, Candida albicans SC5314
  CDS (1)..(696): transl_table=12
atgtcattgaaatacttagacaccgccagaaagatcctttgtattggtcgtaattatgctgcccacatcaaggaattaaacaatgccaccccgcaacagccatttttctttttaaaaccatcttcatcagtattaaagcccgactctggcccattcttggttcccaagggagttattgttcatcatgaagtggaattggcatttacgttaaacaaagacttgaaaaacttgccatctactttttctcctgaagaagctattgacagcattgaagggtatgccttgactattgatatgacagcaagaaacgttcaggatgaagccaaaaagaaaggattgccttggtcaattggtaaagggttcgacacctttttgccagtgtctaaattcatcgccaaggaaaaaatcccagacccatacaaagttgagttggtgttgaaaattaacggtgaagtcaaacaacaagataaaaccgacttgatgttgttccccattcataaaattttgagccacatgtcagcaattatgacattggaaaagggagacttaattttgactgggaccccaaaaggtgttggtcaagttaagccgggcgataaggttgaagctcaattgttggttaacggtaaagtcattgaagagattaaattcgacgccgaagaaaaaccaggtccttacgaatataaacagatatag

SEQ ID NO: 32443 - protein, 231 aa, Candida albicans SC5314
MSLKYLDTARKILCIGRNYAAHIKELNNATPQQPFFFLKPSSSVLKPDSGPFLVPKGVIVHHEVELAFTLNKDLKNLPSTFSPEEAIDSIEGYALTIDMTARNVQDEAKKKGLPWSIGKGFDTFLPVSKFIAKEKIPDPYKVELVLKINGEVKQQDKTDLMLFPIHKILSHMSAIMTLEKGDLILTGTPKGVGQVKPGDKVEAQLLVNGKVIEEIKFDAEEKPGPYEYKQI

SEQ ID NO: 32444 - DNA, 759 bp, Ustilago maydis 521
  CDS (1)..(759)
atggcctcctcatttctgacacggggaaagaaaatcgttgcgatcactcatgctgacaacgacgtacgattctctcttggtcatggtctcttgaactgcattgcattgcatcacagtatcggacgtaactatgcagctcatgccaaggagctcaacaatgccgtgcctaccgaaccttttttcttcctgaaacccactacttcctaccttgccaacaatggtaccgttgagattcccaaaaacatccttgcacacttcgaggttgagcttggcgtggtcatcggcagccctcgagttcgcgatgtcttggctgctgatgcaatgaagcacgttgcaggctacaccctctccatcgatatgaccgcacgcaacctgcaagacaaggttaaatccaaaggccttccttggtcctctgcgaaagggtttgatactttcaccccaacctcaggattcatcgacaagtctcgtgttcgtgacccatccaagctgagattgtggctcaaggtcaacgatcaggtcaagcagaatggcacaacgggtgatatgatctttggtatcccagagttgatcgagcacgtttcgtcaattatgacgctggaggagggggatctgctgctgacaggtacaccgcagggtgtaggcgaggtcaaggatggcgatgtaatcaagtgcggtctggaagatcagtcaggtaacctgcttgaacagctcaagatcaacgtagccaatcgtgttggtggatacgagttcaaactctaa

SEQ ID NO: 32445 - protein, 252 aa, Ustilago maydis 521
MASSFLTRGKKIVAITHADNDVRFSLGHGLLNCIALHHSIGRNYAAHAKELNNAVPTEPFFFLKPTTSYLANNGTVEIPKNILAHFEVELGVVIGSPRVRDVLAADAMKHVAGYTLSIDMTARNLQDKVKSKGLPWSSAKGFDTFTPTSGFIDKSRVRDPSKLRLWLKVNDQVKQNGTTGDMIFGIPELIEHVSSIMTLEEGDLLLTGTPQGVGEVKDGDVIKCGLEDQSGNLLEQLKINVANRVGGYEFKL

SEQ ID NO: 32446 - DNA, 687 bp, Cryptococcus neoformans var. neoformans B-3501A
  CDS (1)..(687)
atgtccaactttatcaaagcaggaaggaagattgtcgctattggtcgcaactacgctgatcacgccaaggagcttggtaacgccattcctaaggagcctttcttctttttgaaacccacttcttcttaccttgtccctgacaatggacctgttgagatccctcggggggttatcgtgcatcatgaagttgagcttggtgttgtcatcggtaagaacggtcgagacatctccccttctgctgccttcgaccatgttgctggatactctcttgctgtcgacatgactgcccgtaatgttcaggataaggccaaggctaaaggtttgccttggtctgctgccaagggcttcgatactttctgccctattggtcctttcattcccaagcacttcattgccgatcctactaaagtcggcctccatttttcggtcaacggtactgttaagcagtctggcctcacctccgacatgatcttcgacattccccagctcattgcatttgtctctggtatcatgaagcttgaagaaggtgacttggtacttactggaacccctagtggggtgggaaagattaagaggggggaaattttcgaggcgaagttgacttaccctggattagatggtgaggtcttgagcaagtatgaaatcgaatgcgtggagaggcaaggaggttacgagtttatgccttaa

SEQ ID NO: 32447 - protein, 228 aa, Cryptococcus neoformans var. neoformans B-3501A
MSNFIKAGRKIVAIGRNYADHAKELGNAIPKEPFFFLKPTSSYLVPDNGPVEIPRGVIVHHEVELGVVIGKNGRDISPSAAFDHVAGYSLAVDMTARNVQDKAKAKGLPWSAAKGFDTFCPIGPFIPKHFIADPTKVGLHFSVNGTVKQSGLTSDMIFDIPQLIAFVSGIMKLEEGDLVLTGTPSGVGKIKRGEIFEAKLTYPGLDGEVLSKYEIECVERQGGYEFMP

SEQ ID NO: 32448 - DNA, 936 bp, Cryptococcus neoformans var. neoformans B-3501A
  CDS (1)..(936)
atgctcccctgtataactactctgattcgacctgctttttctcctatacacaacatcagagccatgtcctccttctctcgacttgttcgattcgtccccaaatcctcctccacaccgcttattggtgaaccggtcaacgccgacctcgacatcggtctcgccgcgtacgagtcaaaacctgtcgaaattgaggtgttctctggtacttctgtcctcaaccccggagagaagactggcaaaaaggaaattgtcgagaggcttttgagcccattagcccagtctgaagtcggcacgatacgatgtatcggtctgaattacgttaaccacgctaaggaggtcaatcttcccatgcccgatatccccaccctttttatgaagccttctacatctctcgccgatccctttccttcccctaccattatccccaaggcttttgtcgcttccaactctgctgatttcgagtcggaagtcgcattcgtgattggcaaggatgccaagaacgtttccgaagaggaggctcttgactacgtccttggttttaccgccgccaacgacgtttcctcccgagaagctcagttcgcccagtctcaatggtgttattccaagtctttcgacggcgcttgccctattggtccggccctcgtcaacaagaaccaagccaacaagttctccgatgtcaagattgagggctctcttaacggaaagacagtccaatctagccgcctcgatgacttgatcttttctgttcccaagattgtttctttcctttcccaaggtaccactcttcctgctggtacgatcatcatcactggtacccctgccggtgtcggatggtcatctactccacgaatcactctcaaggatggcgacgagttccgagtatttgtttcccatggtgttggtaccttgattaacaagattgttgaggagaaatag

SEQ ID NO: 32449 - protein, 311 aa, Cryptococcus neoformans var. neoformans B-3501A
MLPCITTLIRPAFSPIHNIRAMSSFSRLVRFVPKSSSTPLIGEPVNADLDIGLAAYESKPVEIEVFSGTSVLNPGEKTGKKEIVERLLSPLAQSEVGTIRCIGLNYVNHAKEVNLPMPDIPTLFMKPSTSLADPFPSPTIIPKAFVASNSADFESEVAFVIGKDAKNVSEEEALDYVLGFTAANDVSSREAQFAQSQWCYSKSFDGACPIGPALVNKNQANKFSDVKIEGSLNGKTVQSSRLDDLIFSVPKIVSFLSQGTTLPAGTIIITGTPAGVGWSSTPRITLKDGDEFRVFVSHGVGTLINKIVEEK

SEQ ID NO: 32450 - DNA, 663 bp, Strongylocentrotus purpuratus
  CDS (1)..(663)
atgtcttccaacacagaaccgcttaacaactttgcaaattttggaaagaagatagtttgtatcggcaggaattatgctgagcatgcagcggagttggggaataaggttcctaccaagcctatgattttcttaaaaccaacatcagcttatctccaagaaggacaaggcaacataaagctacctccaaactgcacagagatacaccatgaagtagagctaggtattgtcattggaaaatcaggcagcaatatcctagaatcctctgccatggagcatgttggtgggtacaccctcgccctggatatgaccgaaaggaaactacaaagtgacctcaagtccaaaggccatccttggagcctggcgaagggttttgacacatcttgtccggtaggcggtttcctggacgcatcaaggatcgacaacgttgatgatgtaaggctatggttaaaggtcaatggagaaacaaagcaggatgggaatactaaagacatgatattccgtgtgccaaccttgctgagtttcatcagtcagtacatgacgctggaggtcggtgacctcgtactgactgggactccctctggagttggaccagttagaagcaaggatgttattgttgcaggactcaatgatgatttgttacagattgaattcagtgtagagtga

SEQ ID NO: 32451 - protein, 220 aa, Strongylocentrotus purpuratus
MSSNTEPLNNFANFGKKIVCIGRNYAEHAAELGNKVPTKPMIFLKPTSAYLQEGQGNIKLPPNCTEIHHEVELGIVIGKSGSNILESSAMEHVGGYTLALDMTERKLQSDLKSKGHPWSLAKGFDTSCPVGGFLDASRIDNVDDVRLWLKVNGETKQDGNTKDMIFRVPTLLSFISQYMTLEVGDLVLTGTPSGVGPVRSKDVIVAGLNDDLLQIEFSVE

SEQ ID NO: 32452 - DNA, 864 bp, Tribolium castaneum
  CDS (1)..(864)
atgagatttgtgcaataccggctcaaaacgggcggtttaccccacctgggggggcagattacccaggatggggacattttcgacatcagcaacgtggaccactccatacccaacaccctgaccaagttcctagccaccggcgatgacgtctacgagagggccaaaaggataatcgcttccggcaaatccgtcatccctctcaaaaacgtggacctcctccccccaataatcaaaccggacaaagtggcttgcgtgggcctcaactactccggtcattgtgacgaacaaaacatcccccacccccgtgaacccatgttttttagtaaattctcctcaaccatcgtggggccctacgacaccatccaactgcccaaaataagcaacagtgtcgactgggaatgtgaactcgctgtgatcataggccgcaaagccaaggccataaggcaagaccaagcccatgattacatcttcggatacacagtggcccaagatattagtgcccgagactggcagaaaaaacgaaataatggacagtttctgctaggcaaaagtatggacacgttctgccctttgggccctgcggtagttacgaaaaataaactagaccccaacaacttaaatatcaaaacttgggtcaacggcaagttgaaacagaacggaaatacgaaagagatgatcttcaaagtcgattttctcgtctcgtatttgtcacagattgtaacactgtaccccggcgatgtgatcctcacggggaccccttccggggtcggcatgcaccgcagcccccctgagttcctccacaaagacgatatcctcgagagcgaaattgaaggaatcggcaaaatgagaaacattgttcaataa

SEQ ID NO: 32453 - protein, 287 aa, Tribolium castaneum
MRFVQYRLKTGGLPHLGGQITQDGDIFDISNVDHSIPNTLTKFLATGDDVYERAKRIIASGKSVIPLKNVDLLPPIIKPDKVACVGLNYSGHCDEQNIPHPREPMFFSKFSSTIVGPYDTIQLPKISNSVDWECELAVIIGRKAKAIRQDQAHDYIFGYTVAQDISARDWQKKRNNGQFLLGKSMDTFCPLGPAVVTKNKLDPNNLNIKTWVNGKLKQNGNTKEMIFKVDFLVSYLSQIVTLYPGDVILTGTPSGVGMHRSPPEFLHKDDILESEIEGIGKMRNIVQ

SEQ ID NO: 32454 - DNA, 837 bp, Tribolium castaneum
  CDS (1)..(837)
atgggcggtttaccccatctgggggggcagattacccaagacggggacattttcgacattagcaacgtggaccactccatacccaacaccctgaccaagttcctagccaccggcgatgacgtctacgagcgggccaaaagaataatcgcttccggcaaatccgtcatccccctcaaaaacgtggaactcctccctccagtaatcaaaccggacaaggtggcttgtgtaggccttaactactcgcgccactgcgatgaattaaacatcccctacccccatgaaccaataattttcagtaaattctcctcaaccatcgtggggccttatgataaaatcgagctccccaaaataagcaatagcgtcgactgggaagcggaactcgctgtggtcataggacgcaaagccaaagccataaggcaagaccaagcccttgaccacattttcggctacactgtggcccaagacatcaccgcccgagactgggtaacagccagaaacaacggacagtacctcctaggcaagagtatggacactttctgccctttgggcccggcagtagtgacgaaaaataaactagaccccaacaacttgaccatcaaaagctgggtcaacggaaagttgaaacagaacggaaacacgaacgaaatgatcttcaaagtcgatttcctcgtctcgtatttatcacaggttgttactctgtaccccggcgatgtgatcctcacagggaccccttccggggtcggtgtgaaccgcagcccccccgaattcctccgcaaaaacgacatactcgaaaccgaaattgaaggaatcggcaaaatgagaaacacagttcaataa

SEQ ID NO: 32455 - protein, 278 aa, Tribolium castaneum
MGGLPHLGGQITQDGDIFDISNVDHSIPNTLTKFLATGDDVYERAKRIIASGKSVIPLKNVELLPPVIKPDKVACVGLNYSRHCDELNIPYPHEPIIFSKFSSTIVGPYDKIELPKISNSVDWEAELAVVIGRKAKAIRQDQALDHIFGYTVAQDITARDWVTARNNGQYLLGKSMDTFCPLGPAVVTKNKLDPNNLTIKSWVNGKLKQNGNTNEMIFKVDFLVSYLSQVVTLYPGDVILTGTPSGVGVNRSPPEFLRKNDILETEIEGIGKMRNTVQ

SEQ ID NO: 32456 - DNA, 642 bp, Tribolium castaneum
  CDS (1)..(642)
atgacactcgagaattttgttcaaaacgggaaaaaaatcgtcggcgtggccgccaattataaggcgctggtaaaaatactccaaaggcccattccggaaacccccgatattttcctaaaacccacaacttcgtacattaccgaagcacagaaaattataatacctcaaggtttttccgtcaatgaggaaattgagttgggggtgatcattggtaaaagtgggaaatttattacagaaagtcaagcaatggatcatgttggtggctactgtgttgctcttgacatgacggccacctgtcgaatgaaagaggcaaggagtaagggtggctcatggactctcgggaaagggtttgataccgcatgccctgtcagtaaatttataccaaagagtgcgattaaggatcctcacgatttgaacctttggtgtaaagttaatggggaacttagacaagaaggaaacacaaacgatttaattttctccataccaaaattaatttctttcatatcacagtatatcacattagaaaataatgatttgataatcacggggtcgccaccagggatgggtcctgttcatccaggtgacgtcattgagagtggaatagaaaatattattaactttaagtacagcgtgtcaaattaa

SEQ ID NO: 32457 - protein, 213 aa, Tribolium castaneum
MTLENFVQNGKKIVGVAANYKALVKILQRPIPETPDIFLKPTTSYITEAQKIIIPQGFSVNEEIELGVIIGKSGKFITESQAMDHVGGYCVALDMTATCRMKEARSKGGSWTLGKGFDTACPVSKFIPKSAIKDPHDLNLWCKVNGELRQEGNTNDLIFSIPKLISFISQYITLENNDLIITGSPPGMGPVHPGDVIESGIENIINFKYSVSN

SEQ ID NO: 32458 - DNA, 690 bp, Herminiimonas arsenicoxydans
  CDS (1)..(690): transl_table=11
atgaatcaggcttacgttatacaaccacaaagcattcctatcttgcctgtacggggaacggacaagctgttccctgtgcatcgtatttattgcataggtcgtaactacgctgcgcacacgatcgagatgggtcacgatcctgataaagagccgccatttttctttcagaagaatccggataacattattgtcgataaagattttccctatccgccggaaacatcggatgtgcattttgaatttgagctggtcgtggcgctagccaaaggtggcaagaacatcacggttgaaaaggcgctggatcacatcttcggttacggtgtcgggctcgatatgaccagacgcgatctgcagggcgtggcaaaaaaaatggggcgtccgtgggaggtgggcaaggcgtttgaacattcggcaccttgttcggcattgattccggttgctgacgtaggccatccgcacaaaggcggtatctggttcaaggtcaacggcgaggtaaggcaaaagggcgatctggatcaaatgatctggaaggttgcggagcagatttccatactttcgactttttttgaactcaaaccgggcgatctcatcatgacgggcacgccagcgggcgtcggtgcgatcaacaagggcgatcagctcgaaggcatgattgaaggcgtctgcggtatgaagctggccgttatttga

SEQ ID NO: 32459 - protein, 229 aa, Herminiimonas arsenicoxydans
MNQAYVIQPQSIPILPVRGTDKLFPVHRIYCIGRNYAAHTIEMGHDPDKEPPFFFQKNPDNIIVDKDFPYPPETSDVHFEFELVVALAKGGKNITVEKALDHIFGYGVGLDMTRRDLQGVAKKMGRPWEVGKAFEHSAPCSALIPVADVGHPHKGGIWFKVNGEVRQKGDLDQMIWKVAEQISILSTFFELKPGDLIMTGTPAGVGAINKGDQLEGMIEGVCGMKLAVI

SEQ ID NO: 32460 - DNA, 699 bp, Burkholderia vietnamiensis G4
  CDS (1)..(699): transl_table=11
atgtccgcatacgtcatcgacgctcccgagcgtccttccgtcgaagtcgatcaatcgtccgcgcgctttccggtacgccgcgtgttctgcgtgggccgcaactacgccgaccacgcgcgggaaatgggcgccgatcccgaccgcgaaccgccgttcttcttcacgaagccggccgatgcggtcgtgccggccgccggcaccgtcccgtatccgccgctgacgaacgacctccatcacgagatcgagctggtcgtcgcgatcggcaaggacggccgctcgatcgagccggccgacgcgctgtcgcacgtgtggggttacggcgtcggcgtcgacctcacgcgtcgcgacctgcaggccgaagccaagaagctgggccgcccgtgggactgggcgaagggcttcgacgcgtcggggccgatgagcccgctgcgcgccgcgagcgcgaccggccacccggcgagcggacggatctggctcgcggtgaacggcgacacgcgtcagcaaggcgatctcgccgacatgatctgggccgtgcccgacgtgatcgcctacgtgtcgcgctcggtcgcgttgaaggccggcgacctgatcttcaccggcacgccggccggcgtgggcgcgctgcagccgggcgatcgcgtgacgggcggggtggacggcgtcgcgacgttcgagttcgtggtcggcgcgaagccgtaa

SEQ ID NO: 32461 - protein, 232 aa, Burkholderia vietnamiensis G4
MSAYVIDAPERPSVEVDQSSARFPVRRVFCVGRNYADHAREMGADPDREPPFFFTKPADAVVPAAGTVPYPPLTNDLHHEIELVVAIGKDGRSIEPADALSHVWGYGVGVDLTRRDLQAEAKKLGRPWDWAKGFDASGPMSPLRAASATGHPASGRIWLAVNGDTRQQGDLADMIWAVPDVIAYVSRSVALKAGDLIFTGTPAGVGALQPGDRVTGGVDGVATFEFVVGAKP

SEQ ID NO: 32462 - DNA, 762 bp, Dehalococcoides sp. BAV1
  CDS (1)..(762): transl_table=11
atgagaatagtacgttttagcctttctggcaagcgggcaggatatgcagtgcttgaagatacaaagctgaaagaactgaagggcaatcctttcggcaaaattgttttttcaggcaatgtttttgatatttcagaggccaggcttcttccgccgtcagttccgtccaaaataatagccattggtttaaactacaaagctcatgccggagagatggcagaagatttgcccaaattgccccttatattttttaaaaatgccagtgggattatcggtccggaagataacataataaaacctggtcagtctgaacgggtggattatgaaggggaattggcggttataataagaaagaaaacgcgcaatataaagcctgaagatgcttttgactatatactggggtacagttgctttaatgatgtaacggccagagacctgcagaaaatagacgggcagtggtcacgcgccaaaggttttgatacctttgccgtctgcggcccgtggatagaaacagagcttgacccgcaggtgcaattgctggaaacctatctgaacggcaagcttaaacaacgcacttccacagcggatatgatattcagtatcccccgtatagtcagctttatatcagaggtgatgactttgcttccgggggatattattgcaaccggtacgccttcaggtatcgggccaatgaaactgggagacagggtggaagtacgtatttcaggtatcggcagtctggtaaaccacttggctctaaaataa

SEQ ID NO: 32463 - protein, 253 aa, Dehalococcoides sp. BAV1
MRIVRFSLSGKRAGYAVLEDTKLKELKGNPFGKIVFSGNVFDISEARLLPPSVPSKIIAIGLNYKAHAGEMAEDLPKLPLIFFKNASGIIGPEDNIIKPGQSERVDYEGELAVIIRKKTRNIKPEDAFDYILGYSCFNDVTARDLQKIDGQWSRAKGFDTFAVCGPWIETELDPQVQLLETYLNGKLKQRTSTADMIFSIPRIVSFISEVMTLLPGDIIATGTPSGIGPMKLGDRVEVRISGIGSLVNHLALK

SEQ ID NO: 32464 - DNA, 795 bp, Thermus thermophilus HB27
  CDS (1)..(795): transl_table=11
atgaagatcctgcgcttcaacgaggggaggtggggggtcctcgagggcgagctcgtcctggagacggacggccccggggggaaccccacgggaaggcggtacgacctggcctccgtcaccctgctgcccccggccacgcccaccaagatcgtctgcgtggggcggaactaccgggagcacatccgggagatggggcacgacttcggggaggacctgcccaaggagcccggcctcttcctcaaggggcccaacgccctggcccggcccgggaaccccagggacccttggggcaccgccgagcccgtcccctacccctttttcaccgaggagctccactacgagggggagcttgccgtggtcgtcggggacaggatgcgccatgtccccccggagaaggccctggaccacgtcctgggctacaccgtggccgtggacatcaccgcccgggacgtgcagaagaaggacctgcagtgggtccgggccaagagcgccgacaagttcctgcccttgggcccctggctggagacggacctcaacccccaggacacctgggtgcgcacctacgtgaacgggacgctgcggcaggaaggccacacctcccagatgatcttcagcgtggccgagatcctctcctacatctccaccttcatgaccctggagcctttggacgtggtcctcaccgggacccccgagggcgtgggggccctgaggcccggggaccggctggaggtggccgtggagggcgtgggaaccctcttcaccctcatcgggcccaaggaggagaggccgtggtga

SEQ ID NO: 32465 - protein, 264 aa, Thermus thermophilus HB27
MKILRFNEGRWGVLEGELVLETDGPGGNPTGRRYDLASVTLLPPATPTKIVCVGRNYREHIREMGHDFGEDLPKEPGLFLKGPNALARPGNPRDPWGTAEPVPYPFFTEELHYEGELAVVVGDRMRHVPPEKALDHVLGYTVAVDITARDVQKKDLQWVRAKSADKFLPLGPWLETDLNPQDTWVRTYVNGTLRQEGHTSQMIFSVAEILSYISTFMTLEPLDVVLTGTPEGVGALRPGDRLEVAVEGVGTLFTLIGPKEERPW

SEQ ID NO: 32466 - DNA, 645 bp, Acinetobacter sp. ADP1
  CDS (1)..(645): transl_table=11
ctgatgaatacacgtccatcaaaaattatttgtatcggaagaagctatgctgcacatgcaaaagaattaggcaatgcgatttcagatcgtccagtcctgtttattaagccaccgagtagtttaattggtttggaacagggcattgaatggaataccaaacatggcagttgccattttgagtgtgagttgactctacgaattgaccagcctcttaaaaatgaaacagacccccaaaaagctttagctgcaattggcgccgtaacgatgggattggatttgactttgcgggatttacaagatgacttgaaaagtaaagggcatccgtgggagcgttgtaaagcatttgatggtgcatgtgtattggcagattgggttgatgtgagtgaaattgaagactggaagcatgtgacctatacctttcatatcaatgatcagttacgtcaggaaggcgatacagcatatctactcttaagcattggtgaatacctgtgtgatattagtcaggcatttagcatcgaagcgggcgatgtggtcatgacaggcacaccagcaggtgtagggccgttgcatcacggcgatcagcttaaaatgacgcttcatggtaaaacccagcaatttgtgtggaacacctttgtacatgaataa

SEQ ID NO: 32467 - protein, 214 aa, Acinetobacter sp. ADP1
MMNTRPSKIICIGRSYAAHAKELGNAISDRPVLFIKPPSSLIGLEQGIEWNTKHGSCHFECELTLRIDQPLKNETDPQKALAAIGAVTMGLDLTLRDLQDDLKSKGHPWERCKAFDGACVLADWVDVSEIEDWKHVTYTFHINDQLRQEGDTAYLLLSIGEYLCDISQAFSIEAGDVVMTGTPAGVGPLHHGDQLKMTLHGKTQQFVWNTFVHE

SEQ ID NO: 32468 - DNA, 657 bp, Erwinia carotovora subsp. atroseptica SCRI1043
  CDS (1)..(657): transl_table=11
atgtatcaacacagagactggcagggcgcgctgcttgatttcccagtaaataaagtcgtttgcgtcgggagcaactactcagaacacatcaaagaaatgggaagtgcgaccccgagcgagccagttttattcatcaagcctgaaaccgcactgtgtgatttacgtcaacccgtcgctattcctaaaaatctgggctcggttcaccacgaagttgagctggcggtgctgatcggtacgccgttaaagcaggcgaatgaagaacgcgttgcacgagccatcgcgggttatggcgtggcgttggatttgacgctgcgtgatttgcagtccgaattcaaaaaagcaggccagccgtgggaaaaagccaaagcctttgacggttcctgcccgatctccggttttattccggttgctgagtttggcgatccgcagcaaaccgaactgggtgtaaaagtgaatgatgaagtgcgccagcagggcaacacgcgtgatatgattacgtcgattctgccgctgattgcctacatgagccgtttctttacgctgcgcgcgggcgatattattttaacgggtacgccaaaaggagtcggtccgatcctgtcaggcgatatgctgacgattacggtaaatgaccggacgctgagcacccgtattatctaa

SEQ ID NO: 32469 - protein, 218 aa, Erwinia carotovora subsp. atroseptica SCRI1043
MYQHRDWQGALLDFPVNKVVCVGSNYSEHIKEMGSATPSEPVLFIKPETALCDLRQPVAIPKNLGSVHHEVELAVLIGTPLKQANEERVARAIAGYGVALDLTLRDLQSEFKKAGQPWEKAKAFDGSCPISGFIPVAEFGDPQQTELGVKVNDEVRQQGNTRDMITSILPLIAYMSRFFTLRAGDIILTGTPKGVGPILSGDMLTITVNDRTLSTRII

SEQ ID NO: 32470 - DNA, 801 bp, Propionibacterium acnes KPA171202
  CDS (1)..(801): transl_table=11
atgcgtattgcccggtttgtcaccgctggttccgaccctgccttcgggatcgtagagcttgctgccgatcatggagatcatcccgagaccatcgccgttatcactggagacccagtggcggcaccggttcaatacactggtgcccgtcacgaccttgccgatgtgcggttgctgtctccggtgattccgcgatcgaagatcattggggttggtcgtaactacgccgatcacgccagcgaactgggcaatgaggttccccaccaaccgcttctatttgttaagccgaatacctcggttatcggccctgacgaacccattgtgcgaccgactgcgtcctccaacctgcactacgagggggagctggccatcgttatcggacggatctgtaaggacgtgccagaggacagagctcaggaagtcatctttgggttcaccgttgccaatgacgtcactgcccgcgatctgcaagattctgacggtcactgggttcgcgccaagggggctgacaccttctgcccgctggggccatggatggttacccacttctccattgcagaagcgtctcaccgccagattgtgactcgactagacggtagggaggttcagcacggtaataccgaccagatggtccacaccatccccaagctcatctcctatatctcttcgttcatgaccttgttgccgggcgatgtcatcctcacgggtacccccgctggggtcgggccgatggagctcggacagcgcgtcgaggttgaaattgaggggatcgggacgctaacgaacactgtcgtggaggtctga

SEQ ID NO: 32471 - protein, 266 aa, Propionibacterium acnes KPA171202
MRIARFVTAGSDPAFGIVELAADHGDHPETIAVITGDPVAAPVQYTGARHDLADVRLLSPVIPRSKIIGVGRNYADHASELGNEVPHQPLLFVKPNTSVIGPDEPIVRPTASSNLHYEGELAIVIGRICKDVPEDRAQEVIFGFTVANDVTARDLQDSDGHWVRAKGADTFCPLGPWMVTHFSIAEASHRQIVTRLDGREVQHGNTDQMVHTIPKLISYISSFMTLLPGDVILTGTPAGVGPMELGQRVEVEIEGIGTLTNTVVEV

SEQ ID NO: 32472 - DNA, 885 bp, Symbiobacterium thermophilum IAM 14863
  CDS (1)..(885): transl_table=11
atgctcctggtcacctaccgcacgcccggcggcctcgccctgggggtcaggacggagaggggcatcctcgacgtctccgctgccgccgggcgcttcgggcgcagggacgtcccgcttcacgtcgaccaggcgctggggatggggctcgacgccctcgacccgctggcggacctggtcgcccgggccgaggaagaggctgacctgttcctgccggaggacggcctcaggctggggccgccggtgccccggccgggcaagatcctctgcgtcggcctcaactaccgcgcccacgccgcggaagctcacatggcggtgcccgcctaccccgtcctgttcgccaagttccaaaacgccgtcgccggcccgggcgaccccgtggtcctgccgagcatcgccgagcagtacgactacgaggccgagctggtggtggtgatcggccgccgggcccggcgcgtgcctgcggaggccgcactggattacgtgctgggctactgtaacggcaacgacctgagcgcccgggaactgcagatgcgcaccagccagtggctgctgggcaagtcgctggacggcttcctgcccatcgggccgtacctggtgacccgggacgaggtgccggacccgcaggacctgcgcatccggctctggcgcaacggggagatccggcaggacggccacacccggaacatgctcttccctgtggcggagctcatcgcgtacatcagccggtacatgaccctggagcccggggacatcatcgcgaccggcaccccggaaggggtgatcatgggccttgcggagaaagactggctgaagccgggcgacgtggtggccgtcgagatcgacggtctggggcggttggagaaccggctggtggccggcgagtga

SEQ ID NO: 32473 - protein, 294 aa, Symbiobacterium thermophilum IAM 14863
MLLVTYRTPGGLALGVRTERGILDVSAAAGRFGRRDVPLHVDQALGMGLDALDPLADLVARAEEEADLFLPEDGLRLGPPVPRPGKILCVGLNYRAHAAEAHMAVPAYPVLFAKFQNAVAGPGDPVVLPSIAEQYDYEAELVVVIGRRARRVPAEAALDYVLGYCNGNDLSARELQMRTSQWLLGKSLDGFLPIGPYLVTRDEVPDPQDLRIRLWRNGEIRQDGHTRNMLFPVAELIAYISRYMTLEPGDIIATGTPEGVIMGLAEKDWLKPGDVVAVEIDGLGRLENRLVAGE

SEQ ID NO: 32474 - DNA, 849 bp, Burkholderia mallei ATCC 23344
  CDS (1)..(849): transl_table=11
atgaaactgcttcgttacggccccgtgggccaggaaaagcccggcttgctcgacgccgacggccgcattcgcgatctgtcatcgttgatcgacgacgtcgcgggcggcgcgctgtcggacgcgagccttgcacggcttgccgcggccgatcccgcgtcgctgccgctcgtcgccggcgagccgcggatcggcgcgtgtgtcggccggatcggcaagttcgtctgcatcggcctgaactacgcggaccacgcggcggaggcgggcctcgcggtgcccgccgagcccgtcgtgttcggcaagtggacgagcgcggtgagcggcccgcacgacggcatcgagattccgcgcggctcggtgaagacggactgggaggtcgaactgggcgtcgtgatcggccgcgcgtgcaagaacgtcgacgaggccgacgcgctgtcgcacgtcgccggctattgcgtcgtcaacgacgtgtccgagcgcgaatggcagatcgagcgcggcggccagtgggacaagggcaagggcttcgacacgttcgggccgatcggcccgtggctcgtcacgcgcgacgaaatcgccgatccgcaggcgctcgacctgtggctcgacgtggacggccggcgctatcagagcggcaacacgcgcacgatggtgttcaccgtcgcgcggttgatcgcgtatctgtcgcgctgcatgagcctgcagcccggcgacgtgatctcgacgggcacgccgcccggcgtcgggatgggcgtgaagccgtcccccgtctatctgaagccggggcagacggtgcgctgcggggtggcgggcctgggcgagcagcaacagcgaacgcgcgcggcggcgtga

SEQ ID NO: 32475 - protein, 282 aa, Burkholderia mallei ATCC 23344
MKLLRYGPVGQEKPGLLDADGRIRDLSSLIDDVAGGALSDASLARLAAADPASLPLVAGEPRIGACVGRIGKFVCIGLNYADHAAEAGLAVPAEPVVFGKWTSAVSGPHDGIEIPRGSVKTDWEVELGVVIGRACKNVDEADALSHVAGYCVVNDVSEREWQIERGGQWDKGKGFDTFGPIGPWLVTRDEIADPQALDLWLDVDGRRYQSGNTRTMVFTVARLIAYLSRCMSLQPGDVISTGTPPGVGMGVKPSPVYLKPGQTVRCGVAGLGEQQQRTRAAA

SEQ ID NO: 32476 - DNA, 885 bp, Azoarcus sp. EbN1
  CDS (1)..(885): transl_table=11
atgaagatccttcgattcaatggcggtcatgtcgggatcagcgacgggcgcaaggtcgtcgacgtcagcgatctgtgcacctcctcgccggccgattggccgccggtcggcatcaaccgcctgatccgcgatttcgaggcactcaggccgcgtctgcaggcgctgctcgataccgaaccgggcgagccgatcgagacggtgcggctcgaaacccccgtgccgtggccgaacaagctgatggcctatccggtgaattatcacgaccatgcgaaggaaatggcctcgcgcgggctcgccagcatccagggctatttcctcaaatccaattcctcgctcgtcggcgccgccgacgtcatcgaactgcccgcactgcccggccgggagatccaccacgaatgcgagatcgcgctggtgatcggcaaggagggacgccagatcccgcctgagcgcgcgctggagcacgtgctcggctacgcctgcctgctcgacatgacggtgcgcggcaaggaagaacgcgtgttccgcaagtcctatgacaccttcacgccggtggggccctggatcgtcaccgccgacgaggtacccgaccccgccgacatcgacatgaagctgtgggtcaatgacgaattgcgccagcaggcaaatacgcgcgacctgatcgtcgacatcccgcagatggtgtcgatcgcctcgtcggcctcgacgctgtaccccggggacctgatcgccaccggcactcccgccggggtcgggcgcgtggtcgccggcgacgtggtgacgatcgaggtcgcccgcgtcgggcgcatgtcgatcccggtcgtacaaggcacgcgcggggccaatgtcgtgttcgcgcagccttacgaattcgttcgcgcacaatga

SEQ ID NO: 32477 - protein, 294 aa, Azoarcus sp. EbN1
MKILRFNGGHVGISDGRKVVDVSDLCTSSPADWPPVGINRLIRDFEALRPRLQALLDTEPGEPIETVRLETPVPWPNKLMAYPVNYHDHAKEMASRGLASIQGYFLKSNSSLVGAADVIELPALPGREIHHECEIALVIGKEGRQIPPERALEHVLGYACLLDMTVRGKEERVFRKSYDTFTPVGPWIVTADEVPDPADIDMKLWVNDELRQQANTRDLIVDIPQMVSIASSASTLYPGDLIATGTPAGVGRVVAGDVVTIEVARVGRMSIPVVQGTRGANVVFAQPYEFVRAQ

SEQ ID NO: 32478 - DNA, 699 bp, Silicibacter pomeroyi DSS-3
  CDS (1)..(699): transl_table=11
atgagcgacagcctgttcaccctttccccgatccccggcatcccggtccgcggggaaagcgccacctatccgatcgggcgcatcttctgcgttggccgcaactatgccgcccatgccgccgagatgggcaacgaggtcgaccgcgaggcgccgttctatttcaccaaatccgccgccaatgcgatcctgaccggggccaccgtgccctatccccctggcaccgagaatttccattacgagatggagctggcctttgccattggcaagccggtgttccgcgccagccgggccgaggcctgggacgcggtctatgcctatggctgcgcgctcgacatgacccggcgcgaccagcagatccgcgagcgcgacaagaaacgcccctgggacctgggcaaggatgtcgagaacgcggcggtctttgcgcccctgacccgggtggccgactggtcgcctgaggacgacaagcgcattcatcttgaagtgaatggcgcgataaaacaggacgccaccctggccgagttgatctggaagatcgacgagatcgtcagccatctgtcgggctattaccatctgcgcccgggcgatctggtgatgacgggcacacctgccggtgtcggcccggtcgtcgccggggatgtgatcaccggcgggatcgacgggctggacccgatcgcgctgacgctcggcccggcagagtaa

SEQ ID NO: 32479 - protein, 232 aa, Silicibacter pomeroyi DSS-3
MSDSLFTLSPIPGIPVRGESATYPIGRIFCVGRNYAAHAAEMGNEVDREAPFYFTKSAANAILTGATVPYPPGTENFHYEMELAFAIGKPVFRASRAEAWDAVYAYGCALDMTRRDQQIRERDKKRPWDLGKDVENAAVFAPLTRVADWSPEDDKRIHLEVNGAIKQDATLAELIWKIDEIVSHLSGYYHLRPGDLVMTGTPAGVGPVVAGDVITGGIDGLDPIALTLGPAE

SEQ ID NO: 32480 - DNA, 666 bp, Pseudomonas syringae pv. syringae B728a
  CDS (1)..(666): transl_table=11
atgagctaccagcacaaatatgtcgatggcaccaacattcacttcccgctgggtaaagtggtctgcatcgggcgtaactacgccgaacacgccaaggaactgggcaacgcggtgcctaccgagccgctgctgttcatgaagcccggcagcgcggtggttgcgctggagggtggcttcagcatcccggcagaccgcggttcggtgcattacgaagccgagatcgtggtgttgatcggcaagcccctgagcaagaacccttcgcgcgaagaagtactcgacgcgatcagcggctttgcgcctggtctggacctgacgttgcgtgatgtccagtcgcgtctgcgtgagaaaggcctgccgtgggagctggccaagtgttttgacggcgctgcggtgatcccgccgttcgtgcccgccgagaccttccctgatctggaggacatcggtatccgcctgaccctcaatggcaaggtggttcaggacggcaacagcaacatgatgctcaacccgatcgtgccgatgatccagcacatggcagccaacttctcgctgcaggccggcgacctgatcatgaccggcacacctgccggtgtcgggccgttcgaagctggcgaccagatcgccctggaactggtcgggcagacgccgttcgagagcgtcgtcaggtaa

SEQ ID NO: 32481 - protein, 221 aa, Pseudomonas syringae pv. syringae B728a
MSYQHKYVDGTNIHFPLGKVVCIGRNYAEHAKELGNAVPTEPLLFMKPGSAVVALEGGFSIPADRGSVHYEAEIVVLIGKPLSKNPSREEVLDAISGFAPGLDLTLRDVQSRLREKGLPWELAKCFDGAAVIPPFVPAETFPDLEDIGIRLTLNGKVVQDGNSNMMLNPIVPMIQHMAANFSLQAGDLIMTGTPAGVGPFEAGDQIALELVGQTPFESVVR

SEQ ID NO: 32482 - DNA, 666 bp, Pseudomonas fluorescens Pf-5
  CDS (1)..(666): transl_table=11
atgagctatcagcaccagtatgtcgacggtacccggatccattttccggtgggcaaggtggtgtgcatcggtcgcaactacgccgagcacgccaaggagctggacaacccggtacctaccgaacccctgttgtttatcaagccgggcagttgtgtggtgcccctggaaggtgggttcgcgattcccaccgagcgtggttcggtgcactacgaagcggaaatcgcggtgttgatcggcaagccgctctccaccaaacccagccgcgaagaagtgctggatgccatttccggctttgccccggcactggacctgaccctgcgggacaagcaggccgaactcaaagccaagggcctgccctgggaaatcgccaagtcgttcgacggcgcggcggtgatcgcgccctttgtggtgggcagtaccttcgccgacctgaccgacatcggcatccgcctgaccatcaacggtgaagtacgccaggacggcaacagcgccatcatgctcaaccccatagtgccgatgatccagtacatggccggttgtttctccctgcaggccggcgatgtgatcctcacgggcacgccggtcggggttgggccgctgaatgtcggcgatgagctggtgctggagcttcccggtgccagccgtttcaccagcagcgtccgttga

SEQ ID NO: 32483 - protein, 221 aa, Pseudomonas fluorescens Pf-5
MSYQHQYVDGTRIHFPVGKVVCIGRNYAEHAKELDNPVPTEPLLFIKPGSCVVPLEGGFAIPTERGSVHYEAEIAVLIGKPLSTKPSREEVLDAISGFAPALDLTLRDKQAELKAKGLPWEIAKSFDGAAVIAPFVVGSTFADLTDIGIRLTINGEVRQDGNSAIMLNPIVPMIQYMAGCFSLQAGDVILTGTPVGVGPLNVGDELVLELPGASRFTSSVR

SEQ ID NO: 32484 - DNA, 717 bp, Psychrobacter arcticus 273-4
  CDS (1)..(717): transl_table=11
atgagccaatcaccatctatatccttagtcgatacaattgctgccagtgccaatgatgacgcgagcaacgccactgttaatgatagcgtacgtgcatctattggcaaggtcgtttgcgtcggtcgtaactatgtggcgcacgctcaagagttgggtaatgaagtgccaacgtcgcccatcttatttatgaaaccagcatcgtcagtggtcagtgtgcatcatgatattgtgcgtccagattcagaacagtttggtgagacacattatgaagctgagctgtgtattcagctgtcagcggatttatctaaggcaaccatcgcacaagcacagcaagctattggcggcgtaactttagggcttgatttaaccttacgcgagctgcaaagcaagctaaaagacaaaggtcatccttgggagcgagccaagtgctttgatggtgcttgcgtgctggctgattggattgcgccgcaagcatttggtgactttaaaaatgtcgaatatcagttttacattaataatgagctcaagcaaaatggtgatagtgcgttgatgttgtttccagtttatgagttgttggttgatatcagtcatgcctttagtctacaagcaggcgatgtcattatgactggtacgccaagtggcgttgggatacttcaggcaggtgatgcgctaaaactcaagttagatgctcatgaatggcaggttcaggttcgataa

SEQ ID NO: 32485 - protein, 238 aa, Psychrobacter arcticus 273-4
MSQSPSISLVDTIAASANDDASNATVNDSVRASIGKVVCVGRNYVAHAQELGNEVPTSPILFMKPASSVVSVHHDIVRPDSEQFGETHYEAELCIQLSADLSKATIAQAQQAIGGVTLGLDLTLRELQSKLKDKGHPWERAKCFDGACVLADWIAPQAFGDFKNVEYQFYINNELKQNGDSALMLFPVYELLVDISHAFSLQAGDVIMTGTPSGVGILQAGDALKLKLDAHEWQVQVR

SEQ ID NO: 32486 - DNA, 666 bp, Pseudomonas syringae pv. phaseolicola 1448A
  CDS (1)..(666): transl_table=11
atgagctaccagcacaaatatgtcgatggcaccaacattcacttcccgctgggtaaagtggtctgcatcgggcgtaactacgccgaacacgccaaggaactgggcaacgcggtgcctaccgagccactgctgttcatgaaacccggcagcgcggtggttgcgctggagggtggcttcactatcccggcagaccgcggctcggtgcattacgaagcagagatcgtggtgttgatcggcaagcccctgagcaagaacccttcgcgcgaagaagtgctggacgcgatcagcggctttgcgcccggcctggacctgaccctgcgtgacgtgcagtcgcgtctgcgtgagaaaggccttccatgggagctggccaagtgtttcgacggcgctgcggtgattccgccgttcgtgcccgccgagaccttccctgatctggaggacatcggtatccgcctgaccctcaatggcaaggtggttcaagacggcaacagcaacatgatgctcaacccgatcgtgccgatgatccagcacatggcagccaacttctcgctgcaggccggtgacctgatcatgaccggcacgcctgccggtgtcgggccgttcgaaaccggcgaccagatcgcgctggaactggtcgggcagacgccgttcgagagcgtcgtcaggtaa

SEQ ID NO: 32487 - protein, 221 aa, Pseudomonas syringae pv. phaseolicola 1448A
MSYQHKYVDGTNIHFPLGKVVCIGRNYAEHAKELGNAVPTEPLLFMKPGSAVVALEGGFTIPADRGSVHYEAEIVVLIGKPLSKNPSREEVLDAISGFAPGLDLTLRDVQSRLREKGLPWELAKCFDGAAVIPPFVPAETFPDLEDIGIRLTLNGKVVQDGNSNMMLNPIVPMIQHMAANFSLQAGDLIMTGTPAGVGPFETGDQIALELVGQTPFESVVR

SEQ ID NO: 32488 - DNA, 702 bp, Dechloromonas aromatica RCB
  CDS (1)..(702): transl_table=11
atggacttcgtttttgctccccacgcagttcctgtgctgccggtactcggtaccgagcagcgttttccagtacgccgggttttttgcgtcggccgtaactatgccgatcatgctcgcgaaatgggtgcggtcgatcaggccgaaggccgtgagccgccatttttcttcaccaagccggccgatgcggtggttggcgggacaggagagctgagcgtcaagtatccgccgcagaccagcaacctgcaccatgaggtggaaatggtcgtggcgctgggggcggggggggagaatgttgcggtcgatgcggcaaagggcctgatcttcggttacgccgtcggccttgacttgacgcgacgcgacatgcaggccaacgccaagagcaagagccatccgtgggacatgagcaagggcttcgaccagtcagccgtcgctggtgtgatcaccccggtggcgctcagcggttatcccgaagtgggccgtatctggctgaaagtgaatggtcagatgcgccaggaaggcgacttgtcagccatgatgtggacggtggcggacatcattgccaatctgtcgacgctggtccggctggaagcgggtgatctgatctacaccggtaccccggccggggtcgggccgcttgttcggggcgatgtgctggaagcgggtgtcgaaggcttgtgtccgctacaagcgcagattcgttag

SEQ ID NO: 32489 - protein, 233 aa, Dechloromonas aromatica RCB
MDFVFAPHAVPVLPVLGTEQRFPVRRVFCVGRNYADHAREMGAVDQAEGREPPFFFTKPADAVVGGTGELSVKYPPQTSNLHHEVEMVVALGAGGENVAVDAAKGLIFGYAVGLDLTRRDMQANAKSKSHPWDMSKGFDQSAVAGVITPVALSGYPEVGRIWLKVNGQMRQEGDLSAMMWTVADIIANLSTLVRLEAGDLIYTGTPAGVGPLVRGDVLEAGVEGLCPLQAQIR

SEQ ID NO: 32490 - DNA, 804 bp, Thermobifida fusca YX
  CDS (1)..(804): transl_table=11
gtgcgtatcgcgagattctcggccggtgatgacgtaggtttcggcttggtcgataccgacgatgagggcaaccagttcgtcacccggatgaagagccacccgttggtggggccgatccagctcaccggagaacgcaccaaactcgaagacgtgcggctgctctccccgatcctgcccaccaagatcgtgtgcatcggcaaaaactacgccgaccacatcgcggagatgggaggcagcgctgaggacgaacgggaccccaaggagccggtcgtcttcctcaagccctccaccgccgtggtcgggcccaacgaccccgtcttccacccgaaactctcctcgcgggtggactacgagggagaactggctgtgatcatcggccggctctgccgggaggtgccggccgaacgcgccaaggacgtcatcttcggctacaccatcggcaacgacgtcaccgcccgcgacctgcagcaggccgaccaccagtggacccgcgccaaggggttcgactcgttctgcccgctcggaccgtggattgagaccgggctcagcgttgaggaagcctcgcagctgcgcatcaccaccaccgtggacggggaggtccgccaggacggcaacaccgggcagatgatccacagcattcccgagatcatctcctacgtgagctctttcatgacgctcctgccgggggatgtgatcctcaccggcacccccgcaggggtcggaccggtccgggtaggccagcggatgaccgtggcgatcgaccggatcggggaactgagcaacccggtggtggcccgcgactga

SEQ ID NO: 32491 - protein, 267 aa, Thermobifida fusca YX
MRIARFSAGDDVGFGLVDTDDEGNQFVTRMKSHPLVGPIQLTGERTKLEDVRLLSPILPTKIVCIGKNYADHIAEMGGSAEDERDPKEPVVFLKPSTAVVGPNDPVFHPKLSSRVDYEGELAVIIGRLCREVPAERAKDVIFGYTIGNDVTARDLQQADHQWTRAKGFDSFCPLGPWIETGLSVEEASQLRITTTVDGEVRQDGNTGQMIHSIPEIISYVSSFMTLLPGDVILTGTPAGVGPVRVGQRMTVAIDRIGELSNPVVARD

SEQ ID NO: 32492 - DNA, 762 bp, Ralstonia eutropha JMP134
  CDS (1)..(762): transl_table=11
atgcccgggtgcgcgcatagcgcggcacccaggcccccgcacacccttctgactgaaccgaccatgtcctacgtcttcacgccccccgctaccgtcgccattcccgttgttggcagcgatgaccagttcgccgtgcgccgcgtctactgcgtcggccgcaactacgccgcccatgcacgcgaaatggggttcgatcccgaccgcgagcccccgttcttcttctgcaagccggccgacgccatcgtgcctgtggctgacggccagacgctggaactgccctaccctgtacagacgcagaactaccactatgaagccgagctggtcgcggtgatcggcaaggccggttccgacattccggtcgagcaggcgctggagcacgtttggggctacgccgtaggcctggacatgacgcgccgcgacctgcagatgaagatgcgcgagatgggccgcccgtgggaaatcggcaaggccttcgacgcctcggcaccagtcgcgccgatccatcgcgctgccgatatcggccacccgcaagaggctgcgctctggctgaccgtcaacggcgaagacaagcagcgcagcaatatcacgcacctgatctggtcggtggccgaaacagtcgcttacctgtcgcagttcttccgcctggaaccgggcgatgtgatcttcaccggcaccccggagggtgtgggcgcggtcaaggccggcgacaccatggtgaccggcgtcgacggcctcggcgaactcaaggtccgcgtggtctga

SEQ ID NO: 32493 - protein, 253 aa, Ralstonia eutropha JMP134
MPGCAHSAAPRPPHTLLTEPTMSYVFTPPATVAIPVVGSDDQFAVRRVYCVGRNYAAHAREMGFDPDREPPFFFCKPADAIVPVADGQTLELPYPVQTQNYHYEAELVAVIGKAGSDIPVEQALEHVWGYAVGLDMTRRDLQMKMREMGRPWEIGKAFDASAPVAPIHRAADIGHPQEAALWLTVNGEDKQRSNITHLIWSVAETVAYLSQFFRLEPGDVIFTGTPEGVGAVKAGDTMVTGVDGLGELKVRVV

SEQ ID NO: 32494 - DNA, 735 bp, Methanosarcina barkeri str. Fusaro
  CDS (1)..(735): transl_table=11
atgataggaaggttcagatcaggagatgaaattttttatggagatatcgaaaatgggcgcgtgtatccaaaaggagggactcctgccgggatttttgacctttcagagcttcgcgtccttccgccggcgtctccctcgaaaattgtatgtgtcggccttaactatcgggatcatgctgaagagctgaacatgaaagtcccggaaaaccctgtactctttttaaagcctccttcagccattatagggcatggggacaagatcatttatccggcatcgagctccagagtagaacatgaagctgaactcgcagtcgttataggcaaacgctgtaagaacatctcaacttcaaaggccatagatgtaattgcaggttatacctgctttaatgatgtgaccgcccgggacctccagcaaaaagatggtcaatggacaagagcaaagagttttgatacctttgcagctttcgggccttatcttgcttctcccgatgaagttgatattacgaatgcaaagattgcctgcagggtaaatggagataccaggcaggcttccagcacttcaaaccttctttttgacattccttatcttattgaatttatcaccgagatcatgaccctggaagtaggagatgtcattgccacaggaacccctcctggcgttggagaacttcagcgtggagacattgtggaagttgagatccagggaatcggaacacttagaaacgaggttgtctga

SEQ ID NO: 32495 - protein, 244 aa, Methanosarcina barkeri str. Fusaro
MIGRFRSGDEIFYGDIENGRVYPKGGTPAGIFDLSELRVLPPASPSKIVCVGLNYRDHAEELNMKVPENPVLFLKPPSAIIGHGDKIIYPASSSRVEHEAELAVVIGKRCKNISTSKAIDVIAGYTCFNDVTARDLQQKDGQWTRAKSFDTFAAFGPYLASPDEVDITNAKIACRVNGDTRQASSTSNLLFDIPYLIEFITEIMTLEVGDVIATGTPPGVGELQRGDIVEVEIQGIGTLRNEVV

SEQ ID NO: 32496 - DNA, 774 bp, Anabaena variabilis ATCC 29413
  CDS (1)..(774): transl_table=11
atggcgcagcgctacgtgcgagttcaaaatcgggaaggtaagatttactatgggttgctacaactgtctttcaatgtgcaggttctagatgctccaccgtggctgcatggacaacccacagacctaattttagaaccagatcattatcaaattttggctccctgcgctccttctaaaattgtcgcagtgggcaaaaattatgcagatcatgcagccgaaatgggaacgtcagttccaagtgaaccactaattttcctgaagccaccaacaacgattattgcctcggagacagagattaaatatcctctccagtcgcaacgagtggattatgaaggagaattagccttgatcattggcgatcgcacttgtaactgtacaccagaggaagcccaaactaaaatttggggttataccattgccaatgatgtgacagcgcgggatttacagcgaaaagatgggcaatggacaagagctaaaggttttgatactttctgcccattgggaccttggattgtccgcgaattgagtccaggggcaagattacagacctttctcaatgatgatgctaatcccgtacaatcggcgggaattgatcaaatggtatttgcccctgattttttggtgtcatatatcagtcaggtgatgacattgcttcccggagatgtgattttaacgggtacgccagagggtgtaggagctttgcaacaaggcgatcgcatccgtgtagaaattgaaggtatcggtcgcctagaaaacaccgtagcagcccattaa

SEQ ID NO: 32497 - protein, 257 aa, Anabaena variabilis ATCC 29413
MAQRYVRVQNREGKIYYGLLQLSFNVQVLDAPPWLHGQPTDLILEPDHYQILAPCAPSKIVAVGKNYADHAAEMGTSVPSEPLIFLKPPTTIIASETEIKYPLQSQRVDYEGELALIIGDRTCNCTPEEAQTKIWGYTIANDVTARDLQRKDGQWTRAKGFDTFCPLGPWIVRELSPGARLQTFLNDDANPVQSAGIDQMVFAPDFLVSYISQVMTLLPGDVILTGTPEGVGALQQGDRIRVEIEGIGRLENTVAAH

SEQ ID NO: 32498 - DNA, 666 bp, Pseudomonas fluorescens PfO-1
  CDS (1)..(666): transl_table=11
atgagctatcagcaccagtatgtcgacggtacgcggattcattttccgctggggaaagtggtgtgcatcggccgtaactacgccgaacacgccaaggaactggacaacccggtgcctaccgagccgttgctgttcatcaagccgggcagttgcgtggtgccgctggaaggcagtttcagcattccgaccgagcgtggctcggtgcattacgaggcggaaatcgccgtgttgatcggcaaaccgctgtcgaccaaaccgagccgtgaagaagtgctggacgcgatctccggtttcgccccggcgctggacctgaccctgcgcgacaagcaggccgagctcaaatccaagggcctgccgtgggaaatcgccaagtcgttcgacggcgcggcggtgattgcaccgttcgtggtcggcagcactttcgccgacctgaccgacatcggcattcgcctgaccatcaatggcgaagtgcgccaggacggtaacagcagcgccatgctcaacccgatcgtgccgatgatccagcacatggccggctgcttctcgctgcaggccggtgacgtgatcctgaccggcacgccagtgggcgtcggcccgctgaacgttggcgatgagatcgtgctggaactgccgggcgccagtcgttttaccagcagcgttcgctga

SEQ ID NO: 32499 - protein, 221 aa, Pseudomonas fluorescens PfO-1
MSYQHQYVDGTRIHFPLGKVVCIGRNYAEHAKELDNPVPTEPLLFIKPGSCVVPLEGSFSIPTERGSVHYEAEIAVLIGKPLSTKPSREEVLDAISGFAPALDLTLRDKQAELKSKGLPWEIAKSFDGAAVIAPFVVGSTFADLTDIGIRLTINGEVRQDGNSSAMLNPIVPMIQHMAGCFSLQAGDVILTGTPVGVGPLNVGDEIVLELPGASRFTSSVR

SEQ ID NO: 32500 - DNA, 699 bp, Rhodobacter sphaeroides 2.4.1
  CDS (1)..(699): transl_table=11
atggcggcctacgtcctacccaccgcggcgcaagcccacctcgatgtcgtcggcagcgacgagaaattcccggtgcgccgcgtctattgcatcggcaagaactacgtcgcccacatccgcgagatgaatgcggacgagcgcgacccgccggtgatcttcatgaagcctgcggatgcggtggtgcgcaacggcggcgagatcccctatccggtcttcaccgagaacttccattacgaatgcgagctcgtggtggtgctgaagtcgggcggctacaacatctcggtcgccgatgccgccagccacatctacggctatgccgtgggcctcgacatgacgcggcgcgaccatcagaagggcgtgctggaaaaaggcctgccgtgggaggtcacgaaggccttcgacctctcggccccgatcggccccgtcacccgcgccgaggagtgcggggtgctgacctcgggccagctcacgctgaaggtgaacggggaggtcaagcaggatgccgacatcgggctgatgatctggaaggtcgacgagatcattgccaagctctccgagcagcaccgccttcagccgggcgacatcatcatgaccggcacgcccgcgggcgtgggcgcggtggtgaccggagacgtgctcgactgcacgatggaggggctcgagccgatgcaggtccgcatcgggccgaaggccgtctga

SEQ ID NO: 32501 - protein, 232 aa, Rhodobacter sphaeroides 2.4.1
MAAYVLPTAAQAHLDVVGSDEKFPVRRVYCIGKNYVAHIREMNADERDPPVIFMKPADAVVRNGGEIPYPVFTENFHYECELVVVLKSGGYNISVADAASHIYGYAVGLDMTRRDHQKGVLEKGLPWEVTKAFDLSAPIGPVTRAEECGVLTSGQLTLKVNGEVKQDADIGLMIWKVDEIIAKLSEQHRLQPGDIIMTGTPAGVGAVVTGDVLDCTMEGLEPMQVRIGPKAV

SEQ ID NO: 32502 - DNA, 756 bp, Carboxydothermus hydrogenoformans Z-2901
  CDS (1)..(756): transl_table=11
atgattttaggtagagccgtaatagcggggcaggataagtacgtgaaaattaatgatgataaggtagaaattttaaatggagatattttcggcgagattaattccagcggaaaattacttccgctttcagaggtcaaattactacccccggtattaccgtcgaaaattatctgtgtaggtttaaactaccgggaccatattgacgaatttaaacaccagttgccggaagaaccggtgatttttctaaaaccgcctaccgcggtaattggtcctttagacgtgataatattacctcaagaaagtcggcgggtggactacgaaggagaactggcggtggtgattaaaaaggaagggcgaaatctaaaggaagaagaagcaagggatttcatcttaggttatacctgtgccaatgatgttaccgcccgggacttacagcggaaggatggacagtggacgcggggaaaatcgttcgatactttttgccctcttggaccgtggattgttaccgatattgagcctgaccaccttgagatagaaacttatttgaatggggaactccggcaaaagagtaatacttctaaaatgctgtttcatccctattttttggtaagttttatttctaaagtcatgactttaaagcctggagatgtaattttaacgggaacccccagcggtgttggtaaacttgctgaaggagacacggttgaggtaaagatttcggccattggaagcctgagaaattttgtgaaagtatag

SEQ ID NO: 32503 - protein, 251 aa, Carboxydothermus hydrogenoformans Z-2901
MILGRAVIAGQDKYVKINDDKVEILNGDIFGEINSSGKLLPLSEVKLLPPVLPSKIICVGLNYRDHIDEFKHQLPEEPVIFLKPPTAVIGPLDVIILPQESRRVDYEGELAVVIKKEGRNLKEEEARDFILGYTCANDVTARDLQRKDGQWTRGKSFDTFCPLGPWIVTDIEPDHLEIETYLNGELRQKSNTSKMLFHPYFLVSFISKVMTLKPGDVILTGTPSGVGKLAEGDTVEVKISAIGSLRNFVKV

SEQ ID NO: 32504 - DNA, 759 bp, Burkholderia sp. 383
  CDS (1)..(759): transl_table=11
atgccggcccgtgcgccgcacgggcgcggcatccgtcttcccaccgaacgaggccatccgatgtccgcttatgtcatcgacgctgccgagcgtccttccgtcgaagtcgaacagtcgtccgcgcgctttccggtgcgccgcgtcttctgtgtcggccgcaactacgccgaccacgcgcgcgaaatgggcgccgatcccgaccgcgaaccgccgttcttcttcacgaagccggccgacgcgatcgtcccggccagcggcaccgtcgcctatccgccgctgacgaacgaccttcatcacgaaatcgagctggtcgtcgcgatcggcaaggacggccgggcgatcgacccggccgacgcgctgtcgcacgtgtggggctacggcgtcggcatcgacctcacgcgccgcgacctgcaggccgaagcgaagaagctgagccgtccgtgggactgggcgaagggtttcgacgcatcgggccccgtgaccgcgctgcgcgcggcgtccgctaccggccacccggcgacgggccgcatctggctcgcagtgaacggcgacacgcgccagcaaggcgacctggccgacatgatctgggccgtgcccgacgtcatcgcgtatgtgtcgcgctcggtcgagctgaaggccggcgacctgatcttcaccggcacgccggctggcgtcggtgcgctgcagcccggtgaccgcgtcacgggcggcgtcgacggcgtcgcgacgttcgagttcgtcgtgggcgcaaagccgtaa

SEQ ID NO: 32505 - protein, 252 aa, Burkholderia sp. 383
MPARAPHGRGIRLPTERGHPMSAYVIDAAERPSVEVEQSSARFPVRRVFCVGRNYADHAREMGADPDREPPFFFTKPADAIVPASGTVAYPPLTNDLHHEIELVVAIGKDGRAIDPADALSHVWGYGVGIDLTRRDLQAEAKKLSRPWDWAKGFDASGPVTALRAASATGHPATGRIWLAVNGDTRQQGDLADMIWAVPDVIAYVSRSVELKAGDLIFTGTPAGVGALQPGDRVTGGVDGVATFEFVVGAKP

SEQ ID NO: 32506 - DNA, 657 bp, Geobacter metallireducens GS-15
  CDS (1)..(657): transl_table=11
atgacgtttgccaccctggcaggaagcgccacggaataccccatcggcaagatcctctgcattggccgcaactatgcggaacacatcaaggaactggggaacgaaaccccggatgcgccggtcattttcaccaaacccgccacgtcggtcatcggtgatggcgacgccattgtgattcccccttactccagagactgccaccacgaagcggaactggcggtcctcatcgggacagcgggaaaagatatccccgttgaacgcgccctggaacacgtggccggctacggtgtcgccatcgacctgacgctacgggacgtgcaggccgagctcaagaagaaagggctcccctgggacatcgccaaggggttcgacaccgcctgccccctctctccttttgtgcctgccgaccgggtcgccgatccgcaagacctgcggattatcctgaccgtcaacggcgaaacgcgccaggacggctcaacctccctcatgatccacacggtccgcgagatcatcagccatatgtcggggatattcaccctggaaccgggggacgtgatcctcaccggaacccccgccggcgtcagccccattgtttcgggagatcgtctcgtggctgagataccgggtgttgcccggctccaggtctccgttaaataa

SEQ ID NO: 32507 - protein, 218 aa, Geobacter metallireducens GS-15
MTFATLAGSATEYPIGKILCIGRNYAEHIKELGNETPDAPVIFTKPATSVIGDGDAIVIPPYSRDCHHEAELAVLIGTAGKDIPVERALEHVAGYGVAIDLTLRDVQAELKKKGLPWDIAKGFDTACPLSPFVPADRVADPQDLRIILTVNGETRQDGSTSLMIHTVREIISHMSGIFTLEPGDVILTGTPAGVSPIVSGDRLVAEIPGVARLQVSVK

SEQ ID NO: 32508 - DNA, 702 bp, Rhodospirillum rubrum ATCC 11170
  CDS (1)..(702): transl_table=11
gtgcgcttcgttcttcctcccttgccccgcacggccattccggtaagcggaaccgacggtttcttcccggtgggccgggtgttctgcgtcggccgcaactacgccgaccacgcccgcgagatgggcggcgatccgcataaggagccgccgttcttcttttccaagccgggggacgcggtggtgccgctgggcggcgccgtgccctatccccaggcgacctcgaacctccatcacgaggtcgaactggtggtggccctgggcggcggcggccatgacatcgcccccgataaggccctcgatctggtctggggctatgcggtggggatcgatctgacgcggcgcgacctgcaagacagcgccaagagggccggccgcccctgggatatggccaagggcttcgaagccagcggcccggtcggggcgatcaccccggcggcgaccaccggcgcgctgacctcgggcgccatcagcctttcggtcaatggcgttccccgccagacgggcgatctgaaggatatgatctggccggtcagcgatgtcatttccttcctgtcccggctgatggtgctgcgcccgggcgacctgatcttcaccggcacgccggccggcgtcggcccggtggaggaaggcgacgagctgagggccgaaatcgctggcctcgacccgctcaccctcaccctcgtcgccggaccggtcctctga

SEQ ID NO: 32509 - protein, 233 aa, Rhodospirillum rubrum ATCC 11170
MRFVLPPLPRTAIPVSGTDGFFPVGRVFCVGRNYADHAREMGGDPHKEPPFFFSKPGDAVVPLGGAVPYPQATSNLHHEVELVVALGGGGHDIAPDKALDLVWGYAVGIDLTRRDLQDSAKRAGRPWDMAKGFEASGPVGAITPAATTGALTSGAISLSVNGVPRQTGDLKDMIWPVSDVISFLSRLMVLRPGDLIFTGTPAGVGPVEEGDELRAEIAGLDPLTLTLVAGPVL

SEQ ID NO: 32510 - DNA, 777 bp, Moorella thermoacetica ATCC 39073
  CDS (1)..(777): transl_table=11
atggaaagaagcgagaagatagtacgttttagcgctgggggtgaggttttttacggccgcctggaaggggcgaaaatcctggccctggagggcgaaatctttggcccctgccgggaaagcgggcgccaatttagcctggacgaagttcgcctcctggccccatgccggccgggcaaggccgtgtgtgttggtctgaattaccgcaaccatattaccgagatgagcgaaaagctaccggaggaaccggtgatctttataaaaccgtccaccagcgtcatcggccccggggagacgattatttactggcctatggtgggccgcctggattatgaagccgaactggcggtggtcatcggccgcgaggcccataacgtcgaggaaagagaggcggcagactatatttttggctacaccatagccaacgatgtcacggcccgggacctgcagcagaaggacggccagtggaccagggccaagggtttcgacacctttctgccctgcggtccctggattgtccggggtatcgacgccggcgaccttcgggtccaggccttcctgaacggagaattgaagcaggacgggcgtacttcccagttgattttcccggtacccaggctggtcagttttatctctcgggtgatgaccctccacccgggggacctgatccttaccggcacccctgcaggtgtgggccctatgcaggtgggcgataccattgaaatcagggtggagaacatcggcagcctggtcaatagggtcgccgcaccggtgatataa

SEQ ID NO: 32511 - protein, 258 aa, Moorella thermoacetica ATCC 39073
MERSEKIVRFSAGGEVFYGRLEGAKILALEGEIFGPCRESGRQFSLDEVRLLAPCRPGKAVCVGLNYRNHITEMSEKLPEEPVIFIKPSTSVIGPGETIIYWPMVGRLDYEAELAVVIGREAHNVEEREAADYIFGYTIANDVTARDLQQKDGQWTRAKGFDTFLPCGPWIVRGIDAGDLRVQAFLNGELKQDGRTSQLIFPVPRLVSFISRVMTLHPGDLILTGTPAGVGPMQVGDTIEIRVENIGSLVNRVAAPVI

SEQ ID NO: 32512 - DNA, 705 bp, Burkholderia thailandensis E264
  CDS (1)..(705): transl_table=11
atgaccgattacgttttcgcgccgcccgccgttccgtccgtcgaagtcgccggctgcgccgcgcgctttccggtgcgccgcgtgttctgcgtcggccgcaactatgcggaccacgcgcgcgagatgggcgccgatccgaaccgcgagccgccgttcttcttcacgaagccggccgatgcgatcgtgcccgcgagcggcacggtgccgtatccgacgctcacgtccgacctgcatcacgagatcgagctcgtgatcgcgatcggccgaggcgggcgcgcgatcgccgccgacgcggcgctcgatcacgtgtggggctacggcgtcggcgtcgacctgacgcggcgcgacctgcaagcccaggcgaagaaggccggccggccgtgggactgggcgaagggcttcgacgcgtcgggcccgctgacggcgctccatccggccgcatccgtcggtcatccgctgcgcggccggatctggctcgcggtcaacggcgacatgcgccagcaaggcgacctcgccgacatgatctggccgattcccgacgtgatcgcgtatgcgtcgcgcgcggtcgagctgcgcgcgggcgacctgatcttcaccggcacgccggcgggcgtcgccgcgctgcagccgggcgatcgcgtgacgggcggcgtcgacggcgtcgcgtcgttcgagttcgtcgtcggggaaaagccggccgcgtga

SEQ ID NO: 32513 - protein, 234 aa, Burkholderia thailandensis E264
MTDYVFAPPAVPSVEVAGCAARFPVRRVFCVGRNYADHAREMGADPNREPPFFFTKPADAIVPASGTVPYPTLTSDLHHEIELVIAIGRGGRAIAADAALDHVWGYGVGVDLTRRDLQAQAKKAGRPWDWAKGFDASGPLTALHPAASVGHPLRGRIWLAVNGDMRQQGDLADMIWPIPDVIAYASRAVELRAGDLIFTGTPAGVAALQPGDRVTGGVDGVASFEFVVGEKPAA

SEQ ID NO: 32514 - DNA, 645 bp, Desulfitobacterium hafniense Y51
  CDS (1)..(645): transl_table=11
atgcaaggttttggagggatacatcggatgataaaaaacatttattgtgtcggtcgcaattatctgcagcatgccaaggaactcaacaatgcggttccaacttccccgtttcttttcgttaagcccactcatgctctggtggaaggtcaggggcagaccattgccatgcccaaagaccaggggaatgtccattacgaggcggaattggttgttcatgtgggcaaaaactatgaacccggcatgaaggccgaagcggttattgataaaatagctgtagggattgactttactttaagagaggttcaggatgagctgaagaaaaaaggactgccctggctgctggctaaagggttccctaactcagcggtactatcccgatggctgcctttcgaagggctggaggggacggccggccatgattttacccttgagaagaatggacaggaagtgcaaagaggaaatatcaaggagatgatttttgatattcccaccatcatagaattctgtgcccaacacttcggattggctgaaggggatattattttcaccggaacgcctgccggtgtcggtgtagccgctgctggagaccattttgtactgaagtggaaggaagagcaagtgggagagctgttcattggtgagtaa

SEQ ID NO: 32515 - protein, 214 aa, Desulfitobacterium hafniense Y51
MQGFGGIHRMIKNIYCVGRNYLQHAKELNNAVPTSPFLFVKPTHALVEGQGQTIAMPKDQGNVHYEAELVVHVGKNYEPGMKAEAVIDKIAVGIDFTLREVQDELKKKGLPWLLAKGFPNSAVLSRWLPFEGLEGTAGHDFTLEKNGQEVQRGNIKEMIFDIPTIIEFCAQHFGLAEGDIIFTGTPAGVGVAAAGDHFVLKWKEEQVGELFIGE

SEQ ID NO: 32516 - DNA, 699 bp, Burkholderia xenovorans LB400
  CDS (1)..(699): transl_table=11
atgagttacgtatttgcacccgcaccggtggtcgcggtgccggttgtggggtccagcgagcagttcgcggtgcgtcgcatctactgtgtgggccgcaattacgaggcgcacgcgcgggagatgggacacgatcctgatcgcgaaccgccgttcttcttcaccaagccggctgacgcggtgctgtacgtcgcgcccggcgccaccggcgagtttccttatccgccgcagtcgaaaaatgtccatttcgaaatggaaatggtggcggcgatcggcaagggcggcaagaacattgccgcggaaagcgcgctcgatcacgtctacggttacgcgctcggtctcgatatgacgcgccgcgatctgcaggccgaagcgaaaaagctcggccgcccctgggatacggcgaagggtttcgatcactcggcgccgctcggcccgattcatcccgccgcgacggtcggccatgtcggcaagggcgcgatctggttgtcggtgaacggcgaggaaaagcaaagctcggatgtgtcgcaactgatctggtcggtggccgagacggttgcatatctgtctacgctgttcgaactgcaacccggcgatctgatcttcaccggcactccggagggcgtcggcgcggtggtgccgggcgatctgatgaagggcggcgtggacgggctcggcgaattcagcgtgcgcgtcgtctga

SEQ ID NO: 32517 - protein, 232 aa, Burkholderia xenovorans LB400
MSYVFAPAPVVAVPVVGSSEQFAVRRIYCVGRNYEAHAREMGHDPDREPPFFFTKPADAVLYVAPGATGEFPYPPQSKNVHFEMEMVAAIGKGGKNIAAESALDHVYGYALGLDMTRRDLQAEAKKLGRPWDTAKGFDHSAPLGPIHPAATVGHVGKGAIWLSVNGEEKQSSDVSQLIWSVAETVAYLSTLFELQPGDLIFTGTPEGVGAVVPGDLMKGGVDGLGEFSVRVV

SEQ ID NO: 32518 - DNA, 879 bp, Ralstonia metallidurans CH34
  CDS (1)..(879): transl_table=11
atgaaatttgcaacgctccaaaccgcgcaagggaagctcgtttccctggtaaacactgagtcgcagcagtattggccgctccaggatctggtttctgggttcaccggggacatggtccaattggttcatgttttcccggaaattaagggccgcttgacgcccaccggcgaaggcaagcccctctcgcaggcgacggtgctcgccccgatcgaccagccgcgccgcaatatcttctgcgtcggcaagaactaccatgagcacgcgaaagaattctcgaaatccggcttcgacagcagcgccaaggagggtgagcacgccccggaagcgccggttgtctttacaaagcccgcctcgacggtcatcggcccgggcaagaaagtaccgagccacccgaacgtgacgaagcaactagactacgaggcagaactggcagtcgtcatcggcaaggctggccgtgcgatccgcaaggaagaggcgtacaagcatgtcatcggctacaccatcgtgaatgacttcaccgcccgcgacctgcagaagacgcaccgacagtggttccttggcaagtcattggacggcttctgcccaatgggcccgtatctcgtcacggcagatgaactcgacgtcgaaaatcttgaagtgaagtgctggatcaacgacgaactgcgccaggactccaacaccagccagctcattttcgacattcccacgcttattgagactctctctgccggcatcgaactgcagcccggcgatgtcatcgcaacaggcacccccgcaggcgtcggcattggcttcaacccgccgaagtttgtaaaggccggcgatgtcatgcgcattgagatcacgggcctgggcaccctggtcaacgaggtggagtaa

SEQ ID NO: 32519 - protein, 292 aa, Ralstonia metallidurans CH34
MKFATLQTAQGKLVSLVNTESQQYWPLQDLVSGFTGDMVQLVHVFPEIKGRLTPTGEGKPLSQATVLAPIDQPRRNIFCVGKNYHEHAKEFSKSGFDSSAKEGEHAPEAPVVFTKPASTVIGPGKKVPSHPNVTKQLDYEAELAVVIGKAGRAIRKEEAYKHVIGYTIVNDFTARDLQKTHRQWFLGKSLDGFCPMGPYLVTADELDVENLEVKCWINDELRQDSNTSQLIFDIPTLIETLSAGIELQPGDVIATGTPAGVGIGFNPPKFVKAGDVMRIEITGLGTLVNEVE

SEQ ID NO: 32520 - DNA, 792 bp, Acidobacteria bacterium Ellin345
  CDS (1)..(792): transl_table=11
atgcgctactgccgttttgtccatcgtgggcagccgaagtacggcctcatcgaaaccgagaacacgcgcgactacatcatccgcgccatcgccaccatgccgcaggattacaacaccttcgctggtgccgagccattgcatgtgctcctggaagaagccgagttgctggctagcgttgtgcccaccaagatcgtttgcgtcgggaggaactacaaagcgcacgccgaagaactcggacacgagatccccaagtacccgctcattttctcaaaaccaacttctgcaatcattgcacccggcgcggacattaaacggccggcgaagctctcacagcgcgtggactacgagggcgaactcggcgtgatcatcggtcgcgaatgccgtcacattcccgaggaccacgacgtgcgctcctacatccacggctacaccgtagtgaacgatgtcaccgcgcgcgatttgcagaacaaagacggccagtggacccgcgccaagggtttcgacacgttctgccccgtcggtccaatcgtcaacgatgcgctggatccatggactggcgtggaagtcgagactcgcgtgaacggagcggtccgccaacatggcaacacgtcgagtttcatctttccactcgacgtcatcctccgcttcatctccgaagtgatgaccctgtttccgggcgatctcattgccaccggtacacccgaaggcgtcggaccgatcatagctggagacgtggttgaggtcagcgtggcaggtatcggaactctgcgcaatcctgtcgccgacgagtag

SEQ ID NO: 32521 - protein, 263 aa, Acidobacteria bacterium Ellin345
MRYCRFVHRGQPKYGLIETENTRDYIIRAIATMPQDYNTFAGAEPLHVLLEEAELLASVVPTKIVCVGRNYKAHAEELGHEIPKYPLIFSKPTSAIIAPGADIKRPAKLSQRVDYEGELGVIIGRECRHIPEDHDVRSYIHGYTVVNDVTARDLQNKDGQWTRAKGFDTFCPVGPIVNDALDPWTGVEVETRVNGAVRQHGNTSSFIFPLDVILRFISEVMTLFPGDLIATGTPEGVGPIIAGDVVEVSVAGIGTLRNPVADE

SEQ ID NO: 32522 - DNA, 771 bp, Myxococcus xanthus DK 1622
  CDS (1)..(771): transl_table=11
atgacgaccgcgcgctactgccgcttcctgcatgagggccgtgcgcaccacggccgggtggaaggctccgaggtggtggtcctcaccgccgcgccctgggctggcgcgaaggagacgggcatccaccgctcgctgtcctcgctgacgctgctggtgccgtcggacgcgtccaaggtcgtgtgtatcggccagaactaccgcaagcacgcggaggagatgggcaagccggtgccgcccgagccgctcatcttcaccaagccctccacggcgctcaatggcacgggctcgcccatccgcatccccaaggcgagccaggaagtccactacgaggcggagctggcgctcgtcatcggcgagaagctgaagaacgccgacgagtccaccgcggcgcgcgccatctggggcctcacctgcttcaacgacgtgacggcgcgcgacgtccagcgccgcgagattcagcacacccgcgccaagggctacgacaccttcgcgtgcgcggggccgtgggcggtgacgggcctgtctcccgccgacctccgcattgtgtgccgggtgaacgggcaggtgcgccaggacagccgcacatccgacatgattttcagtcccgcgcgcctggtgtcgttcatctcccacatcatgacgctgctgcctggggacatcgtcagcaccgggacgccgtcgggtgtggggaagctgtcggccggggacacggtggaggtggagctggagggaatcggaaccctggtgaaccctgttgagatggagccgtga

SEQ ID NO: 32523 - protein, 256 aa, Myxococcus xanthus DK 1622
MTTARYCRFLHEGRAHHGRVEGSEVVVLTAAPWAGAKETGIHRSLSSLTLLVPSDASKVVCIGQNYRKHAEEMGKPVPPEPLIFTKPSTALNGTGSPIRIPKASQEVHYEAELALVIGEKLKNADESTAARAIWGLTCFNDVTARDVQRREIQHTRAKGYDTFACAGPWAVTGLSPADLRIVCRVNGQVRQDSRTSDMIFSPARLVSFISHIMTLLPGDIVSTGTPSGVGKLSAGDTVEVELEGIGTLVNPVEMEP

SEQ ID NO: 32524 - DNA, 882 bp, Rubrobacter xylanophilus DSM 9941
  CDS (1)..(882): transl_table=11
atgaagctcgccacgtatctggacggcaggccgcgggtgggggcggtggtcgacggcggggtcgtcgacctgagcgggaggttcggctccatgctggagctcatcgaggggggaggggaggcgctggaggaggcccgcgcggtcgccgcgggctccgggcccgccgcccggctcgacgaggtgaggctgctggcccccatcccgcagcccaggaggaacgtcttctgcatgggctggaactacctgacccacttcgaggaggggaggggacggcgcgaggggcagggggaggagctgcccgagtaccccaccttcttcgacaagcccacgaccaccgtcatcggcccccacgacgacatcccgttcgacccgaacttctccgagaagatcgactacgaggccgagctcgccgtcgtcataggccggtccgggaggagcatacccgccggggaggccatggaccacgtcttcggatacaccgccgcgaacgacgtgaccgcccgggacgtgcagcggcgccacggcggccagtggctcaagggcaaggggatggacggaagctgccccttggggccctggatcgtgaccgccgacgagataccggacgtgcagaacctgcaggtccaatgccgcgtaaacggcgtgcagaagcagaactcgaacaccaggttcatggtcttccccgtcgcgaggctcatagaggagctctccctggcgatgaccctcctgcccggggacgtcctgctcaccggcacgccggagggcgtaggctacgcccggacgccgcccgagttcctcaggcccggcgacgaggtgaccgtctacgtcgagggcgtcggggagatctccaaccgcgtcgtcgagaaaaacctcacccgctga

SEQ ID NO: 32525 - protein, 293 aa, Rubrobacter xylanophilus DSM 9941
MKLATYLDGRPRVGAVVDGGVVDLSGRFGSMLELIEGGGEALEEARAVAAGSGPAARLDEVRLLAPIPQPRRNVFCMGWNYLTHFEEGRGRREGQGEELPEYPTFFDKPTTTVIGPHDDIPFDPNFSEKIDYEAELAVVIGRSGRSIPAGEAMDHVFGYTAANDVTARDVQRRHGGQWLKGKGMDGSCPLGPWIVTADEIPDVQNLQVQCRVNGVQKQNSNTRFMVFPVARLIEELSLAMTLLPGDVLLTGTPEGVGYARTPPEFLRPGDEVTVYVEGVGEISNRVVEKNLTR

SEQ ID NO: 32526 - DNA, 888 bp, Rubrobacter xylanophilus DSM 9941
  CDS (1)..(888): transl_table=11
ttgctgctaagatgcaggcctgctggtctctgtggcgcgcaaaccaagagagaaccggagggaggagcgcagaaggtgaagctggtcacttactcggtgggcggcggagagccgcgcgtggggaggcttcaggacggcgccgtacagcccctcggggctccggacatgatctcgtacatcagggggggcggggagccggagggggagcccgtgccgctcgaggaggcgcggctgcacgcccccgtcctcaacccacagaagataatcgccatcgggctcaactacgaggaccacgcgaacgagacgggcgcgcccatccccgagaagcccatcgtcttcgccaagtacgccaacaccctcgtcggggcgggggaggaggtcaggatcccgcccatcacctcccaggccgactacgaggccgagctcgccgtcgtcatcgggcgggaggccaagaacgtctccgaggaggaggccctggagtacgtcttcggctacaccaactgcaacgacgtctcctcgcgcgacctgcagttctccgagggcgggcagtggacccgcagcaagtcgctcgacaccttctgcccgctcgggccctacgtcgcgacccgcgacgagatccccgacccccagagcctccggatacgctcggtgctcaacggcgaggtcatgcaggacagcaacacctccaagatgatcttcccggtcgcccgcctcatctccttcctctccaccggtatgaccctcgtccccggggacatcatcgccaccggcaccccggcgggggtgggcttcgcccgcgacccgaaggtcttcctcaaggacggcgacgagatctccatcgagatagaggggctcgggcggctcaccaaccccgtcagggaagagtag

SEQ ID NO: 32527 - protein, 295 aa, Rubrobacter xylanophilus DSM 9941
MLLRCRPAGLCGAQTKREPEGGAQKVKLVTYSVGGGEPRVGRLQDGAVQPLGAPDMISYIRGGGEPEGEPVPLEEARLHAPVLNPQKIIAIGLNYEDHANETGAPIPEKPIVFAKYANTLVGAGEEVRIPPITSQADYEAELAVVIGREAKNVSEEEALEYVFGYTNCNDVSSRDLQFSEGGQWTRSKSLDTFCPLGPYVATRDEIPDPQSLRIRSVLNGEVMQDSNTSKMIFPVARLISFLSTGMTLVPGDIIATGTPAGVGFARDPKVFLKDGDEISIEIEGLGRLTNPVREE

SEQ ID NO: 32528 - DNA, 834 bp, Hyphomonas neptunium ATCC 15444
  CDS (1)..(834): transl_table=11
atgcgtctggtgcggtttgaagccgaagggcacgtccggtttggccatctggaaggcgatactgtcgtgcctgttgcaggagacagctttatcgacgcgctggagggccgcgagaagggcgcgcccctggcgctcagcgtcgtgcgcctgctcgccccggtgccccgtccccgaaaaatcctggggataggtgtgaattatgccgcccacgccgccgagagcgtgagcttcatcaacaccgccaaacccgaggtgcagaaatggttcaacaaacaggcaacggcggtgaacggaccctatgatccggtccaccttcccagggtttccagccagctcgattatgagggtgagctggtcgcggtgatcggcaagcatggccggcatgtgcccgctgaaagggccatggaaatcgttgcaggcttctgtatcggttgcgattattcggtgcgcgactggcagaaggccagccagacgatgatcatgggcaagggctttgacacgcacgcgccgtttggccccgcgctggtgacgccggatgagctgggcgatatttcagacctcgaaatccgcagcttcgtgaacggcgaattgcgccagtccggccgcccgcgggacatgatccacgatgttggcgcccagattgcacatcttacggcggcctttacgcttgagcctggggatgtgatcttcactggaaccccggccggagtcggcgcggggttcgatccgccgaaatggctgaaggcaggtgaccgtgtacgcatcgagatcgacaggctgggccacatcgagaacgccatcgttcccgagcctgacacaatgcgaatcggttga

SEQ ID NO: 32529 - protein, 277 aa, Hyphomonas neptunium ATCC 15444
MRLVRFEAEGHVRFGHLEGDTVVPVAGDSFIDALEGREKGAPLALSVVRLLAPVPRPRKILGIGVNYAAHAAESVSFINTAKPEVQKWFNKQATAVNGPYDPVHLPRVSSQLDYEGELVAVIGKHGRHVPAERAMEIVAGFCIGCDYSVRDWQKASQTMIMGKGFDTHAPFGPALVTPDELGDISDLEIRSFVNGELRQSGRPRDMIHDVGAQIAHLTAAFTLEPGDVIFTGTPAGVGAGFDPPKWLKAGDRVRIEIDRLGHIENAIVPEPDTMRIG

SEQ ID NO: 32530 - DNA, 843 bp, Hyphomonas neptunium ATCC 15444
  CDS (1)..(843): transl_table=11
atgaagatcctcagagttggccctccggggcgcgaaaagccggcagttcttgattccagcggcaatatgcgggacgtcagcgacctggtggatgactgggatggcctggcattgtccgatgccgtgtttgcgcagttgcgcaaggttgaccttgccaccctgcccatgctcccggccgccagccggatcggcccctgtgtcgcagatgtcggaaaattcatctgtatcgggctgaattatgccgatcacgccgccgaaaccggcgccgaagtgcctgctgaacccgtggtgttcttcaaggcgacgagcgccatctgcgggccgaatgacaatctcgaaatcccccgcaaatcggagaaaaccgactgggaagtcgagctcggcatcgtcatcggcaaacacacaaaatacgtctcggaagaagacgcgatggaccacatcgccggctattgcgtggttcacgacgtctccgagcgcgccttccagcttgagggcaccggccagtgggtaaagggaaaaagcgccgatacgttcggcccgatcggcccctggctcgtcacccgcgacgagattaccgacccgcaaaaccttaccatgtggctggatgttaacggcgaagccatgcagcgggggtcgacctcgaccatgattttcggggtggcgcatatcgtcagctacctctcgcaattcatgagccttcagccgggggacgtgatttccacaggcacgcctccgggcgtgggcctgtcgcgcacaccgccgctctatctgaaggcgggcgacacggtaacccttggaattcaaggccttggcgaccagcgccaggtctgcatcaacgcctga

SEQ ID NO: 32531 - protein, 280 aa, Hyphomonas neptunium ATCC 15444
MKILRVGPPGREKPAVLDSSGNMRDVSDLVDDWDGLALSDAVFAQLRKVDLATLPMLPAASRIGPCVADVGKFICIGLNYADHAAETGAEVPAEPVVFFKATSAICGPNDNLEIPRKSEKTDWEVELGIVIGKHTKYVSEEDAMDHIAGYCVVHDVSERAFQLEGTGQWVKGKSADTFGPIGPWLVTRDEITDPQNLTMWLDVNGEAMQRGSTSTMIFGVAHIVSYLSQFMSLQPGDVISTGTPPGVGLSRTPPLYLKAGDTVTLGIQGLGDQRQVCINA

SEQ ID NO: 32532 - DNA, 843 bp, Rhizobium leguminosarum bv. viciae 3841
  CDS (1)..(843): transl_table=11
atgaagctgatgcgtgttggcgaagccggcagtgaaaaaccagcacttctcgatgccgatggcaagatccgcgatctttccggtcatgttgccgatatcggcggtgaagcgatcggaccggcaggccttgcaaagatagcggccatcgatccgaagagccttccggaacttgtccccggacgcatcggcgcctgcgtcgcgggcactggcaagttcatctgcatcggcttgaattattcggatcatgctgccgaaaccggtgcgaccgtgccgcccgagccgatcatcttcatgaaagcaacatccgcaatcgtcggaccgaacgataatgttatcatcccgcgcggttcggaaaagaccgattgggaagtcgagctcggcgtcgtcatcggcaaaaccgccaaatatgtgacggaagccgaagcgctggattatgtcgccggttattgcgtttccaatgacgtttccgagcgcgctttccagaccgagcgttccggtcaatggaccaaggggaaatcctgcgatacgtttggtccgatcggcccatggctcgtgaccaaggatgaaattcccgaaccgcagaacctcggcatgtggctgacggtcaacggccagaagatgcagaacggctcatcgaaaacgatggtttacggggttgcgttcctcgtctcctacctcagccagttcatgtcgctgcatcccggtgacgtgatctcgaccggcacgcctccgggcgtcggcatgggcctcaagccgccgcgttatctcaaatcaggagacgtggtcgaactcggcatcgaaggtctcggcacgcagaagcagaccttcgtagcggatcgttaa

SEQ ID NO: 32533 - protein, 280 aa, Rhizobium leguminosarum bv. viciae 3841
MKLMRVGEAGSEKPALLDADGKIRDLSGHVADIGGEAIGPAGLAKIAAIDPKSLPELVPGRIGACVAGTGKFICIGLNYSDHAAETGATVPPEPIIFMKATSAIVGPNDNVIIPRGSEKTDWEVELGVVIGKTAKYVTEAEALDYVAGYCVSNDVSERAFQTERSGQWTKGKSCDTFGPIGPWLVTKDEIPEPQNLGMWLTVNGQKMQNGSSKTMVYGVAFLVSYLSQFMSLHPGDVISTGTPPGVGMGLKPPRYLKSGDVVELGIEGLGTQKQTFVADR

SEQ ID NO: 32534 - DNA, 666 bp, Pseudomonas aeruginosa UCBPP-PA14
  CDS (1)..(666): transl_table=11
atgagttaccagcatcaatatatcgacggcaccccgatccacttccccctgggcaagctggtctgcgtcgggcgcaactacgccgaacacgccaaggaactgaacaacccggttcccaccgagccgctgctgttcatcaagcccggctcctgcgtggtgccggtgagcggcgggctgagcctgccgcaggagcgcggctcggtacactacgaggcggaaatcgccgtgctgatcggcaagccgctgtcgcgcaagccgaaccgcgaggaggtcctcgacgcgatctccggctatgcgccggcgctggacctgaccttgcgcgaggtccaggcgaaactgaaggaaaagggcctgccctgggagctggcaaagagcttcgatggcgccggcgtgctgtcgccgttcgtgaacgccgaccagttccccgacccgaccgacatcggcatccgcctgaccatcaacggcgaggtgcgccaggacggcaacagccgcgacatgctcaatccgatcgtgccgctgatccagcacatcgccgggcatttctcgctacaggccggcgatgtggtgctgaccggcacgccgtccggggtcgggccgctgaacagcggcgacgagttgctgctcgaattgccgggcgccagccgtttcgagacccgcgtgctctga

SEQ ID NO: 32535 - protein, 221 aa, Pseudomonas aeruginosa UCBPP-PA14
MSYQHQYIDGTPIHFPLGKLVCVGRNYAEHAKELNNPVPTEPLLFIKPGSCVVPVSGGLSLPQERGSVHYEAEIAVLIGKPLSRKPNREEVLDAISGYAPALDLTLREVQAKLKEKGLPWELAKSFDGAGVLSPFVNADQFPDPTDIGIRLTINGEVRQDGNSRDMLNPIVPLIQHIAGHFSLQAGDVVLTGTPSGVGPLNSGDELLLELPGASRFETRVL

SEQ ID NO: 32536 - DNA, 810 bp, Solibacter usitatus Ellin6076
  CDS (1)..(810): transl_table=11
gtgatcgtggacgggttgttgattcgtctcaaagatgcgggcttccacgacgtgcacgacctgatcgcgggcggcgccgacgccatggatcgcgtggtgcgatgggtgaatcactcgccaggcggggaggtcttcgacgtggccggaatgaaactgcggtcgcccctccagcggccgggcaagatcatctgcatcggcctgaattaccgcgatcacgccgaggaagcgaagatgccgatcccggaaacaccgaccgtgttcgccaagtggggcaacaccgtcaccgggcatcagcatccgatcgtgctgccgaagaattccagaaagccggattatgaagcggaactcgcggtggtaatcggcaagggcggacgccacattgcggaggcgaactggcgcgagcacgtctttggatacacgatcctcaacgacgtgagcgcgcgcgattttcagatggcgaccagccagtggacgatcggcaagactttcgacaccttcgctccgattggcccgtggatcgtcaccaccgacgaaatcgaagatcccggcgcgctccgaatctcgctcacgctaaacagcgtgaccatgcaggattcgaacaccagtaatttgattttcggaattccgaaactgatcgcgtatttatcgagcgtgatgtcgctcgaaccgggcgacatcatttcgaccgggacgcccgccggggtaggcttcgcccagaaacccccgcgatggctggttcccggggacgtgtgcgcgattcaggtggggggaatcggcgagctggtgaacccggtgatcgccgaagcgtag

SEQ ID NO: 32537 - protein, 269 aa, Solibacter usitatus Ellin6076
MIVDGLLIRLKDAGFHDVHDLIAGGADAMDRVVRWVNHSPGGEVFDVAGMKLRSPLQRPGKIICIGLNYRDHAEEAKMPIPETPTVFAKWGNTVTGHQHPIVLPKNSRKPDYEAELAVVIGKGGRHIAEANWREHVFGYTILNDVSARDFQMATSQWTIGKTFDTFAPIGPWIVTTDEIEDPGALRISLTLNSVTMQDSNTSNLIFGIPKLIAYLSSVMSLEPGDIISTGTPAGVGFAQKPPRWLVPGDVCAIQVGGIGELVNPVIAEA

SEQ ID NO: 32538 - DNA, 810 bp, Nocardioides sp. JS614
  CDS (1)..(810): transl_table=11
gtgcgcatcgcaaggttcaccacgggcgaagacccgttgtacggcgtggtcacgggcgagctcgacgagttcgggcagccggaccccgacagcgtcgtcgtggccctggccggcgacccgctctacgtcggcgtcaagctgctcgaccaggagcaccggctcgaggacgtgcgactgctcgcgccggtgctgccgcgcagcaaggtcgtcgggatcggccgcaactacgcggcgcacgcggcggagctgggcaacgacctacccaccgagccgctgatgttcctcaagccgaacaccagcgtgatcggcccgggcgacccgatcttctacccgccgcagacgcagaacctgcactacgagggcgagctcgccgtcgtgatcggccggatctgccgcgacgtacctcccgagcaggccaccgacgtgatccacggctacacgatcggcaacgacgtgaccgcgcgggacctgcagcgcagcgacgtgcagttcacccgggccaagggcttcgactcgttctgcccgctggggccgtggatcgagaccgacctcgacccgcacgacttcgcggagggccgcagcgtccagacgcacctgaacggcgacctggtccaggacggctcgaccaaggacctgatcttcgacatcccgaccctgatcgcgtacgtgtccagcgtgatgacgctgctccccggtgacgtcatcctcaccggcacccccgagggcgtcggccccatggacgtcggcgacgaggtcgaggtctcgatcgccggactcggcactctcacgaaccccgtcaaggcaaggtga

SEQ ID NO: 32539 - protein, 269 aa, Nocardioides sp. JS614
MRIARFTTGEDPLYGVVTGELDEFGQPDPDSVVVALAGDPLYVGVKLLDQEHRLEDVRLLAPVLPRSKVVGIGRNYAAHAAELGNDLPTEPLMFLKPNTSVIGPGDPIFYPPQTQNLHYEGELAVVIGRICRDVPPEQATDVIHGYTIGNDVTARDLQRSDVQFTRAKGFDSFCPLGPWIETDLDPHDFAEGRSVQTHLNGDLVQDGSTKDLIFDIPTLIAYVSSVMTLLPGDVILTGTPEGVGPMDVGDEVEVSIAGLGTLTNPVKAR

SEQ ID NO: 32540 - DNA, 711 bp, Azoarcus sp. BH72
  CDS (1)..(711): transl_table=11
atgtcccagacccattacctgtggaacccctcgccggtctattcgctgccggtgaagggcgtcgatgcccgctttccggtcaagcgcatcttctgcgtcggccgcaactaccacgcccacgcggtggaaatgggccgcccggtcgacaaatcgaccatggcccccttctacttcctgaaggacgcctccacgctggtggagtccggcgccaccgtgccctaccccaccggcaccagcaactaccactacgagatggaactggtggtggcgatcggcaaggcgggcttccgcgtcgccgaggccgatgcggactcgctcatctacggctatgccgccgggttggacatgacccgccgcgacctgcagctggtggcccgcgaacagggccgcccgtgggacctcggcaagaacttcgagaactccgcggtctgcaccgagatcatccccgccgccggcggcgccgtgctcgacaagggcgcgatcaacctgcaggtcaacggcgagaccaggcagagcgccgacctctcgatgctgatctggaacatccgcgaaatcatcgccgacctgtcgaagttctatcacctggagccgggcgacctgatctacaccggcaccccggaaggcgtcggcgcggtcaagagcggcgaccgcatcaccggccatatcgacggtgtgggcgacgtcgcgctgacgatcggcgccgccgagtaa

SEQ ID NO: 32541 - protein, 236 aa, Azoarcus sp. BH72
MSQTHYLWNPSPVYSLPVKGVDARFPVKRIFCVGRNYHAHAVEMGRPVDKSTMAPFYFLKDASTLVESGATVPYPTGTSNYHYEMELVVAIGKAGFRVAEADADSLIYGYAAGLDMTRRDLQLVAREQGRPWDLGKNFENSAVCTEIIPAAGGAVLDKGAINLQVNGETRQSADLSMLIWNIREIIADLSKFYHLEPGDLIYTGTPEGVGAVKSGDRITGHIDGVGDVALTIGAAE

SEQ ID NO: 32542 - DNA, 696 bp, Acidovorax sp. JS42
  CDS (1)..(696): transl_table=11
atgagctatgtgatccctcccgcaccgcaggccagcgtgcccgtcgtgggcacaacccagcgctttcccgtgcaccgcatctactgcgtgggccgcaactatgccgagcatgccaaggaaatgggcttcaccggccgcgagccgccgttcttcttcatgaagcccgccgacgccgtgctgcccgtgaacccgggcgagaccggccagatgccctaccccacgctgaccaaggacctgcaccacgagatcgagctggtggtggccatcggtaagggcggcaagcacatcgccgcggccgacgcgctgtcgcacatctggggttacgccgtgggcctggacatgacgcgtcgcgacctgcagggcgagatgaagaagcagggccgcccctggtgcatcggcaagggcttcgaggccagcgcgcccatcggcccgatcacgcccgcggcgcaggcgggcgacgtgcagcaggcagccatctggctgcaggtcaacggcacggaccgccagcgcagcagcgtgggccagctgatctggaacatcgccgagaccatcgaacatctgtccgccgcgtgggagctgcagcccggcgacctgatcttcaccggcacccccgagggggtgggcgcggtggtgcgcggcgacgtgctggaaggcggcatcgacggcctgggcacgctgcgcgtggccgtggcctga

SEQ ID NO: 32543 - protein, 231 aa, Acidovorax sp. JS42
MSYVIPPAPQASVPVVGTTQRFPVHRIYCVGRNYAEHAKEMGFTGREPPFFFMKPADAVLPVNPGETGQMPYPTLTKDLHHEIELVVAIGKGGKHIAAADALSHIWGYAVGLDMTRRDLQGEMKKQGRPWCIGKGFEASAPIGPITPAAQAGDVQQAAIWLQVNGTDRQRSSVGQLIWNIAETIEHLSAAWELQPGDLIFTGTPEGVGAVVRGDVLEGGIDGLGTLRVAVA

SEQ ID NO: 32544 - DNA, 846 bp, Acidovorax sp. JS42
  CDS (1)..(846): transl_table=11
atgaaactcgtccgccacggacaacccggcgcggagcgcgccggcctgatcgacgcccagggcgtgctgcgcgacctgtccatgctgctgccggacatcggccccacgcagttggcgccacgcacgttggccgcgctggccgccatcgacgccgcgcgcctgcccgcggtggtacccggcacacgcctgggctgccccgtgggcggtgtcggcaagatcgtctgcgtgggcctgaactacgccgaccatgcggccgaggccggcttgcccgcgccggcagagcccgtgctgttcatgaaggcgaccagcgcgctcagcggccccacggacgccgtgcgcatcccgcccggcgcgctcaagaccgactgggaggtggagctgggcatcgtcatcggcacgcgcatgcagcaggtggccgaggccgatgcgctggcccatgtggccggctacgtgctggccaacgacgtgtccgagcgcagctaccagatggagcgtggcgggcagtgggacaagggcaaaggctgcgacaccttcgcgcccgtgggcccctggctggtgaccaccgacgagattcccgacccgcacgccatcgggctgtggctggaggtgaacggccagcgcatgcaggacggccacacgcgcaatttcatcttcggcgtgccccgggtgctggcctacatcagccagttcatgacgctggagccgggcgatctggtgctcaccggcacgcccgccggcgtgggcctgggacagaagcccacgccgcgtttcttgcgcgcgggcgacgtgatgcggctgggcgcgacggggctgggcgagcagcggctggtctgcacgggcgggtag

SEQ ID NO: 32545 - protein, 281 aa, Acidovorax sp. JS42
MKLVRHGQPGAERAGLIDAQGVLRDLSMLLPDIGPTQLAPRTLAALAAIDAARLPAVVPGTRLGCPVGGVGKIVCVGLNYADHAAEAGLPAPAEPVLFMKATSALSGPTDAVRIPPGALKTDWEVELGIVIGTRMQQVAEADALAHVAGYVLANDVSERSYQMERGGQWDKGKGCDTFAPVGPWLVTTDEIPDPHAIGLWLEVNGQRMQDGHTRNFIFGVPRVLAYISQFMTLEPGDLVLTGTPAGVGLGQKPTPRFLRAGDVMRLGATGLGEQRLVCTGG

SEQ ID NO: 32546 - DNA, 828 bp, Crocosphaera watsonii WH 8501
  CDS (1)..(828): transl_table=11
atgccgcaacgctacgttagagtaaaaacaactcaaggaaacatccattatggctcacttaatctcaatcgcagtgtggcggtgtttgatgctgccccttgggatggagggcaacccagtggtgtcgtcctcaaggcggatagttatcaatttgtagccccttgttttccttccaaaattattgcagtgggcagaaattataaagctcatgcagaggaactgggtaacaccgtcccaacagaacctttactctttcttaaacctccttcgaccctgattggggaagagcaacctatctattatccctcccagtctcaacaggtagactatgaaggagagttagctttggtgattggtgaagtgactaaaaattgttctgagaaagaagctcaaagcaaaatttggggctataccattgctaatgatgtgacagcccgtgattttcaacggaaggataatcaatgggtgcgggctaaggggtttgataccttttgtcctctaggcccctgggtgatccgcgaattaagtgcggctgctagtattcaaacttttgttaacaatgaagaagaaccacggcagtctgctttggttcaggatatgatattttctcctcaagtcatcgtttcttatatctctcaaattctgactttgtttccaggggatgttattttgacgggaacccccgaaggggttggccctgtgagtatcggcgatcgcattcgggtagaaattgagggcattggtagcatcgaaaaccctgttatgagtgagccaaccgctaacatgactaccagcgaacctgagaataagcagcctcagaaatcgtag

SEQ ID NO: 32547 - protein, 275 aa, Crocosphaera watsonii WH 8501
MPQRYVRVKTTQGNIHYGSLNLNRSVAVFDAAPWDGGQPSGVVLKADSYQFVAPCFPSKIIAVGRNYKAHAEELGNTVPTEPLLFLKPPSTLIGEEQPIYYPSQSQQVDYEGELALVIGEVTKNCSEKEAQSKIWGYTIANDVTARDFQRKDNQWVRAKGFDTFCPLGPWVIRELSAAASIQTFVNNEEEPRQSALVQDMIFSPQVIVSYISQILTLFPGDVILTGTPEGVGPVSIGDRIRVEIEGIGSIENPVMSEPTANMTTSEPENKQPQKS

SEQ ID NO: 32548 - DNA, 720 bp, Prosthecochloris aestuarii DSM 271
  CDS (1)..(720): transl_table=11
atgcctcttattccagccgccacactcgccccgtcatcgatctactgtgtaggaaaaaactatgaagatcatgccagagaaatgctgaaatgggacgggggcacaacgctcccgcccctgaatgagtctgaccccattatctttctcaaacccgtttcagctcttacgcctgactacagaacatcgatcccctgtatcgaacagcaaccggtatcgcaccttatgcattacgaagccgaactggtgctcctcattggaaaggatgcagagcaaatagggctcgacgaagcgccccgatatattcaaggctacggtgtcggtcttgacatgacactgcgcgacgtccagcagcaggcccgacaaaaaggagagccatggctgaaaagcaaaggtttccgtcaaagcgctatggtctcggatatcataaccgctgaagatgccggagatccggcctctcttggtttttctctcatcctgaacggcaaaaaagtccagcagggggcggcaaaccagatgatattcaatccctttcatcttatttcctatctttcatggatatatggtttgcgccggggagaccttctgtttaccggcacaccggcaggcgtcggaccggttgaaccgggtgatcgcctcgaagcgattctggaacaaacacataacggggccgcaacagccctgacgcatttcgaagcaacaatccatgaacccggcacataa

SEQ ID NO: 32549 - protein, 239 aa, Prosthecochloris aestuarii DSM 271
MPLIPAATLAPSSIYCVGKNYEDHAREMLKWDGGTTLPPLNESDPIIFLKPVSALTPDYRTSIPCIEQQPVSHLMHYEAELVLLIGKDAEQIGLDEAPRYIQGYGVGLDMTLRDVQQQARQKGEPWLKSKGFRQSAMVSDIITAEDAGDPASLGFSLILNGKKVQQGAANQMIFNPFHLISYLSWIYGLRRGDLLFTGTPAGVGPVEPGDRLEAILEQTHNGAATALTHFEATIHEPGT

SEQ ID NO: 32550 - DNA, 831 bp, Roseovarius nubinhibens ISM
  CDS (1)..(831): transl_table=11
atgcgatttgccagatacggagcagcaggagaagaacggcccgcgatgctcgacgccgaggggcggctgcgcgacctgtcgggggtggtgccggatctttcgggcgaggtgctggggcaattgcccaaggtgaaccccgaggcgctgccgctggtcgagggcacgccgcgcctgggcgtgccggtggcagacattggcaagctggtgtgcatcgggctcaacttttccgatcatgccgccgaggcggggatgcagccgccctcggaacccatcgtcttcatgaaggcgacctcggccatctgcgggcccaatgacacggtctcgctgccgcgcggctcggagaaatccgactgggaggtcgagcttggcgttgtgatcggacgccgcgccaaatatgtgagcgaggccgaggccctgtcctatgtggcgggctacaccatcgtcaatgatgtctcggaacgcgcctttcagaccgagcgcggcggccaatggaccaaaggcaagagctgcgacacattcggccccattggcccctggctggtgacgcctgacgccttgggcgatgtgcaggatctcgacatgtcgctcgatctcaacggcacgcggatgcagaccggcaacacgcgctcgatgatctttggcgtggccgaggtgatttcctatctgagccagatgatgacattgcatccgggcgatgtgatcgccaccggcacgccgccgggggtggggatggggttcaaaccgccgaaatacctcaaaccgggcgatgtgatggagctcgagattgccgggcttggccgtcagcgtcaggaggtggtggccgatagctga

SEQ ID NO: 32551 - protein, 276 aa, Roseovarius nubinhibens ISM
MRFARYGAAGEERPAMLDAEGRLRDLSGVVPDLSGEVLGQLPKVNPEALPLVEGTPRLGVPVADIGKLVCIGLNFSDHAAEAGMQPPSEPIVFMKATSAICGPNDTVSLPRGSEKSDWEVELGVVIGRRAKYVSEAEALSYVAGYTIVNDVSERAFQTERGGQWTKGKSCDTFGPIGPWLVTPDALGDVQDLDMSLDLNGTRMQTGNTRSMIFGVAEVISYLSQMMTLHPGDVIATGTPPGVGMGFKPPKYLKPGDVMELEIAGLGRQRQEVVADS

SEQ ID NO: 32552 - DNA, 759 bp, Oceanicola batsensis HTCC2597
  CDS (1)..(759): transl_table=11
atgaagatcgcgagatacacgcacaacgaccaaatcgcctgcgggatggtcgaaggcgacacgctgcgcccgataaggggcgacatcttcggcgatttctcgaccaccgaggacaggctgccgctgtccgacgtcgccctcctgccgccggttgagccgggcaagctggtgtgcgtcgggttgaactacaagcgtcacgccgaggaatccggtgccgcgatccccgaagagccgatgctcttcatgtgcgccccgtccgccgtcatccccgacggcggcaccatcctgctggacagccaggacgccaggatcgactacgaggcggaaatcgccatcgtgatcggcaagcaggcccgcaacctgcccgaggccgacgcccggtcctgcatcttcggctacacgatctgcaacgacgtctcgaaccgcgactatcagaagaaggacgggcagttcacccgggcgaagtccttcgacacctacaagcccctcggcccctggatcgaaaccgggctcgacccggacaacgcggcaatatcgctccgccagaacggcgaactccggcagcagtcgaacaccagcgacatgatcttttcgatcgaccggatcgtggccttcgtctcgggcatcatgaccctgaaccccggcgacgtgatcatcaccggcacgcccgaaggcgtgggtcccatgaggtccggcgaccgcatcgagatcgaaatcgagggcatcggcacgctcgccaattccgtcgccaacgcgtag

SEQ ID NO: 32553 - protein, 252 aa, Oceanicola batsensis HTCC2597
MKIARYTHNDQIACGMVEGDTLRPIRGDIFGDFSTTEDRLPLSDVALLPPVEPGKLVCVGLNYKRHAEESGAAIPEEPMLFMCAPSAVIPDGGTILLDSQDARIDYEAEIAIVIGKQARNLPEADARSCIFGYTICNDVSNRDYQKKDGQFTRAKSFDTYKPLGPWIETGLDPDNAAISLRQNGELRQQSNTSDMIFSIDRIVAFVSGIMTLNPGDVIITGTPEGVGPMRSGDRIEIEIEGIGTLANSVANA

SEQ ID NO: 32554 - DNA, 666 bp, Pseudoalteromonas tunicata D2
  CDS (1)..(666): transl_table=11
atggaaaagtttgaatggttaaatgcgggcgaaatagccttggtacctgctaaagcggtttgtattgggcgaaattaccgtgaacatgctgcggaattaaataatgcagtccccgatagcccgatgttattcatcaaaccaagcagtagttttgttgcattcaaagggcaaataccattagcgcagcgtttgggtgagcatcattatgaagctgagcttgcattgttaattggtcaaactattagtgcttcaactgaattagatttgcagcagcaagttataggaattggagttgcgatggatttaaccttaaggaatgtgcaggctgaacttaaaagcaaaggacatccgtgggaaaaagctaaagcttatgataatagttgtattgtaagtccttttattcaaatcactgagcagacagatttcaacaatctcgaatttaacctctctattaataatgaaatacgccagattggacacacttctgagatggttttttcgatagttcaattacttgatgagattcgccaatattttactcttcaacctggtgatatcgtacttaccgggacaccaaaaggagttggtaagcttaactctggtgatcaacttgtcgttacgttgcaaaaaaacacattggcctcaggccaaattttgttggtataa

SEQ ID NO: 32555 - protein, 221 aa, Pseudoalteromonas tunicata D2
MEKFEWLNAGEIALVPAKAVCIGRNYREHAAELNNAVPDSPMLFIKPSSSFVAFKGQIPLAQRLGEHHYEAELALLIGQTISASTELDLQQQVIGIGVAMDLTLRNVQAELKSKGHPWEKAKAYDNSCIVSPFIQITEQTDFNNLEFNLSINNEIRQIGHTSEMVFSIVQLLDEIRQYFTLQPGDIVLTGTPKGVGKLNSGDQLVVTLQKNTLASGQILLV

SEQ ID NO: 32556 - DNA, 663 bp, Oceanospirillum sp. MED92
  CDS (1)..(663): transl_table=11
atgggatatcaacatcgttatcaagatgggtcatcagctggattgccaacagggaaagttatctgtgtagggcgtaactatgcggatcatgcagctgaactgaataatccaatcccgaccgagccgatgttatttatcaagccttctacctgcgttgtggatatggctgagccttttaaggtgcctcaggatcatggtgaggtgcactttgaaacggagatggcgatcctgatcggtaaacagctgacccatgcaagcgaagctgaagcggcggcagccattgttggtgtaggtttggggttagatctaaccttgcgcgaactacaggggcgtcttaaggaaaaaggccatccatgggagaaatcaaaagcctttgatggttcttgtccgctctctgcatttgtaacagcggatcaaataacagacctacaggatgttgagattcggttgtttgtaaatgacgagttacgtcaacaaggtaatagcgctttgatgttgaacagggtgctaccgctcattagtcatactagtgagtttttcacgcttgagcctggtgatgtgattctgacaggaacgcctgcaggtgttggtccagtaaaggcgggtgatcagttgcaggttgaacttgctgatcttattgccatctcgactgaagcgatctaa

SEQ ID NO: 32557 - protein, 220 aa, Oceanospirillum sp. MED92
MGYQHRYQDGSSAGLPTGKVICVGRNYADHAAELNNPIPTEPMLFIKPSTCVVDMAEPFKVPQDHGEVHFETEMAILIGKQLTHASEAEAAAAIVGVGLGLDLTLRELQGRLKEKGHPWEKSKAFDGSCPLSAFVTADQITDLQDVEIRLFVNDELRQQGNSALMLNRVLPLISHTSEFFTLEPGDVILTGTPAGVGPVKAGDQLQVELADLIAISTEAI

SEQ ID NO: 32558 - DNA, 624 bp, Oceanobacter sp. RED65
  CDS (1)..(624): transl_table=11
gtgggcaaggttgtttgtgttgggcgcaattatgctgaacatgcgaaagaattggggaatgaaatacccgctgagccgattttattcatgaaaccggcgacaagtttagtagcgctagagccaagttttactatcccaacgcatcaaggcagtgtgcaccatgaattggaaattgcacttttgatcggtgaaaccgcgaagaatatcgaggcaaagagtgcgtggcgtatggtcagccatgtgggtttagcgttggatttaacattaagagatgtgcagaccaaactaaaagaaaaatcccacccatgggaaatcgcgaaggccttcgatggtgcctgtccgatatctaaatggttaccgttaagtgatattgttaatcgtaacgatatggaaatttctttgtacaagaatggacagctacagcaaaatggtcgttcgacgcaaatgctcaacgacatcccaagactgcttagttacatgagtgaatatttctctttgcagccaggcgatgtcattctcactggcacgcctgctggtgttggtcctttgcatgtggaagacgaattaactttgatgttggatgataagctgcgctgctctgcaaaagtgaaccaagcgcagtaa

SEQ ID NO: 32559 - protein, 207 aa, Oceanobacter sp. RED65
MGKVVCVGRNYAEHAKELGNEIPAEPILFMKPATSLVALEPSFTIPTHQGSVHHELEIALLIGETAKNIEAKSAWRMVSHVGLALDLTLRDVQTKLKEKSHPWEIAKAFDGACPISKWLPLSDIVNRNDMEISLYKNGQLQQNGRSTQMLNDIPRLLSYMSEYFSLQPGDVILTGTPAGVGPLHVEDELTLMLDDKLRCSAKVNQAQ

SEQ ID NO: 32560 - DNA, 618 bp, Desulfitobacterium hafniense DCB-2
  CDS (1)..(618): transl_table=11
atgataaaaaacatttattgtgtcggtcgcaattatctgcagcatgccaaggaactcaacaatgcggttccaacttccccgtttcttttcgttaagcccactcatgctctggtggaaggtcaggggcagaccattgccatgcccaaagaccaggggaatgtccattacgaggcggaattggttgttcatgtgggcaaaaactatgaacccggcatgaaggccgaagcggttattgataaaatagctgtagggattgactttactttaagagaggttcaggatgagctgaagaaaaaaggactgccctggctgctggctaaagggttccctaactcagcggtactatcccgatggctgcctttcgaagggctggaggggacggccggccatgattttacccttgagaagaatggacaggaagtgcaaagaggaaatatcaaggagatgatttttgatattcccaccatcatagaattctgtgcccaacacttcggattggctgaaggggatattattttcaccggaacgcctgccggtgtcggtgtagccgctgctggagaccattttgtactgaagtggaaggaagagcaagtgggagagctgttcattggtgagtaa

SEQ ID NO: 32561 - protein, 205 aa, Desulfitobacterium hafniense DCB-2
MIKNIYCVGRNYLQHAKELNNAVPTSPFLFVKPTHALVEGQGQTIAMPKDQGNVHYEAELVVHVGKNYEPGMKAEAVIDKIAVGIDFTLREVQDELKKKGLPWLLAKGFPNSAVLSRWLPFEGLEGTAGHDFTLEKNGQEVQRGNIKEMIFDIPTIIEFCAQHFGLAEGDIIFTGTPAGVGVAAAGDHFVLKWKEEQVGELFIGE

SEQ ID NO: 32562 - DNA, 672 bp, marine gamma proteobacterium HTCC2143
  CDS (1)..(672): transl_table=11
gtgctgtttatggcggactacaagcatcaatttttgaatgagatcgcgtgtggcaaaacgctgggtaagattgtatgtgtcggtcgaaactatgctgaccacgctaaagagttgaataatccgattcccgaccggccgctgttatttattaagccatcgacggcagcagtcgatatgctgctgccgataaacatccctacagatcgtggctgctgtcatcacgaactggaaatggccgttcttataggcaaacgcagtagcagtgtgtctagcgttgaagcaaaggacgctattgttggagtgggtctgggacttgacctgacattgcgcgatttgcaagatgagttgaaagccaaaggcgagccatgggagcgagcgaaggcctttgatgggtcatgccccttgtcgccatttagcagcgtcggtgatattgatcaacaaaatcttaatattacgctgctgcgcaacggcactgtgcagcaatcaggaaacacccgagacatgttgtttcctgttgctgacttaatagcagatatcagccgcagttttaccctgcttcccggcgatattattttaactggcacacctgcgggcgtagggccattgtaccccggagataccattacagcgcagctgggtgacctagttaccgtgaatactacgattgtgtaa

SEQ ID NO: 32563 - protein, 223 aa, marine gamma proteobacterium HTCC2143
MLFMADYKHQFLNEIACGKTLGKIVCVGRNYADHAKELNNPIPDRPLLFIKPSTAAVDMLLPINIPTDRGCCHHELEMAVLIGKRSSSVSSVEAKDAIVGVGLGLDLTLRDLQDELKAKGEPWERAKAFDGSCPLSPFSSVGDIDQQNLNITLLRNGTVQQSGNTRDMLFPVADLIADISRSFTLLPGDIILTGTPAGVGPLYPGDTITAQLGDLVTVNTTIV

SEQ ID NO: 32564 - DNA, 666 bp, Pseudomonas putida GB-1
  CDS (1)..(666): transl_table=11
atgagttaccagcaccagtacgtagacggcacgcgcattcacttcccgctgggcaaggtggtgtgcatcggccgtaactatgccgagcatgccaaggaactggacaacccgatccccaccgaaccgctgctgttcatcaagccaggcagctgtgtggtgccggccgaaggcggcttcaagatcccggccgagcggggttcggtgcactacgaggccgaaattgccgtgctgctgggcaagccgctgtcggcccacccgagcgaggaagaggtgctggatgccatttccggctacgccccggcgctggacctgaccctgcgcgacgtgcaggccaaactgaaagagaagggcctgccgtgggaactggccaagtgctttgacggggcctgcgtactgccgccgttcgtctcggccgccagtttcgaggatgtcaccgacatcccggtgcgcctgaccgtcaacggcgaagtgcgtcaggacggcaacagcgcgatgatgctgaacccgatcgtgccgatgatccagtacatggcggcgcatttttcgctgcaggcgggggatgtgatcctcaccggtaccccggcgggtgtggggccgttcaatgtcggtgacgagctggtgctggagctgccgggtgtcagccgcttcgaaagccgagtgttctga

SEQ ID NO: 32565 - protein, 221 aa, Pseudomonas putida GB-1
MSYQHQYVDGTRIHFPLGKVVCIGRNYAEHAKELDNPIPTEPLLFIKPGSCVVPAEGGFKIPAERGSVHYEAEIAVLLGKPLSAHPSEEEVLDAISGYAPALDLTLRDVQAKLKEKGLPWELAKCFDGACVLPPFVSAASFEDVTDIPVRLTVNGEVRQDGNSAMMLNPIVPMIQYMAAHFSLQAGDVILTGTPAGVGPFNVGDELVLELPGVSRFESRVF

SEQ ID NO: 32566 - DNA, 765 bp, Pseudomonas putida GB-1
  CDS (1)..(765): transl_table=11
gtgaaacacgcccgtatccagttcgacggccaggcccatgatgtcacggtcgaaggcgaccacctgcgccttgccgatggccgcctggtccatcaagaccaggtcacctggctgccgcccgccaccggcagcatgttcgccctgggcctgaactacgccgatcacgccaaggaactggccttcgcgccgcccaccgaacctctggccttcatcaagtcgcccggcacctacaccggccacggccaggtcacctggcgcccggacaacgtcgagtacatgcactacgagtgcgagttggtcgcggtcattggcaaagcagcgaaaaacgtcaagcgtgaggacgccctggcctacgttgccggctacaccgtgtgcaacgactacgccatccgcgactacctggaaaactactaccgccccaacctgcgggtgaaaaaccgcgacgccaccaccccggtcggcccgtggatcgtcgatgcggccgatgtgccagacgtcagcaacctgaagctgcgcacctggatcaacggtgagctgaagcaggaaggcaccacggcggacatgatcttcgacatcccgcaccttatcgaatacttctccagcttcatgaccctgcagccaggcgacatgatcgccaccggcacgccagaaggcctggccgacgtggtgccgggcgatgaagtggtagtggaagtggaaggcgtcggccgcctggtcaaccgcatcgtcagcgaagctgatttcttcaagaacaacaaggcatga

SEQ ID NO: 32567 - protein, 254 aa, Pseudomonas putida GB-1
MKHARIQFDGQAHDVTVEGDHLRLADGRLVHQDQVTWLPPATGSMFALGLNYADHAKELAFAPPTEPLAFIKSPGTYTGHGQVTWRPDNVEYMHYECELVAVIGKAAKNVKREDALAYVAGYTVCNDYAIRDYLENYYRPNLRVKNRDATTPVGPWIVDAADVPDVSNLKLRTWINGELKQEGTTADMIFDIPHLIEYFSSFMTLQPGDMIATGTPEGLADVVPGDEVVVEVEGVGRLVNRIVSEADFFKNNKA

SEQ ID NO: 32568 - DNA, 660 bp, Pseudomonas putida GB-1
  CDS (1)..(660): transl_table=11
atgagccatgccctgcatgacgttgccaacggcaccctgttcggcgtcgcgctgaactaccggggtttgctgcagcagcaccaagcggcgttcgtcgaagcaccgtacaagcaactgccagtcaagccagtgctgttcgtcaaaaccccgaacacgcgcaaccagcatgaaggccaagtgctgttcccggccaacgtacagcgcctgcaacctggcccggcgctgggtgtggtgattggcaaggacgccagccgcgtcagtgtggaggacgccctggagcatgtggcgggctacaccatcgtcaacgaaaccagcctgcccgaagacagctactaccgcccggccgtcaaggccaagtgccgtgatggcttctgcccgatcggcccagcgttggtgccggccagccaggtagccaaccccgatgccctaggcctgcgcctgtatgtgaatggcgaactgcgccagcacaacaacaccgccaactgcgtgcgcacggtggcccagctgattgccgaaatcagcgagttcatgaccctgcacgctggcgacatcctgatcaccggcacccccgagggccgcgtcgatgtacagccaggcgaccgcgtcgatatcgagatcgacggcctgggcaagctgaccaaccacatcgtcgccgagtga

SEQ ID NO: 32569 - protein, 219 aa, Pseudomonas putida GB-1
MSHALHDVANGTLFGVALNYRGLLQQHQAAFVEAPYKQLPVKPVLFVKTPNTRNQHEGQVLFPANVQRLQPGPALGVVIGKDASRVSVEDALEHVAGYTIVNETSLPEDSYYRPAVKAKCRDGFCPIGPALVPASQVANPDALGLRLYVNGELRQHNNTANCVRTVAQLIAEISEFMTLHAGDILITGTPEGRVDVQPGDRVDIEIDGLGKLTNHIVAE

SEQ ID NO: 32570 - DNA, 660 bp, Marinobacter sp. ELB17
  CDS (1)..(660): transl_table=11
gtgaattatcagcaccattggcacgatgcaacccctattcatttgcccctgggcaaaattgtctgcatcggccgtaactatgccgaacacgccaaagaactgaacaacccggtcccgaccgagcccctgctgttcataaaacccgccaccgccgcggtacacctgaccagacctctggacttcccgcgggatcaaggcgccgtgcactttgaaaccgaattagcagtgctgattggcaaacccctgacgaacgcctccgccagcgatgcagaagcggcgatactgggttatggcctggcgctggatttaaccctccgtgacctgcaaagccgtcttaaaaagcaggggcacccatgggagcgggctaaaggttttgatcgcgcctgcccactcacgccgtttgtcccagccagcgatctggacaagcgccgcctacacttcagtctggatatagacggcgagcgccagcaaagcggcgacaccgccgacatgctgtttccggtggtggccctgattgcccacatcagtacacagttctctctgttacccggggatgtaatactgactggcacgcccaaaggtgtcggaccactgcaatccggacaaatcctgcaactgacgctggaagatcgcctgtcggtatcgaccagagtggtttag

SEQ ID NO: 32571 - protein, 219 aa, Marinobacter sp. ELB17
MNYQHHWHDATPIHLPLGKIVCIGRNYAEHAKELNNPVPTEPLLFIKPATAAVHLTRPLDFPRDQGAVHFETELAVLIGKPLTNASASDAEAAILGYGLALDLTLRDLQSRLKKQGHPWERAKGFDRACPLTPFVPASDLDKRRLHFSLDIDGERQQSGDTADMLFPVVALIAHISTQFSLLPGDVILTGTPKGVGPLQSGQILQLTLEDRLSVSTRVV

SEQ ID NO: 32572 - DNA, 666 bp, Marinobacter sp. ELB17
  CDS (1)..(666): transl_table=11
atgacttttatccctcgctttctcgataactcacactttggacagtcgctcggcaaaattgtctgcgttggacgaaactatgctgagcatgccaaagagctaaacaatccggtgcccactgaaccaattctgttcatcaaaccggcgacagccgctgtgcgcctggaagatacgattatcgcaccggccattcgcggtgaagtgcactatgaaacggaacttgcactgttgattggtgagccgctcagtaatgctacaccagagcaggccgagggtgctgttgttgggcttggactggcgcttgatctgaccctgcgcgatgttcaggcaaagctaaaaggaaaagggcatccatgggaaattgccaaaggtttcgatggggcctgccctctctcttccttcgtaaaagtgagagacgtgccgaactgggactcattgagttttagcctgtcgatcaacgaagaactgcgccaaatcggcaaagcttcagacatgctattttcggtaccgcagctgctggtagaaatgagccgccacttcacgctggagccaggcgacgttattttgaccgggacgccggcaggcgttggtatcctgccccgtggggcgacgctgcattttagtctggacggcgctttcgaattcacaactcaggttgcatcgtag

SEQ ID NO: 32573 - protein, 221 aa, Marinobacter sp. ELB17
MTFIPRFLDNSHFGQSLGKIVCVGRNYAEHAKELNNPVPTEPILFIKPATAAVRLEDTIIAPAIRGEVHYETELALLIGEPLSNATPEQAEGAVVGLGLALDLTLRDVQAKLKGKGHPWEIAKGFDGACPLSSFVKVRDVPNWDSLSFSLSINEELRQIGKASDMLFSVPQLLVEMSRHFTLEPGDVILTGTPAGVGILPRGATLHFSLDGAFEFTTQVAS

SEQ ID NO: 32574 - DNA, 906 bp, Bacillus sp. SG-1
  CDS (1)..(906): transl_table=11
atgaaacttctatcttttaaagtaaatgaagaagaaaaatatggtgtggtaaaagaaagtggaaagaccatttggaatttgactgagcttgaaaaagagtatgacggaaaaagtcagcttccgggttctttgcttcaagtaatccaaggtgaacagggagccttccaaaggcttgaagatctgaagcaattcggcagttcgctcgaggactcttcggaatttttatatgactggaaggatgtcactctgctctctccgataacgaaacccgaaaagaatattatgtgtgtaggaaagaactatcgtgaacacgcgattgagatgggcagcgaggcagatattcccgagcatatcatgattttcacaaaggcccctacttcagtaacgggatcatcaggggtggtttactcccactctgccttaacttcacagcttgattacgaaggtgaacttgctgtcatcattggcagaaaaggaatcaatattcaagaggacgaagcccgggattatattttcgggtacaccattttgaatgacatcacggcaagggaccttcagaagaagcataaacagttcttccttggaaaaagtcttgatacgacttgtccgatgggtccatatattgtaaccgccgatgaaatcccagcccctgaatcactgtcaattaaaacagtggtcaacggagaagttcgtcaggatgcatctgtgagcgatatgatctttccaataggtaaaattattgctgagttatctgcaggaatgacgcttgagcctggggatataatagcgacaggaaccccagcaggtgtagggaaaggatttcaccccccaagatttttgaaatctggtgacagaattgaaatttccattgaaaaaatcggtacactgatcaatacaattcaatag

SEQ ID NO: 32575 - protein, 301 aa, Bacillus sp. SG-1
MKLLSFKVNEEEKYGVVKESGKTIWNLTELEKEYDGKSQLPGSLLQVIQGEQGAFQRLEDLKQFGSSLEDSSEFLYDWKDVTLLSPITKPEKNIMCVGKNYREHAIEMGSEADIPEHIMIFTKAPTSVTGSSGVVYSHSALTSQLDYEGELAVIIGRKGINIQEDEARDYIFGYTILNDITARDLQKKHKQFFLGKSLDTTCPMGPYIVTADEIPAPESLSIKTVVNGEVRQDASVSDMIFPIGKIIAELSAGMTLEPGDIIATGTPAGVGKGFHPPRFLKSGDRIEISIEKIGTLINTIQ

SEQ ID NO: 32576 - DNA, 696 bp, Moritella sp. PE36
  CDS (1)..(696): transl_table=11
atgctatcaaattcagggactgaaatgattgattctctttatgaacaccaaagcatagataataagcaactcgcactgccagttggtaaagttgtttgtatcggtcgtaactaccttgatcacatccgtgaacttggtaatgacgtacccgagcaagcattactttttattaaaccttcaacctcattagttgcgctcgataagccgttgccacttccggttgatttaggggagtgccacaatgagttagaagtagcgctattaattaagtcaccaataacgaaaggaacgtcaattgtgctttctgagttaatctggggagttggtttagggcttgatcttactttacgtgatttacaatcatcgcttaaaggccaaggacatccttgggaaagggcaaaagcgtttgataatgcttgtccggtgactccgtttatcccacttgcagagtttggagatgtgaataaccttgatttcacgttgtccgtcaatgatcagctaaggcagcagggatgtactgctaatatgatgcgttctattgagtcattgctgactgagattacggcatgttttaccttgttacccggtgatattgtattaacaggcacgcccgcaggggtaggggtacttaattcaggcgataagcttgcattaacacttacaaaccgttataaattcggctgcgagttcatttag

SEQ ID NO: 32577 - protein, 231 aa, Moritella sp. PE36
MLSNSGTEMIDSLYEHQSIDNKQLALPVGKVVCIGRNYLDHIRELGNDVPEQALLFIKPSTSLVALDKPLPLPVDLGECHNELEVALLIKSPITKGTSIVLSELIWGVGLGLDLTLRDLQSSLKGQGHPWERAKAFDNACPVTPFIPLAEFGDVNNLDFTLSVNDQLRQQGCTANMMRSIESLLTEITACFTLLPGDIVLTGTPAGVGVLNSGDKLALTLTNRYKFGCEFI

SEQ ID NO: 32578 - DNA, 594 bp, Francisella novicida
  CDS (1)..(594): transl_table=11
atgcaaattgatctaacaaagtcaaaagtgatttgtgtcggaagaaattatgttgagcatattcatgagcttaataatgaagttcctgacaatccagttatttttataaaacctaactcaagtataactaaaactttaaggttgtcttcaaaaagagaaactcattacgaatgtgaaatagtttttatttttgataataattcaaatataaaagccgtcggtttgggattagatctgactgatagaaatttacagtcaaaacttaaagcaaaaggcctaccatgggaattggcaaaagcttttgataatagtgcggtgattagtgagtttgttgcaatagatagtaaagacattgcatttttgaatttcaaagcatataagaatgatatactaattcagcaaggtagctatgattttatgatctataaacctcaacaaattatagattttttgcagcaaaatgaaatctcaatctatgaaaatgatttactaatgacaggaactcctaaaggagttggtgtagtaaatagtggtgataagtttaaaattgagttattttgtagagataaaaaaatattagcaacgactttttag

SEQ ID NO: 32579 - protein, 197 aa, Francisella novicida
MQIDLTKSKVICVGRNYVEHIHELNNEVPDNPVIFIKPNSSITKTLRLSSKRETHYECEIVFIFDNNSNIKAVGLGLDLTDRNLQSKLKAKGLPWELAKAFDNSAVISEFVAIDSKDIAFLNFKAYKNDILIQQGSYDFMIYKPQQIIDFLQQNEISIYENDLLMTGTPKGVGVVNSGDKFKIELFCRDKKILATTF

SEQ ID NO: 32580 - DNA, 690 bp, Magnetospirillum gryphiswaldense
  CDS (1)..(690): transl_table=11
atgaccaccgccttgttcaccctgccccaacccgctgtcccgattttgggtgaaaatgcccattatccggtgcgccgggtattctgtgttggtcgcaactatgccggccatgcgcgtgagatgggctcggaccccagccgtgaaccgccgttttatttcagcaaaagcgccgacagcctggtgccgggcggcggttccatcccctatgcgccgggcaccggcaatttgcatcatgagatcgagctggtggtcgccctgggggccgatgtcttccaggccagccaggatcagacggcgtcagccatcttcggctatgccgtcggcctcgacatgactcggcgggatttgcaaaacgccgccaaggacaaggggcgcccgtgggatttgggcaagtcgttcgagttttccgcccccatcaccgccatcgtccgcgacagccggcccatgacggcgggggccatctcgctcaccgtcaacggcacagagcgccagcacggcgatatcagcgagatgatctggtcggtgcccgaaatcatcgcccatctgtcgcagtattatcatctggggctgggcgacctgatctataccggcacccccgagggcgtatcggcggtcaagcccggcgacgaactggtcggccatgtcgacaatctgccggagttgcgggtgatcatcgaagcggcggaataa

SEQ ID NO: 32581 - protein, 229 aa, Magnetospirillum gryphiswaldense
MTTALFTLPQPAVPILGENAHYPVRRVFCVGRNYAGHAREMGSDPSREPPFYFSKSADSLVPGGGSIPYAPGTGNLHHEIELVVALGADVFQASQDQTASAIFGYAVGLDMTRRDLQNAAKDKGRPWDLGKSFEFSAPITAIVRDSRPMTAGAISLTVNGTERQHGDISEMIWSVPEIIAHLSQYYHLGLGDLIYTGTPEGVSAVKPGDELVGHVDNLPELRVIIEAAE

SEQ ID NO: 32582 - DNA, 888 bp, Rhodococcus erythropolis
  CDS (1)..(888): transl_table=11
atgcgcgtggcaaatcaatccggtcgactcaagcttgtcggcgacggggtcggggtcgacgtcgaggtcgccagtcagggcagattcacctcggatccgcaggcggtcttcgatcgctgggacgagttccggctgtgggcagagtcgatcgacttccacggtgcggaaccaatagtcgagtctgatctgcaggcaccggtacctcgtcctggtcagatcttcgcggtcggagtgaattaccgcgaccacgtcgaggagtccggactctcacttcccgaggcgcctttcgtcttcacgaaattcccgggatcgatcacgggcccctacaacaacatcgaactgccggacggctccgtcgacttcgaagtcgaactggtcgcggtcatcggccgagccgcacgacacgtggatgccagcaacggctgggactacgtagcgggagtaactctcggccaagacctttccgaacgccaactacaactctcgggccccgcgccgcagcagttcagtctaggaaaatcatatgcagggttcgcaccgatcgggccggttctggtcacgccggacgaattcgccgaccccgatgacatcggagtcagcacgagactgtccggcgacgaaatgcagaactcgcggacccggcacctcatcttcccgatccccgaactcgtcgcgtacctgtcctcgatcctgcccctttcgccgggggatctcatcttcaccggcacccctgagggcatcggctggacgcgcgaacccaaacggctcatcagcaccgacgatgaactcgtctccaccgccgatgttatcggcgaaatgcgtcatcgcttcatcccgagccgccatcacagcgccacttcctcggccaggagcagcaccaatgtctga

SEQ ID NO: 32583 - protein, 295 aa, Rhodococcus erythropolis
MRVANQSGRLKLVGDGVGVDVEVASQGRFTSDPQAVFDRWDEFRLWAESIDFHGAEPIVESDLQAPVPRPGQIFAVGVNYRDHVEESGLSLPEAPFVFTKFPGSITGPYNNIELPDGSVDFEVELVAVIGRAARHVDASNGWDYVAGVTLGQDLSERQLQLSGPAPQQFSLGKSYAGFAPIGPVLVTPDEFADPDDIGVSTRLSGDEMQNSRTRHLIFPIPELVAYLSSILPLSPGDLIFTGTPEGIGWTREPKRLISTDDELVSTADVIGEMRHRFIPSRHHSATSSARSSTNV

SEQ ID NO: 32584 - DNA, 696 bp, Sphingomonas sp
  CDS (1)..(696): transl_table=11
atgaccatggtttttgacccgtctgctccgacattggcgcaggtaagcgacggacgcattttccccgtgcgcaggatattctgtgtcgggcgcaactatgccgaacatgcgcgcgagatgggacgtgacccggatcgtgagccgcccttcttcttcaccaaatgggcggaaaccatcgtgccttcggatgtcgaggtcgcttacccgtccgcaaccgccaattttcattatgaagccgaactggtggtcgccatcgggctggagggcagggatattccggtcgagaccgctctcgaccatgtgttcggctatgccaccggcctcgatatgacccgccgcgatctgcagctcaaggcgcgggccgagggtcggccatgggatacaggcaagaatgtcgagcaatcgtctcccttgggattgcttcatcctgtcgccgaatgcggccatctgtccaccggcgcgatcagcctgacggtcaatggcgaagtcaagcagagcgccgatctggcagacctgatctggccggttgcggacatcatcgcctttctttcgggcctttaccggctcctgccgggcgacctcatctacaccggcacaccggccggcgtggggccggtcgtccccggcgatgaaatcgatgtgcgcatcgatggtctcacacccacccgcattcgcatagccgagccggcgcgctga

SEQ ID NO: 32585 - protein, 231 aa, Sphingomonas sp
MTMVFDPSAPTLAQVSDGRIFPVRRIFCVGRNYAEHAREMGRDPDREPPFFFTKWAETIVPSDVEVAYPSATANFHYEAELVVAIGLEGRDIPVETALDHVFGYATGLDMTRRDLQLKARAEGRPWDTGKNVEQSSPLGLLHPVAECGHLSTGAISLTVNGEVKQSADLADLIWPVADIIAFLSGLYRLLPGDLIYTGTPAGVGPVVPGDEIDVRIDGLTPTRIRIAEPAR

SEQ ID NO: 32586 - DNA, 864 bp, Pseudomonas alcaligenes
  CDS (1)..(864): transl_table=11
atgaaaatatgccgtttcaacgaaaaccgactgggagtggtggacggggatgaggtgctggatgtgacagaggcgctgtccgtacttccctcttatgaatacccgctgcctggttacgatccattgatcaagcaccttgatgcgctgctggcccggatcgaaaccctgatcaaggatgctccgcgcattctcctggccgatgttcgcctactgagccccgtggccaaccccggcaagatcatcgcggcaccgattaactacacgcgtcatctgcaggaagtgctggcagacagcgcaatcaataacggcgttgccagtttcacccagcacatcaagaagtcggggctgttcctcaaagccaacagttctctcgccggtgccggtgagggcgtcgccctaagccatcaggatcgccgcaatgaccatgaggtcgaattggcgatagtgattggcaagacggcgcgaaacgtaccgagagagaaatcactggagtatgtcgcgggctactgcatcgggatcgacatgactgtccgcggccccgaggagcgcagcttccgcaaatcgcccgacagctacaccatcctggggccgtggctggtgacccgcgatgagatcgacagccccggtgagttgcagatgtcgttgaaggtcaacggtgaagttcggcagaacgccaataccagcgaccttatcctgggtgtcgaggagttggtcgaattcgcttcgtccttttataccctccaccctggggacgtcatcatcagcggtacgcccgaaggagtggggccagtgaatcccggtgacgcgatgctggccgaaatagagcgaatcggcaccatgaccattgccatccgctcggtgtga

SEQ ID NO: 32587 - protein, 287 aa, Pseudomonas alcaligenes
MKICRFNENRLGVVDGDEVLDVTEALSVLPSYEYPLPGYDPLIKHLDALLARIETLIKDAPRILLADVRLLSPVANPGKIIAAPINYTRHLQEVLADSAINNGVASFTQHIKKSGLFLKANSSLAGAGEGVALSHQDRRNDHEVELAIVIGKTARNVPREKSLEYVAGYCIGIDMTVRGPEERSFRKSPDSYTILGPWLVTRDEIDSPGELQMSLKVNGEVRQNANTSDLILGVEELVEFASSFYTLHPGDVIISGTPEGVGPVNPGDAMLAEIERIGTMTIAIRSV

SEQ ID NO: 32588 - DNA, 855 bp, Aspergillus oryzae
  CDS (1)..(855)
atgtcctggactcacctcatccgcttcattgctgtcgaagatagccaagagcatcttggtcagttagtcgataccactcgcgatattggtaaagatagcgtcaatggcgttgaaatcgcagcctatcttatcgatgggacgatctttgacgggcgcgtatccacgaccgtgatgcacgttaagcagcttctctccccagtcaccaaagaacagtgtagttacatccgttgtctgggcctgaactacctcgaccacgccaaagaagccaacatggcgctccccactgtccccgttatgttcaccaagcctcgtaccgcactagccaacccgtaccccgctacgattaatatccccaagtgtgcgcaggatgaaacgagtgattacgaggcagagctctgcgtcgttattggaaagacaggccgcgatatccctgaagaggaagcactagattatgttctgggttatacagcgtccaacgacgtttcggcaagggctctgcaattcgcgacttcgcagtggtcgttttcgaaggggttagacgggagttgccctgtcggacccgttcttgtttcgtcttccgtcatcaaggacccgcagacgttgtccattaaggcgattcataatgggagcgtcctgcaggatggccataccaaggaaatgctgttttcgatcaagaagcagatctcctatctatctcagggcacgaccctggaagctggcacaatcttcctgacgggcactccggctggaattggcttcacccgggagcccagaattgtgctgaaggatggtgatgagatcaatgtcgaaattgagaacattggcacgttgatcaacaaggtgcggtatgaatag

SEQ ID NO: 32589 - protein, 284 aa, Aspergillus oryzae
MSWTHLIRFIAVEDSQEHLGQLVDTTRDIGKDSVNGVEIAAYLIDGTIFDGRVSTTVMHVKQLLSPVTKEQCSYIRCLGLNYLDHAKEANMALPTVPVMFTKPRTALANPYPATINIPKCAQDETSDYEAELCVVIGKTGRDIPEEEALDYVLGYTASNDVSARALQFATSQWSFSKGLDGSCPVGPVLVSSSVIKDPQTLSIKAIHNGSVLQDGHTKEMLFSIKKQISYLSQGTTLEAGTIFLTGTPAGIGFTREPRIVLKDGDEINVEIENIGTLINKVRYE

SEQ ID NO: 32590 - DNA, 2604 bp, Aspergillus oryzae
  CDS (1)..(2604)
atggctcctggaatcctggtcaatggtttccatgacagtactacaccatcctcgacgcttcccacgcgccgacgcccgtatccccacgaaggcctccggttcgatcccaaacttaaacccaaatcgtatcgcatgaccggcacctcaccggactcaaagatcctgttcctggatgtgaatattctcgactcgacaggcaatgatccgtatcgtggtgatgtattgattcacggggagcgcattgtctcggttgggctagtccccgatgttgaagcgcttcgccatgacccgaaggtccgtgtcgtccaaggtcgtggacgtactttcatgtctggtctcggggatgcccatacacattggacttggaacaatatcgctcttgagctactgggtgacattggcgtcgaggagcacactctgattacagcacgctcggcactttgttacctggactccggatacaccatgtgctatggcgccgcctctgccaaagatcgtctggactgcgtcgttcgagatgctatcaatcgcggaaccttgcccgggccgagacttctggcaaatggcagggagatcgccaagcgagagggtgagcttgcggcgggaattactgcatttgctgaggggccactggagatgcgagaggtgatcagacatcatgctaaaatcggtgtcgatcaaatcaaattgagtatgtcaggtgaggccatcaccgaaactgtttcggccgaggaatgtttctttaccgatgaggaaacagccgcttgtgtggatgaagctcatcgcaatgggatcagggtttgctctcatgcacgggcgagagactcggtcatccaatgtgctagacacggtgtggacgtcatttaccatgcgtcctataccgatgaagagggtatgcagatactcgaaaaggtcaaggaccgggttgttgttgcccctgcgctcaactggctctatgctaccgtttacgaggcggaaccctttgggtattccatggagaaggctgagcaagtcggataccggagagagctggagacagctatcaaggcattgaaggagatgcacaagcgggggattactgtccttccaggaggtgactatggctttgcctggtgtcctcatgggacgtacgctcgggatcttgagcactttgtgaaactattggactttacgccgatggaatccattgtcgctgcgacagctgggatagccaagctatttatgcaggaggacgagctgggaaaggtacttcctgggtattatgccgactgcatcctggtcgatggtgatcctctgaaagacatcgcggtgcttcaggaccactcgaagctggatgtgattatgattaacggccgtatccacaaagctcagccgacagagttccttaatacctctgcagttcctccatcattgcaagagaagaagagctacttcaatttcgtagcctttgaagatgagttgggacgatctcgcattggccacctcgaccttggtgactccacaatccagccgttgacaatggcttccggctctccccttgccagtctgagccaggtcattgaactgggcgacgagggggttgtccgcgccgcggaagctccattcccgctgagctcagtgaagctgttgccgccgctcgcagatcgagatgttctctgtattggcgagaactaccgcaagcatatcaaggaataccgggaaagtggctttgctgctgctgataacaaagtcactgatagtccccaagtcccaactgtcttcaccaagcgcagtactagcatcactgctagtggaacagacatctatccccaccctggatttactcaaacgatggactacgaaggtgaactgggagtcatcatcggaaaagcaggcttctctatcaaggagaaagatgccatggattatatctggggctatacgatcataaatgatctatccgcccgtgagagacagcgagaccaccgccaatactttatgggaaaatcgccggacaccttctgtcctatgggaccggttgctgttgaagctgcagcgttatcaggagaaattcgagtacaaactcatgtcaatggtgaaaagcgtcaagatggcaccacagccgacctgattttctccatccctaaattgattgagacggtatctagtggcatcaccattcagccgggcgatgtaatcgcaacaggcactccacacggcgttggagttggccaccatccgccgaagttccttaagccaggcgacttggtcgaggtgagcgtcactggccttggaaagctttccaatcgtatcgcggatcccggtagcaagaaccctactatcgatcgtgtcctccaaaagccttcgagtatcccaacttataaccttgatcggacttggggcggtgttgggttaaccaaagtcggacccgaccattatatcaacgtccgagaattgggatcccaaagccccgatgcagaaacgatcgttttcatccacggccttggtgccaacctggaatactacgcgccgcttgtccaagccgcaggactagaaaggacacggcgctacgcccgcccgagcgtcctcaactgctaccttgcagaccttcgccagagaccttga

SEQ ID NO: 32591 - protein, 867 aa, Aspergillus oryzae
MAPGILVNGFHDSTTPSSTLPTRRRPYPHEGLRFDPKLKPKSYRMTGTSPDSKILFLDVNILDSTGNDPYRGDVLIHGERIVSVGLVPDVEALRHDPKVRVVQGRGRTFMSGLGDAHTHWTWNNIALELLGDIGVEEHTLITARSALCYLDSGYTMCYGAASAKDRLDCVVRDAINRGTLPGPRLLANGREIAKREGELAAGITAFAEGPLEMREVIRHHAKIGVDQIKLSMSGEAITETVSAEECFFTDEETAACVDEAHRNGIRVCSHARARDSVIQCARHGVDVIYHASYTDEEGMQILEKVKDRVVVAPALNWLYATVYEAEPFGYSMEKAEQVGYRRELETAIKALKEMHKRGITVLPGGDYGFAWCPHGTYARDLEHFVKLLDFTPMESIVAATAGIAKLFMQEDELGKVLPGYYADCILVDGDPLKDIAVLQDHSKLDVIMINGRIHKAQPTEFLNTSAVPPSLQEKKSYFNFVAFEDELGRSRIGHLDLGDSTIQPLTMASGSPLASLSQVIELGDEGVVRAAEAPFPLSSVKLLPPLADRDVLCIGENYRKHIKEYRESGFAAADNKVTDSPQVPTVFTKRSTSITASGTDIYPHPGFTQTMDYEGELGVIIGKAGFSIKEKDAMDYIWGYTIINDLSARERQRDHRQYFMGKSPDTFCPMGPVAVEAAALSGEIRVQTHVNGEKRQDGTTADLIFSIPKLIETVSSGITIQPGDVIATGTPHGVGVGHHPPKFLKPGDLVEVSVTGLGKLSNRIADPGSKNPTIDRVLQKPSSIPTYNLDRTWGGVGLTKVGPDHYINVRELGSQSPDAETIVFIHGLGANLEYYAPLVQAAGLERTRRYARPSVLNCYLADLRQRP

SEQ ID NO: 32592 - DNA, 870 bp, Aspergillus oryzae
  CDS (1)..(870)
atgactaccttctctcgtctcattcgctttttagctacagatggtcacatctactatggtgatgccattatgcccgctggtaccagtgacattggaaaggtgactagggcacaagtgattcgaggggatatttttggccagtatcaagtcacagaccaagtcgctgaggttaaaatgctcctcgcaccattggcgagggaggacattgcaacggtgcgctgtttgggattgaactatgagcagcatgcgagagaatccaacctccccattccaaagtatccggtcctcttctacaagccaatcacagccattactggtccgtatgatgatatccctatatgctctatggcgcaagacgtggagggactagactatgaatgcgaattggttcttgtcattggcaagcaagccaagaatattcccgaggagcaagcattggattatgtgctcgggtatgctgtgggaaacgatatctcccatcgcgattggcaactcaaacgtggcggaggacaatgggggttgggcaaaggcttcgatggttgggcaccttttggaccaggcatcgtctctacaaagctgatccgcaatcccaatgccttaaatatctcaactaaagtcaacggtcaaacagtccagtcatcatcaaccaaagatatgatattcggggtcgcccagacagtatcatttctctcccaaggcaccactctgctgcctggtgacctaatcttcaccggaacgccacagggtgttgggatgggccggaaacctgcggcttggcttacaaatggcgatcaggtagaggtctctctggaagatgtgggttcatgcgttaaccgagtcgcctttgaaaagccaccatcgaagctatga

SEQ ID NO: 32593 - protein, 289 aa, Aspergillus oryzae
MTTFSRLIRFLATDGHIYYGDAIMPAGTSDIGKVTRAQVIRGDIFGQYQVTDQVAEVKMLLAPLAREDIATVRCLGLNYEQHARESNLPIPKYPVLFYKPITAITGPYDDIPICSMAQDVEGLDYECELVLVIGKQAKNIPEEQALDYVLGYAVGNDISHRDWQLKRGGGQWGLGKGFDGWAPFGPGIVSTKLIRNPNALNISTKVNGQTVQSSSTKDMIFGVAQTVSFLSQGTTLLPGDLIFTGTPQGVGMGRKPAAWLTNGDQVEVSLEDVGSCVNRVAFEKPPSKL

SEQ ID NO: 32594 - DNA, 699 bp, Aspergillus oryzae
  CDS (1)..(699)
atggcagcctcaatcagagccaattgccgcaaggtcatttgcattggccgcaactatgctgaccatattacggagctcaacaacaccacgcccaagcaaccgttcttcttcttgaagcccgcttcggccattctgtgtcctggcgagggccccgtcttgcgtcctaagggaacaaacctacactatgaggtggaattagcgctggtgatgggcaagacacttcgggatcatgacccgaacgatgagcagggagctttggatgctattcatagctaccttctcggcattgacatgactgcccgcaacgtacaagacgaagctaagaagaagggtctcccatggtccattgccaaggggtttgacaccttcctacctgtctcccaagaaatcgccaaatcgcgaatccccaaccctcacgatgccttccttcgtttgagcgtcggctccgaggtgcgccaggccgactcgaccggattgatgctctaccggatccctagactgctgggtgagatctcgcgagttatgactttggagaagggcgacgtggtcttgactggtacaccgaagggtgtcggagaggtgaagtccggagatgtgatgagagcttccatcgaagtcgatggaaaggagattaaggaaggccggattgaggttgaggtgaaggatcgcgagggccgctacctgtacgctgagacttaa

SEQ ID NO: 32595 - protein, 232 aa, Aspergillus oryzae
MAASIRANCRKVICIGRNYADHITELNNTTPKQPFFFLKPASAILCPGEGPVLRPKGTNLHYEVELALVMGKTLRDHDPNDEQGALDAIHSYLLGIDMTARNVQDEAKKKGLPWSIAKGFDTFLPVSQEIAKSRIPNPHDAFLRLSVGSEVRQADSTGLMLYRIPRLLGEISRVMTLEKGDVVLTGTPKGVGEVKSGDVMRASIEVDGKEIKEGRIEVEVKDREGRYLYAET

SEQ ID NO: 32596 - DNA, 888 bp, Aspergillus oryzae
  CDS (1)..(888)
atgtctaaaatcgcatcgaccttctcgcgccttgtgcgctttgtccctaagtcgaacccgtctaaggttctgatcggcgagccggtagatgcgcaacttgatgtcggattggctctttaccagggcaaggaagtctcagtgcgaccattcactggagcatccgtccttaacccaggccagaagacagagtccactgagatcatcagccggattctctcccctctgtcgcaaaatgaggtcggatcgatcagatgtattgggctgaactatacctctcacgccgccgagatgaaactctctatcccagatgttccaactttgttcattaagccaccgacagccctctcggacccatggcctgcgccaaccattcttcctaagatcacacaggttgataacacgggcgactatgagtccgaaatggttattgttattggtcgcgatgcgaaggatgttagcgaggctgatgcactggactatgtccttggctacacggcagcaaacgatgtttcaagccgcacgtcacagatgaaccagagtcaatggtgtttctccaagggattcgacacctcgtgcccgatcggtccgaccctcgtttctgcggcactgttcccggatgccagcaaattccagatccgcggcctgaagaacggaaaagtgctgcaggattgtcctctaacggacttgatattcagcgtgcccaagctcgtcagctttttgtctcagggaacaactctgccagcaggaactattatcttgactggaactccgcctggcgtgggagctgcaaagaaccctaaggagttcttgaagaatggagatgagttcgccgttgaattgcttcctcacgtcggaaccctggtgacaaagattgaaaaccataaatga

SEQ ID NO: 32597 - protein, 295 aa, Aspergillus oryzae
MSKIASTFSRLVRFVPKSNPSKVLIGEPVDAQLDVGLALYQGKEVSVRPFTGASVLNPGQKTESTEIISRILSPLSQNEVGSIRCIGLNYTSHAAEMKLSIPDVPTLFIKPPTALSDPWPAPTILPKITQVDNTGDYESEMVIVIGRDAKDVSEADALDYVLGYTAANDVSSRTSQMNQSQWCFSKGFDTSCPIGPTLVSAALFPDASKFQIRGLKNGKVLQDCPLTDLIFSVPKLVSFLSQGTTLPAGTIILTGTPPGVGAAKNPKEFLKNGDEFAVELLPHVGTLVTKIENHK

SEQ ID NO: 32598 - DNA, 672 bp, Unknown
  Unidentified
  CDS (1)..(672)
atggcagcagcctgtgagaagcttctgcaactgagcaccacgatcgtcgccgctggcagaaactacgctgcccatgctaaagaattaggcaacgccgttcccaaggagccggtgttgtttctgaagccaacttcctcctacttgccaaatggcggaacaattcaaatcccacacaatgagggatctctgcatcatgaggtcgagctggctgtcgtcatcgccaaaaaagctcgtgatgtcccccaatcatctgccatgcattatgttgctggttatgcacttgcactggatatgactgccagggatctgcaagctactgcaaagtctgcaggtcttccatggactttggcaaaaggccaggacactttcacaccaattagttcaattttgccaaagaatctggtgccaaacccggatgatctagaattgtggttaaaggtagatgaggagattcggcaaaagggctcaaccaaggacatgatctttaagatcccatttataattagtcacataagttctgtcatgacattgtttgaaggagatgtgatactaactggcactcctccaggtgttggccctgtgaaagaaggtcaaacaataaccgccggcattacaggccttgtcgacgtgcaattcaatgttgaaaaaagaaaaaagccttcaagctcttga

SEQ ID NO: 32599 - protein, 223 aa, Unknown
  Unidentified
MAAACEKLLQLSTTIVAAGRNYAAHAKELGNAVPKEPVLFLKPTSSYLPNGGTIQIPHNEGSLHHEVELAVVIAKKARDVPQSSAMHYVAGYALALDMTARDLQATAKSAGLPWTLAKGQDTFTPISSILPKNLVPNPDDLELWLKVDEEIRQKGSTKDMIFKIPFIISHISSVMTLFEGDVILTGTPPGVGPVKEGQTITAGITGLVDVQFNVEKRKKPSSS

SEQ ID NO: 32600 - DNA, 702 bp, Escherichia coli
  CDS (1)..(702): transl_table=11
atgactcaatatgtattcgaaccacaagcgcccgttaccgtaccggttgttggcagtgataaacaattccccgtgcgtcgcgtttactgcgtcgggcgtaactatgccgcccacgcccgcgaaatgggctttgatccggatcgtgaaccacccttcttcttctgcaaaccagcagatgccgttattccggtcgccgctggcgaaacgctggcgctgccatatccggcgcagaccgataactatcattacgaaattgaactggtagtggcgattggtaaaaaaggcagcgatatcccgctggaacacgcccatgaatatgtctggggttatgccacgggtcttgatatgactcggcgtgaccgtcaaatggaaatgcgccagatgggccgcccgtgggaaatcggtaaagcgtttgatctctcagcgcccatcgcgccgctgcacaaagcccgcgatatcggcggtattgataatgcgccaatctggttacaggttaacggcgaagatcatcagcgcagcgatattcgccatctcatctggtcggtgaatgaaaccatcagctatctgtcaggcttctttgagctgcaaccgggcgatctgatcttcaccggtacgccggaaggggttggcccggtagtgaaaggtgatgtgatcacaggcaacgtcgagggcttaacgcctatcgcggtgaagattgtctga

SEQ ID NO: 32601 - protein, 233 aa, Escherichia coli
MTQYVFEPQAPVTVPVVGSDKQFPVRRVYCVGRNYAAHAREMGFDPDREPPFFFCKPADAVIPVAAGETLALPYPAQTDNYHYEIELVVAIGKKGSDIPLEHAHEYVWGYATGLDMTRRDRQMEMRQMGRPWEIGKAFDLSAPIAPLHKARDIGGIDNAPIWLQVNGEDHQRSDIRHLIWSVNETISYLSGFFELQPGDLIFTGTPEGVGPVVKGDVITGNVEGLTPIAVKIV

SEQ ID NO: 32602 - DNA, 747 bp, Streptomyces parvulus
  CDS (1)..(747): transl_table=11
gtgctgatcgcgcgcgccgccgtcggagaagaccgaacgtacgcccgcgtcgacacggacacagggctgatccacctcctggccggcactccctacgacgagatccggccgaccggcgaaaccagaccgcttgccgaggcccgcctgctcgcaccggtcgaacccagcaaagtgctggtcgcaggacgcaattacggcgatgtcgtcacaccggacctggtggtcttcatgaagccgtccacctctgtcgtcggccccaggagcaccgtcctgctgccggcggaggccaagcaggtccggtacgagggagaactcgccgtggtgatcgggcgccgctgcaaagacgtccccgaagacaccgcggaccaggccgtgttcggctacacctgcgccaacgacgtcaccgcctgggacgtcggggaaccgaagggccactggaccaaggcgaagagcttcgacacattctgcccgctgggaccatggatccgcaccgatctcgaccccgctgacctcgtcctgcgcacaaccgtgaacggcacgctgcgccaggacggctccaccaaggaaatgaacaggaatgtccgcgccctcgtgtcccgttgcagctcactgatgacgctgctgcccggagacgtgatcctcaccggcacaccggcgggcgccggcgtgctgcgtccgggtgacgaggtcgtcgtcgagattgacgggatcggttcgctcgcgaatccgatcggcgtggccaagtag

SEQ ID NO: 32603 - protein, 248 aa, Streptomyces parvulus
MLIARAAVGEDRTYARVDTDTGLIHLLAGTPYDEIRPTGETRPLAEARLLAPVEPSKVLVAGRNYGDVVTPDLVVFMKPSTSVVGPRSTVLLPAEAKQVRYEGELAVVIGRRCKDVPEDTADQAVFGYTCANDVTAWDVGEPKGHWTKAKSFDTFCPLGPWIRTDLDPADLVLRTTVNGTLRQDGSTKEMNRNVRALVSRCSSLMTLLPGDVILTGTPAGAGVLRPGDEVVVEIDGIGSLANPIGVAK

SEQ ID NO: 32604 - DNA, 687 bp, Drosophila melanogaster
  CDS (1)..(687)
atgcaactaactcaaatcctcaggatggcgtgccaaaaccaaaatgccgccaacttcttgagcaatggcaagaaaattgtgggggtggctctcaattacatggacgttgtgctggccaggaacgttcccgtgcccaaggagccgctcgtcttcctcaagcccacatcttcgtacctccaggagggtcagcccattgtgttaccaaaagtctttaccaaggtggcatatgaagtggaactaggcgtggtgattggaaagccctgcaagaacgtatccaaggcagatgccatgagctatgtggcaggatactgcctggctttggatctaactgcacagtgcaatttgggaccagctcgggcggccggtcatccgtggaccttgggcaagggatttgatacttctacgcccgtgtcccagtttatacccatcgaaaaagtgacggacccgcacaatctgccgctttggctcaccgtcaatggagaccttaagcaaaacgggtgcactgcagacttaatattcaaggtgcccgacatcatttcctacgtgtccaagtacatgaccctggaggccaacgatctgatccttaccggaacgcccaatggtgccgatgcgttcaaggcaggcgatgtaattcagtgcggaatggccgatctcgctaaattgaccttccaagtggatgctgaataa

SEQ ID NO: 32605 - protein, 228 aa, Drosophila melanogaster
MQLTQILRMACQNQNAANFLSNGKKIVGVALNYMDVVLARNVPVPKEPLVFLKPTSSYLQEGQPIVLPKVFTKVAYEVELGVVIGKPCKNVSKADAMSYVAGYCLALDLTAQCNLGPARAAGHPWTLGKGFDTSTPVSQFIPIEKVTDPHNLPLWLTVNGDLKQNGCTADLIFKVPDIISYVSKYMTLEANDLILTGTPNGADAFKAGDVIQCGMADLAKLTFQVDAE

SEQ ID NO: 32606 - DNA, 846 bp, Burkholderia cepacia
  CDS (1)..(846): transl_table=11
atgaaattggccagctttttgttggatgggaagcgtcgcagtggggccttgactgacaagggcctcgcagtgttcgatgtcgacggcgacatcggtgacttgctgcgcaaagggaccgacctcgcgggcttcgacgcattgctcgccaagagctcgcgcatcgtcgacgcggccagtgtgacctttgtgcaaccgtcggccgagccgcccaaaatcttctgtgtgggattgaactacgctgatcacacggccgagagtccgtacgaacagcccgactatccgaccatctttttgcgcgtggctaccgctacgacggggcacggcgcgagtattgccttgcctgatctgagcgagcaactcgactatgaaggcgagatgattgctgtgctgggcaagggtggcaagcgtatcccgaaggagcgtgcgcatgagcacgtgtttggctacgctgtcggcaacgaggtgtcggttcgcgactaccagttcaagtcgccgcagtggaccatcggcaagaacttcgacggcaccggagcatggggaccgtacatcgtcaccgccgacgaactcccgctggggggacatggtctgaagatcgaggttcgcctgaacggcaagacggttcagtcatcgaataccgggcacatgatctttgacgtcgccaccatcatctcgaccatcagccaggccatcactttgcagcccggtgacatcatcttcacgggaacgcctgctggtgtgggccttggccacaagcctccgctgtggatgaaggatggcgacaaggtcgaggtcgagatcgagggcatcggtctgctcaagaactcgatcgccaaagaggtcacttga

SEQ ID NO: 32607 - protein, 281 aa, Burkholderia cepacia
MKLASFLLDGKRRSGALTDKGLAVFDVDGDIGDLLRKGTDLAGFDALLAKSSRIVDAASVTFVQPSAEPPKIFCVGLNYADHTAESPYEQPDYPTIFLRVATATTGHGASIALPDLSEQLDYEGEMIAVLGKGGKRIPKERAHEHVFGYAVGNEVSVRDYQFKSPQWTIGKNFDGTGAWGPYIVTADELPLGGHGLKIEVRLNGKTVQSSNTGHMIFDVATIISTISQAITLQPGDIIFTGTPAGVGLGHKPPLWMKDGDKVEVEIEGIGLLKNSIAKEVT

SEQ ID NO: 32608 - DNA, 672 bp, Arabidopsis thaliana
  CDS (1)..(672)
atggcgacgtcgatgatacagaggatgttcaagcaagggacgaagatcgtctgcgtcggccgtaactacgccgctcacgccaaagaactaggcaacgccgtccccaaggaaccagttatattcttgaagccaacatcatcatacttagaaaatggaggaacaattgagatcccacatcctttggattcacttcaccatgaagtagaactcgctttagtgattggacagaaagctagagatgtacctgaatcaatagccatggattacattggaggatatgcggttgctcttgatatgactgctagggaactccaagcttctgctaaggcatctggtctcccatggacggttgcgaaaggacaagataccttcactcctatcagctctgttctgccaaaggcgatggtgcgtgatcccgataatctagaactttggctcaaggttgatggtgaaacaagacagaagggtttgaccaaagatatgatattcaaggtcccctacctcattagctacataagttctataatgaccctttacgaaggagatgtcatcttgacaggcacaccagaaggtgttggacctgtaaagataggtcagaagataacggccggaatcaccggtctatctgaagttcaattcgatgtggagaggcgtgtaaagcccttgagctaa

SEQ ID NO: 32609 - protein, 223 aa, Arabidopsis thaliana
MATSMIQRMFKQGTKIVCVGRNYAAHAKELGNAVPKEPVIFLKPTSSYLENGGTIEIPHPLDSLHHEVELALVIGQKARDVPESIAMDYIGGYAVALDMTARELQASAKASGLPWTVAKGQDTFTPISSVLPKAMVRDPDNLELWLKVDGETRQKGLTKDMIFKVPYLISYISSIMTLYEGDVILTGTPEGVGPVKIGQKITAGITGLSEVQFDVERRVKPLS

SEQ ID NO: 32610 - DNA, 864 bp, Pseudomonas alcaligenes
  CDS (1)..(864): transl_table=11
atgaagatatgtcgattcaatgaagatcgggttggtgtggtgattgaaagcacggtgacagatgttactgattttgttaaatccgaattgggctcctattgttggccgtttcccaagggagatgtttttatagccaacctcagtgcgatgatacctggcttaaccgagtatgttgagaccggaaatgccactagttacgagttggatgctgtaacgttaattagcccagtgggtaatccgggtaagattatcgcggctccggtaaattatgctgaccatcttgacgaatcaaatcaagataaaggtataaatttcggaacggaaatttcactgattgataaatacgctctatttctcaaggctggaagctcttctgttggtccagatgagggaataagtcttccagcagttgaaggtcgaagattcgatcatgaagtcgagttggcacttgtgataggaaaagaaacccgaagagtgactgttgacgaagcgctgtcttcagttgcaggttattttatagggcttgatatcacaatgaggggaactgaagatcggagttatagaaagtcatttgatagctttactgtaatgggcccgtggctcgtcacctcagatgcgtttgggtccccggaaggagtggcgttttctctctctgtaaatggagagcaaagacaaaatgccaacaccaatgatttggtgtggtccgtggctaaaattatttcagttgcttcccatgcttacactctttatcccggagacgttattttgaccggaacacctgctggagtggggccaatcaaagccggtgacaaaatttctgcgagtatcgatcgtattggtagcatggaagttcctgtgaaataa

SEQ ID NO: 32611 - protein, 287 aa, Pseudomonas alcaligenes
MKICRFNEDRVGVVIESTVTDVTDFVKSELGSYCWPFPKGDVFIANLSAMIPGLTEYVETGNATSYELDAVTLISPVGNPGKIIAAPVNYADHLDESNQDKGINFGTEISLIDKYALFLKAGSSSVGPDEGISLPAVEGRRFDHEVELALVIGKETRRVTVDEALSSVAGYFIGLDITMRGTEDRSYRKSFDSFTVMGPWLVTSDAFGSPEGVAFSLSVNGEQRQNANTNDLVWSVAKIISVASHAYTLYPGDVILTGTPAGVGPIKAGDKISASIDRIGSMEVPVK

SEQ ID NO: 32612 - DNA, 678 bp, Pyrococcus abyssi
  CDS (1)..(678): transl_table=11
gtgataaggctaccgtttagagatgggtattacgaggttaggcctaccaagataatagccctcgcaaagaattacgccgagcacgctagggagatggggagcgaaccccctgaagagcccgtgatattcttaaagccaccttcggctttaataggcccaaactcagtaatagtccttccgaggaggagtaagagggttgatcacgaggttgaattggccgttataataggtaagagggccaagaacgttccggctgaaaaggccttcgactacatcctgggatacacgatccttttggacataacggctagagacctacaggcagaggcaaggaagaaaggctatccctggactgtttcgaaaggtttcgacactttcgcccccataggccccaggatagttgataagagggaacttgatccctcggatctcgagataggtctaaaggtgaacggtaaggttaggcaacttggaaggacgagtgagatgatattcaagattcccgagttgatagagtacataagctcgatcatgacacttgagccgggagacataatagcgacgggaacgcctcctggggtaggtcctttgaggcatggggataagatagaggcctgggttgagggaataggcgttctagaggaagaggtcatcgccgaggattcgatactctgctaa

SEQ ID NO: 32613 - protein, 225 aa, Pyrococcus abyssi
MIRLPFRDGYYEVRPTKIIALAKNYAEHAREMGSEPPEEPVIFLKPPSALIGPNSVIVLPRRSKRVDHEVELAVIIGKRAKNVPAEKAFDYILGYTILLDITARDLQAEARKKGYPWTVSKGFDTFAPIGPRIVDKRELDPSDLEIGLKVNGKVRQLGRTSEMIFKIPELIEYISSIMTLEPGDIIATGTPPGVGPLRHGDKIEAWVEGIGVLEEEVIAEDSILC

SEQ ID NO: 32614 - DNA, 660 bp, Escherichia coli
  CDS (1)..(660): transl_table=11
atgtatcaacatcacaactggcaaggtgcgctgctggattatccggtgagtaaagtagtctgtgttggcagtaactatgccaaacatattaaagagatgggcagcgcagtgcccgaagagccagtgctgtttattaaaccagaaacggcactgtgcgatctgcggcagccattggcgatcccatccgatttcggttcagttcatcatgaagtcgaactggcggtgttgattggcgcgacactgcgtcaggctacggaagagcatgtccgcaaagccattgccggttatggcgtggcgctcgatctgacattgcgtgatgttcagggaaaaatgaagaaagccgggcagccgtgggaaaaggctaaagcgtttgataactcttgtccgctttccgggtttattcccgcggcggaatttaccggcgacccgcaaaatacaacgctgagcctgagcgtaaacggcgaacaacgccagcaaggtacgactgcggacatgatccataaaatcgttccgctgatcgcttatatgagcaagttttttaccctcaaggccggtgacgttgtgttgacaggcacgcctgatggcgtcggcccgttgcaaagcggtgatgagctgacagtcactttcgatgggcattctttgacaactcgcgttttgtaa

SEQ ID NO: 32615 - protein, 219 aa, Escherichia coli
MYQHHNWQGALLDYPVSKVVCVGSNYAKHIKEMGSAVPEEPVLFIKPETALCDLRQPLAIPSDFGSVHHEVELAVLIGATLRQATEEHVRKAIAGYGVALDLTLRDVQGKMKKAGQPWEKAKAFDNSCPLSGFIPAAEFTGDPQNTTLSLSVNGEQRQQGTTADMIHKIVPLIAYMSKFFTLKAGDVVLTGTPDGVGPLQSGDELTVTFDGHSLTTRVL

SEQ ID NO: 32616 - DNA, 780 bp, Saccharomyces cerevisiae
  CDS (1)..(780)
atgagctacaattatttgaaggcagctagaaaaattatatgcattgggcgtaattacgcagcgcatatcaaagagctgaacaattcaactccaaaacaaccgttttttttcctaaaaccaacctcgagtattgtgacaccattgtcttcatcattggtcaagaccactagacctgcaaactcgactttcaatggtttaaatgaagacggaactaaccccgggcccatttttatcccacgcggtgtgaaggttcatcacgaaattgagttggcattgattgtgagcaaacatttgtccaatgtcactaagatgaaacccgaagaagtctatgactctattagtggtgtagctctagcattggatcttacagcaagaaatgtccaagatgaagccaaaaagaaggggctaccttggactataagcaagggttttgacaccttcatgccaatctctgctatagtctcccgcgagaagttctcatcctacaaatcaaacttacaggatattttcagagtcaagtgctctgttaacggacagttgagacaagatggtggtactaacctcatgttgcacccactccataaaatactgcaacacatatctaccatgatatctctggaaccgggtgatatcattttgactggtacacctgcaggtgtaggcgagttaaagcctggtgaccgtgttcactgtgagctattgcagaataatgacaatattgtcgacatgaacttcgaatgtgaaaatcggccgggaccatatgaatttagagaaacataa

SEQ ID NO: 32617 - protein, 259 aa, Saccharomyces cerevisiae
MSYNYLKAARKIICIGRNYAAHIKELNNSTPKQPFFFLKPTSSIVTPLSSSLVKTTRPANSTFNGLNEDGTNPGPIFIPRGVKVHHEIELALIVSKHLSNVTKMKPEEVYDSISGVALALDLTARNVQDEAKKKGLPWTISKGFDTFMPISAIVSREKFSSYKSNLQDIFRVKCSVNGQLRQDGGTNLMLHPLHKILQHISTMISLEPGDIILTGTPAGVGELKPGDRVHCELLQNNDNIVDMNFECENRPGPYEFRET

SEQ ID NO: 32618 - DNA, 666 bp, Schizosaccharomyces pombe
  CDS (1)..(666)
atgttgtcacgggccggcaaggttgtttgtattggaagaaactatgctgctcacattcgtgagttgaacaaccccttccccaccaaacctttctttttccttaaacctactagtgccattgttgaacctggccatggaaacttaataattcctcccgatgtatctgctcattatgaagttgaactaggattgataatgaaggatcgcctgcctgccagacgtccagtatcttccaatagctggctcgattcaattggagcctactttgtaggaatcgatatgaccgctagaaacatacaaaatgaagcgaagaaaaaaggtctcccttggtccttcgcgaaaggttatgacacctttttacccgttggccccatcattcctaagcatcttatacctgatccccacaatgtcattctggaattgtcacttaacggcaaggtggtccagaaggacagtacatctctgatgttaaacaagattcctaaaatattctcgtcaatcactgaggccatgtccttgaatcctggtgatttggtgctaacaggtactccaaagggcgttggtcctgtggtaccgggagatattttgtctgctcggttgcttactgcgcaggagcaggaaataattcctagtaaatttgaaatcaaagcagagaaatgtgattaa

SEQ ID NO: 32619 - protein, 221 aa, Schizosaccharomyces pombe
MLSRAGKVVCIGRNYAAHIRELNNPFPTKPFFFLKPTSAIVEPGHGNLIIPPDVSAHYEVELGLIMKDRLPARRPVSSNSWLDSIGAYFVGIDMTARNIQNEAKKKGLPWSFAKGYDTFLPVGPIIPKHLIPDPHNVILELSLNGKVVQKDSTSLMLNKIPKIFSSITEAMSLNPGDLVLTGTPKGVGPVVPGDILSARLLTAQEQEIIPSKFEIKAEKCD

SEQ ID NO: 32620 - DNA, 681 bp, Oryza sativa
  CDS (1)..(681)
atggcggcggcggcgcagaggctcctggcggccagcacgaagatcgtaggggtgggccgcaacttcgtcgcccacgccaaggagctcgggaaccccgtccccaaggagccggtgctgttcctgaagcccacctcgtcgttcctccacgcgggcgtggccggcgccgccatcgaggtgccggagccggtcgagtcgctgcaccacgaggtcgagcttgccgttgtcatctcccagcgcgcgcgcgacgtccccgaagcatccgccatggacttcgtaggaggttatgcacttgctttggacatgacagcaagagaacttcagtctgcggctaagtctgcaggtcttccttggactttgggtaaagcacaggacaccttcactccaattagtgcagtgattccaaaatcagatgtagctaatcctgatgatctagagctctggctaaaggttgatgatgaacttaggcagaagggatctacaagtgatatgatattcaagataccatctctaataagttatatcagttccatcatgacattaatggagggtgatgttatactgaccggtactcctgagggtgtaggcccagtacgaccaggacagaagatcaaagctggtataaccggcctcattgatgttgagtttgatgttcagaagcgcaagcggtcattttctacttga

SEQ ID NO: 32621 - protein, 226 aa, Oryza sativa
MAAAAQRLLAASTKIVGVGRNFVAHAKELGNPVPKEPVLFLKPTSSFLHAGVAGAAIEVPEPVESLHHEVELAVVISQRARDVPEASAMDFVGGYALALDMTARELQSAAKSAGLPWTLGKAQDTFTPISAVIPKSDVANPDDLELWLKVDDELRQKGSTSDMIFKIPSLISYISSIMTLMEGDVILTGTPEGVGPVRPGQKIKAGITGLIDVEFDVQKRKRSFST

SEQ ID NO: 32622 - DNA, 660 bp, Brassica napus
  CDS (1)..(660)
atggcgacgtcgaagatagagaggcagttcaagcaaggcaccaagatcgtcggcgtcagtcgcaactacgccgctcatgtcaacgcccttcccaaggaaccagttatattcttaaagccaacttcatcatacttggagaacggaggaacgattgagatcccacatcctctggattcactttatcatgaggtggagcttgctgtagtgatcgcaaagaaggctagagatgtacccgagtcaaccgccatggaatacgttggaggatatgcggttgctcttgatatgtccgctagggaaatccaagcttccgccaaggcatctggtctcccttggactcttggcaaaggacaggatactttcacaccaataggctctgttctgccaaaggcgatggtgcacgatcccgataatctggaactttggctgaaggttgatggtgaaacaagacaaaagggtttaacaaaagatatgatcttcaaggtcccgtaccttatcagctacataagttctttcatgactctctacgaaggagatgtcatcttgacaggtacaccagaaggtgttggacctgtaaagataggtcagaagataaccgcagggatcactggtctatctgaagttcagttcgatgttgataggcgtgtaaaacctctgagctaa

SEQ ID NO: 32623 - protein, 219 aa, Brassica napus
MATSKIERQFKQGTKIVGVSRNYAAHVNALPKEPVIFLKPTSSYLENGGTIEIPHPLDSLYHEVELAVVIAKKARDVPESTAMEYVGGYAVALDMSAREIQASAKASGLPWTLGKGQDTFTPIGSVLPKAMVHDPDNLELWLKVDGETRQKGLTKDMIFKVPYLISYISSFMTLYEGDVILTGTPEGVGPVKIGQKITAGITGLSEVQFDVDRRVKPLS

SEQ ID NO: 32624 - DNA, 687 bp, Triticum aestivum
  CDS (1)..(687)
atggcagcagcggcggcgcagaggcttcttgcgtcgagcacgaagatcgtcggggccgggcgcaactacatctcccatgccaaggatctcggcaaccctgtcctcaaggaacccgtcctgttcctgaagcccacgtcgtcattcctccacgccggcccgaccgccggccccatcgaggtgcccgagccgctcgagtcgctgcaccacgaggtcgaactcgccgtcgtcatctcccggcgcgcgcgcgatgtccccgaggcctccgccatggatttcgtcggaggttatgcacttgctttggacatgtcatcaaacgatctgcaatcagcttctaagtctgcaggtcttccttggactttgggtaaagtacaggacacctttactccaattagtgcggtggttccgaaatctgcaatcgctaatccctatgacctagaactgtggctaaaggtagatggtgaacttaggcagaagggacttacaagtgatatgatattcaagattccttttctaatcagttatatcagttccatcatgacattaatggagggcgatgtgatattaactggtactcctcccgatggcgttggtcctgtccgagtgggacagaagattaatgctggtataactgacctcattgatgtagagtttgatgttgagagacgcaaacgttcattttcttactga

SEQ ID NO: 32625 - protein, 228 aa, Triticum aestivum
MAAAAAQRLLASSTKIVGAGRNYISHAKDLGNPVLKEPVLFLKPTSSFLHAGPTAGPIEVPEPLESLHHEVELAVVISRRARDVPEASAMDFVGGYALALDMSSNDLQSASKSAGLPWTLGKVQDTFTPISAVVPKSAIANPYDLELWLKVDGELRQKGLTSDMIFKIPFLISYISSIMTLMEGDVILTGTPPDGVGPVRVGQKINAGITDLIDVEFDVERRKRSFSY

SEQ ID NO: 32626 - DNA, 687 bp, Hordeum vulgare
  CDS (1)..(687)
atggcagcagcggcggcgcagaggctccttgcggcgagcacgaagatcgtcggggccgggcgcaactacatctcccatgccaaagatctcggcaaccctgtcctcaaggaacccgtcctgttcctgaagcccacgtcgtcgtttctccacgctggcccgaccgccggccccatcgaggtgcccgagccgctcgagtcgctgcaccacgaggtcgagctcgccgtcgtcatctcccggcgcgcgcgcgatgtccccgaggcctccgccatggatttcgtcggaggttatgcacttgctttggacatgtcatcaaacgatctgcaatcagcttctaagtctgcaggtcttccttggacattgggtaaagtacaggacacctttactccaattagtgcggtggttccgaaatcagcgatcactaatccctatgatctagaactgtggctaaaggtagatggtgaacttaggcagaagggacttacaagtgatatgatattcaagattccttttctaatcagctatatcagttccatcatgacattaatggagggtgatgtgatattaactggtactccccccgatggtgtaggtcctgtccgagtaggacagaagattagtgctggtataactgacctcattgatgtagagttcgatgttcagagacgcaaacgttcattttctaactga

SEQ ID NO: 32627 - protein, 228 aa, Hordeum vulgare
MAAAAAQRLLAASTKIVGAGRNYISHAKDLGNPVLKEPVLFLKPTSSFLHAGPTAGPIEVPEPLESLHHEVELAVVISRRARDVPEASAMDFVGGYALALDMSSNDLQSASKSAGLPWTLGKVQDTFTPISAVVPKSAITNPYDLELWLKVDGELRQKGLTSDMIFKIPFLISYISSIMTLMEGDVILTGTPPDGVGPVRVGQKISAGITDLIDVEFDVQRRKRSFSN

SEQ ID NO: 32628 - DNA, 678 bp, Brassica napus
  CDS (1)..(678)
atggcgacttcgatgattcagaggatgttcaagcaaggcacgaagatcgtcggcgttggtctcaattacgcttcacacgccaaagagcttggcaacgcactcccaaaggacccgattgtgttcttaaagccaacctcttcctacttggaaaacggtggaacgattgagatcccacatcctctggactcacttcaccatgaggttgaactcgctgtagtgatcggacacaaggctagagatgtccctgaacgtttagccatggattacatcggaggatatgcgattgctcttgatatgactgctaaggaacaccacgtttctgccatggcatctggtctgccgtgtacacttgctaaagcacaggataccttcactcccatcagctctgttctaccaaaggcaatggtggttgatcccaataacctggaactctggcttaaggttgatgatgagataagacaaaagggttggacaaaggatatgatctacaaggtcccatacctcatcagctacataagttctgtaatgacccttttcaaaggagatgtcatcttgacaggtacaccagaagggataggacctgtaaagattggtcagaagataaccgctggaatcactggtctttctgaagttcagttcaatgtcggtaggcgtgtaaaaccattgttgaactcctag

SEQ ID NO: 32629 - protein, 225 aa, Brassica napus
MATSMIQRMFKQGTKIVGVGLNYASHAKELGNALPKDPIVFLKPTSSYLENGGTIEIPHPLDSLHHEVELAVVIGHKARDVPERLAMDYIGGYAIALDMTAKEHHVSAMASGLPCTLAKAQDTFTPISSVLPKAMVVDPNNLELWLKVDDEIRQKGWTKDMIYKVPYLISYISSVMTLFKGDVILTGTPEGIGPVKIGQKITAGITGLSEVQFNVGRRVKPLLNS

SEQ ID NO: 32630 - DNA, 678 bp, Brassica napus
  CDS (1)..(678)
atggcgacttcgatgattcagaggatgttcaagcaaggcacgaagatcgtcggcgttggtctcaattacgcttcacacgccaaagagcttggcaacgcactcccaaaggacccgattgtgttcttaaagccaacctcttcctacttggaaaacggtggaacgattgagatcccacatcctctggactcacttcaccatgaggttgaactcgctgtagtgatcggacacaaggctagagatgtccctgaacgtttagccatggattacatcggaggatatgcgattgctcttgatatgactgctaaggaacaccacgtttctgccatggcatctggtctgccgtgtacacttgctaaagcacaggataccttcactcccatcagctctgttctaccaaaggcaatggtggttgatcccaataacctggaactctggcttaaggttgatgatgagataagacaaaagggttggacaaaggatatgatctacaaggtcccgtacctcatcagctacataagttctgtaatgacccttttcaaaggagatgtcatcttgacaggtacaccagaaggtataggacctgttaagattggtcagaagataaccgctggaatcactggtctttctgaagttcagtttagtgtcggtaggcgtgtaagaccattgttgagctcctag

SEQ ID NO: 32631 - protein, 225 aa, Brassica napus
MATSMIQRMFKQGTKIVGVGLNYASHAKELGNALPKDPIVFLKPTSSYLENGGTIEIPHPLDSLHHEVELAVVIGHKARDVPERLAMDYIGGYAIALDMTAKEHHVSAMASGLPCTLAKAQDTFTPISSVLPKAMVVDPNNLELWLKVDDEIRQKGWTKDMIYKVPYLISYISSVMTLFKGDVILTGTPEGIGPVKIGQKITAGITGLSEVQFSVGRRVRPLLSS

SEQ ID NO: 32632 - DNA, 675 bp, Glycine max
  CDS (1)..(675)
atggcagtggcaggttgtcagaagcttctggaactgagcaccaagatcgtcgctgttggcagaaactacgctgctcacgccaaggaattaggcaacgccgttcccaaggagccggtgttgtttctgaaaccgacgtcgtcttacttgaaaaacggcggaaccatccaaatcccacacaacgagggctctctgcatcacgaggttgagctcgctgtggtcatcgccaagaaagcacgtgacgtctccgaatcctctgcgatggattatgtcgccggttatgcactggctctggatatgactgctagggaccttcaagctgctgctaagtctgcaggtcttccatggagtttggcaaaaggccaggacactttcaccccaattagttctattttgccaaagactgcagtgccaaatcctgatgatctagaattatggttaaaggtagatgaggaaatacggcaaaagggctcaaccaaggacatgatctttaagatcccatttctaattagctacattagctctgtcatgacattgtttgaaggggatgtcatactaactggtactcccccgggtgttggccctgtcaaagagggtcaaacaattactgctggcgttacaggccttgtggacgtacagtttaatgttgaaaaaagagctaggcctgttctttcttga

SEQ ID NO: 32633 - protein, 224 aa, Glycine max
MAVAGCQKLLELSTKIVAVGRNYAAHAKELGNAVPKEPVLFLKPTSSYLKNGGTIQIPHNEGSLHHEVELAVVIAKKARDVSESSAMDYVAGYALALDMTARDLQAAAKSAGLPWSLAKGQDTFTPISSILPKTAVPNPDDLELWLKVDEEIRQKGSTKDMIFKIPFLISYISSVMTLFEGDVILTGTPPGVGPVKEGQTITAGVTGLVDVQFNVEKRARPVLS

SEQ ID NO: 32634 - DNA, 675 bp, Glycine max
  CDS (1)..(675)
atggcagcggcaggttgtcagaagcttctggaattgagcacgaagatcgtcgctgttggcagaaactacgctgctcatgccaaagaactaggcaacgccgttcccaaggagccggtgttgtttctgaaaccgacgtcgtcttacttgagtaacggcggaaccattcaaatcccacacaacgagggctctctgcatcacgaggttgagctcgctgtggtcatctccaagaaagcccgtgacgtctccgaatcctctgccatggattacgtcgccggttatgcactggctctggatatgactgctagggaccttcaagctgctgctaagtctgcaggtcttccatggagtttggcaaaaggccaggacactttcacccctattagctctattttgccaaagactacagtgccgaatcccgatgatctagaattatggttaaaggttgacgaggaaattcggcaaaagggctcaaccaaggacatgatatttaagatcccatttctgattagctacgtaagctctgtcatgacattgtttgaaggagatgtcatactaactggtactcccccgggtgttggccctgtgaaagagggtcaaacaattactgctggtattacaggccttgtggacgtacagtttaatgttgaaaaaagagctaggcctgttctttcttga

SEQ ID NO: 32635 - protein, 224 aa, Glycine max
MAAAGCQKLLELSTKIVAVGRNYAAHAKELGNAVPKEPVLFLKPTSSYLSNGGTIQIPHNEGSLHHEVELAVVISKKARDVSESSAMDYVAGYALALDMTARDLQAAAKSAGLPWSLAKGQDTFTPISSILPKTTVPNPDDLELWLKVDEEIRQKGSTKDMIFKIPFLISYVSSVMTLFEGDVILTGTPPGVGPVKEGQTITAGITGLVDVQFNVEKRARPVLS

SEQ ID NO: 32636 - DNA, 675 bp, Glycine max
  CDS (1)..(675)
atggcagcggcaggttgtcagaagcttctggaattgagcacgaagatcgtcgctgttggcagaaactacgctgctcatgccaaagaactaggcaacgccgttcccaaggagccggtgttgtttctgaaaccgacgtcgtcttacttgagtaacggcggaaccattcaaatcccacacaacgagggctctctgcatcacgaggttgagctcgctgtggtcatctccaagaaagcccgtgacgtctccgaatcctctgccatggattacgtcgccggttatgcactggctctggatatgactgctagggaccttcaagctgctgctaagtctgcaggtcttccatggagtttggcaaaaggccaggacactttcacccctattagctctattttgccaaagactacagtgccgaatcccgatgatctagaattatggttaaaggttgacgaggaaattcggcaaaagggctcaaccaaggacatgatatttaagatcccatttctaattagctacattagctctgtcatgacattgtttgaaggggatgtcatactaactggtactcccccgggtgttggccctgtcaaagagggtcaaacaattactgctggcgttacaggccttgtggacgtacagtttaatgttgaaaaaagagctaggcctgttctttcttga

SEQ ID NO: 32637 - protein, 224 aa, Glycine max
MAAAGCQKLLELSTKIVAVGRNYAAHAKELGNAVPKEPVLFLKPTSSYLSNGGTIQIPHNEGSLHHEVELAVVISKKARDVSESSAMDYVAGYALALDMTARDLQAAAKSAGLPWSLAKGQDTFTPISSILPKTTVPNPDDLELWLKVDEEIRQKGSTKDMIFKIPFLISYISSVMTLFEGDVILTGTPPGVGPVKEGQTITAGVTGLVDVQFNVEKRARPVLS

SEQ ID NO: 32638 - DNA, 684 bp, Zea mays
  CDS (1)..(684)
atggcggctgcggcggcgcagaagctcctcgaggcgagcacgaagatcatcggcgtcgggcgcaactacatcgcccacgccgaggagctcggcaacccgatccccaaggagcccgtactattcctgaagccgacctcgtcgttcctccacgctggcgtggccaccgccgccgtcgagatcccggagccgctcgaatcgctacaccacgaagtcgagctcgccgtcgtcatctcccggcgtgggcgtgacattcctgaagcgtccgccatggacttcgtcggaggctatgcacttgctttggacatgacagcaaggggccttcaatctgttgctaagtctgcaggccttccatggactttggctaaagggcaagacaccttcactccaattagtgcagtagttccaaaatcatctgtcactaatcccgacgatctcgagctatggctaaaggtagatgatgaactaaggcagaaaggatcgacaagtgacatgatattcaagattccttttctgatcagctatatcagctccatcatgacattaatggagggtgatgtgatactaacaggtactcctgagggtgtgggtcctgtgcgagtaggtcagaagatcaaagctggtataactgacctaattgatgtcgagttcgatgttcagaggcgcaaccggtcattttccacatga

SEQ ID NO: 32639 - protein, 227 aa, Zea mays
MAAAAAQKLLEASTKIIGVGRNYIAHAEELGNPIPKEPVLFLKPTSSFLHAGVATAAVEIPEPLESLHHEVELAVVISRRGRDIPEASAMDFVGGYALALDMTARGLQSVAKSAGLPWTLAKGQDTFTPISAVVPKSSVTNPDDLELWLKVDDELRQKGSTSDMIFKIPFLISYISSIMTLMEGDVILTGTPEGVGPVRVGQKIKAGITDLIDVEFDVQRRNRSFST

SEQ ID NO: 32640 - DNA, 684 bp, Zea mays
  CDS (1)..(684)
atggcggctgcggcggcgcagaggctcctcgcggcgagcacgaaaatcatcggcgttgggcgcaactacatagcccacgccaaggagctcggcaatccggtccccaaggagcccgtcctgttcctgaagccgacctcgtcgtttctccacgctggtgtggccaccgccgccgtcgagatcccggagccgctcgagtcgctacaccacgaggtcgagctcgccgtcgtcatctcccggcgtgggcgcgacgttcccgaggcgtccgccatggactttgttggaggttatgcacttgctttggacatgacagcaagggaccttcagtctgttgctaagtctgcaggccttccatggactttggctaaaggacaagacaccttcaccccaattagtgcagtagttccaaaatcagctgtcactaatcccgatgatctcgagctctggctgaaggtagatgatgaactaaggcagaaaggaccgacaagcgacatgctattcaagattccttttctgataagctatatcagttccatcatgacattaatggagggtgatgtgatactaacaggtactcctgagggtgtgggtcctgtccgagtaggtcagaagattacagctggtataactgacctaattgatgttgagttcgatgttcagaggcgcaatcggtcattttccacatga

SEQ ID NO: 32641 - protein, 227 aa, Zea mays
MAAAAAQRLLAASTKIIGVGRNYIAHAKELGNPVPKEPVLFLKPTSSFLHAGVATAAVEIPEPLESLHHEVELAVVISRRGRDVPEASAMDFVGGYALALDMTARDLQSVAKSAGLPWTLAKGQDTFTPISAVVPKSAVTNPDDLELWLKVDDELRQKGPTSDMLFKIPFLISYISSIMTLMEGDVILTGTPEGVGPVRVGQKITAGITDLIDVEFDVQRRNRSFST

SEQ ID NO: 32642 - DNA, 696 bp, Zea mays
  CDS (1)..(696)
atgccggcggccatggcggctgcggcggcgcagaggctcctcgcggcgagcacgaaaatcatcggcgttgggcgcaactacatagcccacgccaaggagctcggcaatccggtccccaaggagcccgtcctgttcctgaagccgacctcgtcgtttctccacgctggtgtggccaccgccgccgtcgagatcccggagccgctcgagtcgctacaccacgaggtcgagctcgccgtcgtcatctcccggcgcgggcgcgacgttcccgaggcgtccgccatggactttgttggaggttatgcacttgctttggacatgacagcaagggaccttcagtctgttgctaagtctgcaggccttccatggactttggctaaaggacaagacaccttcaccccaattagtgcagtagttccaaaatcagctgtcactaatcccgatgatctcgagctctggctgaaggtagatgatgaactaaggcagaaaggaccgacaagcgacatgctattcaagattccttttctgataagctatatcagttccatcatgacattaatggagggtgatgtgatactaacaggtactcctgagggtgtgggtcctgtccgagtaggtcagaagattacagctggtataactgacctaattgatgttgagttcgatgttcagaggcgcaatcggtcatttttcacatga

SEQ ID NO: 32643 - protein, 231 aa, Zea mays
MPAAMAAAAAQRLLAASTKIIGVGRNYIAHAKELGNPVPKEPVLFLKPTSSFLHAGVATAAVEIPEPLESLHHEVELAVVISRRGRDVPEASAMDFVGGYALALDMTARDLQSVAKSAGLPWTLAKGQDTFTPISAVVPKSAVTNPDDLELWLKVDDELRQKGPTSDMLFKIPFLISYISSIMTLMEGDVILTGTPEGVGPVRVGQKITAGITDLIDVEFDVQRRNRSFFT

SEQ ID NO: 32644 - DNA, 21 bp, Artificial sequence
  primer
atgagttaccagcaccaatac

SEQ ID NO: 32645 - DNA, 22 bp, Artificial sequence
  primer
tcagagcacccggctttcgaag

SEQ ID NO: 32646 - protein, 279 aa, Artificial sequence
  consensus sequence
  Variant (2)..(2): Xaa in position 2 is any amino acid
  Variant (3)..(27): Xaa in position 3 to 27 is any or no amino acid
  Variant (30)..(30): Xaa in position 30 is any amino acid
  Variant (31)..(31): Xaa in position 31 is any or no amino acid
  Variant (33)..(33): Xaa in position 33 is any amino acid
  Variant (34)..(34): Xaa in position 34 is any or no amino acid
  Variant (36)..(40): Xaa in position 36 to 40 is any amino acid
  Variant (41)..(68): Xaa in position 41 to 68 is any or no amino acid
  Variant (70)..(71): Xaa in position 70 to 71 is any amino acid
  Variant (73)..(73): Xaa in position 73 is any amino acid
  Variant (75)..(93): Xaa in position 75 to 93 is any amino acid
  Variant (94)..(122): Xaa in position 94 to 122 is any or no amino acid
  Variant (124)..(124): Xaa in position 124 is any amino acid
  Variant (127)..(136): Xaa in position 127 to 136 is any amino acid
  Variant (137)..(152): Xaa in position 137 to 152 is any or no amino acid
  Variant (155)..(158): Xaa in position 155 to 158 is any amino acid
  Variant (159)..(160): Xaa in position 159 to 160 is any or no amino acid
  Variant (162)..(164): Xaa in position 162 to 164 is any amino acid
  Variant (166)..(166): Xaa in position 166 is any amino acid
  Variant (167)..(167): Xaa in position 167 is any or no amino acid
  Variant (169)..(170): Xaa in position 169 to 170 is any amino acid
  Variant (171)..(179): Xaa in position 171 to 179 is any or no amino acid
  Variant (181)..(183): Xaa in position 181 to 183 is any amino acid
  Variant (185)..(186): Xaa in position 185 to 186 is any amino acid
  Variant (188)..(190): Xaa in position 188 to 190 is any amino acid
  Variant (192)..(215): Xaa in position 192 to 215 is any amino acid
  Variant (216)..(223): Xaa in position 216 to 223 is any or no amino acid
  Variant (225)..(242): Xaa in position 225 to 242 is any amino acid
  Variant (244)..(247): Xaa in position 244 to 247 is any amino acid
  Variant (248)..(248): Xaa in position 248 is any or no amino acid
  Variant (250)..(251): Xaa in position 250 to 251 is any amino acid
  Variant (254)..(256): Xaa in position 254 to 256 is any amino acid
  Variant (261)..(261): Xaa in position 261 is any amino acid
  Variant (262)..(262): Xaa in position 262 is any or no amino acid
  Variant (266)..(269): Xaa in position 266 to 269 is any amino acid
  Variant (270)..(277): Xaa in position 270 to 277 is any or no amino acid
GXXXXXXXXXXXXXXXXXXXXXXXXXXNYXXHXXEXXXXXXXXXXXXXXXXXXXXXXXXXXXXXXXXXPXXFXKXXXXXXXXXXXXXXXXXXXXXXXXXXXXXXXXXXXXXXXXXXXXXXXXEXELXXXXXXXXXXXXXXXXXXXXXXXXXXGYXXXXXXDXXXRXXQXXXXXXXXXXXWXXXKXXDXXXPXXXXXXXXXXXXXXXXXXXXXXXXXXXXXXXXQXXXXXXXXXXXXXXXXXXSXXXXXLXXGDXXXTGTPXXGVGXXXXXXXXXXXXGD

SEQ ID NO: 32647 - protein, 15 aa, Artificial sequence
  protein pattern
  Variant (2)..(3): Xaa in position 2 to 3 is any amino acid
  Variant (6)..(6): Xaa in position 6 is Ile, Leu or Val
  Variant (7)..(7): Xaa in position 7 is Ile or Val
  Variant (8)..(8): Xaa in position 8 is any amino acid
  Variant (13)..(13): Xaa in position 13 is any amino acid
  Variant (15)..(15): Xaa in position 15 is Ile or Val
LXXGDXXXTGTPXGX

SEQ ID NO: 32648 - DNA, 351 bp, Azotobacter vinelandii
  CDS (1)..(351): transl_table=11
atgaccgtcgaaaccttcaccccgactccgctgctctttacgcagggggccgcaaacaaggtgaagactctgatcagcgaggaaggcaatccgcgtctgaagctccgtgtttttgtcacgggcgggggatgctcgggtttccagtatggattcaccttcgatgaagatgtcgccgaagacgacaccatcgtcgagcgtgaaggtgtcagcttggtcgtcgaccccatgagtttccagtacctggccggggccgaggtcgattatcaggaagggctggaaggttcacgcttcgtgatcaagaacccgaatgccgcaaccacttgtggctgcggccagtctttctcggtctga

SEQ ID NO: 32649 - protein, 116 aa, Azotobacter vinelandii
MTVETFTPTPLLFTQGAANKVKTLISEEGNPRLKLRVFVTGGGCSGFQYGFTFDEDVAEDDTIVEREGVSLVVDPMSFQYLAGAEVDYQEGLEGSRFVIKNPNAATTCGCGQSFSV

SEQ ID NO: 32650 - DNA, 767 bp, Sorghum bicolor
  CDS (76)..(555)
ccggggatccgacccaaagccctcgtttctcatcacgccaccgcttaccccgccgccgccgcgtcggcagcggcgatggcgtcgtcgtcgtcgcggccgatgctccgccgcctcgcagaactggccagaggccgcgtccgcgccaaccaccgcatgctctcatccgccttcccgtccaccgccgccatcgagagggcttcgcagtcgccggcggaggcccaggccgtgcgcatgacggagggttgcgtgcggagattaaaagaattacatgctaaagaaccatccgctgaaggtaagatgctgcgcttaagcgttgaagcaggtggatgttctgggttccaatattctttcgctcttgatgacaagaaaaactcagacgacagggtttttgagactgatggtgttaaattggtcgtggatgacatctcatatgacttcgtaaaaggtgccactgtggattatgaggaggaacttatacgttcagcgtttgtggtttcaacaaatcctagtgctgttgggggctgcagctgcaagagttctttcatggtgaaatagcttcaatgttaccttgaagagatcaataaccagaaatagcattctgtagcggaacatatgctttgaatctgggtgtacaattggtattttttggtagttctgaagatgttccttcttgagttttgttactggtagcaatatcatcacaaactgtgtggttcaatctgtatgcctctaaactgtgatagttgtcttatgatgaccaggttgtc

SEQ ID NO: 32651 - protein, 159 aa, Sorghum bicolor
MASSSSRPMLRRLAELARGRVRANHRMLSSAFPSTAAIERASQSPAEAQAVRMTEGCVRRLKELHAKEPSAEGKMLRLSVEAGGCSGFQYSFALDDKKNSDDRVFETDGVKLVVDDISYDFVKGATVDYEEELIRSAFVVSTNPSAVGGCSCKSSFMVK

SEQ ID NO: 32652 - DNA, 480 bp, Zea mays
  CDS (1)..(480)
atggcgtcgtcgtcgtcgcggcccctgctctgccgcctcgcggaactggccagcggccgcgtccgagccaactaccgcatgctctcatccgccttttcatccactgcctccaccgagagggtttcgcagtcgccggcggagcccgaggccgtgctcatgacggaaggttgcgtccggagattaaaagaattacatgctaaagaaccatcctctgaaggtaagatgctgcgcttaagcgttgaagctggtggatgttctgggtttcaatattctttcgctcttgatgacaagaaaaactcagatgatagggtttttgagactgatggtgttaaattggtcgtggatgacatctcatatgactttgtaaaaggtgccactgtggattatgaggaggaacttatacgttcagcgttcgtggtttcaacaaatcctagtgctgttgggggctgcagctgcaagagttctttcatggtgaaatag

SEQ ID NO: 32653 - protein, 159 aa, Zea mays
MASSSSRPLLCRLAELASGRVRANYRMLSSAFSSTASTERVSQSPAEPEAVLMTEGCVRRLKELHAKEPSSEGKMLRLSVEAGGCSGFQYSFALDDKKNSDDRVFETDGVKLVVDDISYDFVKGATVDYEEELIRSAFVVSTNPSAVGGCSCKSSFMVK

SEQ ID NO: 32654 - DNA, 684 bp, Triticum aestivum
  CDS (51)..(551)
cccaatccccctggaggcgcggcgcatatcagcggcgacattgggcggcgatggcctcggttaggccccctctccgccgcctcgcgctgctgcttaacagccgcatccgcgccaacaaccgcttcctcgcctccgcctccacctccacctcctcctaccccaccgccgccgcagccggcaccgccaccaccgagacgccggcgccggaggagccggaggtcgtcagcatgacggataactgcgtccgtagactcaaagagttgcatactaaagaaccatctgctaagggcaacatgttgcgcttgagcgttgaagctggtggctgttctggattccagtacaccttctcactggatagcaaggaaaatgctgatgatagggtcttcgagaagaatggtgttaagttggttgtcgacaatgtctcatacgacttcgtgaaaggttcaacaatcgattatgtagaggaattgataagctcagcatttgtggtttcaaccaatccaagtgctgttggaggctgcagctgcaagagttccttcatggttaaataattcgaacattagtaactttaagaggtagcctgacagaactttaagtggtcggacccttccccagaccctgcgcaagcgggagctacatgcactggggctgccccttttttactacaatacttcgatacttccg

SEQ ID NO: 32655 - protein, 166 aa, Triticum aestivum
MASVRPPLRRLALLLNSRIRANNRFLASASTSTSSYPTAAAAGTATTETPAPEEPEVVSMTDNCVRRLKELHTKEPSAKGNMLRLSVEAGGCSGFQYTFSLDSKENADDRVFEKNGVKLVVDNVSYDFVKGSTIDYVEELISSAFVVSTNPSAVGGCSCKSSFMVK

SEQ ID NO: 32656 - DNA, 324 bp, Triticum aestivum
  CDS (1)..(324)
atgacggataactgcgtccgtagactcaaagagttgcatactaaagaaccatctgctaagggcaacatgttgcgcttgagcgttgaagctggtggctgttctggattccagtacaccttctcactggatagcaaggaaaatgctgatgatagggtcttcgagaagaatggtgttaagttggttgtcgacaatgtctcatacgacttcgtgaaaggttcaacaatcgattatgtagaggaattgataagctcagcatttgtggtttcaaccaatccaagtgctgttggaggctgcagctgcaagagttccttcatggttaaataa

SEQ ID NO: 32657 - protein, 107 aa, Triticum aestivum
MTDNCVRRLKELHTKEPSAKGNMLRLSVEAGGCSGFQYTFSLDSKENADDRVFEKNGVKLVVDNVSYDFVKGSTIDYVEELISSAFVVSTNPSAVGGCSCKSSFMVK

SEQ ID NO: 32658 - DNA, 345 bp, Klebsiella pneumoniae subsp. pneumoniae MGH 78578
  CDS (1)..(345): transl_table=11
atgagtgatgacgtagcgttgccgctggagtttaccgaagccgcagccaataaagtaaaacacctgattgcggatgaagataatccgaacctgaaactgcgcgtgtatatcaccggcggcggttgcagcggtttccagtatggcttcacctttgacgatcaggtgaacgaaggggatatgaccattgagaaacagggcgtcggcctggtggttgacccgatgagcctgcagtatctggtcggcggctctgtcgactataccgaagggctggaaggttcgcgctttatcgtgaccaatccgaacgcgaaaagcacctgcggctgcggctcctcgttcagcgtttaa

SEQ ID NO: 32659 - protein, 114 aa, Klebsiella pneumoniae subsp. pneumoniae MGH 78578
MSDDVALPLEFTEAAANKVKHLIADEDNPNLKLRVYITGGGCSGFQYGFTFDDQVNEGDMTIEKQGVGLVVDPMSLQYLVGGSVDYTEGLEGSRFIVTNPNAKSTCGCGSSFSV

SEQ ID NO: 32660 - DNA, 369 bp, Kineococcus radiotolerans SRS30216
  CDS (1)..(369): transl_table=11
atgaccacgaccagcgacacgaccaccgagccggcggccgcgacccacggggtgctgctcaccgacgtggccgcgacgaaggtccgcacgctgctcgagcaggagggtcgcgacgacctccgcctgcggatcgcggtgcagcccggcggctgctccggcctcatctaccagctctacttcgacgagcgcacgctcgacggggacgcgctgcgcgacttcgacggcgtcgaggtcgttgtggacaagatgagcaccccctacctcgacggggcgacgatcgacttcgccgacaccatcgagaagcagggcttcaccatcgacaacccgaacgccgggagcagctgcgcctgcggtgactccttcagctga

SEQ ID NO: 32661 - protein, 122 aa, Kineococcus radiotolerans SRS30216
MTTTSDTTTEPAAATHGVLLTDVAATKVRTLLEQEGRDDLRLRIAVQPGGCSGLIYQLYFDERTLDGDALRDFDGVEVVVDKMSTPYLDGATIDFADTIEKQGFTIDNPNAGSSCACGDSFS

SEQ ID NO: 32662 - DNA, 426 bp, Xanthobacter autotrophicus Py2
  CDS (1)..(426): transl_table=11
atggacttaccttatgggccattgccagcttcaattcgtaaagtcgatatcatggaaacatccctcgcccccactgcggccgccgacctcccggctcccgacgccgaattcaccgtgaccgatgccgccgcgcgccgcatctgccagattctgtcgcccgaaccggctggcaccttcctgcgcatcagcgtggaaggcggcggctgctccggcttctcttacaagtacgatgtgacccgcgagcagggtgaggacgacctcgtcatcgagaaggaaggcgccaagatcgtcgtcgatcgcatctcgatcgactacatcaagggctcccagctcgattacaaggcggacctgatgggctccgccttcaagatctcgaaccccatggccaccgccaagtgcggctgcgggtccagcttcggcgtctga

SEQ ID NO: 32663 - protein, 141 aa, Xanthobacter autotrophicus Py2
MDLPYGPLPASIRKVDIMETSLAPTAAADLPAPDAEFTVTDAAARRICQILSPEPAGTFLRISVEGGGCSGFSYKYDVTREQGEDDLVIEKEGAKIVVDRISIDYIKGSQLDYKADLMGSAFKISNPMATAKCGCGSSFGV

SEQ ID NO: 32664 - DNA, 348 bp, Mesorhizobium loti MAFF303099
  CDS (1)..(348): transl_table=11
atgggcgctgatgccaagactgccatgaaagtcgacatgaccgaggccgccgccaggcggatcgccgagattgtctctggcgaggccggcaagacggcgctgcgcgtttccgtcgaaggcggcggctgctccggattctcctacaaattcgacctggtcgacacgcgcaacgacgacgatgtcgccatcgagaaggacggcgccacggtgctgatcgacgatttgtcgctggtctatatgggcggctcggtgatcgatttcgtcgacgatctgatggggcagtccttccagatccgcaatccgaacgcggtcgcctcctgcggctgcggcacgagcttctccatctaa

SEQ ID NO: 32665 - protein, 115 aa, Mesorhizobium loti MAFF303099
MGADAKTAMKVDMTEAAARRIAEIVSGEAGKTALRVSVEGGGCSGFSYKFDLVDTRNDDDVAIEKDGATVLIDDLSLVYMGGSVIDFVDDLMGQSFQIRNPNAVASCGCGTSFSI

SEQ ID NO: 32666 - DNA, 342 bp, Vibrio cholerae O1 biovar eltor str. N16961
  CDS (1)..(342): transl_table=11
gtgagcgaagttaatgttccattatccttttctgatgcggcagcaaaacgtgttaaagcgttgatcgcagaagaagaaaatccatcgttaatgttgcgtgtttacatcactggtggtggttgtagcggcttccaatatggctttactttcgatgaaaccgtcaacgaaggtgacaccaaaattgagaatagcggcgtcattttggtggttgatcctatgagtctgcaatatttgatcggcggagtggtcgattataccgaaggtctcgaaggctcaagattcttcgttaacaaccccaatgcaacgaccacgtgtggttgcggcgcatcatttagcgtctaa

SEQ ID NO: 32667 - protein, 113 aa, Vibrio cholerae O1 biovar eltor str. N16961
MSEVNVPLSFSDAAAKRVKALIAEEENPSLMLRVYITGGGCSGFQYGFTFDETVNEGDTKIENSGVILVVDPMSLQYLIGGVVDYTEGLEGSRFFVNNPNATTTCGCGASFSV

SEQ ID NO: 32668 - DNA, 324 bp, Vibrio cholerae O1 biovar eltor str. N16961
  CDS (1)..(324): transl_table=11
atggccgtcactcttagcgaaaccgcagcaagccgagtaaaaacttttctggataatcgtggaaaaggcatcggtttacgtcttggtgtcaagacaactgggtgttcgggaatggcgtatgtgctcgagtttgttgatgatctcaacgaagaagaccacgtatttgaaagccatggtgtgaaggtgatcattgacaccaaaagcatggtctatttagatggcactcaactcgattacaaaaaagaagggttaaacgaaggctttgaattcaacaacccaaatgtcaaaagcgaatgtggttgtggtgaaagcttcaacgtttaa

SEQ ID NO: 32669 - protein, 107 aa, Vibrio cholerae O1 biovar eltor str. N16961
MAVTLSETAASRVKTFLDNRGKGIGLRLGVKTTGCSGMAYVLEFVDDLNEEDHVFESHGVKVIIDTKSMVYLDGTQLDYKKEGLNEGFEFNNPNVKSECGCGESFNV

SEQ ID NO: 32670 - DNA, 354 bp, Bacillus halodurans C-125
  CDS (1)..(354): transl_table=11
atgattaaaattactgatgcggcagtcaatcgcattaaagaaatgatgaaagaagaaggcgaagaaggccttaagctacgtgtaggtgtaaaaggtggaggctgtagcggtctttcctatggcatggggtttgataatgaacagacagaagatgacacgctccacgaaattaatggcttgtctgttttaattgataatgaaagtggtcccatattaaaagatgttgtcattgattacaaacaaaacatgatgggtggcggatttacgattgataacccgaacgccattgctacatgtggttgtggcacatcattccgaacagctaccaacgcaggaacgcctgaagattgctaa

SEQ ID NO: 32671 - protein, 117 aa, Bacillus halodurans C-125
MIKITDAAVNRIKEMMKEEGEEGLKLRVGVKGGGCSGLSYGMGFDNEQTEDDTLHEINGLSVLIDNESGPILKDVVIDYKQNMMGGGFTIDNPNAIATCGCGTSFRTATNAGTPEDC

SEQ ID NO: 32672 - DNA, 345 bp, Pasteurella multocida subsp. multocida str. Pm70
  CDS (1)..(345): transl_table=11
attatgacagagatttccgtgccactgatctttactgatgcggctgccaacaaagtaaaagccttaatcagtgaagaggaaaacccgaatttgaaattacgcgtctatattaccggcggtgggtgtagtggtttccaatatggttttactttcgatgaaaaagtaaacgacggtgatttaactattgagaaatctggcgtgcacttagtgatcgatcccatgagtttacaatatttaattgggggaaccgtggactatactgagggcttagaaggttctcgtttcgttgtgaacaatccaaacgcctcaactacctgtggttgtggttcatctttcagtatttaa

SEQ ID NO: 32673 - protein, 114 aa, Pasteurella multocida subsp. multocida str. Pm70
MMTEISVPLIFTDAAANKVKALISEEENPNLKLRVYITGGGCSGFQYGFTFDEKVNDGDLTIEKSGVHLVIDPMSLQYLIGGTVDYTEGLEGSRFVVNNPNASTTCGCGSSFSI

SEQ ID NO: 32674 - DNA, 339 bp, Neisseria meningitidis MC58
  CDS (1)..(339): transl_table=11
atgtcggatgaaagccctattatttttactgacagctgctgtgccaaagttgccgatttgattgccgaagaaaacaatcccgatttgaaattgcgggtttttgtcaatggcggcggctgttcgggtttccagtacggatttacttttgacgaaatcaaaaacgacgacgattttgaaattgagaaaaacggtttggtctttttggtcgatccgatgagctatcaatatctggtcggtgcggaaatcgactatacggaaagtttgcagggttcgcaattcgtcatccgcaatccgaatgcggaaacaacctgcggttgcggatcgtcgttttccgtatga

SEQ ID NO: 32675 - protein, 112 aa, Neisseria meningitidis MC58
MSDESPIIFTDSCCAKVADLIAEENNPDLKLRVFVNGGGCSGFQYGFTFDEIKNDDDFEIEKNGLVFLVDPMSYQYLVGAEIDYTESLQGSQFVIRNPNAETTCGCGSSFSV

SEQ ID NO: 32676 - DNA, 369 bp, Escherichia coli O157:H7 EDL933
  CDS (1)..(369): transl_table=11
atggacatgcattcaggaacctttaatccacaggatttcgcctggcaaggcttaacgctgacacccgcagccgctgtccacatccgcgagctggtggcaaagcagccgggtatggtcggcgtgcgcttaggtgtgaagcaaacgggctgcgcgggctttggctatgtgctcgacagtgttagcgagccggacaaagacgatctgctgtttgaacacgacggcgcgaagctgtttgtcccgctgcaagcgatgccgtttattgatggcacggaagtcgatttcgttcgtgaaggacttaatcagatattcaaatttcacaaccctaaagcccagaatgaatgtggctgtggcgaaagctttggggtatag

SEQ ID NO: 32677 - protein, 122 aa, Escherichia coli O157:H7 EDL933
MDMHSGTFNPQDFAWQGLTLTPAAAVHIRELVAKQPGMVGVRLGVKQTGCAGFGYVLDSVSEPDKDDLLFEHDGAKLFVPLQAMPFIDGTEVDFVREGLNQIFKFHNPKAQNECGCGESFGV

SEQ ID NO: 32678 - DNA, 330 bp, Sinorhizobium meliloti 1021
  CDS (1)..(330): transl_table=11
atgcaggaaacagttacgctttcggatgcggcggccagacgcattgccgccattctccaggcggagaaggacaagagcgcgatgcgcgtctccgtcgaaggcggcgggtgctcgggcttctcctacaagttcgatttggtggacgcggcaaatgccgacgatctcatcctcgaaaaggacaacgccaaggtcctgatcgacagcctgtcgctggtctatatgggcggctcggagatcgatttcgtcgacaacctcctcgggcagtccttccagatcaacaatccgaacgccgtcgcaagctgcggatgcggaacaagcttttcgatctga

SEQ ID NO: 32679 - protein, 109 aa, Sinorhizobium meliloti 1021
MQETVTLSDAAARRIAAILQAEKDKSAMRVSVEGGGCSGFSYKFDLVDAANADDLILEKDNAKVLIDSLSLVYMGGSEIDFVDNLLGQSFQINNPNAVASCGCGTSFSI

SEQ ID NO: 32680 - DNA, 333 bp, Caulobacter crescentus CB15
  CDS (1)..(333): transl_table=11
atgacccagatcgacttaacgctttccgaaaacgcagcacgccggatcaaggccatcggcgaggccgaagggcgcgcccttatgctccgcgtcgcggtggatggtgggggctgctcgggctttcagtaccgcttcgacctggtcgacagcgttgaggacgatgacctcaaggtcgagcgtgacggcgccgcggccctggtggacgtggtgtccctggcgcttctgaagggctcggagatcgacttcgtcgacgaactggccggggcggagttccggattcgcaacccaaacgccaagtccagctgcggctgcggcgtcagcttctcgatctga

SEQ ID NO: 32681 - protein, 110 aa, Caulobacter crescentus CB15
MTQIDLTLSENAARRIKAIGEAEGRALMLRVAVDGGGCSGFQYRFDLVDSVEDDDLKVERDGAAALVDVVSLALLKGSEIDFVDELAGAEFRIRNPNAKSSCGCGVSFSI

SEQ ID NO: 32682 - DNA, 345 bp, Salmonella typhimurium LT2
  CDS (1)..(345): transl_table=11
atgagtgatgacgtagcgctgccgctgcagtttaccgacgcagcagcgaataaagtaaaaagtcttatcgctgacgaagataacccgaatctgaaactgcgcgtgtatatcaccggcggtggttgcagcggcttccagtatggttttacctttgacgatcaggtgaacgaaggggatatgaccatcgaaaaacagggcgttggcctggtggttgacccgatgagtttgcagtatctggtgggtggttcggtagattataccgaaggtctggaaggttcccgcttcattgtaaccaacccgaatgcgaaaagtacctgcgggtgtggctcttccttcagcatttga

SEQ ID NO: 32683 - protein, 114 aa, Salmonella typhimurium LT2
MSDDVALPLQFTDAAANKVKSLIADEDNPNLKLRVYITGGGCSGFQYGFTFDDQVNEGDMTIEKQGVGLVVDPMSLQYLVGGSVDYTEGLEGSRFIVTNPNAKSTCGCGSSFSI

SEQ ID NO: 32684 - DNA, 369 bp, Salmonella typhimurium LT2
  CDS (1)..(369): transl_table=11
atggaattgcattcagacacgtttaacccggaggacttcccctggcaagggctgacgctaacgccagcggcggcagcgcacatacgtgaactggcagaaaagcagccgggcatgttgggcgtgcggttaagcgtaaaacagacgggatgtgccggatttggctatgttctggataccgttcgggagccggataaagacgatctggtttttgaagccgaaggcgcaaagcttttcgcaccgttacaggcgatgccttttattgacggaacagaagtggattacgtacaggaagggctgaaccagttatttaaatttcataaccccaaagcccagaatgaatgcggctgcggcgaaagttttggggtatag

SEQ ID NO: 32685 - protein, 122 aa, Salmonella typhimurium LT2
MELHSDTFNPEDFPWQGLTLTPAAAAHIRELAEKQPGMLGVRLSVKQTGCAGFGYVLDTVREPDKDDLVFEAEGAKLFAPLQAMPFIDGTEVDYVQEGLNQLFKFHNPKAQNECGCGESFGV

SEQ ID NO: 32686 - DNA, 357 bp, Nostoc sp. PCC 7120
  CDS (1)..(357): transl_table=11
atgacacaagcaactcagtctcaacaaagcgggatactgttgagcgaagccgctttgcggcaagtaaagtccctccaagaaaagcaaggtcaagatttatgcttgagggtaggagtacgccaaggtggctgctctgggatgtcttacatgatggactttgaacaggaaagccagatcactcctcaggatgaagtttttgattacgatggcttcaaaattgtctgcgatcgcaaaagtattttatatctttatggcttaatgcttgattatagcgatgccatgatcggtggtggtttccaatttaccaatcctaatgctactcagacctgcggttgcggtaagtcatttggggtgtaa

SEQ ID NO: 32687 - protein, 118 aa, Nostoc sp. PCC 7120
MTQATQSQQSGILLSEAALRQVKSLQEKQGQDLCLRVGVRQGGCSGMSYMMDFEQESQITPQDEVFDYDGFKIVCDRKSILYLYGLMLDYSDAMIGGGFQFTNPNATQTCGCGKSFGV

SEQ ID NO: 32688 - DNA, 375 bp, Ralstonia solanacearum GMI1000
  CDS (1)..(375): transl_table=11
atgaacgcagtcgcgcaggcagccacgcccgatgtgaacgaggttccggctccgctggtctttaccgacagcgctgcggacaaggtcaagcaactgatcgaagaggaaggcaatccggagctgaagctgcgcgtgttcgtgcaaggcggcgggtgctcgggcttccagtacggcttcacctttgacgaagacaccaacgaagacgacacgaccatgaccaagaatggcgtgacgcttctgatcgactcgatgagctaccagtacctggtgggcgccgagatcgactacaaggaagacatcaacggtgcccagttcgtcatcaagaacccgaatgcctcgaccacctgcggttgcggttcgtcgttctcggtctga

SEQ ID NO: 32689 - protein, 124 aa, Ralstonia solanacearum GMI1000
MNAVAQAATPDVNEVPAPLVFTDSAADKVKQLIEEEGNPELKLRVFVQGGGCSGFQYGFTFDEDTNEDDTTMTKNGVTLLIDSMSYQYLVGAEIDYKEDINGAQFVIKNPNASTTCGCGSSFSV

SEQ ID NO: 32690 - DNA, 333 bp, Agrobacterium tumefaciens str. C58
  CDS (1)..(333): transl_table=11
atggaaaacagcgacattaccctttcggaagcagcagcgaagcgaatcgcgcagatcgtcgccgccgatgccggcaaacaggcgctgcgcgtctcagtggaaggcggcggctgctcgggcttctcctacaaattcgatctggccgaaaacccagctgatgacgacatcgtgatcgcccgcggcgacgccaaagtgctgatcgacagcatgtcggtcatctacatggccggctccgaaatcgacttcgtcgataatcttctgggccagtctttccagatcaagaacccgaatgcggtggcaagctgtggctgcggcacgagcttttcgatttga

SEQ ID NO: 32691 - protein, 110 aa, Agrobacterium tumefaciens str. C58
MENSDITLSEAAAKRIAQIVAADAGKQALRVSVEGGGCSGFSYKFDLAENPADDDIVIARGDAKVLIDSMSVIYMAGSEIDFVDNLLGQSFQIKNPNAVASCGCGTSFSI

SEQ ID NO: 32692 - DNA, 390 bp, Agrobacterium tumefaciens str. C58
  CDS (1)..(390): transl_table=11
atgggctttgcgatcatgaccatgaccggggctgccgcctcgcgtgttaaagcaatcgtcgataattccggtcccggtgccatgggcgtgcgtgtcggcatcaagaagggtggctgcgcgggcatggaatataccatcgacctcgtgaccgaagcggatgcgaaggacgatctggttgaattcgacggtgcgaaggtctgggttcagccctctgcggtgctttatctgctgggcacccagatggattttgaagtgaccaagatgcgctcgggtttcactttcaacaatccgaaccagacgtccgcttgtggctgcggtgaatcggttgagcttaagcctgccgatctggcggcgctggcgaagcaacgtgaggctgaggcaagcgtttaa

SEQ ID NO: 32693 - protein, 129 aa, Agrobacterium tumefaciens str. C58
MGFAIMTMTGAAASRVKAIVDNSGPGAMGVRVGIKKGGCAGMEYTIDLVTEADAKDDLVEFDGAKVWVQPSAVLYLLGTQMDFEVTKMRSGFTFNNPNQTSACGCGESVELKPADLAALAKQREAEASV

SEQ ID NO: 32694 - DNA, 393 bp, Drosophila melanogaster
  CDS (1)..(393)
atggcgacacgtgtggtggcaacggcgacagtgcgggcggtgaaaggccggaagttaatcccgacgcgggccgctctgactctgacacccgcggcggtgctacgcatcaagacgcttctgcaggacaagccggacatggttggcctaaaggtgggcgtacggcagcgaggatgcaatggtctgtcctacacgctggactatgccagccaaaaagacaagttggatgaggaggtggtccaggatggcgtcaaggtcttcatcgacaagaaagcgcagttgtcgctgctgggtaccgagatggactttgtggaatcgaagctgtccagcgagttcgtgtttaacaatccgaacattaagggcacatgcggctgcggcgaatcgttcagcatgtaa

SEQ ID NO: 32695 - protein, 130 aa, Drosophila melanogaster
MATRVVATATVRAVKGRKLIPTRAALTLTPAAVLRIKTLLQDKPDMVGLKVGVRQRGCNGLSYTLDYASQKDKLDEEVVQDGVKVFIDKKAQLSLLGTEMDFVESKLSSEFVFNNPNIKGTCGCGESFSM

SEQ ID NO: 32696 - DNA, 345 bp, Corynebacterium glutamicum ATCC 13032
  CDS (1)..(345): transl_table=11
atgaccgctccatcaaccaacaccggtgttatcttgaccgagtccgcagcgtccaaagctaaggcactcatcgatcaggaaggccgcgacgacctctctctgcgtatcgccgttcagcctggcggctgctctggccttcgttaccagctttacttcgacgaccgcacccttgatggcgataaggaagacatcgtcggtggcgttcgccttgtcgttgacaagatgagcaccccatacttgctcggcgctcagatcgacttcgctgacaccatcgagcagcagggcttcaccatcgacaacccaaacgcaggcagctcttgcgcttgtggtgactccttcaactaa

SEQ ID NO: 32697 - protein, 114 aa, Corynebacterium glutamicum ATCC 13032
MTAPSTNTGVILTESAASKAKALIDQEGRDDLSLRIAVQPGGCSGLRYQLYFDDRTLDGDKEDIVGGVRLVVDKMSTPYLLGAQIDFADTIEQQGFTIDNPNAGSSCACGDSFN

SEQ ID NO: 32698 - DNA, 357 bp, Streptomyces coelicolor A3(2)
  CDS (1)..(357): transl_table=11
atgtccgtatcggacgagaccaccaccgtcaccgacggcatcatcctgaccgacgccgccgcggccaaggtcaaggccctgctcgaccaggaaggccgtgacgacctggcgctgcgcgtcgccgtccagcccggcggctgctccggcctgcggtaccagctcttcttcgacgagcgttccctcgacggtgacgtggtcaaggacttcggtggcgtgaaggtcaccaccgaccgcatgagcgccccgtacctgggcggcgccaccgtcgacttcgtggacaccatcgagaagcagggcttcacgatcgacaacccgaacgcgaccggctcctgcgcctgcggcgactccttcagctga

SEQ ID NO: 32699 - protein, 118 aa, Streptomyces coelicolor A3(2)
MSVSDETTTVTDGIILTDAAAAKVKALLDQEGRDDLALRVAVQPGGCSGLRYQLFFDERSLDGDVVKDFGGVKVTTDRMSAPYLGGATVDFVDTIEKQGFTIDNPNATGSCACGDSFS

SEQ ID NO: 32700 - DNA, 321 bp, Methanosarcina mazei Go1
  CDS (1)..(321): transl_table=11
atgatcgaagtaacagaaaaagctgcagcagaactgaaagcactgctggaacaggaaggcaagcctgaccttgcgctcagaatctttgttgctggagtagcctgcagtggagtacagtatggactggccctcgacgaagaagttaaagaagacgacgtcaccatggaaagcaatggaataaagcttgtaatggcaaaagatatcgagagaaacttctctgaaggcagcattgattacatagaagacgaaaacggaaaaggtttccttatccgcaaccccaacgccggcggcggatgtggcacctgtggtggctgccattaa

SEQ ID NO: 32701 - protein, 106 aa, Methanosarcina mazei Go1
MIEVTEKAAAELKALLEQEGKPDLALRIFVAGVACSGVQYGLALDEEVKEDDVTMESNGIKLVMAKDIERNFSEGSIDYIEDENGKGFLIRNPNAGGGCGTCGGCH

SEQ ID NO: 32702 - DNA, 387 bp, Xanthomonas campestris pv. campestris str. ATCC 33913
  CDS (1)..(387): transl_table=11
atgagtacgctcgtttcgcttcccactgccgccccggcgccggactaccagtccatcgaccggcccctgaacttctccaatgccgccgccgccaaggtgcgcgagctgatccaggaggagggcaacgccgagctggcgttgcgtgtgtatatccagggtggcgggtgttccggcttccagtacggcttcgagttcgatgagaaccgcgccgaggatgacctggccgtggccaccgacggcgtcaccttgctggtggatccgttgagcctgcagtacctgatgggcgccgaggtggactacaccgaaagcctgaccggtgcgcagttcgtgatccgcaatcccaacgccaagaccacttgcggctgcggcagcagcttcagcgtctga

SEQ ID NO: 32703 - protein, 128 aa, Xanthomonas campestris pv. campestris str. ATCC 33913
MSTLVSLPTAAPAPDYQSIDRPLNFSNAAAAKVRELIQEEGNAELALRVYIQGGGCSGFQYGFEFDENRAEDDLAVATDGVTLLVDPLSLQYLMGAEVDYTESLTGAQFVIRNPNAKTTCGCGSSFSV

SEQ ID NO: 32704 - DNA, 387 bp, Xanthomonas axonopodis pv. citri str. 306
  CDS (1)..(387): transl_table=11
atgagtacgctcgtttcgcttcctactgccgccccggcgccggactaccagtccatcgaccggccactgaacttttccgtggccgctgccgccaaggtgcgcgagctgatccaggaagaaggcaatgccgacctggcattgcgcgtgtacatccagggcggagggtgttccggcttccagtacggcttcgagttcgacgagaaccgtgccgaggacgacctggccgtggccaccgatggcgtcacgctgctggtggatccgctgagcctgcaatacctgatgggcgccgaggtggattacaccgagagcctgaccggcgcgcagttcgtgatccgcaatccgaacgcaaaaaccacctgcgggtgcgggagcagcttcagcgtctga

SEQ ID NO: 32705 - protein, 128 aa, Xanthomonas axonopodis pv. citri str. 306
MSTLVSLPTAAPAPDYQSIDRPLNFSVAAAAKVRELIQEEGNADLALRVYIQGGGCSGFQYGFEFDENRAEDDLAVATDGVTLLVDPLSLQYLMGAEVDYTESLTGAQFVIRNPNAKTTCGCGSSFSV

SEQ ID NO: 32706 - DNA, 420 bp, Drosophila melanogaster
  CDS (1)..(420)
atggcgttcctactgcgacaagtggccaggagcggattgcaaagaaatctaatcctaatgcggcatgcaaccgcttccacatccgcgaatcccgaacttagtgtccaggtgagcgagagctgcttgaaacggctccgtgagatctgcgtggatggatctttcctgcgtgtgaccgtcgaaggaggcggatgctccggctttcagtacaaattcgatttggataagcagctgaacgaggatgaccgacagtttggcgaggctgaggccaaggtggtgatcgatacagtctcgctggagtactgcagcggcgccaccgtggactaccatagcgaactaatacgcgccggtttccggatggtggccaatccgctggcggaacagggctgctcctgcggctcctccttctcaatcaaattgtaa

SEQ ID NO: 32707 - protein, 139 aa, Drosophila melanogaster
MAFLLRQVARSGLQRNLILMRHATASTSANPELSVQVSESCLKRLREICVDGSFLRVTVEGGGCSGFQYKFDLDKQLNEDDRQFGEAEAKVVIDTVSLEYCSGATVDYHSELIRAGFRMVANPLAEQGCSCGSSFSIKL

SEQ ID NO: 32708 - DNA, 357 bp, Thermosynechococcus elongatus BP-1
  CDS (1)..(357): transl_table=11
gtgatgacccaggccacacaacccgccaagggaatcatgatgaccgaagctgccctcaagcatttgctcgagctccgcgataagcacggcaaagacctgtgtttgcgggtgggcgtcaaggggggtggctgtgcagggatgtcctacaccatggactttgaagaccccgctaatatccgtcccgatgatgaagtctttgactatgacggcttcaaggtggtctccgatcccaagagtatgctctacatttatggcttggttctggactacagcaacgccctgattggtggcggctttaagtttacgaatcccaatgctacccaaacctgtggctgtggtacctcattttctgcctaa

SEQ ID NO: 32709 - protein, 118 aa, Thermosynechococcus elongatus BP-1
MMTQATQPAKGIMMTEAALKHLLELRDKHGKDLCLRVGVKGGGCAGMSYTMDFEDPANIRPDDEVFDYDGFKVVSDPKSMLYIYGLVLDYSNALIGGGFKFTNPNATQTCGCGTSFSA

SEQ ID NO: 32710 - DNA, 369 bp, Shigella flexneri 2a str. 301
  CDS (1)..(369): transl_table=11
atggacatgcattcaggaacctttaacccacaggatttcgcctggcaaggcttaacgctgacacccgcagcggcgatacacatccgcgagctggtggcaaagcagccaggtatggtcggcgtgcgcttaggtgtgaagcaaacgggctgcgcgggctttggctatgtgctcgacagtgttagcgagccggacaaagacgatctgctgtttgaacacgacggcgcgaagctgtttgtcccgctgcaatcgatgccgtttattgatggcacggaagtcgatttcgttcgtgaaggacttaatcagatattcaaatttcacaaccctaaagcccagaatgaatgtggctgtggcgaaagctttagggtatag

SEQ ID NO: 32711 - protein, 122 aa, Shigella flexneri 2a str. 301
MDMHSGTFNPQDFAWQGLTLTPAAAIHIRELVAKQPGMVGVRLGVKQTGCAGFGYVLDSVSEPDKDDLLFEHDGAKLFVPLQSMPFIDGTEVDFVREGLNQIFKFHNPKAQNECGCGESFRV

SEQ ID NO: 32712 - DNA, 327 bp, Shewanella oneidensis MR-1
  CDS (1)..(327): transl_table=11
atgccaattaaatttaccgatgcggcagccgctaaggtaaaaggcttgttggaagaagagcaaaatcctgcacttaagctacgcgtgtatgtaactggcggtggttgttctggatttcagtacggctttacctttgatgaaaaggtcaacgaaggcgacttcaccgttgagaaacaaggcgtccaattggtcgtcgatcccatgagcttacaatatttagttggcggtgaagtggattacacttctggcctcgaaggttcgcgtttctttgtgaaaaatcccaatgcgacaaccacctgtggttgtggtgccagcttctcagtataa

SEQ ID NO: 32713 - protein, 108 aa, Shewanella oneidensis MR-1
MPIKFTDAAAAKVKGLLEEEQNPALKLRVYVTGGGCSGFQYGFTFDEKVNEGDFTVEKQGVQLVVDPMSLQYLVGGEVDYTSGLEGSRFFVKNPNATTTCGCGASFSV

SEQ ID NO: 32714 - DNA, 399 bp, Pseudomonas putida KT2440
  CDS (1)..(399): transl_table=11
atgcgcgtcatcgagttttatggcggctaccgcgccgggagaatcaacatgagcgtcgaaaccttcacccctaccggtctggagttcacccatggggcagcccagaaggtgaaaaacctggtcaatgaggaaggcaatgaacgtctgaaactgcgggtgttcgtgaccggtggtggttgctcgggcttccagtatggcttcaccttcgatgaagacgtggccgaagatgacaccattgtcgagcgcgagggcgtttccctggtggtcgacccgatgagcttccagtacctggcgggtgccgaagtggactaccaggaaggcctggaaggctcgcgcttcgtgatcaagaacccgaatgccgcgaccacctgcggttgcgggtcgtcgttctcgatctaa

SEQ ID NO: 32715 - protein, 132 aa, Pseudomonas putida KT2440
MRVIEFYGGYRAGRINMSVETFTPTGLEFTHGAAQKVKNLVNEEGNERLKLRVFVTGGGCSGFQYGFTFDEDVAEDDTIVEREGVSLVVDPMSFQYLAGAEVDYQEGLEGSRFVIKNPNAATTCGCGSSFSI

SEQ ID NO: 32716 - DNA, 324 bp, Pseudomonas putida KT2440
  CDS (1)..(324): transl_table=11
atggctatcagcatgacagaagccgccgccaaccacattcgccgctccctcgacgggcgcggcaaaggtgagggcattcgcctgggcgtgcgcaccaccggttgctcgggtctggcctacgtgctggaattcgtcgacgaactggcggacgaagaccaggtgttcgaaaaccatggcgtcaaggtgatcatcgatcccaagagcctggtctacctcgatggcaccgaactggatttcgtcaaggaagggttgaacgaaggcttcaagttcaacaaccccaacgtgcgcggtgagtgtggctgcggcgaaagcttcaacgtttga

SEQ ID NO: 32717 - protein, 107 aa, Pseudomonas putida KT2440
MAISMTEAAANHIRRSLDGRGKGEGIRLGVRTTGCSGLAYVLEFVDELADEDQVFENHGVKVIIDPKSLVYLDGTELDFVKEGLNEGFKFNNPNVRGECGCGESFNV

SEQ ID NO: 32718 - DNA, 330 bp, Bradyrhizobium japonicum USDA 110
  CDS (1)..(330): transl_table=11
atgacgactgccgtgaccatcagtgaccgggccgcacgccggattggggagatcctcaagggcgaagggtcaggcgcgatgctgcgcatctcggtcgagggcggcggctgttccggctttcagtacaagttcgacatcgaccgcgaccgcaccgacgacgatctcgtgatcgagcaggacaatgcggtggtgctggtcgattccgcctcccagcctttcctggcgggatcgcaggtcgatttcgtggacgacctgatcggcgcctcgttccgcgtcaacaatcccaacgcgacggcgtcctgcggctgcgggaccagcttctcgatctga

SEQ ID NO: 32719 - protein, 109 aa, Bradyrhizobium japonicum USDA 110
MTTAVTISDRAARRIGEILKGEGSGAMLRISVEGGGCSGFQYKFDIDRDRTDDDLVIEQDNAVVLVDSASQPFLAGSQVDFVDDLIGASFRVNNPNATASCGCGTSFSI

SEQ ID NO: 32720 - DNA, 375 bp, Tropheryma whipplei str. Twist
  CDS (1)..(375): transl_table=11
ttggcggtgagtgatttgaccaacggttcattgactgacacccccccctcccatggagtgcatttgacagatgtcgctgtgaacaaggtcaagcagtttctagagcaggaacagcgcgacgacctgcgactcagaatagctgttcagcccggggggtgctctggcctcagatatcagctgtattttgatgagagactcttagagggtgattgcgtaaaagattttgatggagttgcgctggttgttgatgacatgagcgttccgtatctcgatggtgcaacgattgattttcacgacacaattagcaagcagggttttacaatcgataaccctaatgccaagggtatgtgtgcctgtggtgacagttttaactag

SEQ ID NO: 32721 - protein, 124 aa, Tropheryma whipplei str. Twist
MAVSDLTNGSLTDTPPSHGVHLTDVAVNKVKQFLEQEQRDDLRLRIAVQPGGCSGLRYQLYFDERLLEGDCVKDFDGVALVVDDMSVPYLDGATIDFHDTISKQGFTIDNPNAKGMCACGDSFN

SEQ ID NO: 32722 - DNA, 324 bp, Pseudomonas syringae pv. tomato str. DC3000
  CDS (1)..(324): transl_table=11
atggctatcagcatgacagaagctgccgctaaccacgtacgccgttccctcgacgggcgcggcaagggtgatggcgttcgtctgggtgttcgcaccacaggctgttcaggtctcgcctatgtgctcgagttcgtcgatgaagcggccagcgaagacaccgtatttgaactgcacggtgtcaaggtgatcatcgacccgaaaagcctggtctatctggatggcaccgagctcgatttcgtgcgtgaagggttgaacgaaggcttcaagttcaacaaccccaattcgcgcggtgagtgcggctgtggcgaaagcttcaacgtctga

SEQ ID NO: 32723 - protein, 107 aa, Pseudomonas syringae pv. tomato str. DC3000
MAISMTEAAANHVRRSLDGRGKGDGVRLGVRTTGCSGLAYVLEFVDEAASEDTVFELHGVKVIIDPKSLVYLDGTELDFVREGLNEGFKFNNPNSRGECGCGESFNV

SEQ ID NO: 32724 - DNA, 342 bp, Vibrio parahaemolyticus RIMD 2210633
  CDS (1)..(342): transl_table=11
gtgagcgaagtaaacgtaccattatctttttctgatgctgcagcatctcgcgttaaggcactgattgcagaagaagaaaacccagcattgaaattgcgcgtatacattactggtggcggttgtagcggcttccaatacggctttactttcgatgagaacgtaaatgacggtgatacaaccatcgaaaacagtggcgtaacactggttgttgacccgatgagcctgcaatacctgattggtggcattgtggattacaccgaagggttggaaggcgctcgcttcttcgttaacaatccgaatgcaacaaccacatgtggttgtggtgcatcatttagcgtgtaa

SEQ ID NO: 32725 - protein, 113 aa, Vibrio parahaemolyticus RIMD 2210633
MSEVNVPLSFSDAAASRVKALIAEEENPALKLRVYITGGGCSGFQYGFTFDENVNDGDTTIENSGVTLVVDPMSLQYLIGGIVDYTEGLEGARFFVNNPNATTTCGCGASFSV

SEQ ID NO: 32726 - DNA, 420 bp, Coxiella burnetii RSA 493
  CDS (1)..(420): transl_table=11
atggataatttactgatgaatgcactggcgcaaaaaacaccgtctccaccgaccttagtatttaccgaggcagccgtccgtaaggtgaagggcttaatcgacgaagaaaacaacccttacttgaatttacgagttttcatcaccggcggcgggtgttcaggcttccaatacgggtttaccttcgatgaagctatcaattccgacgatctcgtcatcgaaaagcaattggaagaagaagatgacgatgaagggggcacgggccagatggccttagtaaaattactggtggaccctttgagtcttcaataccttcaaggggccgaaattgattaccgcgaagatgtcagcggcgctcaattcgtcatccgcaacccaaacgccaaaaccacctgcggctgcggttcctccttcgccgcctga

SEQ ID NO: 32727 - protein, 139 aa, Coxiella burnetii RSA 493
MDNLLMNALAQKTPSPPTLVFTEAAVRKVKGLIDEENNPYLNLRVFITGGGCSGFQYGFTFDEAINSDDLVIEKQLEEEDDDEGGTGQMALVKLLVDPLSLQYLQGAEIDYREDVSGAQFVIRNPNAKTTCGCGSSFAA

SEQ ID NO: 32728 - DNA, 366 bp, Nitrosomonas europaea ATCC 19718
  CDS (1)..(366): transl_table=11
atgggtacaacgatccatgaagaaacaagtgcagctcaacctccattgaattttaccgatggtgctgccagcaaagtaaaagaactgattgaagaagaggataatcaggcgctcaaattaagggttttcgtcagtggtggcggctgctccgggttccaatacggctttaccttcgatgagatcgtcaacgaagatgatttcgtgatggaaaagcagggagtgaaactattggtcgattcgatgagctttcagtacctggtaggcgcagaaatcgactatcaggaaagtgcccaaggcgcacagttcgttatcaaaaatccatccgcagccagcacatgcggatgcggctcttccttctcggtctga

SEQ ID NO: 32729 - protein, 121 aa, Nitrosomonas europaea ATCC 19718
MGTTIHEETSAAQPPLNFTDGAASKVKELIEEEDNQALKLRVFVSGGGCSGFQYGFTFDEIVNEDDFVMEKQGVKLLVDSMSFQYLVGAEIDYQESAQGAQFVIKNPSAASTCGCGSSFSV

SEQ ID NO: 32730 - DNA, 333 bp, Rhodopirellula baltica SH 1
  CDS (1)..(333): transl_table=11
atggcaatcaaattgactgagcgcgcggccgaagaagtcatgcgttttcgcaaggaacacaacttcgacgattcgatgctattgcggattggtgtcgccggcggtggctgcagcggattcaactacacgttgaacttcgacgacagcttcgacatgaaggctgattcaaagtatgactgccacggtgtcagcgtcgtggtcgacaagaagagctcgctctacctcgacggcaccgaagtcgactggtacgacagcctcgaaaaacaaggcttcacgttcaacaacccgaacgctgtgaaaagctgcggttgcggaagctcgttccaagcgtag

SEQ ID NO: 32731 - protein, 110 aa, Rhodopirellula baltica SH 1
MAIKLTERAAEEVMRFRKEHNFDDSMLLRIGVAGGGCSGFNYTLNFDDSFDMKADSKYDCHGVSVVVDKKSSLYLDGTEVDWYDSLEKQGFTFNNPNAVKSCGCGSSFQA

SEQ ID NO: 32732 - DNA, 345 bp, Wigglesworthia glossinidia endosymbiont of Glossina brevipalpis
  CDS (1)..(345): transl_table=11
atggaaaataataaattatttaatttaaaattaacagatttagcaaaaaataaaataaaaaacctgctaaaagaagagaaaaataaaaataaaaaattcagaatatatatttcaggaggaggatgcaacggatttcagtacaattttatattagatgaaaaaataaataaagaagatcatttgattttatttttagacgtagaaattgtaattgattcaattagcttgcaatatttaataggaggagtggttgattataaagaagaattattagaatcttgtttttttgtgatcaatcctaatgcaaaaactacatgtagctgtggtacatcatttagtatataa

SEQ ID NO: 32733 - protein, 114 aa, Wigglesworthia glossinidia endosymbiont of Glossina brevipalpis
MENNKLFNLKLTDLAKNKIKNLLKEEKNKNKKFRIYISGGGCNGFQYNFILDEKINKEDHLILFLDVEIVIDSISLQYLIGGVVDYKEELLESCFFVINPNAKTTCSCGTSFSI

SEQ ID NO: 32734 - DNA, 396 bp, Prochlorococcus marinus subsp. marinus str. CCMP1375
  CDS (1)..(396): transl_table=11
atgagtggttcttccttgccaaataccgaaactcatacagcaaatgatggcaaaggtattttaattacccaagctgcaatggttcagttggcgcgactttgccaagaaaaagggtctgaccagttgcttcgtgttggagtccgttcaggtggatgtagtgggatgagttacacgatggattttgtaaattcagatgctatagagcaagaggacgaagtttatgaatatcaaccatttgatggaactgcatttcgagtgatttgtgatcccaaaagtcttttatatatttatggaatgcaattagatttcagtaatgaattaataggtggtgggtttaatttcactaacccaaatgccacacaaacttgtgggtgtggtagctctttcgcagtttag

SEQ ID NO: 32735 - protein, 131 aa, Prochlorococcus marinus subsp. marinus str. CCMP1375
MSGSSLPNTETHTANDGKGILITQAAMVQLARLCQEKGSDQLLRVGVRSGGCSGMSYTMDFVNSDAIEQEDEVYEYQPFDGTAFRVICDPKSLLYIYGMQLDFSNELIGGGFNFTNPNATQTCGCGSSFAV

SEQ ID NO: 32736 - DNA, 360 bp, Candidatus Blochmannia floridanus
  CDS (1)..(360): transl_table=11
atgagtaatgataaaaaaaatgcttttcctataaaattaactcattctgctgctgatcaagtgaaaaagctcataagcagtcaagattatgctgaaaaattggatttaaaattgcgtgtgtatatattaggaggaggatgtggagggtttcaatataaatttattttagatgatcaggtttcgaatgatgattgtgttattgaaagtaatggagctattgtagtggtagaccctatgagcttacagtatttatttggaggaataattgattattatgaaggtttagaaggatctaaatttttggtagttaatcctaatgctaaaggggtatgtagttgtggatcatcatttaatatttaa

SEQ ID NO: 32737 - protein, 119 aa, Candidatus Blochmannia floridanus
MSNDKKNAFPIKLTHSAADQVKKLISSQDYAEKLDLKLRVYILGGGCGGFQYKFILDDQVSNDDCVIESNGAIVVVDPMSLQYLFGGIIDYYEGLEGSKFLVVNPNAKGVCSCGSSFNI

SEQ ID NO: 32738 - DNA, 372 bp, Bordetella pertussis Tohama I
  CDS (1)..(372): transl_table=11
atgaatgctgttaccgaaaccgtcgatctgcaggctccgccgcccgtgccgctggtcttcaccgactcggcggccgccaaggtcaaggatctgttggccgaagagggcaaccccgaactgaagctgcgcgtgttcgtgcaaggcggcggctgttccggcttccagtacggcttcacgttcgatgaagtggtcaacgacgacgacaccgtgctcgacaaggcaggcgtgcagctgctggtcgacccgatgagcttccagtacctggtcggcgccgagatcgactacaaggaagacctcgaaggcgcgcagttcgtcattcgcaatcccaacgcgtccaccacctgcggctgcggttcgtcgttctcggtgtaa

SEQ ID NO: 32739 - protein, 123 aa, Bordetella pertussis Tohama I
MNAVTETVDLQAPPPVPLVFTDSAAAKVKDLLAEEGNPELKLRVFVQGGGCSGFQYGFTFDEVVNDDDTVLDKAGVQLLVDPMSFQYLVGAEIDYKEDLEGAQFVIRNPNASTTCGCGSSFSV

SEQ ID NO: 32740 - DNA, 354 bp, Chromobacterium violaceum ATCC 12472
  CDS (1)..(354): transl_table=11
atgacagaagctgctaccgaaatgccgagcccgatcaacttcaccgagagcgcttgcgccaaggtgcaggatctgatcgcggaagagggcaatcccgacctgaaactgcgcgtgttcgtcaccggcggcggctgttccggcttccagtacggtttcacgttcgatgaaatcgccaacgaggacgataccgctatcgagcgccagggcgtcaccttcctggtcgatccgatgagctaccaatacctggtcggcgccgagatcgactaccaggaaagcctggaaggctcccagttcgtgatccgcaacccgaacgccaccaccacttgcggttgtggttcttcgttctcggtgtga

SEQ ID NO: 32741 - protein, 117 aa, Chromobacterium violaceum ATCC 12472
MTEAATEMPSPINFTESACAKVQDLIAEEGNPDLKLRVFVTGGGCSGFQYGFTFDEIANEDDTAIERQGVTFLVDPMSYQYLVGAEIDYQESLEGSQFVIRNPNATTTCGCGSSFSV

SEQ ID NO: 32742 - DNA, 375 bp, Gloeobacter violaceus PCC 7421
  CDS (1)..(375): transl_table=11
atgaccaccagcatcgacaccgctccggcccgtcgccttccgcgccgaggcatccagatgaccgaaagcgccctcgccgaggtgatgcgcctgcgcgagcgccgcggcggcgatctgatgctgcgcgtcggcgtcaaaggcggcggttgctcgggcctcagctacacgatggacttcgaagaagaatccaacgtcaccgcccacgacgaggtcttcgaccacagcggctttaaagtcgtctccgacaaaaagagtctgctgtttctctacgggctggtgctcgactacagcgacgaattgttgggcggcggcttcaagttcaacaaccccaacgccgagcgctcctgctcctgcggcagttccttctcggcctag

SEQ ID NO: 32743 - protein, 124 aa, Gloeobacter violaceus PCC 7421
MTTSIDTAPARRLPRRGIQMTESALAEVMRLRERRGGDLMLRVGVKGGGCSGLSYTMDFEEESNVTAHDEVFDHSGFKVVSDKKSLLFLYGLVLDYSDELLGGGFKFNNPNAERSCSCGSSFSA

SEQ ID NO: 32744 - DNA, 348 bp, Photorhabdus luminescens subsp. laumondii TTO1
  CDS (1)..(348): transl_table=11
atgatgagcgatgatatcgtattacctttgcagtttacggatgccgcggctaacaaagtgaaaatcttggtttcggatgaagaaaacccaaacttgcgtttacgggtttatatcaccggtggcggatgcagtggctttcagtatggttttacctttgatgatcaaataaatgaaggtgatatgaccattgagaaacagggtgtggagttggttgttgatccgatgagcctacaatatttagttggcggttgtgttgattataccgaaggtctggaaggttcacgttttatcgtcaccaaccctaatgcgaagacaacctgtggttgtggttcttctttcagtatctga

SEQ ID NO: 32745 - protein, 115 aa, Photorhabdus luminescens subsp. laumondii TTO1
MMSDDIVLPLQFTDAAANKVKILVSDEENPNLRLRVYITGGGCSGFQYGFTFDDQINEGDMTIEKQGVELVVDPMSLQYLVGGCVDYTEGLEGSRFIVTNPNAKTTCGCGSSFSI

SEQ ID NO: 32746 - DNA, 324 bp, Vibrio vulnificus YJ016
  CDS (1)..(324): transl_table=11
atggccgttacattaacagattccgcagcaaatcgagtaagagcgttcctagataaccgaggcaaaggcattggtttacgtttaggtgtgaagacgactggttgttcgggtatggcctatgtccttgagtttgttgacgaactgaatgaagaagacgaagtgtttgaacattcaggcgttaaggtgattatcgataaaaagagcttggtgtacctcgacggcacgcaacttgactacgtaaaagaagggttgaatgaaggctttgaattcaacaacccaaatgcgaaaagtgaatgtggttgcggtgaaagcttcaacgtctaa

SEQ ID NO: 32747 - protein, 107 aa, Vibrio vulnificus YJ016
MAVTLTDSAANRVRAFLDNRGKGIGLRLGVKTTGCSGMAYVLEFVDELNEEDEVFEHSGVKVIIDKKSLVYLDGTQLDYVKEGLNEGFEFNNPNAKSECGCGESFNV

SEQ ID NO: 32748 - DNA, 378 bp, Vibrio vulnificus YJ016
  CDS (1)..(378): transl_table=11
ttgtctggcgggaatacacgagtgagagaggtcgtcgtgagcgatattaatctaccattatcattttctgatgcagcagcaacacgagttaagatgttgattgctgaggaagaaaacccagcgcttaaattgcgtgtttacattactggcggtggttgtagcggcttccagtacggttttacttttgatgaaagcgtcaatgaaggcgataccactatcgaaaacagtggtgttacgttagttgttgacccaatgagtctgcagtatttaattggcggcgttgtcgattacacagaagggttggaaggctcacgctttttcgtcaacaacccaaatgcaacaaccacgtgtggttgtggtgcatcattcagcgtgtaa

SEQ ID NO: 32749 - protein, 125 aa, Vibrio vulnificus YJ016
MSGGNTRVREVVVSDINLPLSFSDAAATRVKMLIAEEENPALKLRVYITGGGCSGFQYGFTFDESVNEGDTTIENSGVTLVVDPMSLQYLIGGVVDYTEGLEGSRFFVNNPNATTTCGCGASFSV

SEQ ID NO: 32750 - DNA, 333 bp, Rhodopseudomonas palustris CGA009
  CDS (1)..(333): transl_table=11
atgacggaatcgagcgtcaccatcagcgaacgcgcggcgcgccggattggcgaaatcctcaagggcgaaggccaaggtgcgatgctgcggatcagcgtcgaaggcggcggttgctccggctttcagtacaaattcgacgtcgaccgcaccaagaccgacgacgatctggtgatcgccaaggaaggcgcggtggtgctggtcgattccgcctcggtgccgttcctcgccggctcggaagtcgacttcgtcgacgacctgatcggcgcctcgttccgggtcaacaacccgaacgcaaccgcctcctgcggctgcggcaccagcttctcgatctga

SEQ ID NO: 32751 - protein, 110 aa, Rhodopseudomonas palustris CGA009
MTESSVTISERAARRIGEILKGEGQGAMLRISVEGGGCSGFQYKFDVDRTKTDDDLVIAKEGAVVLVDSASVPFLAGSEVDFVDDLIGASFRVNNPNATASCGCGTSFSI

SEQ ID NO: 32752 - DNA, 462 bp, Wolbachia endosymbiont of Drosophila melanogaster
  CDS (1)..(462): transl_table=11
atgtcaacaaattacaacatcaacttaactgataatgcactaaaaaaaatccactctcttgcagagcaggaaggggataagagttccattttacgggttgcagtttcaggtggtggatgttctggcttcaaatacaattttcttatggatcaaatgaataaaaatctacctttggatgatgaagacgatgattacgatgatgagtttgatgacgaagacgaagatgatgactatgaagaaagtgaggactatagaagccactccagttttagcgaaaaaggtaaagatatagtaattaatgatgaaaatggaaaccctgtattaatggttgataattgttcagcaaaatttttaaataactcagttatagattatactgaggatctcagtggttctggttttcaaataaagaatgcctttgctaagtctcaatgtggttgtggtaacagtttttcggtttaa

SEQ ID NO: 32753 - protein, 153 aa, Wolbachia endosymbiont of Drosophila melanogaster
MSTNYNINLTDNALKKIHSLAEQEGDKSSILRVAVSGGGCSGFKYNFLMDQMNKNLPLDDEDDDYDDEFDDEDEDDDYEESEDYRSHSSFSEKGKDIVINDENGNPVLMVDNCSAKFLNNSVIDYTEDLSGSGFQIKNAFAKSQCGCGNSFSV

SEQ ID NO: 32754 - DNA, 414 bp, Bdellovibrio bacteriovorus HD100
  CDS (1)..(414): transl_table=11
ttgaacaatctccccggagggtctatccggggctccccagcccttgacagctgtgttatactggctgcgacgttaaaggagctttctatgatcactatttcacctgaagcagcaactaaactggcttccctaaaaaaagatgaaggaaaagacgacgcggcttttctgcgcgttgaggtgaaaaaaggcggctgttcaggcctgtcttacaaaatggatttcgataccgtgactcgtgacggagacaagttctttgaatcccagggccaaaaagtggccgtggactctcaaagcatgctctatctgctgggtatgaccctggaatactccggcggcttgaatggtaaagggtttgtgttcaacaacccgaacgccaacaaacactgcggctgcggttccagcttcaacgtttag

SEQ ID NO: 32755 - protein, 137 aa, Bdellovibrio bacteriovorus HD100
MNNLPGGSIRGSPALDSCVILAATLKELSMITISPEAATKLASLKKDEGKDDAAFLRVEVKKGGCSGLSYKMDFDTVTRDGDKFFESQGQKVAVDSQSMLYLLGMTLEYSGGLNGKGFVFNNPNANKHCGCGSSFNV

SEQ ID NO: 32756 - DNA, 360 bp, Yersinia pestis biovar Microtus str. 91001
  CDS (1)..(360): transl_table=11
ttgggagtgatgaggatgagcaacgaaacagtactgcccctacagtttaccgaggcggcggcaaagaaagttaaactactgatttctgatgaggaaaacccgaatctgaaactgcgtgtttacattaccggtggtggatgtagcgggttccaatatggttttacttttgatgatcaggttaatgatggtgatatgaccattgaaaaacaaggtgttgagctggttgttgacccaatgagcctgcaatatttagtgggcggtgccgtggattatactgaagggctggaaggttctcgttttatcgtgactaacccgaatgcaaagagtacttgtgggtgtggttcttctttcagtatctaa

SEQ ID NO: 32757 - protein, 119 aa, Yersinia pestis biovar Microtus str. 91001
MGVMRMSNETVLPLQFTEAAAKKVKLLISDEENPNLKLRVYITGGGCSGFQYGFTFDDQVNDGDMTIEKQGVELVVDPMSLQYLVGGAVDYTEGLEGSRFIVTNPNAKSTCGCGSSFSI

SEQ ID NO: 32758 - DNA, 474 bp, Apis mellifera
  CDS (1)..(474)
atggcgaaattgaaacatgcgatttgggacgtttcttctaattttgttgcaaatagatatttttcacgtttattaacttctcagtggtataatacgtctacagtctcgttattaaataatacgttaatagattctacagtgaaagataaaaacgatatcatcattacagatagttgcgttaaacgtttaaaggaaattacagatgataatgcttatttaagagttacagtggaaggtggaggctgttctggttttcaatataaatttgatttagatacaaatataaatgaaaatgataaagtgtttcaaaaggatggtgcaaaagttgttatagattcaacatctttggaatatattaaaggatcgacaatagaatttcatacagaactgatacgatctgcatttagaataactaataatcctttagctgaacaaggttgtagttgtggtgctagtttttctattaaaatataa

SEQ ID NO: 32759 - protein, 157 aa, Apis mellifera
MAKLKHAIWDVSSNFVANRYFSRLLTSQWYNTSTVSLLNNTLIDSTVKDKNDIIITDSCVKRLKEITDDNAYLRVTVEGGGCSGFQYKFDLDTNINENDKVFQKDGAKVVIDSTSLEYIKGSTIEFHTELIRSAFRITNNPLAEQGCSCGASFSIKI

SEQ ID NO: 32760 - DNA, 390 bp, Strongylocentrotus purpuratus
  CDS (1)..(390)
atggctgcgcttggaagagctacggttcgagccgttcaaggcaaaaagaggttaattcctcaaagggctgcattagttttgactcaagcagctgttgagaagataaagacacttgttatcaataaatcagaagtagaaggactaagggtcggagtgaagacgagagggtgcaatggactcagttacacactagactatgccaaggagaaacagaagtttgatgaggaggtcgttcaagatggggtgaaaatcttcattgactctaaagcacaactgacgctgcttggaacggaaatggactttgtaaataccaagctgtccagcgaatttgtcttcaacaatcccaacatcaaaggaacgtgtgggtgtggagaaagcttcaatgtatag

SEQ ID NO: 32761 - protein, 129 aa, Strongylocentrotus purpuratus
MAALGRATVRAVQGKKRLIPQRAALVLTQAAVEKIKTLVINKSEVEGLRVGVKTRGCNGLSYTLDYAKEKQKFDEEVVQDGVKIFIDSKAQLTLLGTEMDFVNTKLSSEFVFNNPNIKGTCGCGESFNV

SEQ ID NO: 32762 - DNA, 495 bp, Nasonia vitripennis
  CDS (1)..(495)
atgtcaatttacttcggcatggcgaagttaacgcgttccgtctggggactctcttctaatttctcctcgaatcagtacttctcacgacttttggcaacaccatggatccctgcctctgacttgagattgcgaaattcgtctaccaaagtagccagcagtgcttgcgaagacgaaatcctaataagcgatagctgtgtaaagcgtttaaaagaaataacggaggaaggtagctgtttaagagtaacagttgaaggtggaggctgttctggcttccaatacaaattcaatttggattccagcataaataaagatgacaaagttttccagaaagatggagctaaaatagtgatagattctacatctctagaatatattaaaggatccacaatagagtatcatacagaattaatacgctctgcattcagaataacagacaaccctttagcagaacaaggatgtagctgtggagctagtttcgccattaaagttgactga

SEQ ID NO: 32763 - protein, 164 aa, Nasonia vitripennis
MSIYFGMAKLTRSVWGLSSNFSSNQYFSRLLATPWIPASDLRLRNSSTKVASSACEDEILISDSCVKRLKEITEEGSCLRVTVEGGGCSGFQYKFNLDSSINKDDKVFQKDGAKIVIDSTSLEYIKGSTIEYHTELIRSAFRITDNPLAEQGCSCGASFAIKVD

SEQ ID NO: 32764 - DNA, 393 bp, Nasonia vitripennis
  CDS (1)..(393)
atggcgtcacgcatagcagccagtgcaacggtgcgcgcagtaaaaggaagaaagattctcccgactagggctgcattagttttgacgagcaacgccgtgaataaaatcaaagaaatactgaaggataagcctgaatacattggcctgaaagttggcgtccgacaaagaggctgtaatgggctcagctacacgctcgattacgctaccgacaaaagcaagctcgacgaagaagtcgtccaggacggagtgcgcgttataatcgacagaaaagcgcaattgtccctgctgggcaccgaaatggattacatagaaaataaattgagttccgagttcgtgttcaacaacccaaatataaaggggacgtgtggatgtggcgaaagctttagcgtgtag

SEQ ID NO: 32765 - protein, 130 aa, Nasonia vitripennis
MASRIAASATVRAVKGRKILPTRAALVLTSNAVNKIKEILKDKPEYIGLKVGVRQRGCNGLSYTLDYATDKSKLDEEVVQDGVRVIIDRKAQLSLLGTEMDYIENKLSSEFVFNNPNIKGTCGCGESFSV

SEQ ID NO: 32766 - DNA, 720 bp, Anopheles gambiae str. PEST
  CDS (82)..(474)
ataaaatagtcatctccacgcatctctcgctacagaacagcacccgggaaagggcgagggcagtaaatttccagtgaaacaatggcctccaagattgtggccaccgccaccgtgcgtgccgtgaagcatcggaagctgctgccgatgagagcagcactgtcgctgacaccggcagcagtaaacaggataaagcaacttcttgaaggcaaaaacgaatttatcggtctcaaggttggtgtacgacagaggggatgcaacggattgtcctacacgctggattacgctgcaacgaaagataaaatggacgaggaagtagtgcaggacggtgtgaaagtactgatcgacaaaaaggcacaactgtcccttttaggcacggaaatggattacgttgaaacggacctgtcggcggaatttgtcttcaacaatcccaacatcaagggcacgtgcggctgtggcgaatcgttcagcatctaacgaggcagagcagcaaacacgaaacacttttagacgtactgtaagttgcttcgcgatagaaaaatgggatcgctcccttccttctcgggacgacggtcccgctactttctcgtggcttgttgttttagatttgtaaaatctagcgttgaacaaagagagaatcaccttgtcctgtacataacataatttagcttgttagtagcgttattttgagtgtaataaattagccgtgttgagtacctaaaa

SEQ ID NO: 32767 - protein, 130 aa, Anopheles gambiae str. PEST
MASKIVATATVRAVKHRKLLPMRAALSLTPAAVNRIKQLLEGKNEFIGLKVGVRQRGCNGLSYTLDYAATKDKMDEEVVQDGVKVLIDKKAQLSLLGTEMDYVETDLSAEFVFNNPNIKGTCGCGESFSI

SEQ ID NO: 32768 - DNA, 840 bp, Magnaporthe grisea 70-15
  CDS (1)..(840)
atgtcggcaacttccgtaaaaacaatgactagagtcaatacctgcccaaactcggtctcggccgcaaggctgttcctccaggtcgccgcacagaggacctcgccgccgcgcttcttcgacattttgctgccggcttcgaccatccgctactttgccactaccaacaacacggccgcgacgcgccggcaatggggagccgggatcgtcccgatagcaccgcagcagcagccccgcggcttcagtccccggagaagacagccgcagcagcaccttccgccggcgccaccgcccaccccgacgctcgagggtatcctgccgctggtggccggccggcgccagtattttgcctcggcggcggcccgggcctgtgagacaaggacactgcacaacccgcagatggacgaggatgggaacgagatgaggctggagataacgccccgagcggcaaagcgtctatccgaaatcatgaccaaggacaaaaacccccagctcgccctgcgcatccaggtcgagagcggcggctgccacggcttccagtacctgatgcggcttgtcaccctgcctccgaccctgccgactgcagcagccgcagaaccttcgtccgatggggagcaacaaccagtcgttggggaggacgataccatattctactatgcccaggacgcggccgaccctcttgccgaacccaagatcatcctggatcagccgtcgttggaactgctcaagggtagcaaggtcgacttcactatggagctgatagggtctcagttcaaaattgtagacaatcctctagcgacgagcagctgtggttgcggcaccagctttgacgtcaagatatag

SEQ ID NO: 32769 - protein, 279 aa, Magnaporthe grisea 70-15
MSATSVKTMTRVNTCPNSVSAARLFLQVAAQRTSPPRFFDILLPASTIRYFATTNNTAATRRQWGAGIVPIAPQQQPRGFSPRRRQPQQHLPPAPPPTPTLEGILPLVAGRRQYFASAAARACETRTLHNPQMDEDGNEMRLEITPRAAKRLSEIMTKDKNPQLALRIQVESGGCHGFQYLMRLVTLPPTLPTAAAAEPSSDGEQQPVVGEDDTIFYYAQDAADPLAEPKIILDQPSLELLKGSKVDFTMELIGSQFKIVDNPLATSSCGCGTSFDVKI

SEQ ID NO: 32770 - DNA, 714 bp, Gibberella zeae PH-1
  CDS (1)..(714)
atggctcgagttcactgcgctaatgcgcaatccaccgtcaattcctttatgcaacttgcaagacgaagctacacgaccgccactgctcaatcctcagcacccctcgagtttcttgtcccgagatgtactccgccaaccggcttgcgaacttctggacttgcgattaaccgctccagaacatatgcccactcaagatggtcatggagttataaattacgagaaacagcgacgcgacagttctcaacatcggctgtacgacaaaagacacgggcgatactgaacccccaacaagacgaagatggcaacgaaatgatgctcgaaattactgaccgggctgccaagcgcctcaacaagatcatggagaaggatggtaacccaaaccttgctttgagaatccaagtggaaagcggtggctgtcatggcttccaatacctcatgagtctcgtcaccttaccagctaaggatgccgccgaatggtcctcaatcgtgaacgaagacgatacgattttccaatacatctccgaagacgctgatccggccacagcttcggaggatggtccgaagattatactcgatgaaccatccctcgacctcctcaagggcagcaaagttgacttcacgatggagctgatcggctcgcagttcaagattacagacaacccgcttgctaccagcagttgtggctgtggtacaagcttcgatatcaagatgtag

SEQ ID NO: 32771 - protein, 237 aa, Gibberella zeae PH-1
MARVHCANAQSTVNSFMQLARRSYTTATAQSSAPLEFLVPRCTPPTGLRTSGLAINRSRTYAHSRWSWSYKLRETATRQFSTSAVRQKTRAILNPQQDEDGNEMMLEITDRAAKRLNKIMEKDGNPNLALRIQVESGGCHGFQYLMSLVTLPAKDAAEWSSIVNEDDTIFQYISEDADPATASEDGPKIILDEPSLDLLKGSKVDFTMELIGSQFKITDNPLATSSCGCGTSFDIKM

SEQ ID NO: 32772 - DNA, 720 bp, Gibberella zeae PH-1
  CDS (1)..(720)
atgttcacctcaagatcggtagcaagactcgtcctacgacgagcatgctctcctcttcctgtttcctctcctctgaggcaattctccacatcgagacctctcgccgttagctaccactcctatactcttcccacccacacctctacgcctcccagaaacgacgatgtccccgaaacatcaatagcacaacccgatcctcttcccaaagtccacgagacccgtccgcctccccagcagcctcagcatcctcagccgccaaagcaacaagaagctgcgacgacaacaacgacaacgcagaatgacgttcccgccacctcggcatcagccccgaagctaaacgagatggaagcccagaagccgaaggccgcccgaccgcgatctaagctacgcccacgcaaggctgctatgaaattgacgccctctgcggtagagcaattaagagagttgctcgatcagcccgagccgaagctcatcaaggtcggcgtaaggaaccgaggatgcagtggtctagcgtatcacctcgaatatgtcgacaagcctggcgcttttgacgagacggttgagcaggatggtgtcaaggtcttgatcgacagcaaggcgcttttcagcattattggaagcgagatggattatgttgaagacaagctcaaccagcgcttcgtgttcaagaaccccaatatcaaggaggaatgcggctgtggcgagtcattcatggtctag

SEQ ID NO: 32773 - protein, 239 aa, Gibberella zeae PH-1
MFTSRSVARLVLRRACSPLPVSSPLRQFSTSRPLAVSYHSYTLPTHTSTPPRNDDVPETSIAQPDPLPKVHETRPPPQQPQHPQPPKQQEAATTTTTTQNDVPATSASAPKLNEMEAQKPKAARPRSKLRPRKAAMKLTPSAVEQLRELLDQPEPKLIKVGVRNRGCSGLAYHLEYVDKPGAFDETVEQDGVKVLIDSKALFSIIGSEMDYVEDKLNQRFVFKNPNIKEECGCGESFMV

SEQ ID NO: 32774 - DNA, 753 bp, Candida glabrata CBS 138
  CDS (1)..(753)
atgtctataagaagtatatataatgggcgtttgcccgtgctcctgaggagtgcgagatatttacacggatcacgggcagtgctgggccctgcagtgtccaacgagaggcctaccaacactgtggctttcaagttttctttcaacaagccgcggaaggagacgtccccggtgagtgcgaagtggtcctcgcacaggatgcccagcaaagaagtcctgcaagaacaagcgcaagtgatcaaggccaaagaagaagagaagaaagtggctacggagaagtttatcaaggagaatatgatagaattgaaagaaccagaagctgtggagaaagtacaggacacaccaacaaacaaggccactgctacagccaaagcatccgatagctcagcgccggcgaagaagaaaggaaagaggcggatactgagacctcgtaaggcggttatcacactttctcccaaggctatataccatttgaaagcactgctcgacgaaccagaaccaaagctgatccgtgtcggtgccaagaaccgtggttgctcaggtctgacttatgacctacaatacatcactgaaccgggaaagttcgatgaagttgttgaacaagacggcgtcaagatagtcatcgactccaaggcattgttcagtgtcgtcggcagcgaaatggattgggtagacgacaaactagcatctaaatttgtattcaagaaccccaactctaagggtacatgtggatgtggtgagagttttatggtctaa

SEQ ID NO: 32775 - protein, 250 aa, Candida glabrata CBS 138
MSIRSIYNGRLPVLLRSARYLHGSRAVLGPAVSNERPTNTVAFKFSFNKPRKETSPVSAKWSSHRMPSKEVLQEQAQVIKAKEEEKKVATEKFIKENMIELKEPEAVEKVQDTPTNKATATAKASDSSAPAKKKGKRRILRPRKAVITLSPKAIYHLKALLDEPEPKLIRVGAKNRGCSGLTYDLQYITEPGKFDEVVEQDGVKIVIDSKALFSVVGSEMDWVDDKLASKFVFKNPNSKGTCGCGESFMV

SEQ ID NO: 32776 - DNA, 696 bp, Kluyveromyces lactis NRRL Y-1140
  CDS (1)..(696)
atgcaaagacacatactatctagaagcaaccagtgcctgctgcgtggcaatgtgctggcagtgagacatctttctcaaaggccactggcaaggactaagaggtttttgcaaacctctcagaatggggataaagtgaatgctccagtttggccattcaattttgaaattccagtgaagaacggtaagagtagtgcacctggtacacaggaagaagcatctggatctgggaccgcaggtgctaaaaagacatggctcacttactcgcttcctaaaaatgttgccaagaagggggaacctttacagacccaaccacccaaagtcgatgaaaatattcaaccaaaaaaacgtgcaaagagaaagctaaggccacgtaaagctctaatatcgttgacgcccaatgctctttctcatttgaaggggttgctcgatcaacctgaacctaaactaataagaataggagttaaaaatagaggatgttccggtttgacttacgatttgcaatatattactagtccaggaaagttcgatgaagtggtagagcaagacggtgtgaaggttataattgattcaaaggctcttttcagtatagttggtagtgaaatggactgggtagatgataagttgtcctctagatttgttttcaagaatccaaactctaagggtacatgcggatgcggtgaaagtttcatggtataa

SEQ ID NO: 32777 - protein, 231 aa, Kluyveromyces lactis NRRL Y-1140
MQRHILSRSNQCLLRGNVLAVRHLSQRPLARTKRFLQTSQNGDKVNAPVWPFNFEIPVKNGKSSAPGTQEEASGSGTAGAKKTWLTYSLPKNVAKKGEPLQTQPPKVDENIQPKKRAKRKLRPRKALISLTPNALSHLKGLLDQPEPKLIRIGVKNRGCSGLTYDLQYITSPGKFDEVVEQDGVKVIIDSKALFSIVGSEMDWVDDKLSSRFVFKNPNSKGTCGCGESFMV

SEQ ID NO: 32778 - DNA, 828 bp, Debaryomyces hansenii CBS767
  CDS (1)..(828)
atgatagcgaaaagaattatattgacaaacttaaatcacacatataagagatatgcttcaaatgaagcaaagaaaggtggaaagaggtttatgcaaactatacctgttacaacaagcaagaatgatttctattcgggattgaaatatcctatgaagaagacaaatttgggagaatcaactaaagaacctagtgatctgagctctaaatggtctaaacattctttggggccaatggaaaaagtgtctactaaggaccaaagtacatcagcgcccgcaaggagatcccgagcatccaaattttccaacaagacattgaagaatatcggcaagcccgaaactgcagaaacgaagagtactaaggaggagacgaagaacacagaagcgcagaagcccgcacaacctaatataatatcgacagtaactgtcgaacctacgacaccaaagataacggagaatgaaaagccggcgaagaagacgaaacagaagagaacattgcgtcctagaaaagcattgattacgttcagtgccaatgcagtggaccatttgaagaatttgttggatcaacctgagccgcaattgatcagaatcggggtacagaacagaggttgttcaggattaacatataacttggaatacgtatcagagccaggtaagttcgacgagaaggtggaacaagatggtgtcaaggtatacatagattcgaaggcccttttttcaattgtggggtctgaaatggattggttggatgacaaattgtcgtcgaggtttatctttagaaatcccaactctaagggtacctgtgggtgtggtgaatcatttatggtctaa

SEQ ID NO: 32779 - protein, 275 aa, Debaryomyces hansenii CBS767
MIAKRIILTNLNHTYKRYASNEAKKGGKRFMQTIPVTTSKNDFYSGLKYPMKKTNLGESTKEPSDLSSKWSKHSLGPMEKVSTKDQSTSAPARRSRASKFSNKTLKNIGKPETAETKSTKEETKNTEAQKPAQPNIISTVTVEPTTPKITENEKPAKKTKQKRTLRPRKALITFSANAVDHLKNLLDQPEPQLIRIGVQNRGCSGLTYNLEYVSEPGKFDEKVEQDGVKVYIDSKALFSIVGSEMDWLDDKLSSRFIFRNPNSKGTCGCGESFMV

SEQ ID NO: 32780 - DNA, 678 bp, Debaryomyces hansenii CBS767
  CDS (1)..(678)
atgatttcaaagtttatacagagaaatgtagtaataccaactaccagacagttaatcaggcctagcatgacgtacttaacttacagacacggatattcaaccgaaacaggtacaaaatcaaatacagcacctaaagcatttaaatcctcgtcgttcaatcaaccaaaagagatccctaaggcatcaacgagtcaaacgcaaactgctgaagtaccccaagaagatattgatgattttaacataacgaagttgatccatggaactacggacatgaagatcgcaataactaagagggccagtaataaactaacgagtattgctgaagacgataagaatcctaatgctgcgttaaaagttgaggtcgaaagtggtgggtgtcatggatttcaatacaatttaaagttgactgacttgactgaagaattgaaagatgagaacaatgagcttttggttttcaaaagaatgggtgatgatggcgaggtagcgcaagttgtattagatgattcttcattacagattcttcaagactcgaaagttgactatacaaaagaattaattggtagtcagttcaaaattgttgactcaccgtacacttctacggcttgtggttgtggtgcatcctttgattttgattttgaaaagttagaaaaagtaagggagagagaagctaataagtaa

SEQ ID NO: 32781 - protein, 225 aa, Debaryomyces hansenii CBS767
MISKFIQRNVVIPTTRQLIRPSMTYLTYRHGYSTETGTKSNTAPKAFKSSSFNQPKEIPKASTSQTQTAEVPQEDIDDFNITKLIHGTTDMKIAITKRASNKLTSIAEDDKNPNAALKVEVESGGCHGFQYNLKLTDLTEELKDENNELLVFKRMGDDGEVAQVVLDDSSLQILQDSKVDYTKELIGSQFKIVDSPYTSTACGCGASFDFDFEKLEKVREREANK

SEQ ID NO: 32782 - DNA, 753 bp, Yarrowia lipolytica CLIB122
  CDS (1)..(753)
atgacaatgtcactacgaaacaaattgacggttggaaagcgattcctacagacggcggagcggtcgactccttccatgaccccgttcatgctcaacaacccgaatgcgtaccattcgtccaagagcgacaaccaggccgagaacaagtcgtcttcgtctcagccccagggattcacatgggcccgtcaccagctgccccgtttcgacgccgcttccaagtcgtccaagatcgagacccccaaaccctttgcattcaaattccccaacacacaggacaagtcgtcgcgacctgccaccactccttttgcattccgacctgccgccaagaccagcgcaacggccgctgctcctactaaggctgctgcccccgctgaaaaggctgctgctcccgcccccgctcccaagcgaacccgaaagttgcgaccccgaaaggccgtcatcactctttcgcccacagctgtcaagcacctcaaggacctccttgaccagcccgagccaaagctcattcgaattggcgtaagaaaccgaggatgttccggactcacctaccacattgactacgtggacaagcccgccaagtttgacgaggaggttgtccaggacggcgtgcgagtgctcatcgactccaaggccctgtttagcattatcggatccgagatggactggctcgacgacaagctgtcttcgcggttcattttccgaaaccccaactccaagggagagtgtggatgtggcgagtccttcatggtttaa

SEQ ID NO: 32783 - protein, 250 aa, Yarrowia lipolytica CLIB122
MTMSLRNKLTVGKRFLQTAERSTPSMTPFMLNNPNAYHSSKSDNQAENKSSSSQPQGFTWARHQLPRFDAASKSSKIETPKPFAFKFPNTQDKSSRPATTPFAFRPAAKTSATAAAPTKAAAPAEKAAAPAPAPKRTRKLRPRKAVITLSPTAVKHLKDLLDQPEPKLIRIGVRNRGCSGLTYHIDYVDKPAKFDEEVVQDGVRVLIDSKALFSIIGSEMDWLDDKLSSRFIFRNPNSKGECGCGESFMV

SEQ ID NO: 32784 - DNA, 555 bp, Yarrowia lipolytica CLIB122
  CDS (1)..(555)
atgttcagacgactgttacaagccaagagctcgttgcggactgtcccccgactgggctccccgtcgctactgacacaaagacacttcacagcatccgcccgacgtcttttcgagtttcccgagtcggtcccccgagagaaaatcgaggaagatgccgtcaccattgtgaacccccagaaggacgacaagggacgactcctgcgtctgtttgtgtccgaccgagcggccaccagactcaacgccatttccgaggacgacaagaaccctttgctggctctccgaattgaggtggagtccggtggatgccatggcttccaatacaagctggagctgtccgacgtggaggacgtcgattttgagatggacagtgtgttcgagaagaacggcgctcgaattctcattgacaagagctctctggagattctgcgagaatccaacattgattacacaaccgagcttattggcagccagttcaaggtggtggacagtccctacactgtgagtgcttgtggctgcggctcctccttcgacttcgacgaaagcaagttggcctaa

SEQ ID NO: 32785 - protein, 184 aa, Yarrowia lipolytica CLIB122
MFRRLLQAKSSLRTVPRLGSPSLLTQRHFTASARRLFEFPESVPREKIEEDAVTIVNPQKDDKGRLLRLFVSDRAATRLNAISEDDKNPLLALRIEVESGGCHGFQYKLELSDVEDVDFEMDSVFEKNGARILIDKSSLEILRESNIDYTTELIGSQFKVVDSPYTVSACGCGSSFDFDESKLA

SEQ ID NO: 32786 - DNA, 393 bp, Apis mellifera
  CDS (1)..(393)
atggcttcttccatggttgctgcagcgacagttcgtgctgtcaaaggtagaaaaatattagccacacgcgctgcgcttactttaacaccaagtgcagtaaaaaaaatcaaggaattattgaaagataaaagtgaatttattggtttaagagtaagtgtgaaacaacgaggatgtaatggtcttagttatactcttgattatgccaaagaaaagtctaaacttgatgaagaagttgttcaagatggtgtttgtattatgatcgacaaaaaggcacaattatctttattaggtaccgaaatggattatatagaaactaaattaagttctgaatttatttttaataatccaaatatcaaaggcacgtgtggatgtggagaaagtttctccgtttag

SEQ ID NO: 32787 - protein, 130 aa, Apis mellifera
MASSMVAAATVRAVKGRKILATRAALTLTPSAVKKIKELLKDKSEFIGLRVSVKQRGCNGLSYTLDYAKEKSKLDEEVVQDGVCIMIDKKAQLSLLGTEMDYIETKLSSEFIFNNPNIKGTCGCGESFSV

SEQ ID NO: 32788 - DNA, 810 bp, Candida albicans SC5314
  CDS (1)..(810): transl_table=12
atgatgatagcaacaagaagacaaagtttacaattaacgaaaagatacatttcaaatcatgccaccaaaaacaagagatttatacagaccattccaatatctaccaatactgggtccaattcattcttatcaaaattacatcaatctgaaagtaatgacgcaccaacatccaaatgggcaagacatacattaagtttccctaaaaccgaaacatcaaacactactccacaaccgccagttagaaaatcaagaacatcacgttttgctaataaatcacaattagctaacgaaaccaaaccattcaactcttccataactccaacaccacaatcaaatataattgaaataacatcagaccctgaaattcaaaaagcatccaataaaataactacatcaaccgcatcagtgccgaccgacagtaacaaatctcaatccacagctgctccatcagtgacgcctaaaaagaaaagagtattaagaccaagaaaagctttgattacattaacatctagcgcggtacaacatctccaaggattattagatcaacctgatccaaaattgattcgtataggagtgagaaacagaggatgttcaggattgacttataatcttgaatacgttgataaaccaggtaaatttgatgaattggtggaacaagatggagtcaaagtattaatagattcaaaagcattattttcaattgttggttcggaaatggattggttggatgataaattaagttcgagatttatatttaaaaatccaaattcaaaaggaacttgtggatgtggtgaatcattcatggtataa

SEQ ID NO: 32789 - protein, 269 aa, Candida albicans SC5314
MMIATRRQSLQLTKRYISNHATKNKRFIQTIPISTNTGSNSFLSKLHQSESNDAPTSKWARHTLSFPKTETSNTTPQPPVRKSRTSRFANKSQLANETKPFNSSITPTPQSNIIEITSDPEIQKASNKITTSTASVPTDSNKSQSTAAPSVTPKKKRVLRPRKALITLTSSAVQHLQGLLDQPDPKLIRIGVRNRGCSGLTYNLEYVDKPGKFDELVEQDGVKVLIDSKALFSIVGSEMDWLDDKLSSRFIFKNPNSKGTCGCGESFMV

SEQ ID NO: 32790 - DNA, 699 bp, Candida albicans SC5314
  CDS (1)..(699): transl_table=12
atgttaggaacaaaatattttgctatatccaaacgaatcttaacattaaaatcatttaaacccttaacacttggtggtacaactattattactttacgttataattcgactaaaccaagtactaccaccaccaattctaatgctaattcatctaggctaaaaccgtcatcatttgccttcccatcgtctccaacttctcaacaatcatcatctacaactacttcaaccaatgattccataacatcatcacaacaacaagaagatattaatgatttcagagcaacaaaattaattcatggaaaaacaaatttatcatttgcaataactgaaagagctagtaagaaattaaatgaaatttctcaacaagataatcaagattcaggattattaatacaagtagaaagtggaggatgtcatggatttcaatataatttgaaattaaccaatattgataaagaattacaacaacaacaagacggcgatgctaatgatttggttgtgtttgaaagagatcaaggagggaaagtgattatgaatgaatcatcattaatgattttacaagattcaaaattggattatactaaagaattaattggtagtcaatttaaaattgttgatagtccttatactagttctgcttgtggttgtggaagttcatttgattttgattttgataaattgctgcaaaaggaaggataa

SEQ ID NO: 32791 - protein, 232 aa, Candida albicans SC5314
MLGTKYFAISKRILTLKSFKPLTLGGTTIITLRYNSTKPSTTTTNSNANSSRLKPSSFAFPSSPTSQQSSSTTTSTNDSITSSQQQEDINDFRATKLIHGKTNLSFAITERASKKLNEISQQDNQDSGLLIQVESGGCHGFQYNLKLTNIDKELQQQQDGDANDLVVFERDQGGKVIMNESSLMILQDSKLDYTKELIGSQFKIVDSPYTSSACGCGSSFDFDFDKLSQKEG

SEQ ID NO: 32792 - DNA, 648 bp, Ustilago maydis 521
  CDS (1)..(648)
atgttgcgatcagcattcccttcaggctcggcaagatcggctttgcgccacacacagacatatgcatccacatcggcaactacgcttgcctcatcacgattcgcttcaacgagacgtggactgacaagcttgtcgtccttttcattgcgctgctctgccccggtggcttctagctcaaggagaataccagaagcgtttccaagtgcgcggattccttcgctgacgagatcacaaaggaggctggctacaacgctgatccgcaaaccggacgaaccagaagaacccgaagtctatcgagatggcgaacccacgatcattgccaccgaccgtgcgatcgcccagctacaaaaagtagcagagcgtgagaacaactcatcgttagcgctgagagtcgctgtagaaccgggaggatgtcacggctatcagtacaagatagagatcactgaagagatcgaagaggacgattttcagttcgaagtgcatcctggcgtgtccatcttggtcgacagcatcagtctggcactcgtacgcggaagcactatcgactatgtcaccgagctcattggctctcagtttgccatcaagaacaacccgcaggccaagggcgcaggttgcggctgcggtgtcagttgggagcccgtcatctag

SEQ ID NO: 32793 - protein, 215 aa, Ustilago maydis 521
MLRSAFPSGSARSALRHTQTYASTSATTLASSRFASTRRGLTSLSSFSLRCSAPVASSSRRIPEAFPSARIPSLTRSQRRLATTLIRKPDEPEEPEVYRDGEPTIIATDRAIAQLQKVAERENNSSLALRVAVEPGGCHGYQYKIEITEEIEEDDFQFEVHPGVSILVDSISLALVRGSTIDYVTELIGSQFAIKNNPQAKGAGCGCGVSWEPVI

SEQ ID NO: 32794 - DNA, 648 bp, Cryptococcus neoformans var. neoformans B-3501A
  CDS (1)..(648)
atggcccttccaacactccgcaccacgtttgcctcctcgtcacgcgtaacactccaccacctctctttcccagcacgctcactggcatacctgcgctgcggttcttctctcgcccagcactcgtcttcccaagcctacacccctacgccggcgtattctggcccggttgcctcctcttcatcaagcaaggccaagggcggcgtcaaggacatgcacgccgcacccaaccctgcgcctcccgctgcacccgccaagaatgaagggaccggagagaagaaggagcccaggaggagggtgccgttgaagagccagaggaatgcgatcaccatgacccccacagccatttctcaccttcgtgaactgctcgcttcacccacggaacctcgtcttttgcgaatctctgtaaagtctcgtggctgtgccggtatggcctaccaccttgactatgttccaccaccaggcggcaagtttgacgaggttgtcgagcaagatggtgtccgggtgttgattgacagcaaggcgttgttcagtatcattggaagtaggatggactggagagataaccggttgagcgccggatttgtctttgacaaccccaatgttgttgacacctgcggttgtggcgaatctttcaacattcgtttctaa

SEQ ID NO: 32795 - protein, 215 aa, Cryptococcus neoformans var. neoformans B-3501A
MALPTLRTTFASSSRVTLHHLSFPARSLAYLRCGSSLAQHSSSQAYTPTPAYSGPVASSSSSKAKGGVKDMHAAPNPAPPAAPAKNEGTGEKKEPRRRVPLKSQRNAITMTPTAISHLRELLASPTEPRLLRISVKSRGCAGMAYHLDYVPPPGGKFDEVVEQDGVRVLIDSKALFSIIGSRMDWRDNRLSAGFVFDNPNVVDTCGCGESFNIRF

SEQ ID NO: 32796 - DNA, 693 bp, Cryptococcus neoformans var. neoformans B-3501A
  CDS (1)..(693)
atggcctccatctgcactgcttgctctcgcctccttccccgcccagccatcccgtcatcttctcgtcttccagcctctcttgcacgtcttcctccacctcgccatttctctactcttctcactccctattttcaacgtagagtacctcgctccgacccgaaaccttgccgtttagctactacatcagcttacaattcttctcgttctggtttaccagatttgccacctatcccttcaaggcctaatatcaaagtctctgcgccgtcattagcagcgatcaaagaggagggattttatgacgacgatgtcaagctgttgccaccagaagaggcgtttttgaacatcactccagaagctgttcaacaattgaccaggatcacttcacgtgaacctttagaggtcctgagtcaaggtaagcttgcgttgagagtgggggtagaaagtggtgggtgtcatgggtatcaatatattatggacttgacagaagagagaggtgtcgatgactacgtcttacaaccagagggtgtggcatgtataccagttgtcatcgatctcacatcgttcggtcttctcaaaggtgctacacttcaccacgccaccgagctcattggatcttcctttagactacaagacaacccgcaagctaaagagggtggcgcttgcggttgtggtgtaagttgggaggccaagtag

SEQ ID NO: 32797 - protein, 230 aa, Cryptococcus neoformans var. neoformans B-3501A
MASICTACSRLLPRPAIPSSSRLPASLARLPPPRHFSTLLTPYFQRRVPRSDPKPCRLATTSAYNSSRSGLPDLPPIPSRPNIKVSAPSLAAIKEEGFYDDDVKLLPPEEAFLNITPEAVQQLTRITSREPLEVLSQGKLALRVGVESGGCHGYQYIMDLTEERGVDDYVLQPEGVACIPVVIDLTSFGLLKGATLHHATELIGSSFRLQDNPQAKEGGACGCGVSWEAK

SEQ ID NO: 32798 - DNA, 390 bp, Tribolium castaneum
  CDS (1)..(390)
atggctagcagagtggttgcgacggccactgtgcgagcagtgcgcaaaaaactagcccccacacgagctgctttagttctgacaccagctgcggtgaatcgagtcaaagaaatactgaaagggcaggataattacgttggtttaaaaattggggtgaaacagaggggttgtaacggtttgtcatacactttggactatgttgataagaaagataaaatggacgaagaagtggtccaagatggtgtcagaatcttcatagataagaaagcacaactcacactcttaggtactgaaatggattacgtgcaaaataaattaagctcagaattcgtttttaacaatccaaatattaaaggcacgtgtggttgtggcgagtcgttcaacatttag

SEQ ID NO: 32799 - protein, 129 aa, Tribolium castaneum
MASRVVATATVRAVRKKLAPTRAALVLTPAAVNRVKEILKGQDNYVGLKIGVKQRGCNGLSYTLDYVDKKDKMDEEVVQDGVRIFIDKKAQLTLLGTEMDYVQNKLSSEFVFNNPNIKGTCGCGESFNI

SEQ ID NO: 32800 - DNA, 351 bp, Tribolium castaneum
  CDS (1)..(351)
atgtcagggttacacataaaaccggaattaattatcactgacacttgcgtcgagcgtttgaaaaatatcagtaaaaattcggatgagttcttaagagtgagtgtagatgggggcggttgctcgggcttccagtataaatttgacctagactcgaaaattaatgaagacgataaaatatttgaaaaaaatggagctaaagttgtgattgatgaaacgtcattggactttgttagaggagcgacggtcgactaccgggaagaactaattaaatcttccttcaggattgtcaataacccgttagctgagcaagggtgttcctgtgggtcgtcttttgctgtcagactggattaa

SEQ ID NO: 32801 - protein, 116 aa, Tribolium castaneum
MSGLHIKPELIITDTCVERLKNISKNSDEFLRVSVDGGGCSGFQYKFDLDSKINEDDKIFEKNGAKVVIDETSLDFVRGATVDYREELIKSSFRIVNNPLAEQGCSCGSSFAVRLD

SEQ ID NO: 32802 - DNA, 351 bp, Herminiimonas arsenicoxydans
  CDS (1)..(351): transl_table=11
atgaatgcaattgccgaaatgccatcccctatccttttcagcgacagtgccgccgcaaaggttgccgaactgattgaagatgaaggtaatccggatctgaagttgcgcgtgttcgtgcagggcggcggttgctccggcttccagtacggtttcacgtttgatgaaatcgtcaatgaagacgacaccactatgaccaagaacggcgtacagctgttgatcgactccatgagctatcaatatctggtcggcgcagaaatcgattacaaggatgatctggaaggcgcgcaattcgtcatcaagaatcctaacgcaacgacaacttgcggttgtggctcgtcctttaccgcctga

SEQ ID NO: 32803 - protein, 116 aa, Herminiimonas arsenicoxydans
MNAIAEMPSPILFSDSAAAKVAELIEDEGNPDLKLRVFVQGGGCSGFQYGFTFDEIVNEDDTTMTKNGVQLLIDSMSYQYLVGAEIDYKDDLEGAQFVIKNPNATTTCGCGSSFTA

SEQ ID NO: 32804 - DNA, 372 bp, Burkholderia vietnamiensis G4
  CDS (1)..(372): transl_table=11
atgaacgctgttaacgaatccgcagcaacgacggccgaaatgccggtcccgttcgtcttcaccgacgccgcggccgacaaggtcaagcaactgatcgacgaagagggcaatcccgacctgaagctgcgcgtgttcgtgcaaggcggcggctgctcgggcttccagtatggcttcacgttcgacgaggaagtcaacgaggacgacaccgtgatggacaagaacggcgtccagctcctgatcgactcgatgagctaccagtatctggtcggcgccgagatcgactacaaggacgacctcaacggcgcgcagttcgtgatcaagaacccgaacgccacgaccacctgcggttgcggctcgtcgttctcggtctga

SEQ ID NO: 32805 - protein, 123 aa, Burkholderia vietnamiensis G4
MNAVNESAATTAEMPVPFVFTDAAADKVKQLIDEEGNPDLKLRVFVQGGGCSGFQYGFTFDEEVNEDDTVMDKNGVQLLIDSMSYQYLVGAEIDYKDDLNGAQFVIKNPNATTTCGCGSSFSV

SEQ ID NO: 32806 - DNA, 342 bp, Bradyrhizobium sp. ORS278
  CDS (1)..(342): transl_table=11
atgaccaatgcctcgaccggccccgtcaccatcagcgagcgcgccgcccgccgcatcggcgagatcctcggcaaggagagcgccggtgcgatgctgcgcatctccgtcgagggcggcggctgctctggcttccagtacaagttcgacatcgaccgcgccaaggccgaggacgatctggtgatcgcccgcgacaaggccgtcgtgctggtcgatccggcctcggtgccgttcctggccggctcggaagtcgatttcgtcgacgacctgatgggcgcctcgttccggatcaacaatcccaacgccaccgcctcctgcggctgcggcaccagcttctcggtctga

SEQ ID NO: 32807 - protein, 113 aa, Bradyrhizobium sp. ORS278
MTNASTGPVTISERAARRIGEILGKESAGAMLRISVEGGGCSGFQYKFDIDRAKAEDDLVIARDKAVVLVDPASVPFLAGSEVDFVDDLMGASFRINNPNATASCGCGTSFSV

SEQ ID NO: 32808 - DNA, 381 bp, Thermus thermophilus HB27
  CDS (1)..(381): transl_table=11
atggtggaaacccaagaggcggtcatccgcatcacccccctggcggcggagaaggccaaggagatccttgcccgctacggcaaggagcacgcggccatccgcgtctacatcaagtccggcggttgctcgggcttccagtacggcatggccgtggacgaaagggagcttccgggggacaccttcgtggagatgcacggggtgcgcctggtggtggaccggatgtccctgccctacctcgtgggctcggagattgactgggtggagagccttatggggggcgggttcacggtccacaaccccaacgccgtgagcacctgcggctgcggccactccttccgcaccaaggaccaggaggggaccccccgcacctgcgggcactga

SEQ ID NO: 32809 - protein, 126 aa, Thermus thermophilus HB27
MVETQEAVIRITPLAAEKAKEILARYGKEHAAIRVYIKSGGCSGFQYGMAVDERELPGDTFVEMHGVRLVVDRMSLPYLVGSEIDWVESLMGGGFTVHNPNAVSTCGCGHSFRTKDQEGTPRTCGH

SEQ ID NO: 32810 - DNA, 324 bp, Bartonella quintana str. Toulouse
  CDS (1)..(324): transl_table=11
atgaatgtgaatatttcagatgttgctgccaagcgtattgcacagatacttttgagtgaaaccgataaaataggattacgtatttccgttgaagggggtgggtgttcaggcttttcttataaatataatttggtttctgaaacgagtgaagatgatctcgttcttaaaaaagatggggcagttgtgttcattgattcgctatcacttccttttatggaaggcgctgaaattgattttgttgatgatcttatgggacagtcttttcaaattcataatcctaatgctgtctcatcgtgcggttgcggtgtgagtttttcaatttaa

SEQ ID NO: 32811 - protein, 107 aa, Bartonella quintana str. Toulouse
MNVNISDVAAKRIAQILLSETDKIGLRISVEGGGCSGFSYKYNLVSETSEDDLVLKKDGAVVFIDSLSLPFMEGAEIDFVDDLMGQSFQIHNPNAVSSCGCGVSFSI

SEQ ID NO: 32812 - DNA, 324 bp, Bartonella henselae str. Houston-1
  CDS (1)..(324): transl_table=11
atgggcgtgaatatttcagatgcagccgccaaacggattgtacagatactttcgagtgagccggataaaataggattacgggtttccgttgaaggtggtgggtgttccggtttttcttataaatataatttggtttctgaaacaaatgaagatgatttcgttctaaaaaaaggtggggcgattgtccttattgattcactttcacttcccttcatggaaggggctgaaattgattttgttgatgatcttatagggcaatcttttcaaattcataatcccaatgctgtctcatcgtgcggttgcggtgtaagtttttcaatttag

SEQ ID NO: 32813 - protein, 107 aa, Bartonella henselae str. Houston-1
MGVNISDAAAKRIVQILSSEPDKIGLRVSVEGGGCSGFSYKYNLVSETNEDDFVLKKGGAIVLIDSLSLPFMEGAEIDFVDDLIGQSFQIHNPNAVSSCGCGVSFSI

SEQ ID NO: 32814 - DNA, 336 bp, Acinetobacter sp. ADP1
  CDS (1)..(336): transl_table=11
atgaatgcccaagctcttgttattacagataatgctgcaaaaaaagtgcgccaactccgcgatagcgaaggcaatcaggatttgatgctgcgtgtttatgtgacaggcggtgggtgttctggcttttcttatggctttaattttgctgatagtcccaacgaagatgatgccgagtttgtaaatggtgatgtcaaaatgttagtagattcactgagctatcagtatctggtaggttcggtggtcgattatattgaaggactggaaggttctcgctttataatccaaaatccaaatgcgactacaacttgcggttgtggttcatcattttcgatctaa

SEQ ID NO: 32815 - protein, 111 aa, Acinetobacter sp. ADP1
MNAQALVITDNAAKKVRQLRDSEGNQDLMLRVYVTGGGCSGFSYGFNFADSPNEDDAEFVNGDVKMLVDSLSYQYLVGSVVDYIEGLEGSRFIIQNPNATTTCGCGSSFSI

SEQ ID NO: 32816 - DNA, 348 bp, Erwinia carotovora subsp. atroseptica SCRI1043
  CDS (1)..(348): transl_table=11
atgagcgacgatatagcagcactgcctctgcaatttaccgatgcggcggcaagcaaggtgaaaaacctgattgctgatgaagagaacccagagctgaaactgcgcgtgtacatcacgggcggcggctgtagcggtttccagtatggttttacctttgacgatcaaatcaacgacggcgacatgaccattgagaaacaaggcgtggcgttggtggttgatccgatgagcttgcaatatctggttggcggtgcggtagattataccgaagggctggaaggttcccgcttcatcgtgacgaatccgaatgcgaaatctacctgcggctgcggttcctctttcagcgtctga

SEQ ID NO: 32817 - protein, 115 aa, Erwinia carotovora subsp. atroseptica SCRI1043
MSDDIAALPLQFTDAAASKVKNLIADEENPELKLRVYITGGGCSGFQYGFTFDDQINDGDMTIEKQGVALVVDPMSLQYLVGGAVDYTEGLEGSRFIVTNPNAKSTCGCGSSFSV

SEQ ID NO: 32818 - DNA, 354 bp, Propionibacterium acnes KPA171202
  CDS (1)..(354): transl_table=11
atgaccgacgcccttacccctcccgccactgacggaatcatccttaccgacgcggctgccgcgaaggtgaagtcgctgctcgatcaagagggtcgtgacgacctcgcgttgcgtctggctgtgcagcctggcggttgctcggggctgcggtatcagctgttcttcgacgagcgtcacctcgagggcgacgttgtaaagacctacggcggggtcgatgtggtcactgaccgtatgagcgctccatacctagctggcgccacgattgacttcatggacaccatcgaaaagcaggggttcactatcgacaaccctaacgcgactagcacctgcgcttgtggggactctttccactga

SEQ ID NO: 32819 - protein, 117 aa, Propionibacterium acnes KPA171202
MTDALTPPATDGIILTDAAAAKVKSLLDQEGRDDLALRLAVQPGGCSGLRYQLFFDERHLEGDVVKTYGGVDVVTDRMSAPYLAGATIDFMDTIEKQGFTIDNPNATSTCACGDSFH

SEQ ID NO: 32820 - DNA, 357 bp, Leifsonia xyli subsp. xyli str. CTCB07
  CDS (1)..(357): transl_table=11
atgaccgacacagcgctgaccggcactcaggcccacggcgtcggcctcaccgacacggcggccgtcaaggttaagagcctgctcgagcaggaagggcgcgatgacctgcggctgcgcgttgccgtccagccgggcggttgttcgggcctgatctaccagctgtacttcgacgagcggatgctcgacggcgacgccgccgtcgacttcgacggcgtcgaggtcatcgtcgataagatgtccgtcccgtacctcgacggcgccacgatcgatttcgaagacacgatccagaagcagggcttcacgatcgacaacccgaacgcggcgggctcctgcgcctgcggagactccttccactga

SEQ ID NO: 32821 - protein, 118 aa, Leifsonia xyli subsp. xyli str. CTCB07
MTDTALTGTQAHGVGLTDTAAVKVKSLLEQEGRDDLRLRVAVQPGGCSGLIYQLYFDERMLDGDAAVDFDGVEVIVDKMSVPYLDGATIDFEDTIQKQGFTIDNPNAAGSCACGDSFH

SEQ ID NO: 32822 - DNA, 375 bp, Symbiobacterium thermophilum IAM 14863
  CDS (1)..(375): transl_table=11
gtgaacatcaccctgacggagaaggcttccaaccggctgaaggagatcatcaagtccaagggtgagaacctggccctgcgcgtgctggtgcgtcccggcggttgctcgggctttgaatacggcatggctctggagcgcaacccgcgcccggacgacaacatcagcgagttcgacggcatcaaggtggtcatcgatccggccagcctgccgtacctggacggctcgaccatcgattacgtggacagcctgatgggcggcggcttcgccatcaacaacccgaacgcggtgaccggctgcgcctgcggccagtccttccgtacggccaacgctgccggcgcccccaggtcctgcggcagcggcggctgcgcacactag

SEQ ID NO: 32823 - protein, 124 aa, Symbiobacterium thermophilum IAM 14863
MNITLTEKASNRLKEIIKSKGENLALRVLVRPGGCSGFEYGMALERNPRPDDNISEFDGIKVVIDPASLPYLDGSTIDYVDSLMGGGFAINNPNAVTGCACGQSFRTANAAGAPRSCGSGGCAH

SEQ ID NO: 32824 - DNA, 342 bp, Mannheimia succiniciproducens MBEL55E
  CDS (1)..(342): transl_table=11
atgacagatatgacaatacctcttacttttactgacgctgcggcaaaaaaagtaaaaaatttaattattgaagaagaaaatcaggatcttaaattacgcgtctatattaccggcggcggttgcagcggcttccagtacggctttacttttgacgaaaaagtcaatgacggtgatttaaccattgaaaacgacggcgttaagctggttatcgacccgatgagcttacaatatcttatcggcggtaccgtggattatacggaaggtctggaaggttcgcgctttgttgtgcacaacccgaatgccacaacgacttgcggctgcggctcctccttcagcatttag

SEQ ID NO: 32825 - protein, 113 aa, Mannheimia succiniciproducens MBEL55E
MTDMTIPLTFTDAAAKKVKNLIIEEENQDLKLRVYITGGGCSGFQYGFTFDEKVNDGDLTIENDGVKLVIDPMSLQYLIGGTVDYTEGLEGSRFVVHNPNATTTCGCGSSFSI

SEQ ID NO: 32826 - DNA, 393 bp, Legionella pneumophila subsp. pneumophila str. Philadelphia 1
  CDS (1)..(393): transl_table=11
atggccaatcttgacgtatcacaaaatacttcagatatacatttttctgtcagtgcagcagataaagtcgcagaactaatcaaagaagaagataattccaatttgaatttacgagtttcaattacaggcggtggttgttctggatttcaatacggatttagctttgatgaacaaatcaatgatgacgacactattgtgatacaacaatgttctgatggaaaatcctctgtcaaattgctagttgactcaatgagttatcaatatttgcatgatgcggaaatcgattacattaaaggaatacaaggagagcaatttgtcatacgcaaccctaatgcaaaaacaacttgtggttgtggctcttcgtttagtattggtgatgaagatgatttataa

SEQ ID NO: 32827 - protein, 130 aa, Legionella pneumophila subsp. pneumophila str. Philadelphia 1
MANLDVSQNTSDIHFSVSAADKVAELIKEEDNSNLNLRVSITGGGCSGFQYGFSFDEQINDDDTIVIQQCSDGKSSVKLLVDSMSYQYLHDAEIDYIKGIQGEQFVIRNPNAKTTCGCGSSFSIGDEDDL

SEQ ID NO: 32828 - DNA, 387 bp, Methylococcus capsulatus str. Bath
  CDS (1)..(387): transl_table=11
atgaccagcatcgtcgatctgacgccttccgagcctgcattgatattcaccggcaacgccgcggccaaggtgagcgaattgatcgccgaggaaggtaatccggcgctcaagctccgggtctatgtatcgggcggaggctgctcggggatgcagtacggctttgctttcgaggaggccgtgaacgaggacgacacgacagtggagaaggatggtgtcgtcctcttggtcgacccgaccagtctgcagtatctgcagggcgccgagatcgattaccaggaggggctggagggttcccgtttcgtcatcaagaacccgaacgccacgtcgtcctgcagttgcggcagttccttctcggtcgacggcggcgcaagctgttcgtctcactga

SEQ ID NO: 32829 - protein, 128 aa, Methylococcus capsulatus str. Bath
MTSIVDLTPSEPALIFTGNAAAKVSELIAEEGNPALKLRVYVSGGGCSGMQYGFAFEEAVNEDDTTVEKDGVVLLVDPTSLQYLQGAEIDYQEGLEGSRFVIKNPNATSSCSCGSSFSVDGGASCSSH

SEQ ID NO: 32830 - DNA, 324 bp, Methylococcus capsulatus str. Bath
  CDS (1)..(324): transl_table=11
atggcggtgacactgacacaaaaagcggcggcacaggtccagaagcatctggcggcgcggggtaccggcgtcggcttgagggtcgccgtcaagacgtcgggctgttccggtctggcctatgccctggaattcgtcgacgagccggcaccggaggatcaacgtttcgaaagccacggtgtcaccgtgctggtcgatccgaaaagcctggtctatctggaaggcaccgaactggatttcgtgcgggaaggactgaacgaaggcttcaagttcaacaatcccaacgtcaagaacgaatgcggttgcggcgagagtttcaacgtctag

SEQ ID NO: 32831 - protein, 107 aa, Methylococcus capsulatus str. Bath
MAVTLTQKAAAQVQKHLAARGTGVGLRVAVKTSGCSGLAYALEFVDEPAPEDQRFESHGVTVLVDPKSLVYLEGTELDFVREGLNEGFKFNNPNVKNECGCGESFNV

SEQ ID NO: 32832 - DNA, 393 bp, Methylococcus capsulatus str. Bath
  CDS (1)..(393): transl_table=11
ttgacgtccgaactgggaatattctatcgttctgatttcgatagagcgtggtgcgatatgagcgcagagaccatcaaatttactgacagcgcggctcagcgagtgagcgagcttctggccgaagaaggcgatcaaaaccttaagctgcgagtctatgtaaccggcggcggatgttcggggtttcaatatggctttacattcgatgaagtcgtcaatgaagacgacacggtcgttgaaaagaatggggtcagcgtgctggtcgacccgatgagccttcaatacctccagggtgccgagatcgactataccgagaacgtttccggttcccagttcgtgatccggaatcccaatgcgaccacgacctgcggctgcgggtcgtcgttttctgtctga

SEQ ID NO: 32833 - protein, 130 aa, Methylococcus capsulatus str. Bath
MTSELGIFYRSDFDRAWCDMSAETIKFTDSAAQRVSELLAEEGDQNLKLRVYVTGGGCSGFQYGFTFDEVVNEDDTVVEKNGVSVLVDPMSLQYLQGAEIDYTENVSGSQFVIRNPNATTTCGCGSSFSV

SEQ ID NO: 32834 - DNA, 441 bp, Anaplasma marginale str. St. Maries
  CDS (1)..(441): transl_table=11
atgtccggtctagagagttgtgggcttaccctaaccgagggtgccgttaataagatcatggctgttttgcgagaggagggtggttcctcgcttcttaaggtttctgtgcaaagtggcggttgcgctgggtttaaatatgagtttgccactggttcatatgaagacgatgcagactcctccgatgaatatctggaggacgatgattcagggtttgacgacatggacggcgatgaagaagataacgatgaggttgaaggtgggtcagacctcatactctcagatgcttctggaaggccgatactattcgtagatcgctgttctaggaagttcttacaagattctaccatagactacgtagaggatattaacggctccagattcgtggtcaacaaccctgccgccaagtctggctgcggttgcgggaacagtttttcattgtag

SEQ ID NO: 32835 - protein, 146 aa, Anaplasma marginale str. St. Maries
MSGLESCGLTLTEGAVNKIMAVLREEGGSSLLKVSVQSGGCAGFKYEFATGSYEDDADSSDEYLEDDDSGFDDMDGDEEDNDEVEGGSDLILSDASGRPILFVDRCSRKFLQDSTIDYVEDINGSRFVVNNPAAKSGCGCGNSFSL

SEQ ID NO: 32836 - DNA, 351 bp, Azoarcus sp. EbN1
  CDS (1)..(351): transl_table=11
atgaacaccgtagttgataccccagaactgatggtcttcacggatagtgcggccatgaaggtcaaggagctgattgaggaggagggcaaccctgaactgaagctgcgcgttttcgtgagcggcgggggatgttccggttttcagtacggttttacgttcgacgaggaagtgaacgaggacgacaccgccttcgaaaaaaacggcgtgacgttgctggtcgatccgatgagctaccagtacttggtaggggccgaaatcgattacagcgaggggctggaagggtcccagttcgtgatccgcaatccgaacgcgacaagtacttgcggctgcggctcttcgttttctgcgtga

SEQ ID NO: 32837 - protein, 116 aa, Azoarcus sp. EbN1
MNTVVDTPELMVFTDSAAMKVKELIEEEGNPELKLRVFVSGGGCSGFQYGFTFDEEVNEDDTAFEKNGVTLLVDPMSYQYLVGAEIDYSEGLEGSQFVIRNPNATSTCGCGSSFSA

SEQ ID NO: 32838 - DNA, 462 bp, Ehrlichia ruminantium str. Welgevonden
  CDS (1)..(462): transl_table=11
atgtcaaacttaaaaaatgcagatttaacacttacagaaaatgctgttaataaaattaaatgtttaatagatcaagaaaaagatacagattctttattatgtttgtcagtttcaggtggtggttgttcaggatttaagtacaacttcaatatgggcaatattaatactttacttgctgatagtgaagaagatgatgaagaagaagatgatgatgattttcttgatgaagaagaagattatgattttcttgatgatgatgagctagaagaagatagtgaagcaaagtttagtgttttcgacgaagaaacaggtaaacctttattattagtagatcgtgcatccaataatctcttaaaacattctgtaatagattacatagaagatataaatggatctcgatttgtcatcaataatccaagtgcaaaatctaagtgcggatgcggtaatagtttttctatatag

SEQ ID NO: 32839 - protein, 153 aa, Ehrlichia ruminantium str. Welgevonden
MSNLKNADLTLTENAVNKIKCLIDQEKDTDSLLCLSVSGGGCSGFKYNFNMGNINTLLADSEEDDEEEDDDDFLDEEEDYDFLDDDELEEDSEAKFSVFDEETGKPLLLVDRASNNLLKHSVIDYIEDINGSRFVINNPSAKSKCGCGNSFSI

SEQ ID NO: 32840 - DNA, 324 bp, Pseudomonas syringae pv. syringae B728a
  CDS (1)..(324): transl_table=11
atggctatcagcatgacagaagctgccgctaaccacgtacgacgttccctcgaggggcgcggcaagggtgacggcgttcgtctgggtgttcgcaccacaggctgttcaggtcttgcctatgtgctcgagttcgtcgatgaggcggccagcgaagacaccgtgttcgaaatgcacggcgtcaaggtgatcattgacccgaaaagtctggtctatctggatggcaccgagctcgacttcgtgcgcgaagggttgaacgaaggcttcaagttcaacaatcccaactcgcgcggtgagtgcggctgtggcgaaagcttcaacgtctga

SEQ ID NO: 32841 - protein, 107 aa, Pseudomonas syringae pv. syringae B728a
MAISMTEAAANHVRRSLEGRGKGDGVRLGVRTTGCSGLAYVLEFVDEAASEDTVFEMHGVKVIIDPKSLVYLDGTELDFVREGLNEGFKFNNPNSRGECGCGESFNV

SEQ ID NO: 32842 - DNA, 351 bp, Pseudomonas fluorescens Pf-5
  CDS (1)..(351): transl_table=11
atgagcgttgaatccttcacccccacggctttgcaattcactcaaggtgcagcgcacaaggtgaagaccctggtcgatgaagagggtaatgatcgcttgaagctgcgcgtattcgttacgggcggcggttgttcggggtttcagtacggtttcactttcgatgaggaagtggccgaggatgacaccatcgtcgagcgcgagggcgtgagcctggtggtcgatccgatgagcttccagtacctggccggtgctgaagtggactaccaggaaggcctggaaggttcgcggttcgtgatcaagaaccccaatgccaccactacctgtggttgcgggtcgtcgttctcgatctga

SEQ ID NO: 32843 - protein, 116 aa, Pseudomonas fluorescens Pf-5
MSVESFTPTALQFTQGAAHKVKTLVDEEGNDRLKLRVFVTGGGCSGFQYGFTFDEEVAEDDTIVEREGVSLVVDPMSFQYLAGAEVDYQEGLEGSRFVIKNPNATTTCGCGSSFSI

SEQ ID NO: 32844 - DNA, 381 bp, Psychrobacter arcticus 273-4
  CDS (1)..(381): transl_table=11
atgaaccaaccagccaaccaatttaatccaagctcaagccaacctgtcgatccaaccgttttgaacctgactgacagtgcggcacaaaaagtacgtcgcctgcgtgaagaagaaggcgatagcaaccttatgctccgcgtctatgtcactggcggcggctgttcaggcttttcttatggctttaacttcgccaatgagctcaatgaagatgatgccaacttcgataataacgatgtgactttggtcgttgactcattaagctatcaatatctacaaggctctaccgttgattataccgaaggcttagagggtgcacgctttattgtgaccaaccctaatgccacgaccacgtgtggctgcggctcgtcattctcgatctaa

SEQ ID NO: 32845 - protein, 126 aa, Psychrobacter arcticus 273-4
MNQPANQFNPSSSQPVDPTVLNLTDSAAQKVRRLREEEGDSNLMLRVYVTGGGCSGFSYGFNFANELNEDDANFDNNDVTLVVDSLSYQYLQGSTVDYTEGLEGARFIVTNPNATTTCGCGSSFSI

SEQ ID NO: 32846 - DNA, 342 bp, Colwellia psychrerythraea 34H
  CDS (1)..(342): transl_table=11
atgtcaaaccctgaattacccattaaatttaccgattctgccgcgagtaaagttctttcgctaatcacagaagaagaaaacccagcacttaagctacgtgtatatgttaccggtggtggttgttcaggttttcagtatggcttcacttttgatgaaaaagtgaatgacggcgatatgaccattgaaaagcaaggcgttatgatggtaatcgatcctatgagtttgcaataccttgttgatggcgaagttgattatcttgaaagtttagaaggtagccgctttgtggtaaataacccaaatgcaacaaccacttgtggttgtgggtcatctttttctatctag

SEQ ID NO: 32847 - protein, 113 aa, Colwellia psychrerythraea 34H
MSNPELPIKFTDSAASKVLSLITEEENPALKLRVYVTGGGCSGFQYGFTFDEKVNDGDMTIEKQGVMMVIDPMSLQYLVDGEVDYLESLEGSRFVVNNPNATTTCGCGSSFSI

SEQ ID NO: 32848 - DNA, 351 bp, Pseudomonas syringae pv. phaseolicola 1448A
  CDS (1)..(351): transl_table=11
atgagtgtcgaatccttcacgcctaccgctttggagttcactccgaatgcagcgcacaaggtgaaaaccctggtcgacgaagagggcaatgatcgtctcaaactgcgtgtattcgttacaggtggtggttgttcaggttttcagtatggctttacgtttgatgaagacgtggccgacgatgacactatcgtcgagcgcgagggcgtaagtctggttgtcgatccgatgagcttccagtacctggctggcgcagaggtcgattatcaggaaggacttgagggttcgcgattcgtgatcaaaaaccctaatgcttccacgacctgtggttgtggctcgtcgttctcgatctga

SEQ ID NO: 32849 - protein, 116 aa, Pseudomonas syringae pv. phaseolicola 1448A
MSVESFTPTALEFTPNAAHKVKTLVDEEGNDRLKLRVFVTGGGCSGFQYGFTFDEDVADDDTIVEREGVSLVVDPMSFQYLAGAEVDYQEGLEGSRFVIKNPNASTTCGCGSSFSI

SEQ ID NO: 32850 - DNA, 351 bp, Dechloromonas aromatica RCB
  CDS (1)..(351): transl_table=11
atgaatgcagttaatgaaatggctgtccccttcgtttttactgacaatgctgctggcaaggtcaaggagttgattgaagaagagggaaatcctgggcttaaattgcgcgtatttgttaccgggggcggttgttccggttttcagtatggctttaccttcgatgaggaggttaatgaagacgatacgaccatggaaaaaaatggcgtgactcttctgattgatccgatgagctatcagtatttggttggtgcggaaattgactacacagagggcttggaggggtcgcaattcgtgattcgcaatccgaatgcaacctctacctgtggttgtggctcctcattttctgcttaa

SEQ ID NO: 32851 - protein, 116 aa, Dechloromonas aromatica RCB
MNAVNEMAVPFVFTDNAAGKVKELIEEEGNPGLKLRVFVTGGGCSGFQYGFTFDEEVNEDDTTMEKNGVTLLIDPMSYQYLVGAEIDYTEGLEGSQFVIRNPNATSTCGCGSSFSA

SEQ ID NO: 32852 - DNA, 351 bp, Thermobifida fusca YX
  CDS (1)..(351): transl_table=11
atgacggctgagactgacgccaccacgcagggggtcaccctcactgacgcggcggtggagaaggtcaagtcgctgctggcccaggaaggccgcgacgacctgagactgcgtctaggagtggcgcccggaggctgctcgggactgcgctaccagctctacttcgacgagcgcacgctcgacggagacatcatcaccgaccacaacggggtcgagctcgccgtcgaccgctacagcatgccctacctcatgggcgccaccatcgacttcgtggacacgatcgagaagcagggcttcacgatcgacaacccgagcgcgcagaactcctgcgcctgcggtgactccttccactga

SEQ ID NO: 32853 - protein, 116 aa, Thermobifida fusca YX
MTAETDATTQGVTLTDAAVEKVKSLLAQEGRDDLRLRLGVAPGGCSGLRYQLYFDERTLDGDIITDHNGVELAVDRYSMPYLMGATIDFVDTIEKQGFTIDNPSAQNSCACGDSFH

SEQ ID NO: 32854 - DNA, 390 bp, Prochlorococcus marinus str. NATL2A
  CDS (1)..(390): transl_table=11
atgattgaatcaaacgcaccgcccacaactcataaagctcaagatggcaaaggagttcttattaccactcctgctttggatcagttgtctagactttgcaaagaacaaggctcagggaaattactgagagtgggagtacgttctggaggatgcagtggtatgagttacacaatggactttgtgtctgatgatgatattcaaaaagatgatgaagtctatgaatattcagtaggcacaagttcttttaaagtgatttgtgatccaaagagtcttttgtacatatatggtatgcagttagatttcagtacagatttaattggtggaggttttaactttactaatcccaatgcgtcacaaacttgtggctgtggaagttcctttgcagtttaa

SEQ ID NO: 32855 - protein, 129 aa, Prochlorococcus marinus str. NATL2A
MIESNAPPTTHKAQDGKGVLITTPALDQLSRLCKEQGSGKLLRVGVRSGGCSGMSYTMDFVSDDDIQKDDEVYEYSVGTSSFKVICDPKSLLYIYGMQLDFSTDLIGGGFNFTNPNASQTCGCGSSFAV

SEQ ID NO: 32856 - DNA, 456 bp, Ehrlichia canis str. Jake
  CDS (1)..(456): transl_table=11
atgtcaaacttaaagagtgcagacttaacacttacagaaaatgctgtaaataaaattaagcacctacttgatcaagaagaggatacaggttctctgttgtgcttatctgtttctggaggtggatgttcaggatttcaatataacttcaatattggtaacatcaacacattacttgctgatgatgaggatgacgaagatgatgattatgattttctcgatgaagatgatgatgaagagtatgatgatgaagatgagttagaaggtaaaagcagtgcaaagtttactgtttttgatgaagaaactggaaaacctttgttattaatagataaagcatcaaatgatcttttaaagcactctacaatagattatgttgaagatattaatggatcaagatttattgttaataatccaattgcaaaatctaaatgcggttgtggcaatagcttctctatataa

SEQ ID NO: 32857 - protein, 151 aa, Ehrlichia canis str. Jake
MSNLKSADLTLTENAVNKIKHLLDQEEDTGSLLCLSVSGGGCSGFQYNFNIGNINTLLADDEDDEDDDYDFLDEDDDEEYDDEDELEGKSSAKFTVFDEETGKPLLLIDKASNDLLKHSTIDYVEDINGSRFIVNNPIAKSKCGCGNSFSI

SEQ ID NO: 32858 - DNA, 351 bp, Thiobacillus denitrificans ATCC 25259
  CDS (1)..(351): transl_table=11
atgaatgcaaccaccgagatggaatccccgctcgtcttcaccgacagcgccgcaagcaaagtcaaaagcctgatcgacgaggagggtaaccctgacctcaagctgcgcgtgttcgtgtcgggcggcggctgctcgggctttcagtacggcttcaccttcgacgaagcacaaaacgccgacgataccgttatggtgaaaaacggcgtgaccctgctcgtcgattcgatgagcttccagtatctggtcggcgccgaaatcgactattcggaaggcctcgaaggcgcgcagttcgtgatcaagaacccgaacgccacgaccacctgcggctgcggctcgtccttctcggcctga

SEQ ID NO: 32859 - protein, 116 aa, Thiobacillus denitrificans ATCC 25259
MNATTEMESPLVFTDSAASKVKSLIDEEGNPDLKLRVFVSGGGCSGFQYGFTFDEAQNADDTVMVKNGVTLLVDSMSFQYLVGAEIDYSEGLEGAQFVIKNPNATTTCGCGSSFSA

SEQ ID NO: 32860 - DNA, 357 bp, Anabaena variabilis ATCC 29413
  CDS (1)..(357): transl_table=11
atgacacaagcaactcagtctcaacaaagagggatactgttgagcgaagccgctttgcggcaagtaaagtccctccaagaaaagcaaggtcaagatttatgcttgagggtaggagtacgccaaggtggctgctctgggatgtcttacatgatggactttgaacaggaaagcaagatcactcctcaggacgaagtttttgattacgatggcttcaaaattgtctgcgatcgcaaaagtattttatatctttatggcttaatgcttgattatagcgatgccatgatcggtggtggtttccaatttaccaatcctaatgctactcagacctgcggttgcggtaagtcgtttggggtgtaa

SEQ ID NO: 32861 - protein, 118 aa, Anabaena variabilis ATCC 29413
MTQATQSQQRGILLSEAALRQVKSLQEKQGQDLCLRVGVRQGGCSGMSYMMDFEQESKITPQDEVFDYDGFKIVCDRKSILYLYGLMLDYSDAMIGGGFQFTNPNATQTCGCGKSFGV

SEQ ID NO: 32862 - DNA, 351 bp, Pseudomonas fluorescens PfO-1
  CDS (1)..(351): transl_table=11
atgagcgtcgaatccttcacccccacggctttgcaattcactcaaggtgccgcgcacaaggtgaagagcctggtcgatgaagaggggaatgatcgcttgaagctgcgcgtattcgttacgggcggcggttgttcagggtttcagtacggcttcaccttcgatgaagatgtggccgaggacgacaccatcgtcgagcgcgaaggcgtcagtctggtggtcgatccgatgagcttccagtacctggcaggtgccgaggtggattatcaggaaggtctggaaggttcgcgtttcgtgatcaagaacccgaatgccaccaccacttgtggttgcggctcctcgttctcgatctga

SEQ ID NO: 32863 - protein, 116 aa, Pseudomonas fluorescens PfO-1
MSVESFTPTALQFTQGAAHKVKSLVDEEGNDRLKLRVFVTGGGCSGFQYGFTFDEDVAEDDTIVEREGVSLVVDPMSFQYLAGAEVDYQEGLEGSRFVIKNPNATTTCGCGSSFSI

SEQ ID NO: 32864 - DNA, 327 bp, Rhodobacter sphaeroides 2.4.1
  CDS (1)..(327): transl_table=11
atgaaccttccgccgcgggttaccgaccgggcctttgcccgccttgccgagatcgccgaagcttcgggcgagacgcgcgcgctgcgcgtcgcggtcgagggcggcggctgctcgggctttcaatatgagatcaagctcgacgatccgggatcggacgatctcgtgctcgagaaggacgggcagaaggtgctgatcgatcaggtctcgctgccgttcctcgccaatgccgagatcgattataccgacgagctgatcggctcgcgcttcgtgatccacaatccgaacgcgtcgagttcctgcggctgcggcacctccttctcgatctga

SEQ ID NO: 32865 - protein, 108 aa, Rhodobacter sphaeroides 2.4.1
MNLPPRVTDRAFARLAEIAEASGETRALRVAVEGGGCSGFQYEIKLDDPGSDDLVLEKDGQKVLIDQVSLPFLANAEIDYTDELIGSRFVIHNPNASSSCGCGTSFSI

SEQ ID NO: 32866 - DNA, 372 bp, Burkholderia sp. 383
  CDS (1)..(372): transl_table=11
atgaacgctgttaccgaatccgcagcaacgacggccgaaatgccggttccgttcgtcttcaccgacgccgcagccgacaaggtcaagcaactgatcgacgaagagggcaatcccgacctgaagctgcgcgtgttcgtgcagggcggcggctgctccggcttccagtatggcttcacgttcgacgaggaagtcaacgaggacgacaccgtgatgaacaagaacggcgtccagctcctgatcgactcgatgagctaccagtacctggtcggcgcagagatcgactacaaggacgacctcaacggcgcccagttcgtgatcaagaacccgaacgcgagcaccacctgcgggtgcggttcgtcgttctcggtctga

SEQ ID NO: 32867 - protein, 123 aa, Burkholderia sp. 383
MNAVTESAATTAEMPVPFVFTDAAADKVKQLIDEEGNPDLKLRVFVQGGGCSGFQYGFTFDEEVNEDDTVMNKNGVQLLIDSMSYQYLVGAEIDYKDDLNGAQFVIKNPNASTTCGCGSSFSV

SEQ ID NO: 32868 - DNA, 357 bp, Synechococcus elongatus PCC 7942
  CDS (1)..(357): transl_table=11
atgacgcaaacaacggctgcccctcagaaaggcattttgatcagtgaaactgccttggcacagttgcaagccatgcaagcccagcagggtaccgatttactgctgcgggtaggcgtgcgtcagggtggttgctcgggcatgtcctacaccatggacttcatcacgcctgaagggatccacgagaaagatgaagtctatgactacgacggtttccgcgtcgtctgcgatcctaaaagccttctctatatctacggcatgaccttggattacagcaccgctttgattggtggtggcttcaagttcactaaccccaatgcggctcagacctgcggctgcggtagctccttctcggcttag

SEQ ID NO: 32869 - protein, 118 aa, Synechococcus elongatus PCC 7942
MTQTTAAPQKGILISETALAQLQAMQAQQGTDLLLRVGVRQGGCSGMSYTMDFITPEGIHEKDEVYDYDGFRVVCDPKSLLYIYGMTLDYSTALIGGGFKFTNPNAAQTCGCGSSFSA

SEQ ID NO: 32870 - DNA, 375 bp, Rhodospirillum rubrum ATCC 11170
  CDS (1)..(375): transl_table=11
atgaccgatcagcccccccctgccgccccgtccccgggcgccgagacggccgacatccgcatttccgccgccgccgccgcgcggatccacgccttgatggaggccgagaacgacagcgccctgatgctgcgggtcaccgtctcgggcggcggctgctcgggattttcctatggcttcgacctggagcgcaccaccgccgaagatgatctgctgtttgagcagcatggcgtaagggtggtgatcgacgaagcctccctcgacctgctgcacgggtccgagatcgactataccgacgatctgatggccgccgccttcaccgttcgcaatcccaacgccaccagcacctgcggctgcgggacctcgttctcgatttaa

SEQ ID NO: 32871 - protein, 124 aa, Rhodospirillum rubrum ATCC 11170
MTDQPPPAAPSPGAETADIRISAAAAARIHALMEAENDSALMLRVTVSGGGCSGFSYGFDLERTTAEDDLLFEQHGVRVVIDEASLDLLHGSEIDYTDDLMAAAFTVRNPNATSTCGCGTSFSI

SEQ ID NO: 32872 - DNA, 363 bp, Frankia sp. CcI3
  CDS (1)..(363): transl_table=11
atgaccgttcaggacaccacggcacccgcgacgcagtcctcgagcgtcgtcctcaccgacaccgccgcaggcaaggtgaagaccctgctcgagcaggagggtcgggatgacctcaagctgcgtatcgcggtgcagcccggaggctgctcgggcatgcgctaccagctgttctttgacgagcggtccctcgacggcgacaccgtcatcgatttctccggtgtcaaggtggcggtggaccggatgagtgccccgtacctcggcggggcgacgatcgacttcgtcgacacgatcgagaagcagggtttcactatcgataacccgaatgcccagggttcctgcgcctgcggcgactcgttccactga

SEQ ID NO: 32873 - protein, 120 aa, Frankia sp. CcI3
MTVQDTTAPATQSSSVVLTDTAAGKVKTLLEQEGRDDLKLRIAVQPGGCSGMRYQLFFDERSLDGDTVIDFSGVKVAVDRMSAPYLGGATIDFVDTIEKQGFTIDNPNAQGSCACGDSFH

SEQ ID NO: 32874 - DNA, 396 bp, Novosphingobium aromaticivorans DSM 12444
  CDS (1)..(396): transl_table=11
atgacgagcggacccgttgaggttggacgcctgcgcgcctatcttggccccatgagcgaaaccgcaatccagacgcccgtcactctcgccccgagcgccgccgcgcgcgttgccgcgattgccgcgaagcagggcaagcctgccattcttcgactttcggtcgagggcggcggctgctccggcttccagtaccggttcgggctcgcggatgcgccggaagaaggcgatacgatcgccgagacggacggcgtgcggcttgtggtcgacgaggtcagcctcggcctgctcgagggcagcatggtggaatatgtcgagtcgcttggcggcgcggcgttccgtgtgaccaacccccaggcggcatcgggttgcggctgcggggcttccttcgccatttga

SEQ ID NO: 32875 - protein, 131 aa, Novosphingobium aromaticivorans DSM 12444
MTSGPVEVGRLRAYLGPMSETAIQTPVTLAPSAAARVAAIAAKQGKPAILRLSVEGGGCSGFQYRFGLADAPEEGDTIAETDGVRLVVDEVSLGLLEGSMVEYVESLGGAAFRVTNPQAASGCGCGASFAI

SEQ ID NO: 32876 - DNA, 360 bp, Staphylococcus aureus subsp. aureus NCTC 8325
  CDS (1)..(360): transl_table=11
atgccaacagttatattaacagaagcagctgcttacgaagtaaaagatatgcttaaagcaaatgaaatgccagatggctatttaaaaattaaagtgaatggtggcgggtgcactgggttaacatacggtatgggtgcagaagaagcgcctggggaaaatgatgaagtcttagaatactttggattaaaagtattagtagacaaaaaagatgcacccgtattaaatggtacgactattgattttaagcaatcattaatgggtggcggtttccaaatcgacaatcctaatgcaattgcttcatgtggctgtggtagttcatttagaactgcaaaagttgcaggtaatcctgaaaattgctaa

SEQ ID NO: 32877 - protein, 119 aa, Staphylococcus aureus subsp. aureus NCTC 8325
MPTVILTEAAAYEVKDMLKANEMPDGYLKIKVNGGGCTGLTYGMGAEEAPGENDEVLEYFGLKVLVDKKDAPVLNGTTIDFKQSLMGGGFQIDNPNAIASCGCGSSFRTAKVAGNPENC

SEQ ID NO: 32878 - DNA, 447 bp, Anaplasma phagocytophilum HZ
  CDS (1)..(447): transl_table=11
atgtacggtatagaaagttatgggttgactataactggtggtgcggtcaataaaataaagtctgtcttagaaagagagggacatccgtctttgctgaggttatctgtgcagggtggtggctgtgctgggtttaagtatgagttcactactgagagtattagagatggccttattggtagaagtgatggtgatgatgactcagagtttgacatagatgatgaggaagaagaggaggatgaagatgggcatgatgaggtgcgaggagggtctgatctcgtgctttcagatgactctggcgctcctattttgctgattgatcgtcattctaagaagtttctgaagaactccactatagactatgtagaagatatgaatgggtcaaggttcgtggtgaataaccctggtgtaaagtttggttgtggctgtgggaacagtttttcgttgtga

SEQ ID NO: 32879 - protein, 148 aa, Anaplasma phagocytophilum HZ
MYGIESYGLTITGGAVNKIKSVLEREGHPSLLRLSVQGGGCAGFKYEFTTESIRDGLIGRSDGDDDSEFDIDDEEEEEDEDGHDEVRGGSDLVLSDDSGAPILLIDRHSKKFLKNSTIDYVEDMNGSRFVVNNPGVKFGCGCGNSFSL

SEQ ID NO: 32880 - DNA, 366 bp, Neorickettsia sennetsu str. Miyayama
  CDS (1)..(366): transl_table=11
atgaacttaaatggaccacccatcgcagtgagcgctttggcatttcagaagtttgttgaactgatcgatgaaagaaaaagaaagggcaagccaacccttggtataaggataaaattactttccaaaggatgcggtggaaatgaatacggtatggagtacgttgaagaagcagaacaatgtgatgaaatgctagagctagcacaacctcctatgggaaaggtgtcattgtttgttgatccaaaaacgatgcttaggattattggaaccaaaatagactatgaagaaacaaaattcaaaagtgggttcgtttttaaaaatcccagagagaaaggaagatgtggatgtggtaaaagtttttactattga

SEQ ID NO: 32881 - protein, 121 aa, Neorickettsia sennetsu str. Miyayama
MNLNGPPIAVSALAFQKFVELIDERKRKGKPTLGIRIKLLSKGCGGNEYGMEYVEEAEQCDEMLELAQPPMGKVSLFVDPKTMLRIIGTKIDYEETKFKSGFVFKNPREKGRCGCGKSFYY

SEQ ID NO: 32882 - DNA, 453 bp, Ehrlichia chaffeensis str. Arkansas
  CDS (1)..(453): transl_table=11
atgtcaaacttaaagagtgcagacttaacccttacagaaaatgctgttaataaaattaaacatttaattgatcaagaagaagatgcagattctcttttatgcctatccgtttctggtggtggatgttcaggatttcagtataacttcaacatttgcaatataaatacattacttgctgatgacgaagatgatgaagacgacgattatgactttcttgacgatgatgatgaagaatacgatgacgaagatgagttagagggaggaagcagtgcaaagtttaccgtttttgatgaagagaccggaaagcctctattactaatagatcaagcatctaataatcttttaaagcactctataatagattatgttgaagatattaatgggtcaagatttataatcaacaacccaattgcaaaatctaagtgtggatgtggtaatagtttctctatataa

SEQ ID NO: 32883 - protein, 150 aa, Ehrlichia chaffeensis str. Arkansas
MSNLKSADLTLTENAVNKIKHLIDQEEDADSLLCLSVSGGGCSGFQYNFNICNINTLLADDEDDEDDDYDFLDDDDEEYDDEDELEGGSSAKFTVFDEETGKPLLLIDQASNNLLKHSIIDYVEDINGSRFIINNPIAKSKCGCGNSFSI

SEQ ID NO: 32884 - DNA, 351 bp, Francisella tularensis subsp. holarctica
  CDS (1)..(351): transl_table=11
atgagtgaagtagttcaaagcgttgatccgataaactttacagaagccgcttctttaaaggttaaagaactaattgaagaggagggtgataattctcttagccttagagtatacatcaccggtgggggctgttctgggtttcaatatgcttttgcttttgataatgaagtaaaagaagatgatatggttattactaaaaatggtgttcgccttttggtagattctatgagttttcagtacttggttggtgctgatgttgactacaaagatgatgtcgaaggtgcatactttgtaattagaaatccaaatgcgaaaactacttgtggctgtggttcatctttttctgtataa

SEQ ID NO: 32885 - protein, 116 aa, Francisella tularensis subsp. holarctica
MSEVVQSVDPINFTEAASLKVKELIEEEGDNSLSLRVYITGGGCSGFQYAFAFDNEVKEDDMVITKNGVRLLVDSMSFQYLVGADVDYKDDVEGAYFVIRNPNAKTTCGCGSSFSV

SEQ ID NO: 32886 - DNA, 354 bp, Saccharophagus degradans 2-40
  CDS (1)..(354): transl_table=11
atgagtgcgccacaaacatttgtacccgaacccgtacaagtgacggaaaatgcgctcgccaaagttaaggcgcttatcgaggaagaaggcaacccagacctgaagttacgtgtatttgttaccggcggcggctgttctgggtttcaatacggcttcgccttcgatgaagcttgcgcagaagacgatgccaaaatagagcgcgatggggtgactgtagtggtagatgctatgagctacccctatttagttggcgctcaagttgattacgaagagggccttaaggggtctaaatttgtagtagccaaccccaacgcctccacaacctgtggatgcggttcgtcattttccatctaa

SEQ ID NO: 32887 - protein, 117 aa, Saccharophagus degradans 2-40
MSAPQTFVPEPVQVTENALAKVKALIEEEGNPDLKLRVFVTGGGCSGFQYGFAFDEACAEDDAKIERDGVTVVVDAMSYPYLVGAQVDYEEGLKGSKFVVANPNASTTCGCGSSFSI

SEQ ID NO: 32888 - DNA, 354 bp, Methylobacillus flagellatus KT
  CDS (1)..(354): transl_table=11
atgaatgcagtgacagaggaaatcccaagcccattgatatttaccgataatgcggcgcgcaaggtcaaggagctaattgacgaggagggctctccagatcttaaattacgtgtattcgtgagcggtggcggttgttcgggttttcagtatggcttcacatttgaggaaaccatcaatgaggatgacacgacggtcgacaaggatggcgtcacattgctgattgatcccatgagtttgcaatacttggtgggggcggaaattgattatcaggatagcctgcagggttcccagttcgtgattcgcaaccctaatgcaacgacgacttgtgggtgcggctcttctttctccgcttga

SEQ ID NO: 32889 - protein, 117 aa, Methylobacillus flagellatus KT
MNAVTEEIPSPLIFTDNAARKVKELIDEEGSPDLKLRVFVSGGGCSGFQYGFTFEETINEDDTTVDKDGVTLLIDPMSLQYLVGAEIDYQDSLQGSQFVIRNPNATTTCGCGSSFSA

SEQ ID NO: 32890 - DNA, 369 bp, Ralstonia metallidurans CH34
  CDS (1)..(369): transl_table=11
atgaacgcagtcgcagaggcacccgcaaccgaggacgtgccggcaccgttcgtctttaccgacagcgcagccgacaaggtcaagcagttgatcgaggaagagggcaatgccgaactgaagctgcgcgtgtttgtgcagggtggcggctgctcgggcttccagtacggcttcaccttcgatgaagatgtgaacgaagacgacaccacgatggtcaagaacggcgtcacgctgttgattgactcgatgagctaccagtatctggtgggcgccgagatcgactacaaggaagacatcaacggtgcgcagttcgtgatcaagaacccgaacgcatcgaccacctgcggttgcggttcgtcgttctcggtctga

SEQ ID NO: 32891 - protein, 122 aa, Ralstonia metallidurans CH34
MNAVAEAPATEDVPAPFVFTDSAADKVKQLIEEEGNAELKLRVFVQGGGCSGFQYGFTFDEDVNEDDTTMVKNGVTLLIDSMSYQYLVGAEIDYKEDINGAQFVIKNPNASTTCGCGSSFSV

SEQ ID NO: 32892 - DNA, 561 bp, Acidobacteria bacterium Ellin345
  CDS (1)..(561): transl_table=11
atgcccagtccagagttggcgacgctcatttatttcagagttcccacacggaggtgggaccgttttgggccaaaaatttctgcgactctcccgcagcttgtccatctaaatattgagtttctgcggatttccgggcgatttggcccggtttggtataatcaagcagaccacccgaggagaatggcaacaatggcaaccactgctaccccgaacaccacgaccccgacgaagagcgcacctctcaacctgacgccgaacgccgttgcgaaggtaaaggagatcatgtcccagcagaaccccgttcctgcgggattgcgcgtgggtgtggtcggcggcggatgctccggcttctcctactcgatgaacttcgagaccagcgccggtctcatggacaaggtctacgaattcgacggcctgaaggtctacattgacgcaacctcggttgtctacctgaacggcgccgttgttgactacgtcgagacactcgaaggcgccggcttcaagttcgaaaacccgaacgtgaagagcacctgcggctgcggctcctccttcagcgtgtaa

SEQ ID NO: 32893 - protein, 186 aa, Acidobacteria bacterium Ellin345
MPSPELATLIYFRVPTRRWDRFGPKISATLPQLVHLNIEFLRISGRFGPVWYNQADHPRRMATMATTATPNTTTPTKSAPLNLTPNAVAKVKEIMSQQNPVPAGLRVGVVGGGCSGFSYSMNFETSAGLMDKVYEFDGLKVYIDATSVVYLNGAVVDYVETLEGAGFKFENPNVKSTCGCGSSFSV

SEQ ID NO: 32894 - DNA, 426 bp, Rubrobacter xylanophilus DSM 9941
  CDS (1)..(426): transl_table=11
ttgaacagggaggggggcggtgtaataatcaggggggacggtgcaagagagcgtagctggctaaggcattcccgggaggtgccggtggaacagaagcaggccatagtttccatcaccgacaaggccgcggagaaggtccgcgcgctgatggagcaggagggcgaggaggatctggcgctgcgcataggcgtgcggcccggcggctgctccggcttccagtactccatctacttcgacgacgaggtcgccgaggacgacgaggtcttcgagaccaagggcgtgaagatactggtcgacgccatgagcgtgccctacctgatgggcagcgagttcgactggcaggagagcctgatgggcgcgggcttcgtggtgaacaacccgaacgtccagggctcctgcggctgcggcggctccttcacctgctag

SEQ ID NO: 32895 - protein, 141 aa, Rubrobacter xylanophilus DSM 9941
MNREGGGVIIRGDGARERSWLRHSREVPVEQKQAIVSITDKAAEKVRALMEQEGEEDLALRIGVRPGGCSGFQYSIYFDDEVAEDDEVFETKGVKILVDAMSVPYLMGSEFDWQESLMGAGFVVNNPNVQGSCGCGGSFTC

SEQ ID NO: 32896 - DNA, 327 bp, Cytophaga hutchinsonii ATCC 33406
  CDS (1)..(327): transl_table=11
atgatttcaataacagataaagcaaaaaatcacgtagccgatcttcgcgcacgtgaaggatacacagaagagtataacattcgtgtttctgttaagggcggcggttgttctggcttgatgtatgatttggattttgacaataaaattgatgaagccgatcaggtttttgaagataaaggtgtaaaaatcttagtggacaaaaaaagcttactgtatctgctgggtacaacacttgactttacagatggcttgaatggcaaaggatttcatttcgtaaatccaaatgccagcagaacctgtggttgcggagaaagtttctctgtttaa

SEQ ID NO: 32897 - protein, 108 aa, Cytophaga hutchinsonii ATCC 33406
MISITDKAKNHVADLRAREGYTEEYNIRVSVKGGGCSGLMYDLDFDNKIDEADQVFEDKGVKILVDKKSLLYLLGTTLDFTDGLNGKGFHFVNPNASRTCGCGESFSV

SEQ ID NO: 32898 - DNA, 342 bp, Haemophilus somnus 129PT
  CDS (1)..(342): transl_table=11
atggcagatcttgcagttcctttaacatttactgatgcggcggcgaataaagtcaaaaccttaatttcagaagaagaaaatacagaattaaaattacgtgtttatattaccggtggggggtgtagtggtttccaatatggctttactttcgatgaaaaaaccaatgacggcgatttaatcgttgaaaattcaggcgttaaattggttgtagatccaatgagtttacaatacctggtcggtggtactgtggactatactgaaggtttagaaggctcaagatttattgtgaacaatccaaatgcatcaacaacttgcggttgcggctcatcttttagcatctaa

SEQ ID NO: 32899 - protein, 113 aa, Haemophilus somnus 129PT
MADLAVPLTFTDAAANKVKTLISEEENTELKLRVYITGGGCSGFQYGFTFDEKTNDGDLIVENSGVKLVVDPMSLQYLVGGTVDYTEGLEGSRFIVNNPNASTTCGCGSSFSI

SEQ ID NO: 32900 - DNA, 357 bp, Trichodesmium erythraeum IMS101
  CDS (1)..(357): transl_table=11
atgacaaaaactactcagtctcaacaaaaaggaattatgatgagcgaaactgctgtaaagcaggttctatccttgagagataaacaaggaaaagacctttgcctacgagtaggggtacgtcaaggcggatgttctggaatgtcttatatgatggattttgccgaccctagcacaattagagaggatgatgaagtttttgattatgatggatttaaggtggtttgcgatcgcaagagtatcctttatctttatggtttgatgcttgattatagtgatgctttaattggcggtgggttccaatttactaatcctaatgcaactcaaacctgtggttgtggtaattccttttctgcttaa

SEQ ID NO: 32901 - protein, 118 aa, Trichodesmium erythraeum IMS101
MTKTTQSQQKGIMMSETAVKQVLSLRDKQGKDLCLRVGVRQGGCSGMSYMMDFADPSTIREDDEVFDYDGFKVVCDRKSILYLYGLMLDYSDALIGGGFQFTNPNATQTCGCGNSFSA

SEQ ID NO: 32902 - DNA, 351 bp, Shewanella sp. MR-4
  CDS (1)..(351): transl_table=11
atgactgatcaagctgacgcagcaatgcctatcaaatttaccgatgcggcagccgctaaggtaaagggcttgttggaagaagagcaaaatcctgcacttaagctacgtgtgtacgtgacgggtggtggttgttctggatttcagtacggctttacctttgatgaaaaggtcaacgaaggcgacttcaccgttgagaagcaaggcgtccaattggtcgtcgatccaatgagcttacaatacctcgttggcggtgaagtggattacacttctggcctcgaaggttcgcgtttctttgtgaagaacccgaatgcgacaaccacctgtggttgtggtgcaagtttctctgtataa

SEQ ID NO: 32903 - protein, 116 aa, Shewanella sp. MR-4
MTDQADAAMPIKFTDAAAAKVKGLLEEEQNPALKLRVYVTGGGCSGFQYGFTFDEKVNEGDFTVEKQGVQLVVDPMSLQYLVGGEVDYTSGLEGSRFFVKNPNATTTCGCGASFSV

SEQ ID NO: 32904 - DNA, 369 bp, Alkalilimnicola ehrlichei MLHE-1
  CDS (1)..(369): transl_table=11
atgagcgaaaccgcacagagttacgatcccaccgaggacttccaggcgctggtggtcaccgacagcgccgccgcccgggtggcgcagctgatcgcccaggaggagtcggacgacctcaagctgagggtgttcgtcagcggtgggggctgttccggcttccagtacgggttcaccttcgatgagcgcattgaggaaggggacagcgttgtcgaaaaggacggtgtgaccttcctggttgatccgatgagcagccagtatctgatgggcgccgaaatcgacttcgtggaggggatcgagggcgagcagttcgtcatccgcaaccccaatgccacgaccacctgcggctgcggctcatccttctccatctag

SEQ ID NO: 32905 - protein, 122 aa, Alkalilimnicola ehrlichei MLHE-1
MSETAQSYDPTEDFQALVVTDSAAARVAQLIAQEESDDLKLRVFVSGGGCSGFQYGFTFDERIEEGDSVVEKDGVTFLVDPMSSQYLMGAEIDFVEGIEGEQFVIRNPNATTTCGCGSSFSI

SEQ ID NO: 32906 - DNA, 342 bp, Hyphomonas neptunium ATCC 15444
  CDS (1)..(342): transl_table=11
atgaccgagaccattgccccggatgtgacactgactgcttctgctgcgaagcggattaatgcgattctcgccaaacaggacggcgccgcctatctgcgcgtgtccgtagaaggtgggggatgttcgggcttttcctacaagtttgacttcgcgcctgctgtaaatgcggatgatgtcgtgatcgaacgcgacggggcaagtgtgctgatcgacgagatgagcctggagtttctgcaggggtcggagatcgacttttccacagagctgatcggcgcggcgttcaagatcaagaacccgaacgcgaccgcggcctgtggctgcgggaccagtttttcggtctga

SEQ ID NO: 32907 - protein, 113 aa, Hyphomonas neptunium ATCC 15444
MTETIAPDVTLTASAAKRINAILAKQDGAAYLRVSVEGGGCSGFSYKFDFAPAVNADDVVIERDGASVLIDEMSLEFLQGSEIDFSTELIGAAFKIKNPNATAACGCGTSFSV

SEQ ID NO: 32908 - DNA, 360 bp, Hyphomonas neptunium ATCC 15444
  CDS (1)..(360): transl_table=11
atggcccgtagacctcgtccgaaacctgtccgcctgtctgacgccgctgccgagcgggtcaaagacatcatggctgaacgcggcatgggctatctgcgcgtgggcgtcaccaatggtggctgcgcgggcatggaatacgttatggactatgcctctgagcctgctgccctcgatgaggtggtggaggacaatggcgtcaccatcctgatcgacgccaaggctgtgctgttcctgctgggcagtgaactcgactacgaaaccacgctgcttcacgagaaattcgtgttccggaaccccaaccagaccgatgcctgcggctgcggcgagagcgtgacgatcgtgccggcagcggctgaatag

SEQ ID NO: 32909 - protein, 119 aa, Hyphomonas neptunium ATCC 15444
MARRPRPKPVRLSDAAAERVKDIMAERGMGYLRVGVTNGGCAGMEYVMDYASEPAALDEVVEDNGVTILIDAKAVLFLLGSELDYETTLLHEKFVFRNPNQTDACGCGESVTIVPAAAE

SEQ ID NO: 32910 - DNA, 333 bp, Rhizobium leguminosarum bv. viciae 3841
  CDS (1)..(333): transl_table=11
atgacggatacgagtgtaaccctttcagatgccgcggcaaagcgcatcgctgcgatcgtcggcgccgaagccggcaagagcgccttgcgcgtttctgtcgaaggcggcggctgttcgggcttttcctacaagttcgatcttgccgacagcgctgacgacgacgacatcatcgtcgaaaagaacgatgccaaggtgctgatcgacagcctttcgctcgtctatatggcgggctcggaaatcgacttcgtcgacaatctgcttggccaatccttccagatcaagaacccgaacgcggtggcaagctgcggctgcggcaccagtttctcgatctga

SEQ ID NO: 32911 - protein, 110 aa, Rhizobium leguminosarum bv. viciae 3841
MTDTSVTLSDAAAKRIAAIVGAEAGKSALRVSVEGGGCSGFSYKFDLADSADDDDIIVEKNDAKVLIDSLSLVYMAGSEIDFVDNLLGQSFQIKNPNAVASCGCGTSFSI

SEQ ID NO: 32912 - DNA, 324 bp, Solibacter usitatus Ellin6076
  CDS (1)..(324): transl_table=11
atggttcaaattaccgatagagcggttggcaaggttcgcgagatcatggcgtcccaggagccggctccggctggacttcgcatagcggtggtcggcggcggttgttccgggttcagctactcgatggcctttgaaaaccagcccaacgttctcgacaagacttacaactacgagggtctgaaaatcttcgtcgatcaggccagccttctgtacctcgatggcgccgaagtggattacgtcgaaacgctcgaaggctccggcttcaagttcaacaacccgcaagtgaaatccacctgcggctgcggaagttccttccaggtctaa

SEQ ID NO: 32913 - protein, 107 aa, Solibacter usitatus Ellin6076
MVQITDRAVGKVREIMASQEPAPAGLRIAVVGGGCSGFSYSMAFENQPNVLDKTYNYEGLKIFVDQASLLYLDGAEVDYVETLEGSGFKFNNPQVKSTCGCGSSFQV

SEQ ID NO: 32914 - DNA, 366 bp, Magnetococcus sp. MC-1
  CDS (1)..(366): transl_table=11
atgtccatcactttgactgaaaatgcgaccagcaagctgacctcgcttattgctgaagagaacaatcccaaccttaaactgcgtatttttgtctctggtggcggctgttctggctttcagtatggttttacctttgacgaaaatcaggaagataccgatttggtcgttgaatcgggcagcgtcaaggttctggttgaccctacctccattaactatctgcgtggcgcggagatcgactttgtcgaagatctcaatggggcctccttccaaatcaaaaaccccaatgcccaaagcacctgcggttgtggtaactcctttacccccgccgccaccggtggtggtggttgtggtcacgccgccagctaa

SEQ ID NO: 32915 - protein, 121 aa, Magnetococcus sp. MC-1
MSITLTENATSKLTSLIAEENNPNLKLRIFVSGGGCSGFQYGFTFDENQEDTDLVVESGSVKVLVDPTSINYLRGAEIDFVEDLNGASFQIKNPNAQSTCGCGNSFTPAATGGGGCGHAAS

SEQ ID NO: 32916 - DNA, 357 bp, Mycobacterium smegmatis str. MC2 155
  CDS (1)..(357): transl_table=11
atgactgttcaggacgcgaccgccaccgaaacccacggtgtcaccctgacggacgctgccgccgccaaggccaaggcgctgctggaccaggagggccgcgacgacctcgcgctgcgcatcgccgtccagccgggtggttgcgccggtctgcgctacaacctgttcttcgacgaccgcaccctcgacggggacctcaccgccgagttcggcggcgtgacgctgaccgtcgaccggatgagcgcgccgtacgtgcagggcgcgacgatcgacttcgtcgacaccatcgagaagcagggcttcacgatcgacaaccccaacgccaccggctcatgcgcctgcggcgacagcttcaactga

SEQ ID NO: 32917 - protein, 118 aa, Mycobacterium smegmatis str. MC2 155
MTVQDATATETHGVTLTDAAAAKAKALLDQEGRDDLALRIAVQPGGCAGLRYNLFFDDRTLDGDLTAEFGGVTLTVDRMSAPYVQGATIDFVDTIEKQGFTIDNPNATGSCACGDSFN

SEQ ID NO: 32918 - DNA, 351 bp, Azoarcus sp. BH72
  CDS (1)..(351): transl_table=11
atgaacgcagcagttgaaacccccgaaattctcgtcttcaccgacaacgccgccaacaaggtgcgcgaactcatcgatgaggaaggcaatccggcgctgaagctccgcgtgttcgtcactgggggcggctgttccggcttccagtacggcttcaccttcgatgaggaagtgaacgaagacgacaccgctttcgaaaagaacggcgtcaccctgctgatcgatccgatgagctatcagtaccttgtcggcgctgaaatcgattacaccgaagggcttgaaggctcgcagttcgtgatccgcaaccccaatgccaccagcacgtgcggatgcggttcctcgttctccgcgtga

SEQ ID NO: 32919 - protein, 116 aa, Azoarcus sp. BH72
MNAAVETPEILVFTDNAANKVRELIDEEGNPALKLRVFVTGGGCSGFQYGFTFDEEVNEDDTAFEKNGVTLLIDPMSYQYLVGAEIDYTEGLEGSQFVIRNPNATSTCGCGSSFSA

SEQ ID NO: 32920 - DNA, 375 bp, Acidovorax sp. JS42
  CDS (1)..(375): transl_table=11
atgagcgccgttgccgagaacaccacgaccgagatgcccgcccccatccttttcaccgacagcgccgccgccaaggtggccgagttgattgccgaagaaggcaatcctgacctcaagctgcgggtcttcgtgcagggcgggggatgctcgggcttccagtatggtttcacatttgatgaaatcacgaacgaagacgacaccaccatgaccaagaacggtgtgtcactgctcatcgatgccatgagctaccaatacttggtgggtgcagagatcgactacaaggaagacctgcagggtgcgcagttcgtcatcaagaacccgaatgccgcttcgacatgcggctgcggctccagcttctccgtggaagaccactga

SEQ ID NO: 32921 - protein, 124 aa, Acidovorax sp. JS42
MSAVAENTTTEMPAPILFTDSAAAKVAELIAEEGNPDLKLRVFVQGGGCSGFQYGFTFDEITNEDDTTMTKNGVSLLIDAMSYQYLVGAEIDYKEDLQGAQFVIKNPNAASTCGCGSSFSVEDH

SEQ ID NO: 32922 - DNA, 354 bp, Magnetospirillum magnetotacticum MS-1
  CDS (1)..(354): transl_table=11
atggccgaggtcgaacacaattacgccgcgcgcgtcaccgtcaccgaaagcgccgccgagcgcgtccagaccctgatcaagatggagggcaagcccaatatgatgctgcgcctgggcgtctcgggcggcggctgttccggcttttcctacggcatttccctggatgatcaggtcaatgacgacgaccgtctgttcaacgagtacggcatcaccgtggtggtggaccagacctctttggacatgctggacggctcggtggtggatttcgtcgaagacctttccggctcgtccttccaggtcaagaatcccaacgctacctccacctgcggctgcggcagttcgttttcggtgtag

SEQ ID NO: 32923 - protein, 117 aa, Magnetospirillum magnetotacticum MS-1
MAEVEHNYAARVTVTESAAERVQTLIKMEGKPNMMLRLGVSGGGCSGFSYGISLDDQVNDDDRLFNEYGITVVVDQTSLDMLDGSVVDFVEDLSGSSFQVKNPNATSTCGCGSSFSV

SEQ ID NO: 32924 - DNA, 357 bp, Nostoc punctiforme PCC 73102
  CDS (1)..(357): transl_table=11
atgacacaagcaattcagtctcaacaacgcggaattctgttgagcgaagccgcattgcaccaggtaaaatccctccgagacaagcaaggcacagacttctgcttacgggtaggagtccgtcagggtggctgttctgggatgtcttacatgatggactttgaagacactagcaagatcaccccgcaggatgaagtttttgactatgatggcttcaaaattgtcagcgatcgcaagagtctcttatatctctacggtttaatgctcgattacagcgatgccatgattggtggtggctttcaatttactaaccctaatgccaaccaaacttgcggttgtggcaagtcatttggggtttag

SEQ ID NO: 32925 - protein, 118 aa, Nostoc punctiforme PCC 73102
MTQAIQSQQRGILLSEAALHQVKSLRDKQGTDFCLRVGVRQGGCSGMSYMMDFEDTSKITPQDEVFDYDGFKIVSDRKSLLYLYGLMLDYSDAMIGGGFQFTNPNANQTCGCGKSFGV

SEQ ID NO: 32926 - DNA, 342 bp, Haemophilus somnus 2336
  CDS (1)..(342): transl_table=11
atggcagatattgcagttcctttgacatttactgatgcagcggcaaataaagtcaaaaccttaatttcagaagaagaaaatacagaattaaaattacgtgtttatattaccggtggggggtgtagtggtttccaatatggctttactttcgatgaaaaaaccaatgacggcgatttaatcgttgaaaattcaggcgttaaattggttgtagatccaatgagtttacaatacctggtcggtggtactgtggactatactgaaggtttagaaggctcaagatttattgtaaacaatccaaatgcatcaacaacttgcggttgcggctcatcttttagcatctaa

SEQ ID NO: 32927 - protein, 113 aa, Haemophilus somnus 2336
MADIAVPLTFTDAAANKVKTLISEEENTELKLRVYITGGGCSGFQYGFTFDEKTNDGDLIVENSGVKLVVDPMSLQYLVGGTVDYTEGLEGSRFIVNNPNASTTCGCGSSFSI

SEQ ID NO: 32928 - DNA, 333 bp, Rickettsia akari str. Hartford
  CDS (1)..(333): transl_table=11
atgaaaaatgttatttcattaaccgattctgctgcaaagcaagtaaaattgctaatagaaaaacgagacaagcctacctttggtgttagggtaggggttaagtcaggcggttgtgccggtcagacttattacgttgaatatgccgatagtaaaaatcaattcgatgaagtagttgaagaaaagggtgtacggatactaatcgacccaaaagcattaatgtatattctaggttctgaaatagactatgtagagactaaattcaaatcccaattcactttcaccaatcctaacgaaaaagcaggttgcggctgtggcaaatcctttagtgtgtga

SEQ ID NO: 32929 - protein, 110 aa, Rickettsia akari str. Hartford
MKNVISLTDSAAKQVKLLIEKRDKPTFGVRVGVKSGGCAGQTYYVEYADSKNQFDEVVEEKGVRILIDPKALMYILGSEIDYVETKFKSQFTFTNPNEKAGCGCGKSFSV

SEQ ID NO: 32930 - DNA, 357 bp, Crocosphaera watsonii WH 8501
  CDS (1)..(357): transl_table=11
atgacacaagccactcaaacccccacaaaaggaattcaactgactgaaacagccctcaagcaagttctcatgttaagggaacaagaaggaaaagacctctgcttgcgtgttggggttcgtcagggaggatgttccggaatgtcctatattatggactttgaagacgttagtaatattggtgaacaagatgaagtctatgattatgatggcttcaaaattgtttgcgatcgcaaaagtcttctttatctctacggcctcgtcctagattatagtaacgccatgattgggggtggttttgaatttactaaccccaacgccaaccaaacttgtggctgtggtaagtcctttggtgtttaa

SEQ ID NO: 32931 - protein, 118 aa, Crocosphaera watsonii WH 8501
MTQATQTPTKGIQLTETALKQVLMLREQEGKDLCLRVGVRQGGCSGMSYIMDFEDVSNIGEQDEVYDYDGFKIVCDRKSLLYLYGLVLDYSNAMIGGGFEFTNPNANQTCGCGKSFGV

SEQ ID NO: 32932 - DNA, 378 bp, Croceibacter atlanticus HTCC2559
  CDS (1)..(378): transl_table=11
atggtaaaacaagccattttcagtatatttgcacatattttcaaaacgatgattaaagtaagcgaaggcgcaaaaaatagaatctcatctctcatggcagagagtggttatgatgcattaaaagattacgttcgagtaggcgtaaaaagtggcggttgcagcgggttgtcttatgacttagattttgataataagacagaagaaaccgataaggtttttgaagacaactcaattaaaattgtagtagataaacgaagctttttatacctagtaggaacaaccttagaatatagcggtggtcttaatggtaaaggttttgtttttaataatccaaatgcacaaagaacttgcggctgtggagaaagcttctcgttataa

SEQ ID NO: 32933 - protein, 125 aa, Croceibacter atlanticus HTCC2559
MVKQAIFSIFAHIFKTMIKVSEGAKNRISSLMAESGYDALKDYVRVGVKSGGCSGLSYDLDFDNKTEETDKVFEDNSIKIVVDKRSFLYLVGTTLEYSGGLNGKGFVFNNPNAQRTCGCGESFSL

SEQ ID NO: 32934 - DNA, 393 bp, Prochlorococcus marinus str. MIT 9211
  CDS (1)..(393): transl_table=11
atgagcacatcacagccagttgttgaaacccataccgctcgtgatgggaaaggcatcatcattactcaaacggccatgaatcagttggccagattatgtagtgaacaaggcaaagataaagtgcttcgtgttggggttcgctctggtggttgcagtggaatgagttacacaatggattttatctccaatcaagagattcaagaagttgatgaaacctatgaatatcagtcgcctggaggtaaatcttttcaggttgtttgtgaccctaaaagtcttttatatatttatggaatgcaactggatttcagtactgatttaattggtggtggatttaacttcaccaacccaaatgcaactcaaacatgtggatgtggcagttcttttgctgtttga

SEQ ID NO: 32935 - protein, 130 aa, Prochlorococcus marinus str. MIT 9211
MSTSQPVVETHTARDGKGIIITQTAMNQLARLCSEQGKDKVLRVGVRSGGCSGMSYTMDFISNQEIQEVDETYEYQSPGGKSFQVVCDPKSLLYIYGMQLDFSTDLIGGGFNFTNPNATQTCGCGSSFAV

SEQ ID NO: 32936 - DNA, 444 bp, Synechococcus sp. WH 5701
  CDS (1)..(444): transl_table=11
atgagcagccccaccaccgatgcccccgccacggtccaggaggccgccaccacagcggttgtcgccccagcggtggccacccacaccggcaaggacggcaagggcatccgcatcaccgaaccggccatgaagcagctggccgccctgatgcagcagcagggcaacgacaagcttctgagggtgggggtgcgctccggtggctgcagcggcatgagctacaccatggatttcatcgacagcgccgcgatccgcggcgacgatgagctgtacgtctatgagcctgacggggcttctagcttccgggtggtgagcgatcccaagagcctgctgtacatctacggcatgcagctggatttcagctcggccctgatcggtggcggcttcaacttcaccaaccccaatgccagccagacctgcggctgcggcagctccttcgcggtctga

SEQ ID NO: 32937 - protein, 147 aa, Synechococcus sp. WH 5701
MSSPTTDAPATVQEAATTAVVAPAVATHTGKDGKGIRITEPAMKQLAALMQQQGNDKLLRVGVRSGGCSGMSYTMDFIDSAAIRGDDELYVYEPDGASSFRVVSDPKSLLYIYGMQLDFSSALIGGGFNFTNPNASQTCGCGSSFAV

SEQ ID NO: 32938 - DNA, 339 bp, Pseudoalteromonas tunicata D2
  CDS (1)..(339): transl_table=11
atgtcagatcaaattccaattaagtttaccgatgctgctgctaacaaagtaaagcaactgattgaagaagaggaaaatccacagctaaaattacgtgtatatgttacaggtggtgggtgttctggtttccaatatggttttacatttgatgaaaaaactaacccaggcgatttagaaatcgttaaaagtggtgtgacattagttgttgatcctatgagccttcaatatttagttgatggtgaggttgattataccgaaggcctagaaggttctcgtttttttgttaataacccaaatgcgactgcaacatgtggctgtggttcatcatttagcgtttag

SEQ ID NO: 32939 - protein, 112 aa, Pseudoalteromonas tunicata D2
MSDQIPIKFTDAAANKVKQLIEEEENPQLKLRVYVTGGGCSGFQYGFTFDEKTNPGDLEIVKSGVTLVVDPMSLQYLVDGEVDYTEGLEGSRFFVNNPNATATCGCGSSFSV

SEQ ID NO: 32940 - DNA, 342 bp, Photobacterium sp. SKA34
  CDS (1)..(342): transl_table=11
atgagcgatgctaatttgccgctaactttttctgatgttgcagcgaataaagtaaaaacactgatcgctgaagaagaaaacccgaatctaaagctacgtgtttatatcactggtggtggctgtagtggctttcaatatggctttacttttgatgaaaaagtaaatgatggtgatatgaccattgaaaatagcggtgtaacgctagtggttgatcctatgagtctccagtacctaatgggtggtatagttgattacactgaaggtctagaaggttcgcgtttctttgttaacaatccaaatgcaacaacgacttgtggttgtggcgcatcatttagtgtttaa

SEQ ID NO: 32941 - protein, 113 aa, Photobacterium sp. SKA34
MSDANLPLTFSDVAANKVKTLIAEEENPNLKLRVYITGGGCSGFQYGFTFDEKVNDGDMTIENSGVTLVVDPMSLQYLMGGIVDYTEGLEGSRFFVNNPNATTTCGCGASFSV

SEQ ID NO: 32942 - DNA, 357 bp, Oceanospirillum sp. MED92
  CDS (1)..(357): transl_table=11
atgatagaaacagttgaaccaggtctagagcaggaaatggcgtttaccgcgtctgcagctgcaaaagttaaatcgctaatcgaagaagaagagaacgatagcctgaagctacgcgtatttattacgggtggtggctgtgcaggcttctcctatggttttaccttcgatgaaagcgctgccgatgacgataccgtgattgagcgtgatggtgtaacaatggtggttgatccaatgagtttccagtatctcgttggttctgaagtcgatttcaaagaagggctgcaaggttctcagtttgttatcaacaaccctaacgcaacgacaacttgtggttgcggctcctctttctctatctaa

SEQ ID NO: 32943 - protein, 118 aa, Oceanospirillum sp. MED92
MIETVEPGLEQEMAFTASAAAKVKSLIEEEENDSLKLRVFITGGGCAGFSYGFTFDESAADDDTVIERDGVTMVVDPMSFQYLVGSEVDFKEGLQGSQFVINNPNATTTCGCGSSFSI

SEQ ID NO: 32944 - DNA, 399 bp, Flavobacteria bacterium BBFL7
  CDS (1)..(399): transl_table=11
ttgaatacggcaaggttcagaaatggctgttgtatatttgtggtcattttaaataaggatttaaagcatatgataaatgtatcgaacacggcaaaaactaagcttgctcaattaatgggtgaagatggttttgctataggtaatgattatgtgcgtgtaggtgttaaaagtggaggttgtagtggattatcttacgacctgacatttgataaaacaactacagacacagataaggtttttgaagcaaatgatgtgcgcattgttgtggataaaaaaagctttttatatctcgttgggactacactagaatttagcggtggtttaaatgggaaaggatttgtttttaataatcctaacgcacaaagaacttgtggttgtggagagagcttttctctatag

SEQ ID NO: 32945 - protein, 132 aa, Flavobacteria bacterium BBFL7
MNTARFRNGCCIFVVILNKDLKHMINVSNTAKTKLAQLMGEDGFAIGNDYVRVGVKSGGCSGLSYDLTFDKTTTDTDKVFEANDVRIVVDKKSFLYLVGTTLEFSGGLNGKGFVFNNPNAQRTCGCGESFSL

SEQ ID NO: 32946 - DNA, 402 bp, Rickettsiella grylli
  CDS (1)..(402): transl_table=11
atgtcaaaagcatcaccgcattgtcatccccaagaaccatttttcactgaaacgcagcccgtgagaattactgaaagcgcagcgcataaaatagaagcgctcatcacggaagaaggaaattcacaattaaaattgcgcgtatttattaccgggggtggttgttctggttttcaatatggatttagttttgaggaagcgatgaatgaagatgatacgctgatcatccaaaaaaatggcaaggatcaaaaaagggaggttcaattattgattgaccccattagtttgggctatttaaccggcgcagaaatcgattataaatcagacttaacaggcgaacaatttatcatacgtaatccgaatgctaaaacgacgtgcggctgtggttcttcctttggaatttaa

SEQ ID NO: 32947 - protein, 133 aa, Rickettsiella grylli
MSKASPHCHPQEPFFTETQPVRITESAAHKIEALITEEGNSQLKLRVFITGGGCSGFQYGFSFEEAMNEDDTLIIQKNGKDQKREVQLLIDPISLGYLTGAEIDYKSDLTGEQFIIRNPNAKTTCGCGSSFGI

SEQ ID NO: 32948 - DNA, 330 bp, Oceanobacter sp. RED65
  CDS (1)..(330): transl_table=11
atgagtgaaatgtccctgaccccagcggctgtgggtaaaattcaggcgctaatcgaggatgaaggggatgatagcctttgcttgcgtgtatttgttacgggcggaggctgctctggttttcaatatggttttacttttgatactgaagtagccgaagatgatgcgcaaatgcagcaagacggcgtaaaggtgcttgtggattcattaagctacccttatttggagggggcgagtgtggattaccaagaaaacttggaaggttcgcgctttgtagtaagcaacccacaagcctctacaacatgtggttgcggttcttcattcacgatctag

SEQ ID NO: 32949 - protein, 109 aa, Oceanobacter sp. RED65
MSEMSLTPAAVGKIQALIEDEGDDSLCLRVFVTGGGCSGFQYGFTFDTEVAEDDAQMQQDGVKVLVDSLSYPYLEGASVDYQENLEGSRFVVSNPQASTTCGCGSSFTI

SEQ ID NO: 32950 - DNA, 324 bp, Vibrio sp. Ex25
  CDS (1)..(324): transl_table=11
atggccatcacaatgacagaatcagcggcaagtcgcgtaagagcattcctagataaccgaggcaaaggtatcggtttacgtcttggagtgaagacgactggttgttcaggcatggcatatgtacttgagtttgttgatgagcttaacgaagaagatgaagtttttgaactctctggagtgaaaatcatcatcgacaaaaaaagcttagtgtacctagacggtaccgaattggattacgtgaaagaagggttgaatgaaggttttgaattcaacaaccctaacgcgaaaagtgaatgtggttgtggtgaaagcttcaacgtctaa

SEQ ID NO: 32951 - protein, 107 aa, Vibrio sp. Ex25
MAITMTESAASRVRAFLDNRGKGIGLRLGVKTTGCSGMAYVLEFVDELNEEDEVFELSGVKIIIDKKSLVYLDGTELDYVKEGLNEGFEFNNPNAKSECGCGESFNV

SEQ ID NO: 32952 - DNA, 339 bp, Alteromonadales bacterium TW-7
  CDS (1)..(339): transl_table=11
atgtcagaagaattaccaattcagtttagcgatgcagcagctgttcgtgttaaacaattaatcgatgaagaagaaaacccagaactaaaactgcgtgtttacgtaacgggtggtggatgttctggctttcagtacggttttacttttgatgaaaaagcaaatcctggcgatttagaaattgtaaaaaatggcgtaacgctagtggttgaccctatgagtattcaatatttagttgacggtgtagttgactatactgagggcttagaaggtgcacgcttttttgtatctaacccgaacgcaacaaccacatgtggttgtggtgcaagttttagtgtgtaa

SEQ ID NO: 32953 - protein, 112 aa, Alteromonadales bacterium TW-7
MSEELPIQFSDAAAVRVKQLIDEEENPELKLRVYVTGGGCSGFQYGFTFDEKANPGDLEIVKNGVTLVVDPMSIQYLVDGVVDYTEGLEGARFFVSNPNATTTCGCGASFSV

SEQ ID NO: 32954 - DNA, 354 bp, marine gamma proteobacterium HTCC2143
  CDS (1)..(354): transl_table=11
atgtcagcagttgagcaatttaccccgcaggcgctatttttgtcagagcgtgcggtggccaaggttaaaagcctaatagctgaagaggcgaatgacgaccttaaattgcgagtttttgtaaccggtggcgggtgttccggcttttcatacggatttacctttgatgagctggtggctgatgatgatacggtcattgaaacggagggggttgtcgccctgcttgattcgatgagttatcaatatctggtgggtgcagaggttgattatcaggagggtttagaaggctcgcgttttgtggcgataaatccaaatgcagatacaacctgtggctgcggatcttctttttctgtttaa

SEQ ID NO: 32955 - protein, 117 aa, marine gamma proteobacterium HTCC2143
MSAVEQFTPQALFLSERAVAKVKSLIAEEANDDLKLRVFVTGGGCSGFSYGFTFDELVADDDTVIETEGVVALLDSMSYQYLVGAEVDYQEGLEGSRFVAINPNADTTCGCGSSFSV

SEQ ID NO: 32956 - DNA, 354 bp, marine gamma proteobacterium HTCC2080
  CDS (1)..(354): transl_table=11
gtgagtgttgtagaagcgtttgaccccaatgaaatccgccttagcgaaaacgctgttcgcaaggtttcagacttggtcaccgacgaaggtaacccggcactgcagctgcgtgtgtatatcacaggcggcggctgttcgggttttcaatacggttttacctttgatgaggttcgtgccgaggacgactgggtaattgagcgagacggcgttgtggcggtggttgacgcaatgtcttatcaatacctggtgggctctgaggtcgattacaccgaggggcttgagggtgcgcgttttgtggtcaacaaccccaatgcggtcacgacctgcggctgtggcgcctctttttcaatttaa

SEQ ID NO: 32957 - protein, 117 aa, marine gamma proteobacterium HTCC2080
MSVVEAFDPNEIRLSENAVRKVSDLVTDEGNPALQLRVYITGGGCSGFQYGFTFDEVRAEDDWVIERDGVVAVVDAMSYQYLVGSEVDYTEGLEGARFVVNNPNAVTTCGCGASFSI

SEQ ID NO: 32958 - DNA, 369 bp, Escherichia coli B
  CDS (1)..(369): transl_table=11
atggacatgcattcaggaacctttaacccacaagatttcgcctggcaaggcttaacgttgacacccgcagcggcgatacacatctgcgagctggtggcaaagcagccaggtatggtcggcgtgcgcttaggcgtgaagcaaacgggctgcgcgggctttggctatgtgctcgacagtgttagcgagccggacaaagacgatctgctgtttgaacacgacggcgcgaagctgtttgtcccgctgcaagcgatgccgtttattgatggcacggaagtcgatttcgttcgtgaaggacttaatcagatattcaaatttcacaaccctaaagcccagaatgaatgtggctgtggcgaaagctttggggtatag

SEQ ID NO: 32959 - protein, 122 aa, Escherichia coli B
MDMHSGTFNPQDFAWQGLTLTPAAAIHICELVAKQPGMVGVRLGVKQTGCAGFGYVLDSVSEPDKDDLLFEHDGAKLFVPLQAMPFIDGTEVDFVREGLNQIFKFHNPKAQNECGCGESFGV

SEQ ID NO: 32960 - DNA, 354 bp, Marinobacter sp. ELB17
  CDS (1)..(354): transl_table=11
ttgagcgtagttcagcaacaggtatcagccccgctgtttttcagtgacagtgcggcggccaaagccaaagagcttattgatgaagaaggcaacgccgacctcaagttgcgggtgtatgtaaccggtggggggtgttctggctttcagtacgggttttcattcgatgacgcccaagacgatgaagacacaattatcgagcgcgacggcgtgaaactactggtagacccgatgagttatcagtacttggtaggttctacagtcgattatctggaaggtctacagggatcacaatttgtggtgaacaaccccaacgccagctccacttgcggctgcggcagttccttctccatctaa

SEQ ID NO: 32961 - protein, 117 aa, Marinobacter sp. ELB17
MSVVQQQVSAPLFFSDSAAAKAKELIDEEGNADLKLRVYVTGGGCSGFQYGFSFDDAQDDEDTIIERDGVKLLVDPMSYQYLVGSTVDYLEGLQGSQFVVNNPNASSTCGCGSSFSI

SEQ ID NO: 32962 - DNA, 354 bp, Marinobacter sp. ELB17
  CDS (1)..(354): transl_table=11
ttgagcatagttcaggaacatacgataaccccgctgtttctcagtgacagtgcggtgtccaaagtacgtgaactggtcgaagaagaaggtaacgagaacctgaagctgcgggtgttcgtaaccgggggcggctgttctggatttcagtacggcttctcgttcgataaggtgcaagatgatgaagacgcggtgattcaaaaagacggcatgagtatgctggtcgacccgatgagctatcagtatcttgtgggcgcaatggtcgattatcaggaggggctacaaggagcccagtttgtagtgcagaacccgaacgccagctcaacctgtggttgcggcagttcgttcactatctag

SEQ ID NO: 32963 - protein, 117 aa, Marinobacter sp. ELB17
MSIVQEHTITPLFLSDSAVSKVRELVEEEGNENLKLRVFVTGGGCSGFQYGFSFDKVQDDEDAVIQKDGMSMLVDPMSYQYLVGAMVDYQEGLQGAQFVVQNPNASSTCGCGSSFTI

SEQ ID NO: 32964 - DNA, 330 bp, Erythrobacter sp. SD-21
  CDS (1)..(330): transl_table=11
atggccgaaatgctcaccctgaccccagccgccgccaagcgcgttgctgccatcgccgacaagcaggcgaaacccccggtcctgcgcctatcggtggagggcgggggatgttccggcttccagtacaagttcgacctcgccgaagggccggaagacgacgattcggtgagcgataccgatggcgtgaagctggtcgtcgattcggtcagcctcgaccttgtggcgggcagcacggtcgacttcgtcgaatcgctgggcggcgcggctttccgcgtcgagaaccccaacgctgcggccgggtgcggctgcggatcgagctttgggatttag

SEQ ID NO: 32965 - protein, 109 aa, Erythrobacter sp. SD-21
MAEMLTLTPAAAKRVAAIADKQAKPPVLRLSVEGGGCSGFQYKFDLAEGPEDDDSVSDTDGVKLVVDSVSLDLVAGSTVDFVESLGGAAFRVENPNAAAGCGCGSSFGI

SEQ ID NO: 32966 - DNA, 360 bp, Gloeothece sp
  CDS (1)..(360): transl_table=11
atgactgttactcttactgaaaaagctgctctcaaactccgtaccttcttgcaaggggagtcaacgaccattacaggtattcgtgttggtgttacagatggtggctgtaatggctacgaatatgcgttaaatttggttagccaaccaaacaccgcagatatgcgatttgatcaagatgatgttcctatttatgttgaccccaatagtgtgtctttattagatggggtaattatcgattttattgatagtttaacgcaaagtggatttacctttacgaatccaaatgcgactgaaacttgtggctgcggtaagtctttctctacagcaaactgcggtggccaagctactccttgtagctaa

SEQ ID NO: 32967 - protein, 119 aa, Gloeothece sp
MTVTLTEKAALKLRTFLQGESTTITGIRVGVTDGGCNGYEYALNLVSQPNTADMRFDQDDVPIYVDPNSVSLLDGVIIDFIDSLTQSGFTFTNPNATETCGCGKSFSTANCGGQATPCS

SEQ ID NO: 32968 - DNA, 330 bp, Magnetospirillum gryphiswaldense
  CDS (1)..(330): transl_table=11
atgtccaacgtcatcctgaccgaaagcgccgcccagcgcgttcaagccctgatcgccatggagggcaagcccaacatgatgctgcgcgtggccgtttccggcggcggctgttcaggctttcaatacaatatcgagctggacgacaagaccggcgaagacgacgtcgtcaccgaacatcacggcgtcaagctggtggtcgaccagacctcgcttgatctgctggacggcaccgaggtggatttcgtcgaggatctgatgggcgccagcttccagttccgcaatccgcaagccacctcgacctgcggctgcggttccagcttttccatgtaa

SEQ ID NO: 32969 - protein, 109 aa, Magnetospirillum gryphiswaldense
MSNVILTESAAQRVQALIAMEGKPNMMLRVAVSGGGCSGFQYNIELDDKTGEDDVVTEHHGVKLVVDQTSLDLLDGTEVDFVEDLMGASFQFRNPQATSTCGCGSSFSM

SEQ ID NO: 32970 - DNA, 360 bp, Synechococcus sp
  CDS (1)..(360): transl_table=11
atgacagtcaatcttaccgataaagccgcctttagattgcgtaccttcatcagaggcgaggggtcaaaagttacgggtattcgggttggggtcaaagatggtggctgtaatggctatgaatatacccttaatctggttaaagaacccaacagcgaagatttacgctttgaacaaaacaatgttcctatctatgttgatgtccatagcgcatctttattagagggagttgtgattgattttgtcgaaagtttgacccaaagtggatttacctttactaatcctaatgccagcgatacttgtggctgtggtaaatctttttcggcggcaaattgtggcagtagcgcaaccccttgtagctaa

SEQ ID NO: 32971 - protein, 119 aa, Synechococcus sp
MTVNLTDKAAFRLRTFIRGEGSKVTGIRVGVKDGGCNGYEYTLNLVKEPNSEDLRFEQNNVPIYVDVHSASLLEGVVIDFVESLTQSGFTFTNPNASDTCGCGKSFSAANCGSSATPCS

SEQ ID NO: 32972 - DNA, 459 bp, Ostreococcus tauri
  CDS (1)..(459)
atgcgtcgcgcgctcgcgcgcatcgccgcgcgcgcgagtgcgcgcgcgacgccgcgcgcgcggacgtcgcgcgaggggagattcgcatcgaatgcgatcggtgccgacgccgacgacggcgtcacgctcacggacgcgtgcgccgcgcgcgtgcgcgcgctcgagcgcgaggagggcggggcgacgcgcctgcggttggcggtccgggggggggggtgctcggggttcacgtacgagttcaccctcgagcgcggcgcgagggctggggcggatgacaagacgtttcgagcggcgaacggggcggaggtggtcgtggacggcgtctcgtacgagtacgtcaagggaagcacgattgattacgtggaggagatgataaagagctcgtttgaggtggtgaagaatccgagggcgaaagggagctgtgggtgcggggcgtcgttcgacgcggaggacgcgtga

SEQ ID NO: 32973 - protein, 152 aa, Ostreococcus tauri
MRRALARIAARASARATPRARTSREGRFASNAIGADADDGVTLTDACAARVRALEREEGGATRLRLAVRGGGCSGFTYEFTLERGARAGADDKTFRAANGAEVVVDGVSYEYVKGSTIDYVEEMIKSSFEVVKNPRAKGSCGCGASFDAEDA

SEQ ID NO: 32974 - DNA, 537 bp, Medicago truncatula
  CDS (1)..(537)
atggctggtgctgctttctttgcaattactactactaccgcgcactgctctccccaattggttcgcgttccaatcactcatacctctctctcttttcgatcttcaacaccaattctcaatcgccgttttagccctaaacctctctctattcgatcactttccgtttctgcttccgctgcacctgcatctggggccgtggcacctgcaatttcgcttaccgataatgcactcaatcacttgaataagatgaggtctgaacgaagtcaagatctgtgtttaagaataggtgtcaaacagggtgggtgctctggtatgtcatacacaatggattttgaggacagggctaatgcaaggccagatgactccatcattgaatacaaaggttttgtaattgtttgtgatcctaagagcctactcttcgtatttggaatgcaattagactacagtgatgctctgatcgggggaggcttcaatttcaagaatcctaatgcgacacaaacctgtggatgtggtaaatcatttaatgcagaaatgtaa

SEQ ID NO: 32975 - protein, 178 aa, Medicago truncatula
MAGAAFFAITTTTAHCSPQLVRVPITHTSLSFRSSTPILNRRFSPKPLSIRSLSVSASAAPASGAVAPAISLTDNALNHLNKMRSERSQDLCLRIGVKQGGCSGMSYTMDFEDRANARPDDSIIEYKGFVIVCDPKSLLFVFGMQLDYSDALIGGGFNFKNPNATQTCGCGKSFNAEM

SEQ ID NO: 32976 - DNA, 483 bp, Medicago truncatula
  CDS (1)..(483)
atgcaaacatcgctgtttcgaagactcgctccattattggcagcacgatttcaacggaaccagaatattataagctctttttcatcttcatcttcttcttccgttcttcaccatgccacatcttcaccgtcttctcccgacgtggaacctgtccacataaccgaaaactgcgttcgcaaaatgaaggaattggatgccaatgaatcatcatccggtggaaaaatgcttcgtttaagcgtagaaaccggtggatgttcaggatttcagtatgcttttaatttggatgacagattcaactcagatgatagagttttcgagaaggaaggaattaaactggttgttgacaatatttcatacgactttgtgaaaggcgcaactgttgattatgtcgaggagctaatccgttcggctttcatagtgacggagaacccaagtgcagttggtggttgcagttgtaaaagttccttcatggtgaaacagtag

SEQ ID NO: 32977 - protein, 160 aa, Medicago truncatula
MQTSLFRRLAPLLAARFQRNQNIISSFSSSSSSSVLHHATSSPSSPDVEPVHITENCVRKMKELDANESSSGGKMLRLSVETGGCSGFQYAFNLDDRFNSDDRVFEKEGIKLVVDNISYDFVKGATVDYVEELIRSAFIVTENPSAVGGCSCKSSFMVKQ

SEQ ID NO: 32978 - DNA, 321 bp, Herbaspirillum seropedicae
  CDS (1)..(321): transl_table=11
atgagcatcaccctcactgaaaacgccgcgcgccgcgtacacgccttcctggccaagcgcagcgctgtcggcttgcgcctggcagtcaagaccagcggctgctccggcatggcttacgcgctcgaatatgccgacgtcgccgagccgcaggatgtgcgcttcgaaagccatggcgtgaccgtgctgatcgatcccaagagcctgccctacctggatggcaccgagctggacttcgtgcgcgaagggctcaacgaaggcttcaagttcaacaatcccaacgccaagaaccagtgcggttgcggcgaaagcttcgcggtctag

SEQ ID NO: 32979 - protein, 106 aa, Herbaspirillum seropedicae
MSITLTENAARRVHAFLAKRSAVGLRLAVKTSGCSGMAYALEYADVAEPQDVRFESHGVTVLIDPKSLPYLDGTELDFVREGLNEGFKFNNPNAKNQCGCGESFAV

SEQ ID NO: 32980 - DNA, 714 bp, Aspergillus oryzae
  CDS (1)..(714)
atgtccttcagcagagttacggttcgctctccagtgacatcatccgccacgatgttgcgctgtgtgagaagcccctacaagacccccgcccatcgtctgttctcctcatatggaaatgcacaccggtcttccaagcgcgacatgcagaccgctactgcgtatcgcccgcattccttgccgaccgcttttccacctccccggagcggcggaagttacgacacctctatctcagcagatttccctccgctccgagagacagcgacacagcagcaaggaatcttcccaaatgtcagtctcagagagaatgaggcgcagaagtccaagcccgtcgaatccacttctccagccccgaagcccgcggaaaagcctaggaggaagctacgtgcacggaaagcggctatgaagttaacacccgaggctatcgttcaactccgtaaactactgtctcagccggacccgaaattgatccgagttggcgtaaagaaccgtggctgctccggtctcgcctaccacctcgaatacgtggagaagccgggtaccttcgatgaagtggtggaacaggatggcgtcaaggttttgattgacagcaaggcgttgttcagcatcatcggtagtgaaatggattggcaagaagataagttgagcaggagattcatcttcaagaacccaaatatcaaggaatcatgtggatgcggtgaatcctttatggtttag

SEQ ID NO: 32981 - protein, 237 aa, Aspergillus oryzae
MSFSRVTVRSPVTSSATMLRCVRSPYKTPAHRLFSSYGNAHRSSKRDMQTATAYRPHSLPTAFPPPRSGGSYDTSISADFPPLRETATQQQGIFPNVSLRENEAQKSKPVESTSPAPKPAEKPRRKLRARKAAMKLTPEAIVQLRKLLSQPDPKLIRVGVKNRGCSGLAYHLEYVEKPGTFDEVVEQDGVKVLIDSKALFSIIGSEMDWQEDKLSRRFIFKNPNIKESCGCGESFMV

SEQ ID NO: 32982 - DNA, 327 bp, Tremblaya princeps
  CDS (1)..(327): transl_table=11
gtgctacagctaaccaactgtgctgtgctcagactgaggggcatggttgcatgccacggcaaaagctgcgtgccgcttagggttttcgtcaagggcggcgggtgcaaaggcatgcgacataagttctgcctggcgtcatgccgcaccgtaggagacgcaggcatgacaaggctaggcgtacgccttgttgcagaccctcttagcctcatgtacctacgcggttctattgtggactgtggcacaggggttggagacgcgcgcttagtggtgtaccaaccaagtgctggcatggtgtgcagctgcggcgcctcgttcacgccagtatag

SEQ ID NO: 32983 - protein, 108 aa, Tremblaya princeps
MLQLTNCAVLRLRGMVACHGKSCVPLRVFVKGGGCKGMRHKFCLASCRTVGDAGMTRLGVRLVADPLSLMYLRGSIVDCGTGVGDARLVVYQPSAGMVCSCGASFTPV

SEQ ID NO: 32984 - DNA, 390 bp, Chlamydomonas reinhardtii
  CDS (1)..(390)
atgaaatcgacgcttggtctcttagcggaggcattgaaggaaactgcacgcagcccgcgaatgcggaaagcggcggtggagcttacggaagcagcagcaggtcgaataaaagaactgctgaacaagcgacacaaggaatacttaaagcttggggtaaaaacgcgaggttgcagtggcatgagctacacgctcaactatgcagacaacaagggcaagttcgatgaggtggttgaggacaagggggtgcgcatcatcatcgaaccgcaggcgctcatgcacgtgctgggcaccaagatggattacgtgaaggacgacctccggcaagagttcgtcttcgtcaatcccaacgcgaaggggacctgcggctgtggggagtcctttacgacatga

SEQ ID NO: 32985 - protein, 129 aa, Chlamydomonas reinhardtii
MKSTLGLLAEALKETARSPRMRKAAVELTEAAAGRIKELLNKRHKEYLKLGVKTRGCSGMSYTLNYADNKGKFDEVVEDKGVRIIIEPQALMHVLGTKMDYVKDDLRQEFVFVNPNAKGTCGCGESFTT

SEQ ID NO: 32986 - DNA, 321 bp, Acetobacter diazotrophicus
  CDS (1)..(321): transl_table=11
atgattgagatgacccccagcgcgtgtgaggcggtacgcgcggccatcgccggtgcagcgaccccggtcgagggaatccggatcatggtcgaatccggtggatgctcgggtttcaaatacatgatgggcctggtcgcggcgcccgaaccctcggacgtcgtggttgacatcgacggcgtcaaggtcttcgtcgatgccgaaagcgggccacatctgcagggcaccaaggtcgatttcgtggtgacgctggaacagtcgggcttctcgttcgacaatccgaatgcggcatcgaaatgttcctgcggaaagtcctttaactga

SEQ ID NO: 32987 - protein, 106 aa, Acetobacter diazotrophicus
MIEMTPSACEAVRAAIAGAATPVEGIRIMVESGGCSGFKYMMGLVAAPEPSDVVVDIDGVKVFVDAESGPHLQGTKVDFVVTLEQSGFSFDNPNAASKCSCGKSFN

SEQ ID NO: 32988 - DNA, 786 bp, Neurospora crassa
  CDS (1)..(786)
atgaacgcgcaaaggattctttcgaggaggacgctctcgtccgccctctgcaacagcaaccgcaccgtcgctcacgcccagcgccaccaattcagcacgacgccctcacccgccgtcaccgctttccagtcctacactcttccctcgcacccgccatcgccgccgcgctccggaaatgactccatggctttccccgtccagccgcccatgccgcgcgtacacgagacaagacctcacaagattgcgtcgccaccgaagcagcagcagcagcagcagcaacaactaaacaactttgcgcaaacgtcaccatctacatcatcaagcccctctcagcccacccccgttgctcccaagcaagaacaatccaaggccgccgccgccgcagcacaagcctcctccgcccccacgcaaccaacgccctccaagcccgccccccgcgcctcccgcctgcgcgcccctcgcaaggccgccatcaacctcacgtccgcggctgtcgagcacctgcgcgccatgctggaccagccggagccgaagctgatcaaagtcggcgtgcgcaaccgggggtgcagcgggctggcgtaccacctggagtacgtggacaaggccggggcatttgacgagacggtggagcaagacggcgtcaaggtcttgattgacagcaaggcgctcttcagcatcattggcagtgaaatggactgggtggaggataagttgagtcagcggtttgttttcaggaatcctaatattaaggagcaatgcggttgtggagagtcattcatggtatga

SEQ ID NO: 32989 - protein, 261 aa, Neurospora crassa
MNAQRILSRRTLSSALCNSNRTVAHAQRHQFSTTPSPAVTAFQSYTLPSHPPSPPRSGNDSMAFPVQPPMPRVHETRPHKIASPPKQQQQQQQQLNNFAQTSPSTSSSPSQPTPVAPKQEQSKAAAAAAQASSAPTQPTPSKPAPRASRLRAPRKAAINLTSAAVEHLRAMLDQPEPKLIKVGVRNRGCSGLAYHLEYVDKAGAFDETVEQDGVKVLIDSKALFSIIGSEMDWVEDKLSQRFVFRNPNIKEQCGCGESFMV

SEQ ID NO: 32990 - DNA, 366 bp, Plectonema boryanum
  CDS (1)..(366): transl_table=11
atgacggttactttgacggaaagagcagaacttcgcctgcgcgcattcttgcaaggcacagccaatcctacagatacgaaaggtattcgagttggggtatctgatgggggttgtagtggctatcaatatacgctggacattgcgaatgagccgaaacccgatgatgtaattgagcaacaagggcgagtgaaaatctatatcgatccacaggctgctgctttgatcaatggagtcgtggttgattttgtagaaggtttgatggatagcggatttaagtttagtaatccgaatgcgacagatacttgcgggtgtggacaatctttccaagcaggagattgcactccggcagcggttccttgtagttaa

SEQ ID NO: 32991 - protein, 121 aa, Plectonema boryanum
MTVTLTERAELRLRAFLQGTANPTDTKGIRVGVSDGGCSGYQYTLDIANEPKPDDVIEQQGRVKIYIDPQAAALINGVVVDFVEGLMDSGFKFSNPNATDTCGCGQSFQAGDCTPAAVPCS

SEQ ID NO: 32992 - DNA, 573 bp, Schizosaccharomyces pombe
  CDS (1)..(573)
atgttgagttgtctttcgaagcctgctcttaggtgtagatcggttaatcgattacagtttttaagaaaactatcattacaagagattcagacattgaaaacacagcatcaatatttaggacgtacccgtttggatgttgaaaccccatcattaaaaccatctgcggcaggcagtggtagcaccgctcctaagccagtcacagaacgggaaattgcttccaccagatttatgccgcgtaagaatgttattaaattgactccattagcagttgaacatttgaagaagatgcaatcatcggcttctatgaaaggaaaaatgcttcgtattggtgtgaagcaaaaaggatgcgctggtcaggcatattcattggaatacatagaaaaacccgacaagtttgacgaaatagtcaaacaagatggtatcagcataatagtcgctagaagagctcttttacaaattattggatcggttatggattatagggatgacgatttgcaatctcgttttattttttctaatcctaatgtgaaatcgacttgcggttgcggagaatcgtttagtactcttaagtag

SEQ ID NO: 32993 - protein, 190 aa, Schizosaccharomyces pombe
MLSCLSKPALRCRSVNRLQFLRKLSLQEIQTLKTQHQYLGRTRLDVETPSLKPSAAGSGSTAPKPVTEREIASTRFMPRKNVIKLTPLAVEHLKKMQSSASMKGKMLRIGVKQKGCAGQAYSLEYIEKPDKFDEIVKQDGISIIVARRALLQIIGSVMDYRDDDLQSRFIFSNPNVKSTCGCGESFSTLK

SEQ ID NO: 32994 - DNA, 753 bp, Saccharomyces cerevisiae
  CDS (1)..(753)
atgataaacacaggaagaagcaggaattcagtactgctggcacacagattcctttcaactggaggattttggcgaggcggtacgaatggcacaatgtctcgcacaatcaacaacgtaaatcctttcaaattaaaattcataccgaagacagtgcccgcagctgcagactctgtctctccagatagtcaacgtccaggtaagaagcccttcaaattcatagtttccaatcagagcaagagtagcaaggcttctaaaagcccgaagtggtcgagctacgcattcccttcgcgtgagaccatcaaatctcatgaggaggccatcaagaagcagaataaagctatagacgagcaaatagctgctgcagtatccaagaatgactgctcttgcacagaacctcccaagaaaagaaagaggaaattgagaccaagaaaggcgctgatcaccctgagtccgaaggcaatcaagcatttaagggcactgctagctcagccggaacctaaattgattagagttagcgctagaaaccgtggatgttcaggactaacgtacgatctacaatatatcaccgagccggggaaattcgatgaggtagtagaacaagatggcgttaaaattgtcatcgattcaaaggcgttattcagcatcattggaagtgaaatggactggatcgacgacaagttggcctctaagtttgtcttcaagaatccaaactccaagggcacatgcggttgtggcgagagtttcatggtttaa

SEQ ID NO: 32995 - protein, 250 aa, Saccharomyces cerevisiae
MINTGRSRNSVLLAHRFLSTGGFWRGGTNGTMSRTINNVNPFKLKFIPKTVPAAADSVSPDSQRPGKKPFKFIVSNQSKSSKASKSPKWSSYAFPSRETIKSHEEAIKKQNKAIDEQIAAAVSKNDCSCTEPPKKRKRKLRPRKALITLSPKAIKHLRALLAQPEPKLIRVSARNRGCSGLTYDLQYITEPGKFDEVVEQDGVKIVIDSKALFSIIGSEMDWIDDKLASKFVFKNPNSKGTCGCGESFMV

SEQ ID NO: 32996 - DNA, 618 bp, Schizosaccharomyces pombe
  CDS (1)..(618)
atgcttatgaaatcgcgagtaaacttattgtttaaaggaccatttttctttcgagaacgttgttttcaaacactcttaaatcctgtgatcgcaattcgacagctatcgcatggatcgcttagaaattctcgatcatgtagaattgatgcgaaatcgaatacattaacgaaagaaatatttcccaaaataaataatgaattcaaaatcaaaaatcgattttatagctcaaagcttgcgaacgaccaattcacgcttcaagagcaatgtgacgagaagggaatcccttttattttatacgtgaaagattcagcgaaaaaacagttagaaaaaattgcagaaaggaaaccagaagaaaactctgttttgcgcgtcactgtcgatggtggtggatgccatggatatcaagtatcttttcgcatggacaacaaaattggaaatgctgacacggtatttgtgcgtggaaaagccagggttgttgctgacaacatttcattacctttgataagtggctctgaaattgagtatacaaatgaacttattggttcctcttttcaacttttaaacaatccacgtgccaagacttcttgtggttgtaatgtcagttttgatgttgaatga

SEQ ID NO: 32997 - protein, 205 aa, Schizosaccharomyces pombe
MLMKSRVNLLFKGPFFFRERCFQTLLNPVIAIRQLSHGSLRNSRSCRIDAKSNTLTKEIFPKINNEFKIKNRFYSSKLANDQFTLQEQCDEKGIPFILYVKDSAKKQLEKIAERKPEENSVLRVTVDGGGCHGYQVSFRMDNKIGNADTVFVRGKARVVADNISLPLISGSEIEYTNELIGSSFQLLNNPRAKTSCGCNVSFDVE

SEQ ID NO: 32998 - DNA, 558 bp, Saccharomyces cerevisiae
  CDS (1)..(558)
atgcaggctaaattattgtttaccagactaaactttagacgtccctccacaactttacgccagtttcccctaacatgttttttatttcatagcaaagcattttactcggatctggtcactaaggagccgttgatcacaccgaaaagaataataaataagacgcctgggttaaacttatctatttctgagagggcttccaacagactagctgagatctaccgcaatagtaaggaaaatttaagaattagtgtggaaagtggtggatgtcacggtttccagtacaatctaactctagaacccgctaccaagccagatattaagaatgatgtcaaagacaaggagttttcagacgaccttgacgatgatgattccaaggatataatatacgtgttacccgaagataagggtcgagtgataattgatagtaaatcactaaacattttgaataacactacactgacatacactaatgagttgatcggttcttcgttcaaaatcatcaatggtagcctaaaaagtagttgtggttgtggaagtagttttgatattgaaaattaa

SEQ ID NO: 32999 - protein, 185 aa, Saccharomyces cerevisiae
MQAKLLFTRLNFRRPSTTLRQFPLTCFLFHSKAFYSDLVTKEPLITPKRIINKTPGLNLSISERASNRLAEIYRNSKENLRISVESGGCHGFQYNLTLEPATKPDIKNDVKDKEFSDDLDDDDSKDIIYVLPEDKGRVIIDSKSLNILNNTTLTYTNELIGSSFKIINGSLKSSCGCGSSFDIEN

SEQ ID NO: 33000 - DNA, 414 bp, Arabidopsis thaliana
  CDS (1)..(414)
atgaaagcttctcaaattttggcggctgcagcggcgagggttggaccggcgttaaggaagcaagtattaaccttaacggacgaagctgcttctagggttcatcatctcttgcaacagcgtcaaaaaccttttctccgattaggcgttaaggctcgtggctgcaacggcttgtcgtacactctcaattacgccgatgagaaaggtaaatttgacgagttggtagaagagaaaggtgtgaggatccttgttgaaccaaaggccttaatgcatgtgattggaacaaagatggattttgtagatgataaactcagatcagagtttgtgtttatcaatcctaactcacaaggacaatgcgggtgtggtgaatcgtttatgacaacatctacctctagtgctaagcagagtgctagttaa

SEQ ID NO: 33001 - protein, 137 aa, Arabidopsis thaliana
MKASQILAAAAARVGPALRKQVLTLTDEAASRVHHLLQQRQKPFLRLGVKARGCNGLSYTLNYADEKGKFDELVEEKGVRILVEPKALMHVIGTKMDFVDDKLRSEFVFINPNSQGQCGCGESFMTTSTSSAKQSAS

SEQ ID NO: 33002 - DNA, 477 bp, Arabidopsis thaliana
  CDS (1)..(477)
atgtcaagatctctggtgaaacgcgttgctccttatttggctggtcggattagagaaaatcatcgattgcttaatttttcttctgcttctgctatcaaagaagcatcttcttcttcttcgtcccaacctgaatcgtcttctaatgatgtagtccatctcagcgacaattgtatccggagaatgaaagagttacaatctagtgagccggaaaagaaaatgcttcgcttgggcgtagagacaggaggatgttctggtttccagtataagtttgagcttgataatagaaccaaccctgatgacagggttttcgagaagaatggtgtcaaattggttgtcgataatgtttcatacgacttggtgaaaggtgctacaattgattatgaggaggaattgatccgtgctgctttcgtggtagctgtaaacccgtccgcagtgggtgggtgcagttgtaaaagctccttcatggtgaaactctga

SEQ ID NO: 33003 - protein, 158 aa, Arabidopsis thaliana
MSRSLVKRVAPYLAGRIRENHRLLNFSSASAIKEASSSSSSQPESSSNDVVHLSDNCIRRMKELQSSEPEKKMLRLGVETGGCSGFQYKFELDNRTNPDDRVFEKNGVKLVVDNVSYDLVKGATIDYEEELIRAAFVVAVNPSAVGGCSCKSSFMVKL

SEQ ID NO: 33004 - DNA, 330 bp, Arabidopsis thaliana
  CDS (1)..(330)
atgagaaagcaagtattagcattgagtgacacggcggctgcgaggattcgccaacttctgcagcatcagcaaaaacctttcctccgccttgctgttgaagccaaaggatgcaatggcctatcttacgtcctcaattacgcccaggagaaagggaagtttgatgaggtggtcgaggagaaaggtgtaaagatccttgtggatccaaaggcggtgatgcatgtgattgggacagagatggatttcgtggacgataagcttaggtctgagtttgtgttcgtcaatccaaacgcgacaaagtgtggatgtggtgagtcattcacgacaacatga

SEQ ID NO: 33005 - protein, 109 aa, Arabidopsis thaliana
MRKQVLALSDTAAARIRQLLQHQQKPFLRLAVEAKGCNGLSYVLNYAQEKGKFDEVVEEKGVKILVDPKAVMHVIGTEMDFVDDKLRSEFVFVNPNATKCGCGESFTTT

SEQ ID NO: 33006 - DNA, 543 bp, Arabidopsis thaliana
  CDS (1)..(543)
atggctttcgctactggaatcacgacgtcttcaaatccaacttttcttggtctaaagatctccaacacaagtctacgttctgtggtttcatgtaattcgatttcgtttccttctttgtcatatgtgaatctcaacctcaatcggagaaaccgcctttctgttcgatccgcttcggttccagctgcacctgcaatggagggactgaagccggcgatatctctgtcagaaaatgcacttaagcatctgagtaagatgagatcagaacgtggggaagatttgtgcttgagaattggagtcaaacaaggaggatgctcgggtatgtcctacacgatggactttgaaaacagagcaaatgcaagaccagatgattccactatcgaataccagggattcactatagtttgtgatccaaagagcatgctctttctttttggaatgcagcttgattacagcgatgctttgattggtggaggcttctctttctcgaaccctaacgctacacaaacctgtggatgtgggaagtcttttgctgccgagatgtga

SEQ ID NO: 33007 - protein, 180 aa, Arabidopsis thaliana
MAFATGITTSSNPTFLGLKISNTSLRSVVSCNSISFPSLSYVNLNLNRRNRLSVRSASVPAAPAMEGLKPAISLSENALKHLSKMRSERGEDLCLRIGVKQGGCSGMSYTMDFENRANARPDDSTIEYQGFTIVCDPKSMLFLFGMQLDYSDALIGGGFSFSNPNATQTCGCGKSFAAEM

SEQ ID NO: 33008 - DNA, 324 bp, Escherichia coli O157
  CDS (1)..(324): transl_table=11
atgtcgattacacttagcgacagtgcagcagcgcgagtaaatacctttctggctaaccgtggcaaagggtttggcctacgtctgggcgtgagaacctccggatgttcaggtatggcttatgtactggaatttgttgacgaaccgacgccggaagacatcgtgtttgaagacaaaggcgtgaaagtcgtggtcgatggcaaaagcctgcaatttctggacggtacgcagctggacttcgtaaaagaaggcctgaacgaagggtttaaattcaccaacccgaacgttaaagatgagtgtggttgcggcgaaagcttccacgtttga

SEQ ID NO: 33009 - protein, 107 aa, Escherichia coli O157
MSITLSDSAAARVNTFLANRGKGFGLRLGVRTSGCSGMAYVLEFVDEPTPEDIVFEDKGVKVVVDGKSLQFLDGTQLDFVKEGLNEGFKFTNPNVKDECGCGESFHV

SEQ ID NO: 33010 - DNA, 324 bp, Erwinia carotovora subsp
  CDS (1)..(324): transl_table=11
atgtcgatttctctgagcgaaagtgcggcgcaacgcgtgagcgcttttatcgcaaaccgaggcaaaggccttgggctgcgtcttggcgtacggacatccggctgttccggtatggcgtatgtgctggagtttgttgatgatttgaacgacggtgacactgtttttgaagacaaaggcgtcaaagtcatcgtggatggcaaaagtctggtctatcttgacggaacggagttggatttcgttaaagaagggctgaacgaaggctttaagttcaataatcctaacatttccggcgaatgtggttgcggcgaaagtttcaacgtctga

SEQ ID NO: 33011 - protein, 107 aa, Erwinia carotovora subsp
MSISLSESAAQRVSAFIANRGKGLGLRLGVRTSGCSGMAYVLEFVDDLNDGDTVFEDKGVKVIVDGKSLVYLDGTELDFVKEGLNEGFKFNNPNISGECGCGESFNV

SEQ ID NO: 33012 - DNA, 324 bp, Salmonella choleraesuis
  CDS (1)..(324): transl_table=11
atgtcgattacacttagcgacagtgcagcagcgcgagttaataccttcctggccaaccgtggtaaagggtttggtctgcgtctgggcgtgagaacctccggctgctcaggtatggcttatgtactggaatttgttgacgagccaacggcggaagacaccgtgtttgaagacaaaggcgttaaggtagtggttgacggcaagagcctgcaatttctggacggtacacagctggacttcgtaaaagaaggtctgaacgaagggtttaaattctccaacccgaatgtgaaagatgagtgtggttgcggcgaaagcttccacgtgtaa

SEQ ID NO: 33013 - protein, 107 aa, Salmonella choleraesuis
MSITLSDSAAARVNTFLANRGKGFGLRLGVRTSGCSGMAYVLEFVDEPTAEDTVFEDKGVKVVVDGKSLQFLDGTQLDFVKEGLNEGFKFSNPNVKDECGCGESFHV

SEQ ID NO: 33014 - DNA, 324 bp, Xenorhabdus nematophilus
  CDS (1)..(324): transl_table=11
atgtcaatttccctgacagaaagtgcagcccaacgtattgtagccttccttgacaatcggggaaaaggtgtcgggttgcgtttgggagtgagaacatccggctgctcaggtatggcatatgtgcttgaatttgctgatgtagttaatgaagaagatcaggttttcgaagataagggcgtgaaggttatcgttgatggtaaaagtatcctttaccttgatggtactgagttggatttcgtgaaagaaggcctgaacgaaggctttaaattcaacaaccccaacgtttccagcgaatgcggctgtggggaaagtttccacgtttaa

SEQ ID NO: 33015 - protein, 107 aa, Xenorhabdus nematophilus
MSISLTESAAQRIVAFLDNRGKGVGLRLGVRTSGCSGMAYVLEFADVVNEEDQVFEDKGVKVIVDGKSILYLDGTELDFVKEGLNEGFKFNNPNVSSECGCGESFHV

SEQ ID NO: 33016 - DNA, 324 bp, Yersinia pestis
  CDS (1)..(324): transl_table=11
atgtcgatatcaatcagcgacagtgctgcacagcgggtcagtgcctttttaaatcaccgcggtaaaggcttgggtctacgcttgggcgtaaggacttcgggttgttccggcatggcatatgtactcgaatttgttgacgaaataaacgatgacgatatcgtttttgaagacaaaggtgtgaaagtgatcatcgacggtaaaagcatggtctatcttgacggtaccgagctggatttcgtcaaagaagggctgaacgaaggctttaagttcaacaatccaaacgtctcaaatgagtgcggatgcggcgaaagctttaacgtttga

SEQ ID NO: 33017 - protein, 107 aa, Yersinia pestis
MSISISDSAAQRVSAFLNHRGKGLGLRLGVRTSGCSGMAYVLEFVDEINDDDIVFEDKGVKVIIDGKSMVYLDGTELDFVKEGLNEGFKFNNPNVSNECGCGESFNV

SEQ ID NO: 33018 - DNA, 369 bp, Escherichia coli
  CDS (1)..(369): transl_table=11
atggacatgcattcaggaacctttaacccacaagatttcgcctggcaaggcttaacgctgacacccgcagcggcgatacacatccgtgagctggtggcaaagcagccgggtatggtcggcgtgcgcttaggcgtgaagcaaacgggctgcgcgggctttggctatgtgctcgacagtgttagcgagccggacaaagacgatctgctgtttgaacacgacggcgcgaagctgtttgtcccgctgcaagcgatgccgtttattgatggcacggaagtcgatttcgttcgtgaaggacttaatcagatattcaaatttcacaaccctaaagcccagaatgaatgtggctgtggcgaaagctttggggtatag

SEQ ID NO: 33019 - protein, 122 aa, Escherichia coli
MDMHSGTFNPQDFAWQGLTLTPAAAIHIRELVAKQPGMVGVRLGVKQTGCAGFGYVLDSVSEPDKDDLLFEHDGAKLFVPLQAMPFIDGTEVDFVREGLNQIFKFHNPKAQNECGCGESFGV

SEQ ID NO: 33020 - DNA, 387 bp, Xylella fastidiosa
  CDS (1)..(387): transl_table=11
atgactatgctcatttctttgcccacggcaccatcagtgcctaactatcagtcgctggagcgtccattgaatttcactatggctgcagcagccaaagtccgtgaattgatacaggaagagaacaacgccgatttggcgttgcgtgtttacatccagggtggggggtgttctggtttccagtacggctttgagtttgacgaaaatcgcgctgatgatgatttagcgttggagacagatggtgttgtgttattggttgatccactcagtctgcagtatctgttaggtgcagaggtcgactacactgagagcctcactggtgctaagtttgtgattcgaaatcccaatgctaagactacctgtggttgtggcagtagtttcagtgtttga

SEQ ID NO: 33021 - protein, 128 aa, Xylella fastidiosa
MTMLISLPTAPSVPNYQSLERPLNFTMAAAAKVRELIQEENNADLALRVYIQGGGCSGFQYGFEFDENRADDDLALETDGVVLLVDPLSLQYLLGAEVDYTESLTGAKFVIRNPNAKTTCGCGSSFSV

SEQ ID NO: 33022 - DNA, 345 bp, Haemophilus influenzae
  CDS (1)..(345): transl_table=11
atgatagatgatatggcggtgccactgacatttactgatgcagcggcaaataaagtaaaaagtttaatcagcgaagaagaaaatactgatttgaaattacgcgtgtatatcacagggggtggttgcagcggtttccaatatggttttacctttgatgaaaaagtcaatgacggcgatttaaccattgaaaaatcaggggttcaacttgtgattgacccgatgagcttacaatatttaatcggcggtacagtcgattacacagaaggtttagagggttcacgttttactgtaaataatccaaatgctaccagcacttgtggctgtggttcatcctttagtatctaa

SEQ ID NO: 33023 - protein, 114 aa, Haemophilus influenzae
MIDDMAVPLTFTDAAANKVKSLISEEENTDLKLRVYITGGGCSGFQYGFTFDEKVNDGDLTIEKSGVQLVIDPMSLQYLIGGTVDYTEGLEGSRFTVNNPNATSTCGCGSSFSI

SEQ ID NO: 33024 - DNA, 351 bp, Aquifex aeolicus
  CDS (1)..(351): transl_table=11
atgcaagagcaagctcaacaatttatttttaaggtaactgacaaggctgttgaagaaatcaagaaggttgcacaggagaacaacatagaaaaccccatactcaggattagagtagttcccggtggatgctccggattccagtacgctatgggatttgatgacaccgtagaagaaggagaccacgtatttgaatacgacggagtgaaagttgtaatagaccccttctccatgccctacgtaaacggtgcggaacttgactacgtagttgacttcatgggcggtgggtttacgataaggaaccccaacgcaaccggaagctgcggatgcggaagttctttctcctgcggctaa

SEQ ID NO: 33025 - protein, 116 aa, Aquifex aeolicus
MQEQAQQFIFKVTDKAVEEIKKVAQENNIENPILRIRVVPGGCSGFQYAMGFDDTVEEGDHVFEYDGVKVVIDPFSMPYVNGAELDYVVDFMGGGFTIRNPNATGSCGCGSSFSCG

SEQ ID NO: 33026 - DNA, 345 bp, Buchnera aphidicola subsp
  CDS (1)..(345): transl_table=11
atggaaaacgcttttaaaagtcatcttcaatttactgaaaaagcaattaaaaaaataaaaaatcttattgaaatagaaaaaaatcatgatttaaaattaagaatttatataaatggtggtggatgcagcggttttcaatatcaatttatttttgatacttcaatcaatgaagacgatatcataatcacccaatcagaggtatccttaatcattgaccccattagtttacaatacttatatggtggtcaaatagattatttagaaaacctagaaggttctaaatttattgtttacaatccaaacgcaaaaaatacatgtggatgcggctcatcattcagcatttaa

SEQ ID NO: 33027 - protein, 114 aa, Buchnera aphidicola subsp
MENAFKSHLQFTEKAIKKIKNLIEIEKNHDLKLRIYINGGGCSGFQYQFIFDTSINEDDIIITQSEVSLIIDPISLQYLYGGQIDYLENLEGSKFIVYNPNAKNTCGCGSSFSI

SEQ ID NO: 33028 - DNA, 333 bp, Rickettsia prowazekii
  CDS (1)..(333): transl_table=11
atgaaaaatgttatttcattaactgatgctgctgcaaagcaagtaaaattactcatagaaaagcgcgctaaacctacctttggtattagggtaggtattaagtcaggcggttgtgccggtcagacttattacgttgaatatgctgataataaaaatcaattcgatgaagtagtggaagaaaagggtgtacgtatactaattgacccaaaaacattgatgtatatcttaggttctgaaatggattatgtagagactaattttaagtcacagttcacttttactaatcctaacgaaaaagctaattgtggctgcggtaaatcctttagtgtgtaa

SEQ ID NO: 33029 - protein, 110 aa, Rickettsia prowazekii
MKNVISLTDAAAKQVKLLIEKRAKPTFGIRVGIKSGGCAGQTYYVEYADNKNQFDEVVEEKGVRILIDPKTLMYILGSEMDYVETNFKSQFTFTNPNEKANCGCGKSFSV

SEQ ID NO: 33030 - DNA, 321 bp, Rhizobium sp
  CDS (1)..(321): transl_table=11
atgataacgctcaccgacagtgcgattgccgcaataaagttcgcgctttcacagacttgcgagccggcggatgggctacgcatcaaagtggaagcgggcggctgctcgggttttaaataccacctgggcttggacagcgagtcgcgcgacggcgacgctgtcattgaggcgggtggggtcaaggtgtacgtagactcagcctctcaacctcatgtcagcggcatgaccgtggacttcaccacgggtgtcgattccgccggattcatctttgataaccccaacgcacgagagaactgcgcctgcgggaagtctttcggctga

SEQ ID NO: 33031 - protein, 106 aa, Rhizobium sp
MITLTDSAIAAIKFALSQTCEPADGLRIKVEAGGCSGFKYHLGLDSESRDGDAVIEAGGVKVYVDSASQPHVSGMTVDFTTGVDSAGFIFDNPNARENCACGKSFG

SEQ ID NO: 33032 - DNA, 345 bp, Haemophilus ducreyi
  CDS (1)..(345): transl_table=11
atgagcgatatcgatcaaattcctcttacctttacagacgcagcagcaaaaaaagttaagagtttaattgagggagaagataaccctaacctacgtttacgcgtttacatcacagggggtggctgtagtggtttccaatatggctttacttttgatgataaaattaatgaaggggatttaacgattgaaaatcaaaatgttggtctgatcgttgacccaatgagtctgcaatatttaatcggcggttccgttgattatactgaaggtttagatggttcacgttttgtcgtacaaaaccctaatgcgagctcaacttgcggttgcggttcatcatttagcatttaa

SEQ ID NO: 33033 - protein, 114 aa, Haemophilus ducreyi
MSDIDQIPLTFTDAAAKKVKSLIEGEDNPNLRLRVYITGGGCSGFQYGFTFDDKINEGDLTIENQNVGLIVDPMSLQYLIGGSVDYTEGLDGSRFVVQNPNASSTCGCGSSFSI

SEQ ID NO: 33034 - DNA, 345 bp, Escherichia coli O157
  CDS (1)..(345): transl_table=11
atgagtgatgacgtagcactgccgctggagtttaccgacgcagcagccaacaaagttaaaagcctgatcgctgacgaagataacccgaatctgaaattacgcgtgtatatcaccggtggcggttgcagcggcttccagtatggtttcacctttgatgatcaggtgaacgaaggcgatatgaccatcgaaaaacagggcgttggcctggtggttgatccgatgagcctgcaatatctggtcggcggttccgttgactataccgaaggactggaaggttctcgtttcatcgtgaccaacccgaacgcgaaaagcacctgcggttgcggttcttcctttagtatctaa

SEQ ID NO: 33035 - protein, 114 aa, Escherichia coli O157
MSDDVALPLEFTDAAANKVKSLIADEDNPNLKLRVYITGGGCSGFQYGFTFDDQVNEGDMTIEKQGVGLVVDPMSLQYLVGGSVDYTEGLEGSRFIVTNPNAKSTCGCGSSFSI

SEQ ID NO: 33036 - DNA, 378 bp, Azospirillum brasilense
  CDS (1)..(378): transl_table=11
atggtgaccctgacggatgcggcggtgaacaccctggagctagcagtgactggcgaagtccggcggcgccgcggccgcctgcgcatcgcggtggccgacgggggctgcgccggccataaataccagatggggctggaggccacggcgggcgacgacgtgctgaccttcggcccggtgacgatcttcgtcgatccgaccagccagcccttcctgaccggcgtggtggtcgatttcgtcgaaggggtcgagggcgcgggcttcaagttcgacaacccgaacgcgacgggcagctgcggctgcggcaagtccttctcggcgggtccggggggcagctgctcctccgcgccggcgccgggcggctgcggcaccgcccactaa

SEQ ID NO: 33037 - protein, 125 aa, Azospirillum brasilense
MVTLTDAAVNTLELAVTGEVRRRRGRLRIAVADGGCAGHKYQMGLEATAGDDVLTFGPVTIFVDPTSQPFLTGVVVDFVEGVEGAGFKFDNPNATGSCGCGKSFSAGPGGSCSSAPAPGGCGTAH

SEQ ID NO: 33038 - DNA, 324 bp, Azotobacter vinelandii
  CDS (1)..(324): transl_table=11
atgattaccctgacagagagcgccaagagcgcggttacccgcttcatcagcagcactggcaagccgatcgccggtttgcgcatccgggtcgagggtggcggttgttccggcctgaaatacagcctgaagctggaagaagccggtgcggaagacgatcaactggtcgactgcgacggcatcaccctgctgatcgacagcgccagcgctcctctgctcgatggcgtgaccatggacttcgtggaaagcatggaaggtagcggtttcaccttcgtcaatccgaatgccaccaacagttgtggttgtggcaagtcttttgcttgttga

SEQ ID NO: 33039 - protein, 107 aa, Azotobacter vinelandii
MITLTESAKSAVTRFISSTGKPIAGLRIRVEGGGCSGLKYSLKLEEAGAEDDQLVDCDGITLLIDSASAPLLDGVTMDFVESMEGSGFTFVNPNATNSCGCGKSFAC

SEQ ID NO: 33040 - DNA, 363 bp, Bacillus subtilis
  CDS (1)..(363): transl_table=11
atgagcaacccggtaacaattacagaagcagcagctttgcatataaaagatatgatgaaagagcatgaagaagaaaacgcgtttctgcgtgtaggcgtcaaaggcggcggctgcagcggactttcttacggcatgggctttgagcatgaaaagagtgaatcagacagtgtgtttgatcagcacggcatcactgttctagttgacaaagaaagccttgacatcatgaacggcaccgtgattgattataaacaatccatgctcggcggcggcttcaccatcgacaatccaaacgccatcgcttcatgcggctgcggttcttcgttcagaacagcaacgaatgcaggcaagcctgaagagtgctaa

SEQ ID NO: 33041 - protein, 120 aa, Bacillus subtilis
MSNPVTITEAAALHIKDMMKEHEEENAFLRVGVKGGGCSGLSYGMGFEHEKSESDSVFDQHGITVLVDKESLDIMNGTVIDYKQSMLGGGFTIDNPNAIASCGCGSSFRTATNAGKPEEC

SEQ ID NO: 33042 - DNA, 417 bp, Oryza sativa
  CDS (1)..(417)
atgtcttcctccgccgccttggccttggccttgaggagggccacctcctccgcgcacaagcagaagcagaagcaggccctcgccctaacggatgccgccgcctctcgaatacgccaactcctcagcctccgccacagaccctacctgcgccttggcgtcaaagcacgcggctgcaatggcctctcttacaccctcaactacgctgatgaaaaaggcaagtttgatgaggttgttgaagataaaggagttaaagtactaatcgatcccaaggctctgatgcatgtcatcggcaccaagatggattatgttgatgacccgctaaggtctgaatttgtgttcatcaatccaaattccaaaggggagtgcggctgtggtgaatctttcatgactacaagcagcaagggatctacatcttga

SEQ ID NO: 33043 - protein, 138 aa, Oryza sativa
MSSSAALALALRRATSSAHKQKQKQALALTDAAASRIRQLLSLRHRPYLRLGVKARGCNGLSYTLNYADEKGKFDEVVEDKGVKVLIDPKALMHVIGTKMDYVDDPLRSEFVFINPNSKGECGCGESFMTTSSKGSTS

SEQ ID NO: 33044 - DNA, 561 bp, Oryza sativa
  CDS (1)..(561)
atggcgctcgcatccggcacgtcctgcgccctccccggcgccgcgcgcccccacctcgccgtgtccccctctccgcccgcctcctcgatccgtttctgcagaggcggctcccgcggaggcagggccgtcgtctccctccgcgcctccgtgcctccagcagcagcggcagcaacaacatctggtagcattgcacctgcaatttcattgactgaaaaggctttgaagcatctgaataaaatgagggctgaacggaatgaagatctctgtttgagaattggagttaggcaaggtggatgttctggcatgtcttacaccatggagtttgaagatcgatccaatgccagccctgatgattcagttgtagaatatgatggctttgcaatagtctgcgacccgaagagccttcttttcatgtttggaatggagctggactacagtgacgcccttatcggtggtggattcgccttccagaacccaaatgcaacaaagacatgtgggtgtggcaaatctttcgccaccggaaaagaaacagagagcacagcaacagcctgcaacaactaa

SEQ ID NO: 33045 - protein, 186 aa, Oryza sativa
MALASGTSCALPGAARPHLAVSPSPPASSIRFCRGGSRGGRAVVSLRASVPPAAAAATTSGSIAPAISLTEKALKHLNKMRAERNEDLCLRIGVRQGGCSGMSYTMEFEDRSNASPDDSVVEYDGFAIVCDPKSLLFMFGMELDYSDALIGGGFAFQNPNATKTCGCGKSFATGKETESTATACNN

SEQ ID NO: 33046 - DNA, 501 bp, Oryza sativa
  CDS (1)..(501)
atggccgcgtcgtcgtcgtcgtcccgtcccctgctccgccgcgtcgcggccctcctcggcggccgcgtgcgcgccagccaccgccttctctcctcctcgccgtcctcctcctccgccgccgccgcagcaaccgagagggcgtcgccgccgtcgcccgcagacccggataccgtgcacatgacggatggctgcatccgaagattaaaagaattacatgctaaagaaccaccttctgaaggtaagatgctgcgattaagtgttgaagctggtggatgttctggattccaatattctttctctcttgatgacaagaaaaactcagatgatcggatctttgagaaagaaggtgttaaattggttgtggacgatgtctcatatgactttgtgaaaggtgccactgtggattatgaggaagaacttatacgctccgcattcgtggtatcaacaaatcctagtgcagttgggggctgcagttgcaagagttcttttatggtcaattag

SEQ ID NO: 33047 - protein, 166 aa, Oryza sativa
MAASSSSSRPLLRRVAALLGGRVRASHRLLSSSPSSSSAAAAATERASPPSPADPDTVHMTDGCIRRLKELHAKEPPSEGKMLRLSVEAGGCSGFQYSFSLDDKKNSDDRIFEKEGVKLVVDDVSYDFVKGATVDYEEELIRSAFVVSTNPSAVGGCSCKSSFMVN

SEQ ID NO: 33048 - DNA, 402 bp, Oryza sativa
  CDS (1)..(402)
atggcttcttcggtgttcaaggcgatggcagagaaggcagggccgtctgtccgaaagcaggcccttacgctgaccgatgcagcggcgtcgagggtgcgccagctgcttggcgtacggcagcgtgcttatctccgtcttggcgtcaaggcccgtggttgcaatgggttgtcgtacacaatgaattatgctgatgagaagggaaaattcgatgaacttgtggaagataaaggagttaagatactaattgatccgaaagctcttatgcacgtgattggaaccaaaatggatttcattgatgatccacttaggtctgagtttgtgtttatgaaccctaattccaagggagaatgtggttgcggcgaatcatttatgacatcaaccaaaaacaaaggcccggcatag

SEQ ID NO: 33049 - protein, 133 aa, Oryza sativa
MASSVFKAMAEKAGPSVRKQALTLTDAAASRVRQLLGVRQRAYLRLGVKARGCNGLSYTMNYADEKGKFDELVEDKGVKILIDPKALMHVIGTKMDFIDDPLRSEFVFMNPNSKGECGCGESFMTSTKNKGPA

SEQ ID NO: 33050 - DNA, 567 bp, Zea mays
  CDS (1)..(567)
atggcgctcgcctccggcacgtgccgccccctcctgggtggccccgccagcaccgcgcggctccacctcgctgtctcctcgtcctccaccgcctgctcgatccgcttcccccgcggcgccggcggtggcagggcggccgtctccctccgcgcccccgcgcctccagcggcggcggcggcaacatctggtagcattgctccagcgatttcattgaccgaaaaggccttgaaacatctgaacaaaatgagggctgaacggaacgaagatttgtgcttgagaattggagtgaaacagggtggatgctcaggcatgtcttacaccatggagtttgaaaatcgagcagatgccagccctgatgattctgttgtagagtatgatggttttgccatagtctgtgaccccaaaagccttctcttcatgtttggaatggagctggactacagcaacgcactcattggtggaggcttctcttttcagaatccaaacgcaacaaaaacctgtgggtgcggcaaatctttcgcgactgggaaggaatccgaggctgcagcaaaagcttgcaacaactag

SEQ ID NO: 33051 - protein, 188 aa, Zea mays
MALASGTCRPLLGGPASTARLHLAVSSSSTACSIRFPRGAGGGRAAVSLRAPAPPAAAAATSGSIAPAISLTEKALKHLNKMRAERNEDLCLRIGVKQGGCSGMSYTMEFENRADASPDDSVVEYDGFAIVCDPKSLLFMFGMELDYSNALIGGGFSFQNPNATKTCGCGKSFATGKESEAAAKACNN

SEQ ID NO: 33052 - DNA, 414 bp, Brassica napus
  CDS (1)..(414)
atgaaggcttctcgagttttagcggctgcagcagcgagggtgggaccggcgataaggaagcaagtgttaaccataacggacgaagcagcatctagggttcatcatctcttgcaccagaggcaaaaacctttcctccgattgggcgttaaagcaagaggctgcaacggtttatcatacaccctcaattacgcagatgagaaagggaaatttgatgagctggtggaagaaaaaggtgtgaggatccttgtggaacccaaggcattaatgcatgtgattggaacaaagatggactttatagatgataaactaagatcagagttcgtgttcatcaatccaaactcgcaaggtcaatgcgggtgtggtgaatcgttcatgacaacatctacttcctcgagtgctaaacaaagtggatag

SEQ ID NO: 33053 - protein, 137 aa, Brassica napus
MKASRVLAAAAARVGPAIRKQVLTITDEAASRVHHLLHQRQKPFLRLGVKARGCNGLSYTLNYADEKGKFDELVEEKGVRILVEPKALMHVIGTKMDFIDDKLRSEFVFINPNSQGQCGCGESFMTTSTSSSAKQSG

SEQ ID NO: 33054 - DNA, 411 bp, Brassica napus
  CDS (1)..(411)
atgaaggcttctcgagttttagcggctgcagcagcgagggtgggaccggcgatgaggaagcaggtgttaacgttgacggacgaagcagcatctagggttcatcatctcttgcagcagaggcagaaacctttcctccgattgggcgttaaagccagagggtgcaacggtttatcatacacccttaattacgccgatgagaaagggaaatttgatgagctggtggaagaaaaaggtgtgaggatccttgtggagcccaaggcattgatgcatgtgattggcaccaagatggactttatagatgataaactaagatcagagttcgtgttcatcaatcctaactcgcaaggtcaatgcgggtgtggtgaatcgttcatgacaacatctacttcctcgagtgctaaacaaagttga

SEQ ID NO: 33055 - protein, 136 aa, Brassica napus
MKASRVLAAAAARVGPAMRKQVLTLTDEAASRVHHLLQQRQKPFLRLGVKARGCNGLSYTLNYADEKGKFDELVEEKGVRILVEPKALMHVIGTKMDFIDDKLRSEFVFINPNSQGQCGCGESFMTTSTSSSAKQS

SEQ ID NO: 33056 - DNA, 504 bp, Brassica napus
  CDS (1)..(504)
atgtcgagatctctggcgaaacgttttgtaccctatctgtctgctcgtataaaagagaatcatcggatgcttaattattattgttcttcctcttcttctgctctcaaagaagcttcttcttcttcttcttcttcttcttcgtcctcctcccaatctgaatcaccttctctcgaggctgttcatctcagcgacaattgtatccggagaataaaagagttacaatctagtgaaccggagaagaagctgcttcgattgggtgtagaaactggaggctgttctggtttccagtacgtctttgagcttgatcataaaaccaaccctgatgacagggtgattgagaaggacggtggcaagttggctgtatataatgtctcatatgactttgtcaaaggcgctactgttgattacgtcgaggagctcatccgttctgctttcgtggtagctgagaacccacccgcagtgggtggatgcagttgtaaaagctccttcatggtgaaacagtga

SEQ ID NO: 33057 - protein, 167 aa, Brassica napus
MSRSLAKRFVPYLSARIKENHRMLNYYCSSSSSALKEASSSSSSSSSSSSQSESPSLEAVHLSDNCIRRIKELQSSEPEKKLLRLGVETGGCSGFQYVFELDHKTNPDDRVIEKDGGKLAVYNVSYDFVKGATVDYVEELIRSAFVVAENPPAVGGCSCKSSFMVKQ

SEQ ID NO: 33058 - DNA, 414 bp, Brassica napus
  CDS (1)..(414)
atgaaggctgctcgagtcttggcggctgcggcggcgagggttggaccggctataaggaagcaagtgttaaccataacggacgaagctgcctctagggttcatcatctcttgctccagaggcaaaaacctttcctccgactgggcgttaaagcaagaggctgcaacggtttatcatacaccctcaattacgcagatgagaaagggaaatttgatgagctggtggaggagaaaggagtgaggatccttgtggaacccaaggccttaatgcatgtgattggaacaaagatggatttcatagatgataaactaagatcagagtttgtgttcatcaatccaaactcgcaaggtcaatgcgggtgtggtgaatcgttcatgacaacatctacttcctcgagtgctaaacagagtggatag

SEQ ID NO: 33059 - protein, 137 aa, Brassica napus
MKAARVLAAAAARVGPAIRKQVLTITDEAASRVHHLLLQRQKPFLRLGVKARGCNGLSYTLNYADEKGKFDELVEEKGVRILVEPKALMHVIGTKMDFIDDKLRSEFVFINPNSQGQCGCGESFMTTSTSSSAKQSG

SEQ ID NO: 33060 - DNA, 393 bp, Zea mays
  CDS (1)..(393)
atgtcgtcctccgtgctgagggctgcggccgacagggccattcgcaggcaggccctcacgctgacgaacgccgcggtgtccaggatccggcagctcctcagcctaaggcaacggccatacctgcggctgggtgtcaaagcgcgaggttgcaacggcctctcctacaccctcaactatgccgatgaaaaggggaagttcgatgagcttgtcgaggagaaaggagttaaagtactgatcgaccccaaggctttgatgcatgttataggcaccaagatggactatgttgatgatccattaaagtccgagtttgtgttcataaacccaaattccaaagggcagtgtggctgcggtgagtctttcatgactacaggcagcaaagggtcgacgtcatga

SEQ ID NO: 33061 - protein, 130 aa, Zea mays
MSSSVLRAAADRAIRRQALTLTNAAVSRIRQLLSLRQRPYLRLGVKARGCNGLSYTLNYADEKGKFDELVEEKGVKVLIDPKALMHVIGTKMDYVDDPLKSEFVFINPNSKGQCGCGESFMTTGSKGSTS

SEQ ID NO: 33062 - DNA, 405 bp, Glycine max
  CDS (1)..(405)
atggcttccaaggcgatgagcgtggcagcagagaagatagcgacggcggcgcgacgccaagccgtgtcgctaacggacgccgccgcctcgcgaatacggcagctgctacagcagcgtcagaggcccttcttgaagctgggagtcaaggctcgcggctgcaacggcttatcctacaccctcaattacgcagatgaaaaagggaagtttgatgagttggttgaggataagggtgttaagatattgattgatccaaaggcccttatgcatgtcattggaactaaaatggattttgtagatgacaaactaagatcggaatttattttcgtcaatccaaattctaaaggtcagtgtggttgtggtgaatctttcatgacaacaggcagtagtggatcttctaagccatga

SEQ ID NO: 33063 - protein, 134 aa, Glycine max
MASKAMSVAAEKIATAARRQAVSLTDAAASRIRQLLQQRQRPFLKLGVKARGCNGLSYTLNYADEKGKFDELVEDKGVKILIDPKALMHVIGTKMDFVDDKLRSEFIFVNPNSKGQCGCGESFMTTGSSGSSKP

SEQ ID NO: 33064 - DNA, 510 bp, Glycine max
  CDS (1)..(510)
atggctttctctgcaatgactagcatgcactctcctcaatttctccgccttcccatctcccttccccgttcttcaccctctggtcgattttcaccgccaattctcaaacgccctaaaccactctccattcgatcagtttcaattcctgctgcaccagcatcagggtctctggcccctgcaatttctgttacagataatgtgctgaagcacttgaataagatgaggtctgaacgaaatcaagatttatgtttaagaataggtgtcaaacagggtgggtgctctggtatgtcatacacaatggattttgaagacagggttaataaaaggccagatgattcaatcattgagtatgaaggttttgaaattgtttgtgatcctaagagcctactcttcatatttggcatgcaattagattacagtgatgctctgattgggggaggcttctctttcaagaatcctaacgcgacacagacttgtggatgtggtaaatcctttgctgccgaaatttag

SEQ ID NO: 33065 - protein, 169 aa, Glycine max
MAFSAMTSMHSPQFLRLPISLPRSSPSGRFSPPILKRPKPLSIRSVSIPAAPASGSLAPAISVTDNVLKHLNKMRSERNQDLCLRIGVKQGGCSGMSYTMDFEDRVNKRPDDSIIEYEGFEIVCDPKSLLFIFGMQLDYSDALIGGGFSFKNPNATQTCGCGKSFAAEI

SEQ ID NO: 33066 - DNA, 498 bp, Glycine max
  CDS (1)..(498)
atggctttctctgcaatcactaccttgccctctcctcaatttctccgccttcctcaatcttcaccctctcttcgattttcaccgccaattctcaaacgccccaaacccctctccattcgatcagtttcaatccccgctgcaccagcatctggttctctggcccctgcagtttcacttacggataatgcgctgaagcacttgaataagatgaggtctgaacgaaatcaagatttatgtttaagaataggtgtcaaacagggagggtgctctggtatgtcatacacaatggattttgaagacagggctaataaaaggccagatgattcaattattgagtatgaaggttttgaaattgtttgtgatcctaagagcctactcttcatatttggcatgcaattagattacagtgatgctctgattgggggaggcttctctttcaagaatcctaacgcgacacagacttgtggatgtggtaaatcctttgccgctgaaatgtag

SEQ ID NO: 33067 - protein, 165 aa, Glycine max
MAFSAITTLPSPQFLRLPQSSPSLRFSPPILKRPKPLSIRSVSIPAAPASGSLAPAVSLTDNALKHLNKMRSERNQDLCLRIGVKQGGCSGMSYTMDFEDRANKRPDDSIIEYEGFEIVCDPKSLLFIFGMQLDYSDALIGGGFSFKNPNATQTCGCGKSFAAEM

SEQ ID NO: 33068 - DNA, 393 bp, Zea mays
  CDS (1)..(393)
atgtcgtcctccgtgctgagggctgcggccgacagggctattcgcaggcaggccctcacgctgacggacgccgcggcgtccaggatccggcagctcctcagcctcaggcagcggccattcctgcggctcggcgtcaaagcgcgtggttgcaacggcctctcgtacacgctcaactatgccgacgaaaaggggaagtttgatgagcttgtcgaggagaagggagtgaaagtgctgatcgaccccaaggctctgatgcatgtcataggcaccaagatggactacgttgacgacccgttaaagtccgagttcgtgttcgtaaacccgaactccaagggggagtgtggctgcggcgaatctttcatgaccacgggcagcaaagggtcgccatcgtga

SEQ ID NO: 33069 - protein, 130 aa, Zea mays
MSSSVLRAAADRAIRRQALTLTDAAASRIRQLLSLRQRPFLRLGVKARGCNGLSYTLNYADEKGKFDELVEEKGVKVLIDPKALMHVIGTKMDYVDDPLKSEFVFVNPNSKGECGCGESFMTTGSKGSPS

SEQ ID NO: 33070 - DNA, 471 bp, Glycine max
  CDS (1)..(471)
atgattcgaagccttgctctgcacttggctgcacgattccgacacaaccacaacctcgtgcgtctttcttcttcttcttctgccgcttctgcctccactcttcatcatgccactccctctccttcttcctctgagcccgttcacatcacccaaaactgcgttcgaagaatgaaggaactggaaggtagtgaatcatcaacagatggaaaaatgcttcgtttgagtgtggaaactggtggatgttctggattccagtatgtttttaatctagataacagaatcaactcagatgacaaagtttttgagagagaaggagttaaattggtcgttgacaacatatcatacgattttgtaaaaggggcgactgttgattatgttgaggagctaatccgttcagcttttgtggtgactgaaaaccccagtgcagttggtggttgcagttgtaaaagttccttcatggtgaaacagtag

SEQ ID NO: 33071 - protein, 156 aa, Glycine max
MIRSLALHLAARFRHNHNLVRLSSSSSAASASTLHHATPSPSSSEPVHITQNCVRRMKELEGSESSTDGKMLRLSVETGGCSGFQYVFNLDNRINSDDKVFEREGVKLVVDNISYDFVKGATVDYVEELIRSAFVVTENPSAVGGCSCKSSFMVKQ

SEQ ID NO: 33072 - DNA, 573 bp, Zea mays
  CDS (1)..(573)
atggcgctcgcctccgccacgtcccgccccctcctcggtcgccccgccggcaccgcgcggccccacctcgccgtttcctcatcctcccccgcctcctcgatccgcttcccccgcggcgccgacggcggcgccagcagagcggccgtctctctccgcgcccccacgcctccagcggcggcaacagcaacatctggtagcattgctccagcaatttcattgactgaaaaggccttgaaacatctgaaccaaatgagagctgaacggaatgaagttttgtgcttgagaattggagtgaaacagggtggatgctcaggcatgtcttacaccatggaatttgaaaatcgagagaatgccagccctgatgattctgttgtagagtatgatggttttgcaatagtctgtgaccccaaaagccttcttttcatgtttggaatggagctggactacagcgacgccctcattggtggcggcttcttgttccagaatccaaacgcaacaaaaacctgtgggtgcggcaaatctttcgcgactggaaaggagaccgaggccgcggcaaccacttgcaacaactag

SEQ ID NO: 33073 - protein, 190 aa, Zea mays
MALASATSRPLLGRPAGTARPHLAVSSSSPASSIRFPRGADGGASRAAVSLRAPTPPAAATATSGSIAPAISLTEKALKHLNQMRAERNEVLCLRIGVKQGGCSGMSYTMEFENRENASPDDSVVEYDGFAIVCDPKSLLFMFGMELDYSDALIGGGFLFQNPNATKTCGCGKSFATGKETEAAATTCNN

SEQ ID NO: 33074 - DNA, 393 bp, Zea mays
  CDS (1)..(393)
atgtcgtcctccgtgctgagggctgcggccgacagggctattcgcaggcaggccctcacgctgacggacgccgcggcgtccaggatccggcagctcctcagcctcaggcagcggccattcctgcggctcggcgtcaaagcgcgtggttgcaacggcctctcgtacacgctcaactatgccgacgaaaaggggaagtttgatgagcttgtggaggagaagggagtgaaggtgctgatcgaccccaaggctttgatgcatgtcataggccccaagatggactacgttgacgacccgttaaagtccgagttcgtgtttgtaaacccgaactccaagggggagtgtggctgcggcgaatttttcatgacgacgggcagcaaagggtcgacgtcgtga

SEQ ID NO: 33075 - protein, 130 aa, Zea mays
MSSSVLRAAADRAIRRQALTLTDAAASRIRQLLSLRQRPFLRLGVKARGCNGLSYTLNYADEKGKFDELVEEKGVKVLIDPKALMHVIGPKMDYVDDPLKSEFVFVNPNSKGECGCGEFFMTTGSKGSTS

SEQ ID NO: 33076 - DNA, 393 bp, Zea mays
  CDS (1)..(393)
atgtcgtcctccgtgctgagggctgcggccgacagggccattcgcaggcaggccctcacgctgacgaacgccgcggcgtccaggatccggcagctactcagcctaaggcaacggccatacctgcggctgggtgtcaaagcgcgaggttgcaacggcctctcctacaccctcaactatgccgatgaaaaggggaagttcgatgagcttgtcgaggagaaaggagttaaagtactgatcgaccccaaggctttgatgcatgttataggcaccaagatggactatgttgatgatccattaaagtccgagtttgtgttcataaacccaaattccaaagggcagtgtggctgcggtgagtctttcatgactacaggcagcaaagggtcgacgtcatga

SEQ ID NO: 33077 - protein, 130 aa, Zea mays
MSSSVLRAAADRAIRRQALTLTNAAASRIRQLLSLRQRPYLRLGVKARGCNGLSYTLNYADEKGKFDELVEEKGVKVLIDPKALMHVIGTKMDYVDDPLKSEFVFINPNSKGQCGCGESFMTTGSKGSTS

SEQ ID NO: 33078 - DNA, 393 bp, Zea mays
  CDS (1)..(393)
atgtcgtcctccgtgctgagggctgcggccgacagggctattcgcaggcaggccctcacgctgacggacgccgcggcgtccaggatccggcagctcctcagcctcaggcagcggccattcctgcggctcggcgtcaaagcgcgtggttgcaacggcctctcgtacacgctcaactatgccgacgaaaaggggaagtttgatgagcttgtggaggagaagggagtgaaggtgctgatcgaccccaaggctctgatgcatgtcataggcaccaagatggactacgttgacgacccgttaaagtccgagttcgtgttcgtaaacccgaactccaagggggagtgtggctgcggcgaatctttcatgacgacgggcagcaaagggacgacgtcgtga

SEQ ID NO: 33079 - protein, 130 aa, Zea mays
MSSSVLRAAADRAIRRQALTLTDAAASRIRQLLSLRQRPFLRLGVKARGCNGLSYTLNYADEKGKFDELVEEKGVKVLIDPKALMHVIGTKMDYVDDPLKSEFVFVNPNSKGECGCGESFMTTGSKGTTS

SEQ ID NO: 33080 - DNA, 20 bp, Artificial sequence
  primer
atgaccgtcgaaaccttcac

SEQ ID NO: 33081 - DNA, 20 bp, Artificial sequence
  primer
tcagaccgagaaagactggc

SEQ ID NO: 33082 - protein, 146 aa, Artificial sequence
  consensus sequence
  Variant (2)..(14): Xaa in position 2 to 14 is any amino acid
  Variant (15)..(23): Xaa in position 15 to 23 is any or no amino acid
  Variant (26)..(27): Xaa in position 26 to 27 is any amino acid
  Variant (29)..(31): Xaa in position 29 to 31 is any amino acid
  Variant (34)..(34): Xaa in position 34 is any amino acid
  Variant (36)..(37): Xaa in position 36 to 37 is any amino acid
  Variant (39)..(60): Xaa in position 39 to 60 is any amino acid
  Variant (61)..(103): Xaa in position 61 to 103 is any or no amino acid
  Variant (105)..(106): Xaa in position 105 to 106 is any amino acid
  Variant (108)..(112): Xaa in position 108 to 112 is any amino acid
  Variant (114)..(115): Xaa in position 114 to 115 is any amino acid
  Variant (116)..(116): Xaa in position 116 is any or no amino acid
  Variant (118)..(126): Xaa in position 118 to 126 is any amino acid
  Variant (128)..(130): Xaa in position 128 to 130 is any amino acid
  Variant (132)..(132): Xaa in position 132 is any amino acid
  Variant (135)..(137): Xaa in position 135 to 137 is any amino acid
  Variant (138)..(138): Xaa in position 138 is any or no amino acid
  Variant (141)..(141): Xaa in position 141 is any amino acid
  Variant (144)..(144): Xaa in position 144 is any amino acid
AXXXXXXXXXXXXXXXXXXXXXXLRXXVXXXGCXGXXYXXXXXXXXXXXXXXXXXXXXXXXXXXXXXXXXXXXXXXXXXXXXXXXXXXXXXXXXXXXXXXXXXDXXSXXXXXGXXXDXXXXXXXXXFXXXNXPNXXXXCGXCGXSF

SEQ ID NO: 33083 - protein, 14 aa, Artificial sequence
  protein pattern
  Variant (3)..(7): Xaa in position 3 to 7 is any amino acid
  Variant (12)..(12): Xaa in position 12 is any amino acid
NPXXXXXCGCGXSF

SEQ ID NO: 33084 - protein, 15 aa, Artificial sequence
  protein pattern
  Variant (2)..(2): Xaa in position 2 is Lys or Arg
  Variant (3)..(3): Xaa in position 3 is Ile, Leu or Val
  Variant (4)..(4): Xaa in position 4 is any amino acid
  Variant (5)..(5): Xaa in position 5 is Ile or Val
  Variant (6)..(8): Xaa in position 6 to 8 is any amino acid
  Variant (11)..(11): Xaa in position 11 is any amino acid
  Variant (13)..(13): Xaa in position 13 is Phe, Leu or Met
  Variant (14)..(14): Xaa in position 14 is any amino acid
LXXXXXXXGCXGXXY

SEQ ID NO: 33085 - DNA, 1752 bp, Azotobacter vinelandii
  CDS (1)..(1752): transl_table=11
atgccatcctgttgcagccggttattgactcctgagggagctgcagagttcccctcgcagccctgcggccaagtcggcaattgtgccaagcccgacttttccctaccagctttttgttttcccggatttttcgatatgagccaacactttcagcatgatgtcctgatcattggcagcggtgcggccggcctgactctggcactcaacctgccgtctcaattgcatatcgcgatcctgagcaagggagagctctccaacggctctaccttctgggctcaaggcggcgtcgccgctgtgctggacgacaccgacacgatcgagtcccatgtcgaggacacattgatcgccggtgccggcctctgccgagaagaggcagtgcgctttacggtggagcatagccgggaagccatccagtggctgatcgaacaaggtgttcctttcacccgcgaagaccctacggcacgagacgatggcggttttgcatttcatctgacccgcgaaggcggccacagccatcggcgcatcatccacgccgcggatgccaccggggccgccatcttcaagactctactcgccaaagtgcaggcacgaccgaacatcgaactgctcgaacagcacgtcgccatcgacctgatcaccgaaagcaagctcggcctgccaggcaggcgttgcctgggcgcctacgtcctcgatcgtcagagcggcgaagtcgagacacacagcgcacgcttcactgcgctggcttgcggcggcgcagccaaagtctacctctacaccagcaatcccgacagcgcctgcggcgacggcatcgccatggcctggcgtgccggctgccgggtgggcaacctggagttcaaccagttccacccgacctgtctttatcatcctcaggccaagaacttcctgatcaccgaagccctgcgcggcgagggcgggctgctcaagctacccaacggcgaacgcttcatgccccgcttcgacccacgcgcagagctggcaccccgggatgtcgtcgcccgcgccatcgaccatgaaatgaagcgtctcggaatcgactgcgtgtatctggatatcagccacaaaccggcggacttcatccaatcgcacttcccgaccgtccatgaacgctgcctggacttcggcatcgacatcacccgcgaccccatccccgtggtccctgccgcccactatacctgtggcggtgtcgtcgtcgacaaccatggacggaccgacattcccggactctatgccatcggtgaaaccagcttcaccggcctgcatggcgccaaccgcatggccagcaactctctgctcgagtgcttcgtctatgcgcgctccaccgccttcgacatgctcgagcaaatggcggacatcgaattgccgagcaatctgccgagctgggatgccagccaggtcaccgactccgatgaagatgtgatcatcgcgcacaattgggacgaactacggcgattcatgtgggactacgtcggtatcgtacgcaccagcaagcgcctgcagagagcccagcaccgggtcaagctgctactcgacgaaattaacgagttctatagcaactacaaggttagccgcgacctgatcgagctgcgcaatctggccctcgtcgccgacctgatgattcgctcggccatgcaacgccacgaaagccgtggcctgcactacaccctcgactatccggacatgctgcccgaggcccgcgacactattctggtgccacccacctacgccggctga

SEQ ID NO: 33086 - protein, 583 aa, Azotobacter vinelandii
MPSCCSRLLTPEGAAEFPSQPCGQVGNCAKPDFSLPAFCFPGFFDMSQHFQHDVLIIGSGAAGLTLALNLPSQLHIAILSKGELSNGSTFWAQGGVAAVLDDTDTIESHVEDTLIAGAGLCREEAVRFTVEHSREAIQWLIEQGVPFTREDPTARDDGGFAFHLTREGGHSHRRIIHAADATGAAIFKTLLAKVQARPNIELLEQHVAIDLITESKLGLPGRRCLGAYVLDRQSGEVETHSARFTALACGGAAKVYLYTSNPDSACGDGIAMAWRAGCRVGNLEFNQFHPTCLYHPQAKNFLITEALRGEGGLLKLPNGERFMPRFDPRAELAPRDVVARAIDHEMKRLGIDCVYLDISHKPADFIQSHFPTVHERCLDFGIDITRDPIPVVPAAHYTCGGVVVDNHGRTDIPGLYAIGETSFTGLHGANRMASNSLLECFVYARSTAFDMLEQMADIELPSNLPSWDASQVTDSDEDVIIAHNWDELRRFMWDYVGIVRTSKRLQRAQHRVKLLLDEINEFYSNYKVSRDLIELRNLALVADLMIRSAMQRHESRGLHYTLDYPDMLPEARDTILVPPTYAG

SEQ ID NO: 33087 - DNA, 2136 bp, Oryza sativa
  CDS (82)..(2022)
acaagatatcctccggcgtggttgtcgtgtgttattaattgaaacaaatctcccctctaccaccaccacaccaccaccgccatgtactcctccggcatgaggcagttcggcgccgcctcgaggctcgcgcgccagctccaggtccgcaacttctctcgcaccgcacccgcaaagaagatcattacgcccaacggccctctgcgcgcaaaggaggcctcgcctctcctcaacaacaagtaccccatcattgaccacgagtacgatgcgctcgtcgttggcgcgggtggtgccggtctccgtgcagccttcggtttggccgaggcgggtttcaacactgcttgcatatcgaagctcttccccaccagatcacacaccgtcgccgcccagggtggcatcaacgctgcgctaggaaacatgcacaaagacgactggaggtggcacatgtacgacaccgtcaagggttcagattggctcggagaccaggacgccatccactacaggaccagagaggcgcctgcgtccgtcattgagctcgagaactacggctgccccttctcgcgaacagacgagggcaagatctaccagcgtgcgttcggtggccaaagccaggactacggaaagggtggccaggcctaccgctgctgcgccgccgccgaccgtaccggccacgctcttctccacactctctacggccagtcgctcaggcacaacaccaactacttcattgagttcttcgccattgacctgatcatggaggacggcgagtgcaagggtgtcatcgcctacaaccaggaggacggcactctccaccgcttccgctctcaccacaccgttcttgccaccggtggctacggtcgtgcctacttctcttgcacttctgctcacacttgcactggtgacggtatggccatggttgcccgtgccggtcttcccaaccaggacatggagttcgttcagttccaccctaccggtatctacggcgctggctgcctgatcaccgagggctctcgtggcgagggtggataccttctcaacagcgagggtgagcgcttcatggagcgttacgcacccactgccaaggatcttgcttctcgtgacgttgtctctcgctccatgaccatggagatccgcgagggccgtggtgtcggtcccgacaaggaccacatctacctccagctttctcacttgcccgccgaggtcctccacgagcgtctccccggtatctctgagaccgcctccatcttcgctggtgtcgacgttaccaagcagcccattcctgtgctccccaccgtccactacaacatgggtggtatccccaccaagtacactggtgaggttctcactgttgacgaggccggcaaggacaaggtcgtccccggtctcttcgcctgcggtgaagccgcctgtgtctccgtccacggtgctaaccgtctcggtgccaactctcttcttgatcttatcgtgttcggccgtgccgtctcccacaccatccgcgacaacttctcacccggcaagccccataaggagcttgacgctggtgctggcgccgaggctatccagactgttgaccagattcgcactgccgacggccccaagagcaccaacgaggtccgcagcgccatgcagaaggtcatgcagactgatgtctccgtcttcaggactgaggagtctctccaggagggtgtcaagaagatcaacgaagtcgaccagatgttctcccaggtcggtaccaaggaccgcagcatgatctggaactccgacctcgtcgagacccttgagctccgcaacttgctcacttgcgccgtccagaccgccgagagtgccgccaaccgcaaggagtctcgtggtgcccacgctcgtgaggactaccccgaccgtgacgacgagaactggatgaagcacacgctctcatggcagaagaagccccacggaaagaccgagctcggctaccgtgcggttactggtactactctcgacgaggcagagtgcaaggctgttcctcccttcgcgagaaagtactagattctgggagtgtgtatgtatgtggagggaagggaactcttgtgtacagtttagccgcttttcttgacaaagggatgttgatagcgaatatcgtattgtgaattgtttcaaaag

SEQ ID NO: 33088 - protein, 646 aa, Oryza sativa
MYSSGMRQFGAASRLARQLQVRNFSRTAPAKKIITPNGPLRAKEASPLLNNKYPIIDHEYDALVVGAGGAGLRAAFGLAEAGFNTACISKLFPTRSHTVAAQGGINAALGNMHKDDWRWHMYDTVKGSDWLGDQDAIHYRTREAPASVIELENYGCPFSRTDEGKIYQRAFGGQSQDYGKGGQAYRCCAAADRTGHALLHTLYGQSLRHNTNYFIEFFAIDLIMEDGECKGVIAYNQEDGTLHRFRSHHTVLATGGYGRAYFSCTSAHTCTGDGMAMVARAGLPNQDMEFVQFHPTGIYGAGCLITEGSRGEGGYLLNSEGERFMERYAPTAKDLASRDVVSRSMTMEIREGRGVGPDKDHIYLQLSHLPAEVLHERLPGISETASIFAGVDVTKQPIPVLPTVHYNMGGIPTKYTGEVLTVDEAGKDKVVPGLFACGEAACVSVHGANRLGANSLLDLIVFGRAVSHTIRDNFSPGKPHKELDAGAGAEAIQTVDQIRTADGPKSTNEVRSAMQKVMQTDVSVFRTEESLQEGVKKINEVDQMFSQVGTKDRSMIWNSDLVETLELRNLLTCAVQTAESAANRKESRGAHAREDYPDRDDENWMKHTLSWQKKPHGKTELGYRAVTGTTLDEAECKAVPPFARKY

SEQ ID NO: 33089 - DNA, 2188 bp, Oryza sativa
  CDS (108)..(2000)
ggtcgtcttccgcgccgccctctccctcctccaccgcctccgcctccgccttctctcgtgccgccgatctccatcgccggcgtgcggtgcaccgagatccacccgagatgtggcgcggctgcgtctcgcgtggcctcaggagcctctccaagggcaagggctcctcctcctccgcccccgtctccgccgccgctaggctcttctccaccgcctcgtcgtcgtacacggtggtggatcactcgtatgacgcggtcgtggtgggagccggcggcgcggggctccgtgcggcgatcgggctctccgagcacgggttcaacacggcttgcatcaccaagctcttccccacgcggtcgcacaccgtcgcggcgcagggtggcataaatgctgctcttggagacatgacggaagatgactggagatggcatatgtatgacactgtcaagggtagtgattggcttggtgaccaggattctattcagtatatgtgcagagaagcaccaaaagcagttatagaacttgaaaactatgggttgccattttcaaggactgaagatggaaagatataccaacgggcctttggaggccagagcttagattttgggaaaggtgggcaggcctatcgatgtgcatgtgctgctgacagaacaggacatgctatgttacacactctgtatggtcaagcaatgaagcataatactcagttctttgtagaatattttgcgctagaccttatcatggacagtgaaggcacctgtcagggggttattgctttgaacatggaggatggcactcttcaccgtttccgtgctacaaatacaattctggccacaggaggttatggcagagcctacttctcagcaacctcagctcacacatgcactggagatggcaacgctatggttgcacgtgctggtttaccacttcaggaccttgagtttgtgcagttccatcctacaggcatttatggtgctggatgccttatcactgaaggttcccgtggtgaaggtggtatccttaggaacagtgaaggcgagcgtttcatggaacgatatgctcctactgcaaaagatcttgcttctcgagatgttgtttcaagatctatgacaatggaaatcagagaaggccgtggtgttgggccattgaaggaccacatctatctgcatcttaaccatctgcctccagaagttcttaaggagaggcttcctggtatttctgaaactgctgctatttttgctggtgttgatgtcaccaaggagcccattcctgtcttgcctactgtgcactataatatgggtgggatcccaacaaattaccatggagaggtagtgactatgaagggtgacaatcctgattctgttgttcctggtttgatggctgcgggagaagcagcatgtgcatctgttcatggtgcaaatcgtctgggtgcaaattcacttcttgacatagttgtttttggcagagcttgtgcaaacagggtagctgaaaccgctaagccaggtgagaagcagaaacctcttcaaaaaagtgctggagaaaagaccatagcctggttagacaagctgagaaatgcaaatggatcattgccaacttccaagatccgtctaaacatgcaacgtgttatgcaaaataatgctgctgtcttccgtacgcaagaaacactcgaggaaggttgcaaattgattaccaaggcatgggaaagttatcatgatgtgaagatcagtgaccggagtctcatatggaattcagatttgatagagaccattgagttggaaaatctcttgataaatgcatgcataaccatgcactcagcagaggctcggaaggaaagcagaggagctcatgctcgtgaagatttcacgaaaagagatgatgagcaatggatgaagcactcgctggggtactgggagaatgagaaggttcgcttggcatacaggccagtccacatgaacacattggacagtgaagttgagtcgttcccacccaaggcgcgtgtttattagttcgggattcacgcagcgccgtaattctgtgtggtgttaataattcaggggctgggcattcctagctgaaagtgcgacctgaattccatcctcctttttccctcggtattttgtgtaatttgctagaaaaataaaggacaaactcatgctaatgctagtgcctaactggtcccttctgggcaacttgt

SEQ ID NO: 33090 - protein, 630 aa, Oryza sativa
MWRGCVSRGLRSLSKGKGSSSSAPVSAAARLFSTASSSYTVVDHSYDAVVVGAGGAGLRAAIGLSEHGFNTACITKLFPTRSHTVAAQGGINAALGDMTEDDWRWHMYDTVKGSDWLGDQDSIQYMCREAPKAVIELENYGLPFSRTEDGKIYQRAFGGQSLDFGKGGQAYRCACAADRTGHAMLHTLYGQAMKHNTQFFVEYFALDLIMDSEGTCQGVIALNMEDGTLHRFRATNTILATGGYGRAYFSATSAHTCTGDGNAMVARAGLPLQDLEFVQFHPTGIYGAGCLITEGSRGEGGILRNSEGERFMERYAPTAKDLASRDVVSRSMTMEIREGRGVGPLKDHIYLHLNHLPPEVLKERLPGISETAAIFAGVDVTKEPIPVLPTVHYNMGGIPTNYHGEVVTMKGDNPDSVVPGLMAAGEAACASVHGANRLGANSLLDIVVFGRACANRVAETAKPGEKQKPLQKSAGEKTIAWLDKLRNANGSLPTSKIRLNMQRVMQNNAAVFRTQETLEEGCKLITKAWESYHDVKISDRSLIWNSDLIETIELENLLINACITMHSAEARKESRGAHAREDFTKRDDEQWMKHSLGYWENEKVRLAYRPVHMNTLDSEVESFPPKARVY

SEQ ID NO: 33091 - DNA, 2320 bp, Zea mays
  CDS (155)..(2014)
cattgggaacaaaacgacctcctccgcccgcccgcccgcccgcctgcccgtcggcgttgtttcgtctccaccgccgctctcctttccagtctccaccaccgctcgtctccccgtaccgcccgcaacccccctcccctgcgagatccggggcgcgatgtggcgcagctgcgtctcgcggggcctctccagggccaaggcctccgcctccaggctcctctccacggcgtcgtcgtcctacacggtggtcgaccacacctacgacgcagtggtggtgggggccggcggcgcggggctccgggcggcgatcggcctctccgagcacggcttcaacaccgcgtgcatcaccaagctcttccccacgcgctcgcacaccgtcgcggctcagggaggcataaatgctgcacttggaaacatgagtgaagatgactggaggtggcatatgtatgacactgttaagggaagcgattggctgggtgaccaggattctattcagtatatgtgcagagaggcaccaaaagctgttatagagcttgagaactatggactaccattttcaagaactgaagagggaaagatataccaacgtgcctttggagggcagagcttagattttggcaaaggtggacaagcctaccgttgtgcctgcgctgctgacagaacaggacatgctatgctgcacacactatatggtcaagcaatgaagcacaacactcaattttttgtggaatactttgctttggaccttctcatggacaatgaaggaaaatgtcagggaatcattgccttaaacatggaggatggaactcttcaccgtttccgtgcttctaatacaattctagccacaggaggttatggcagggcatatttctcagcaacctcagcacacacttgtactggagatggcaatgctatggttgcacgtgctggtttacctctccaggatcttgagtttgtacaattccatcctacaggcatttatggtgctggatgcctgattactgaaggttcccgtggtgaaggtggtatccttagaaatagtgaaggtgaacggttcatggaacgatatgctcctactgcaaaagatcttgcttctcgtgatgttgtttcaagatcaatgacaatggaaattagagaaggacgtggtgtagggccattgaaggatcacatttatttgcatctgaaccatctgccacctgaggttctcaaggaaaggcttcctggtatttctgaaactgctgctatttttgctggtgttgatgtcaccaaggagcccattccagttttgcctactgtgcactacaatatgggcggtattccaacaaactaccatggggaggtagtggatatcaagggtgataatccagatgctgttgttcctggtctaatggctgctggtgaagcagcctgtgcatctgttcatggtgcgaataggctaggcgcaaattcgcttcttgacatagttgtttttggcagagcttgtgcaaacagggtagcagatatttctaaaccaggtgagaagcagaaacctctggaaaaagatgctggagaaaagaccatagcctggttggacaagctgaggaatgcgaatgggtcattgccaacttccaagatccgtctcaacatgcagcgtgttatgcaaaataatgctgctgtattccgtacacaagaaacacttgaagaaggttgtgagctgattagcaaaacatgggaaagtttccatgatgtgaagctcagtgaccagagtctcatttggaactctgacctgatagagacccttgagctggaaaatcttttgataaatgcatgcataaccatgtattcggcagaggctcggaaggaaagcagaggagctcatgctcgtgaggatttcacgacaagagatgacgagaagtggatgaagcactcactggggtactgggaaaacgagaaggttcgattggcatacaggccagtgcacatgaacacattagacgatgaagtagagtccttcccgccgaaagcccgtgtctattgatcgattcgagcctcacaccctcgggaattccgtgtaaggtgttaataaagcagatgggcgttcctggctgagaacatgatctgaactcgtgacccccctttttctgtggttctgtattttgtctgatttgctagaaataaaaggaacacatgctaatgcctgacagacgtttgtgtacatgaaattttgcatgggtttgttacttgttgatgctgtacctgctgttttgagctcgcatgattcatgaacgttgcctgtttcacggtgcaaaaaaaaaaaaactcgaaaagagagggcgccggtacc

SEQ ID NO: 33092 - protein, 619 aa, Zea mays
MWRSCVSRGLSRAKASASRLLSTASSSYTVVDHTYDAVVVGAGGAGLRAAIGLSEHGFNTACITKLFPTRSHTVAAQGGINAALGNMSEDDWRWHMYDTVKGSDWLGDQDSIQYMCREAPKAVIELENYGLPFSRTEEGKIYQRAFGGQSLDFGKGGQAYRCACAADRTGHAMLHTLYGQAMKHNTQFFVEYFALDLLMDNEGKCQGIIALNMEDGTLHRFRASNTILATGGYGRAYFSATSAHTCTGDGNAMVARAGLPLQDLEFVQFHPTGIYGAGCLITEGSRGEGGILRNSEGERFMERYAPTAKDLASRDVVSRSMTMEIREGRGVGPLKDHIYLHLNHLPPEVLKERLPGISETAAIFAGVDVTKEPIPVLPTVHYNMGGIPTNYHGEVVDIKGDNPDAVVPGLMAAGEAACASVHGANRLGANSLLDIVVFGRACANRVADISKPGEKQKPLEKDAGEKTIAWLDKLRNANGSLPTSKIRLNMQRVMQNNAAVFRTQETLEEGCELISKTWESFHDVKLSDQSLIWNSDLIETLELENLLINACITMYSAEARKESRGAHAREDFTTRDDEKWMKHSLGYWENEKVRLAYRPVHMNTLDDEVESFPPKARVY

SEQ ID NO: 33093 - DNA, 2397 bp, Zea mays
  CDS (158)..(2017)
ccccgcgtccgacaaaactcccccgacgtcggcttctccagcgccacgctctcctctccagtctccacctcccctctcccctcggcacgagggtcctccccccaccgccctccccaccccgcgcgtgcgccgccgccgccgcgagatccggggcgcgatgtggcgcagctgcgtctcgcggggcctctccagggccaaggcctccgcctccaggctcctctccacggcatcgtcgtcctacacggtggtggaccacacctacgacgcggtcgtggtgggggccggcggcgcggggctccgggcggccatcggcctctccgagcacggcttcaacaccgcgtgcatcaccaagctcttccccacgcgctcgcacaccgtcgcagcacagggaggcataaatgccgcacttggaaacatgagtgaagatgattggaggtggcacatgtatgacactgtgaagggaagcgattggctcggtgaccaggattctattcagtatatgtgcagagaagcaccaaaagctgttatagagcttgagaactatggattaccattttcaagaactgaagagggaaagatataccaacgtgcctttggaggacagagcttagattttggcaaaggtggacaagcctaccgttgtgcctgtgctgctgacagaacaggacatgctatgctacacacgttatatggtcaagcaatgaagcacaatactcaattttttgtggaatactttgcattggaccttctcatggacaatgaaggaaagtgtcaaggaatcattgccttaaacatggaagatggaactcttcaccgtttccgtgcttctaatacaattctagccacaggaggttatggcagggcatatttctcagcaacctcagcacacacttgtactggagatggcaatgctatggttgcacgtgctggtttacctcttcaggatcttgagtttgtacaattccatcctacaggcatttatggtgctggatgcctgattactgaaggttctcgtggtgaaggtggtatccttagaaatagtgaaggtgaacggttcatggaacgatatgctcctactgcaaaagatcttgcttctcgtgatgttgtttcaagatcaatgacaatggaaattagagaaggacgtggtgtagggccattgaaggatcacatttatttgcatctgaaccatctgccgcctgaggttctcaaagaaaggctccctggtatttctgaaactgctgctatttttgctggtgttgacgtcaccaaggagcccattccagttttgcctactgtgcactacaatatgggtggtatcccaacgaactaccatggggaggtagtggatatcaagggtgataatccagatgctgttatccctggtctaatggctgctggtgaagcagcctgtgcatctgtccatggtgcaaataggctaggcgcaaattcacttcttgacatagttgtttttggcagagcttgtgcaaacagggtagcagatatttctaaaccaggtgagaagcagaaacctctggaaaaagatgctggagagaagaccatagcctggttggacaagctgaggaatgcgaatgggtcattgccaacttccaagatccgtctcaacatgcaacgtgttatgcaaaataatgctgctgtgttccgtacacaagaaacacttgaagaaggttgtgaactgattagcaaaacatgggaaagtttccatgatgtgaagctcagtgaccggagtctcatttggaactctgacttgatagagaccctggagctggaaaatcttttgataaacgcatgcataactatgtattcggcagaggctcggaaggaaagcagaggagctcatgctcgtgaagatttcacgacaagagatgacgagaagtggatgaaacactccctgggatactgggagaacgagaaggttcgattggcatacaggccagtgcacatgaaaacattggacgatgaagtagagtcattcccgccaaaagcacgtgtctattgatcgattcaagcctaacacctcgggaattccgtgtaaggtgttaataagggcttgttcggttagctctcaatccatggattgagtgggattggatgggtttgaatcccaaacaagtcaaatatcttctcaattttttccaatcacatccaatccatatgtattgggaataaccgaacaagccctaaagcagatgggcgttcctggctgagaacatgacctggagttgtgtccctcattttctgtgtttctgtattctgcctagtttgctagaaataaaagggtaagatagaacacatgctaatccctggctgatgtaatgatgtttgtgtacatgaaattttgcatgggttgttatctgttaatgctctgcctggttcctt

SEQ ID NO: 33094 - protein, 619 aa, Zea mays
MWRSCVSRGLSRAKASASRLLSTASSSYTVVDHTYDAVVVGAGGAGLRAAIGLSEHGFNTACITKLFPTRSHTVAAQGGINAALGNMSEDDWRWHMYDTVKGSDWLGDQDSIQYMCREAPKAVIELENYGLPFSRTEEGKIYQRAFGGQSLDFGKGGQAYRCACAADRTGHAMLHTLYGQAMKHNTQFFVEYFALDLLMDNEGKCQGIIALNMEDGTLHRFRASNTILATGGYGRAYFSATSAHTCTGDGNAMVARAGLPLQDLEFVQFHPTGIYGAGCLITEGSRGEGGILRNSEGERFMERYAPTAKDLASRDVVSRSMTMEIREGRGVGPLKDHIYLHLNHLPPEVLKERLPGISETAAIFAGVDVTKEPIPVLPTVHYNMGGIPTNYHGEVVDIKGDNPDAVIPGLMAAGEAACASVHGANRLGANSLLDIVVFGRACANRVADISKPGEKQKPLEKDAGEKTIAWLDKLRNANGSLPTSKIRLNMQRVMQNNAAVFRTQETLEEGCELISKTWESFHDVKLSDRSLIWNSDLIETLELENLLINACITMYSAEARKESRGAHAREDFTTRDDEKWMKHSLGYWENEKVRLAYRPVHMKTLDDEVESFPPKARVY

SEQ ID NO: 33095 - DNA, 2248 bp, Zea mays subsp. mays
  CDS (128)..(2074)
gcacgagaccattacctagaacatcctaatcgaaaagagctagcgtctcttgcacagagacaggcccagggaggccgcgatggcgaacctgacgaacggctttgcgagcctccattgcgcaggggcgatgcatgtggacaaagggcacatgcaagcatcgggactgccttttctctctttcagaagatgcgcccagcttgatatctccagactaggtagcgtgcctcgtttcatgggcgcaacatctgctactgtctcccaacatcatgtgaggcagaggatcagcgccatcagagcctctactctttcctgcctgcaagacgatgccacaaaattctttgattttgtggttattggcagcggtgttgctggcctaaggtatgctctggaagtttcaaagcacggctctgttgctattatcaccaaggcagagcctcatgagagcaacacaaactatgcacaaggcggtgttagtgccgttctatgcccctcggattctgtagaaagtcacatgaaagacacaattgttgcaggggcttatttgtgcgatgaagagattgtcagggtagtttgcacagaaggtccagagcgtgtcaaggaactaattgccatgggtgcctcattcgaccatggtgaagatggtaggctgcaccttgcaagggaaggtggtcattctcacaacagaattgtccattctgccgatatgactggaagagagattgaaagagcactgcttcaagcagttcacaatgatgataacatatctttgtttggtcatcactttgctattgatctattgacatgtcagaaaaatggtgaaatctattgctatggagtggattcaatagacattgaaacccagaaggtagtccgcttcatctcgaaagtgacattgcttgcatcaggaggagctggccatatatatcccacaaccaccaatccaccggtagctactggggacggaatcgcaatgtgtcatcgtgctcaggctgtaatatccaatatggagtttgtgcagttccatccaactgcactttcagatgagggcctgccaataaagccaaagacaagaagagagaatgcatttctcataacggaagcggtgagaggagacggaggaattctttacaaccagtccatggagagattcatgccgatgtacgatgaccgctcggagctggcgccgagagacgtggttgcgaggagcatagacgaccagctgaagaaacgaggcgaaaagtatgtcctcctggacatcagccacagaccaagagacaaggttcttgcccacttccccaacatcgccgccgagtgcctgcggtacggcctggacatcacccggcagcccatcccggtggtcccggcggcgcactacatgtgcggcggcgtccgggcagggctgcagggggagaccaacgtgaagggcctctacgtggccggcgaggtcgcgtgcacggggctgcacggtgccaaccggctagcaagcaactcgctgctggaagcgctggtgttcgccaggagggcggtgcagccgtccatcgacctcatggtggatgccgacggagatgccagaccgtcgctggtggcgaggtgggcacggccgacgctgccgcggtcggtgctgggcgacagcgtgctgtcggacatcgtggggcggacgaggcaggccaggatggagctgcaatcagtgatgtgggagtatgtcggcatcgtgcgctcgacggggcggctgaagcaggccgagtggaggatcggtgacctggagtcggagtgggaggagttcctgttccggcgggggtggaagccgaccacggtgggcgtcgaggtctgcgagatgcgcaacctcttctgctgcgccaagctcgtcgtcaggagcgcgctggccaggcgcgagagccgcggcctgcacttcaccgaggacttcccgtacctggaggagagcaggaggaagcctacggtcatcttcccggccgccgtgcaggagctcacgtggagctccaagccgttgcagaggcagctgcaagcagatgacaatgcatgcagttcatccggctgggccttggggattcgttaattcattcattaatttttaagaactctcagtcgacagcatacacaaaatccagacagttaggctgtagtagcctgcgtatctttgcaattcttgccagttccagctgttgcaacttgtaaacggtgttgttggagctgcattatggtttatgaaccttgatccgtagtatatgtt

SEQ ID NO: 33096 - protein, 648 aa, Zea mays subsp. mays
MHVDKGHMQASGLPFLSFRRCAQLDISRLGSVPRFMGATSATVSQHHVRQRISAIRASTLSCLQDDATKFFDFVVIGSGVAGLRYALEVSKHGSVAIITKAEPHESNTNYAQGGVSAVLCPSDSVESHMKDTIVAGAYLCDEEIVRVVCTEGPERVKELIAMGASFDHGEDGRLHLAREGGHSHNRIVHSADMTGREIERALLQAVHNDDNISLFGHHFAIDLLTCQKNGEIYCYGVDSIDIETQKVVRFISKVTLLASGGAGHIYPTTTNPPVATGDGIAMCHRAQAVISNMEFVQFHPTALSDEGLPIKPKTRRENAFLITEAVRGDGGILYNQSMERFMPMYDDRSELAPRDVVARSIDDQLKKRGEKYVLLDISHRPRDKVLAHFPNIAAECLRYGLDITRQPIPVVPAAHYMCGGVRAGLQGETNVKGLYVAGEVACTGLHGANRLASNSLLEALVFARRAVQPSIDLMVDADGDARPSLVARWARPTLPRSVLGDSVLSDIVGRTRQARMELQSVMWEYVGIVRSTGRLKQAEWRIGDLESEWEEFLFRRGWKPTTVGVEVCEMRNLFCCAKLVVRSALARRESRGLHFTEDFPYLEESRRKPTVIFPAAVQELTWSSKPLQRQLQADDNACSSSGWALGIR

SEQ ID NO: 33097 - DNA, 2248 bp, Zea mays subsp. mays; identical to SEQ ID NO: 33095
  CDS (149)..(2074)

SEQ ID NO: 33098 - protein, 641 aa, Zea mays subsp. mays
MQASGLPFLSFRRCAQLDISRLGSVPRFMGATSATVSQHHVRQRISAIRASTLSCLQDDATKFFDFVVIGSGVAGLRYALEVSKHGSVAIITKAEPHESNTNYAQGGVSAVLCPSDSVESHMKDTIVAGAYLCDEEIVRVVCTEGPERVKELIAMGASFDHGEDGRLHLAREGGHSHNRIVHSADMTGREIERALLQAVHNDDNISLFGHHFAIDLLTCQKNGEIYCYGVDSIDIETQKVVRFISKVTLLASGGAGHIYPTTTNPPVATGDGIAMCHRAQAVISNMEFVQFHPTALSDEGLPIKPKTRRENAFLITEAVRGDGGILYNQSMERFMPMYDDRSELAPRDVVARSIDDQLKKRGEKYVLLDISHRPRDKVLAHFPNIAAECLRYGLDITRQPIPVVPAAHYMCGGVRAGLQGETNVKGLYVAGEVACTGLHGANRLASNSLLEALVFARRAVQPSIDLMVDADGDARPSLVARWARPTLPRSVLGDSVLSDIVGRTRQARMELQSVMWEYVGIVRSTGRLKQAEWRIGDLESEWEEFLFRRGWKPTTVGVEVCEMRNLFCCAKLVVRSALARRESRGLHFTEDFPYLEESRRKPTVIFPAAVQELTWSSKPLQRQLQADDNACSSSGWALGIR

SEQ ID NO: 33099 - DNA, 2293 bp, Triticum aestivum
  CDS (92)..(1957)
cccctcccctcccgtgcttctctccaccccgcccccgcgccacagccgaaccctacacccgcgcgcgcgaggggccgccccgatctgcgagatgtggcgcagccgcgtgtcgcggggcctccgggaggccaaggccgccgccgccgccgcgtccaggcgcttctccaccacctcgtcctacacggtggtggatcacacctacgatgcggtcgtggttggcgctggaggcgcggggctcagggccgcgattgggctctcggagcatgggttcaacaccgcctgcatcaccaagctcttccccacgcggtcacataccgtggcagcgcagggaggtataaacgctgctcttggaaacatgagtgaagatgactggaggtggcatatgtatgatacagtcaagggaagtgattggctcggtgaccaagatgctatccagtatatgtgtagagaagcaccaaaggctgttatagagcttgagaactatggattaccattttccagaactgaagatggaaaaatttatcaacgcgcttttggaggccaaagcttagattttggaaaaggtggtcaggcctatcgatgtgcatgcgctgctgacagaacagggcatgctatgctacacacactttatgggcaggcgatgaagcacaatactcagttttttgttgaatattttgcgctggaccttatcatggacaaagaaggcacctgccagggggtaattgcactaaacatggaggatggtacccttcatcgtttccgttcaacaaatactattttagcaacaggaggttatggcagagcttacttctctgctacttcagctcacacatgtactggtgatggcaatgctatggttgcacgtgctgggttaccccttcaggatcttgagtttgtgcagttccatcctacaggcatttacggtgctggatgccttataactgaaggttcccggggcgaaggtggtattcttaggaacagcgaaggtgagaggttcatggaacgatatgcccctaccgctaaagatcttgcatctcgtgatgttgtttcaagatctatgactatggaaattagagaaggacgtggtgtaggaccaatgaaggaccatctctacctgcaccttaatcatcttcctccagaagttctgaaggaaaggcttcctggtatatctgagactgctgctatttttgctggtgttgatgtcaccaaagagcctattcctgttttgccgactgtgcattataatatgggcggtatcccgacaaattatcatgggcaggtggtggatatcaagggtgataacccagacacaattattcctggtctgatggctgctggggaggcagcttgtgcatctgttcatggtgcaaaccgtcttggtgcaaattcacttcttgacattgttgtatttgggagggcttgtgcaaatagggttgctgagatttccaagccaggagagacacagaaacctcttgaaaaagacgcaggggagaagaccattgcttggttggacaagctgagaaatgctaatggatcactgccaacttcgaagatccgcctcaacatgcaacgtattatgcaaaataatgctgcagttttccgcacacaggaaactctaacagaaggttgcgagctgattagtgaagcacagaaaagtttccacgatgtcaagctcagtgacagaagtctcatatggaattcggatttgatagagaccatagaattagaaaacctgctaataaatgcatgcataaccatgcattcagctgaggctcgccaagagagcagaggagctcatgctcgtgaagatttcaagacaagagatgacgacaagtggatgaagcactcgctagggtactgggaggatgaaaaggttagactagaatacaggccagttcacatgaacaccttggatgatgaagtcgagactttcccgccgaaggcacgtgtttactaatccggacaaggctgtcgacgtttcagttgtttgataagggtatagctcacagcgcggtgtcttccgagtagaaataaatttgcaggggccctccattctcccaaagcttcagaactgtaatataatcgggaatcgccaatatactttccctgaccagtgtaaacttgttgaaagcttctgatgattctattttggtcctgtatcacccctttggttggtaggaataaagacgcataccaagttttgaaggtgtttgaatctgtaaataacctttggcgtgagctgtgaacacaatggttcttttgtctattgtggcttctattaagctttaaactt

SEQ ID NO: 33100 - protein, 621 aa, Triticum aestivum
MWRSRVSRGLREAKAAAAAASRRFSTTSSYTVVDHTYDAVVVGAGGAGLRAAIGLSEHGFNTACITKLFPTRSHTVAAQGGINAALGNMSEDDWRWHMYDTVKGSDWLGDQDAIQYMCREAPKAVIELENYGLPFSRTEDGKIYQRAFGGQSLDFGKGGQAYRCACAADRTGHAMLHTLYGQAMKHNTQFFVEYFALDLIMDKEGTCQGVIALNMEDGTLHRFRSTNTILATGGYGRAYFSATSAHTCTGDGNAMVARAGLPLQDLEFVQFHPTGIYGAGCLITEGSRGEGGILRNSEGERFMERYAPTAKDLASRDVVSRSMTMEIREGRGVGPMKDHLYLHLNHLPPEVLKERLPGISETAAIFAGVDVTKEPIPVLPTVHYNMGGIPTNYHGQVVDIKGDNPDTIIPGLMAAGEAACASVHGANRLGANSLLDIVVFGRACANRVAEISKPGETQKPLEKDAGEKTIAWLDKLRNANGSLPTSKIRLNMQRIMQNNAAVFRTQETLTEGCELISEAQKSFHDVKLSDRSLIWNSDLIETIELENLLINACITMHSAEARQESRGAHAREDFKTRDDDKWMKHSLGYWEDEKVRLEYRPVHMNTLDDEVETFPPKARVY

SEQ ID NO: 33101 - DNA, 1620 bp, Klebsiella pneumoniae subsp. pneumoniae MGH 78578
  CDS (1)..(1620): transl_table=11
atgaataccactcctgacttctcttgtgatgtgttgattatcggcagcggcgctgccggtctttcccttgccctgcgcctggctgagcacagttcggtgaccgtgctgagtaaagggccgatcagcgaaggttcgacgttctacgcccagggtgggattgccgccgtcttcgatgagacggacagtattgaatcccatgtcgaagataccctcatcgccggcgcggggctctgcgatcgtcatgcggtcaccttcgtcgccagcaacgcccgatcatgcgtccagtggcttatcgatcagggagtgctgtttgacacccaggtccaggccaatggcgaagagagctatcatctcacgcgcgaaggggggcacagccatcggcgcattcttcacgccgccgacgccaccggcaaagcggtagagacgacgctggtcgataaagcgcttgcccatcctaatatccgcatccttgagcgcagcaatgccgtcgatttaatcgtatcggataagattggcctgccgggcacccgccgggtggtcggggcatggatctggaatcgtaataaagagcgggtggaaacctgcagcgcgaaagccgtagtactcgctaccggcggggccgcgaaggtttatcaatataccactaaccccgacgtctcttccggagacgggattgcgatggcctggcgggcgggatgtcgggtggcgaatctggagtttaaccagttccaccccaccgcgctatatcacccccaggcgcgtaatttcctgcttactgaagcgctgcgcggcgaaggcgcccaccttaaacgcccggatggcacccgctttatgccggactttgacgagcgcggcgagctggccccgcgcgatatcgtcgcccgcgccatcgaccatgaaatgaagcgcctgggcgtagactgtatgttccttgatatcagccataaacccgaggcgtttgttcgccagcatttcccgatgatttatgaaaagctgctcggcctgggaattgatttaaccaaagagccggtgccggtcgtccccgccgcgcattacacctgcggcggcgtgatggtggatgataatggccgcaccgacgtcgatggtttatacgccatcggcgaagttagctacaccgggctgcacggcgcgaatcgtatggcgtcgaactcgttgctggagtgcctggtctatggctggtccgccgcggaggatattgcccggcgcctgccgctcgcccagaaggtcgccacgctgccagcatgggatgaaagtcaggtggagatcccggatgaactggtggttatccagcacaactggcacgaactgcgcctgctgatgtgggattacgtggggattgtgcgcaccacccgcaggctggagcgcgccctgcggcgcattaccatgctccagcaggagctggatgagtattacgcccgcttccgcgtctcgaataatttgctggaactgcgcaatctggtgcaggtggcggagcttatcgtacgctgcgcgatgttgcgtaaggagagccgcggtctgcattataccctcgactatccgcagccgctgcctgacagcggcccgtcgatactctcgcccctggctcacataaagagataa

SEQ ID NO: 33102 - protein, 539 aa, Klebsiella pneumoniae subsp. pneumoniae MGH 78578
MNTTPDFSCDVLIIGSGAAGLSLALRLAEHSSVTVLSKGPISEGSTFYAQGGIAAVFDETDSIESHVEDTLIAGAGLCDRHAVTFVASNARSCVQWLIDQGVLFDTQVQANGEESYHLTREGGHSHRRILHAADATGKAVETTLVDKALAHPNIRILERSNAVDLIVSDKIGLPGTRRVVGAWIWNRNKERVETCSAKAVVLATGGAAKVYQYTTNPDVSSGDGIAMAWRAGCRVANLEFNQFHPTALYHPQARNFLLTEALRGEGAHLKRPDGTRFMPDFDERGELAPRDIVARAIDHEMKRLGVDCMFLDISHKPEAFVRQHFPMIYEKLLGLGIDLTKEPVPVVPAAHYTCGGVMVDDNGRTDVDGLYAIGEVSYTGLHGANRMASNSLLECLVYGWSAAEDIARRLPLAQKVATLPAWDESQVEIPDELVVIQHNWHELRLLMWDYVGIVRTTRRLERALRRITMLQQELDEYYARFRVSNNLLELRNLVQVAELIVRCAMLRKESRGLHYTLDYPQPLPDSGPSILSPLAHIKR

SEQ ID NO: 33103 - DNA, 1692 bp, Archaeoglobus fulgidus DSM 4304
  CDS (1)..(1692): transl_table=11
atggaacacgacatcgttattgtcggggcagggattgcagggatgagggctgcaatagctgcagcagaaaaaagcagaaagctatccatcgctcttatcgcaaaaacttaccccatcaggtgccacagcgtttgtgcggaaggtgggacggctgctgttttaagggaaggggacagctttgacctgcacgcctgggatacggttaagggtgcagactttctcgctgatcaggatgcggtggagttttttgtgagggaatgccctaaggaaatcataaggctggaaaactgggggtgtccgtggagcagaaacgaggatggaacgattgcccagaggccattcggaggacacagcttcaatcgcgccacatacgcgaaggacaggacgggctttcatgaagttcacaccctctacgagcggatgctgatgtacgacaatgtcgagattttccctgagtacttcataaccaacttagcgattgagaatggagcggtgcagggagtttcagcaatccagctcaagacgggagagatggagttttttgaagcaaaagccgtgattttcgccaccggaggagcggggaggctctacggcttcacaacgtacagccaccaggttacgggagatgggctggcgatagcctacagaaatggcatcccgctgaaggacatggagttcttccagttccaccccacaggccttgtaccttcaggcatcttgatgaccgagggatgcagaggtgagggtggctacctcttgaacaagaacggtgagaggttcatgaaaagatacgctcctgaaaaaatggagatagcgccaagggatgtcgtttcgagggcgatgtggactgagatcattgagggaagaggatttgagggggagtatggcccctacatagccctcgacctgagacatcttggcgaggagaagatagaggagaggttaccgctaatcagagatgcagcaataaaattcgctggcgttgaccccgtggaggagccgattccggtaaggccggtcgctcattacacgatgggtggaatagataccaacgtgaggtgtgagacagcagtaaagggcttcttcgctgccggtgagtgcgcatgcgtaagcattcacggagcaaacaggcttggttcaaactccactgctgaatgcttggtttttggaagggttgcgggagaggttgcggctgagtatgcattgaaggcgaagcaggggaagatttcagccgagttcagggagaaggaggagaagagaatattcgatgagcttctgggcaaaagcggggacgagagcccataccagataaagaaggagctgaacgaaacgatggaggctaacatgtggattttcagagaggagaagggactgaaggaagctgtgaagaaaataaaggagctgaaggagcgctacagaaacgtggaaatcaacgacaagtcgaggggcttcaataccgatttgacctctgccatcgaaatcggctacatgctcgacttggctgaggttgttgccataggggctttgaagagacaggagagcagaggagcccactaccgccttgattacccaaagagagacgacgagaactggctgaagcacactctcgcctactacacccccgaggggccgaaattcgactacaagccagtaaccataacgaagtggcagccggttgaaaggaaatactga

SEQ ID NO: 33104 - protein, 563 aa, Archaeoglobus fulgidus DSM 4304
MEHDIVIVGAGIAGMRAAIAAAEKSRKLSIALIAKTYPIRCHSVCAEGGTAAVLREGDSFDLHAWDTVKGADFLADQDAVEFFVRECPKEIIRLENWGCPWSRNEDGTIAQRPFGGHSFNRATYAKDRTGFHEVHTLYERMLMYDNVEIFPEYFITNLAIENGAVQGVSAIQLKTGEMEFFEAKAVIFATGGAGRLYGFTTYSHQVTGDGLAIAYRNGIPLKDMEFFQFHPTGLVPSGILMTEGCRGEGGYLLNKNGERFMKRYAPEKMEIAPRDVVSRAMWTEIIEGRGFEGEYGPYIALDLRHLGEEKIEERLPLIRDAAIKFAGVDPVEEPIPVRPVAHYTMGGIDTNVRCETAVKGFFAAGECACVSIHGANRLGSNSTAECLVFGRVAGEVAAEYALKAKQGKISAEFREKEEKRIFDELLGKSGDESPYQIKKELNETMEANMWIFREEKGLKEAVKKIKELKERYRNVEINDKSRGFNTDLTSAIEIGYMLDLAEVVAIGALKRQESRGAHYRLDYPKRDDENWLKHTLAYYTPEGPKFDYKPVTITKWQPVERKY

SEQ ID NO: 33105 - DNA, 1809 bp, Escherichia coli O157:H7 EDL933
  CDS (1)..(1809): transl_table=11
gtgcaaacctttcaagccgatcttgccattgtaggcgccggtggcgcgggattacgtgctgcaattgctgccgcgcaggcaaatccaaatgcaaaaatcgcactaatctcaaaagtatacccgatgcgtagccataccgttgctgcagaagggggctccgccgctgtcgcgcaggatcatgacagcttcgaatatcactttcacgatacagtagcgggtggcgactggttgtgtgagcaggatgtcgtggattatttcgtccaccactgcccaaccgaaatgacccaactggaactgtgggggtgcccatggagccgtcgcccggatggtagcgtcaacgtacgtcgcttcggcggcatgaaaatcgagcgtacctggttcgccgccgataagaccggcttccatatgctgcacacgctgttccagacctctctgcaattcccgcagatccagcgttttgacgaacatttcgtgctggatattctggttgatgatggtcatgttcgcggcctggtagcaatgaacatgatggaaggcacgctggtgcagatccgtgctaacgcggtcgttatggctactggcggtgcgggtcgcgtttatcgttacaacaccaacggcggcatcgttaccggtgacggtatgggtatggcgctaagccacggcgttccgctgcgtgacatggaattcgttcagtatcatccaaccggtctgccaggttccggtatcctgatgaccgaaggttgccgcggtgaaggcggtattctggtcaacaaaaatggctaccgttatctgcaagattacggcatgggcccggaaactccgctgggcgagccgaaaaacaaatatatggaactgggtccacgcgacaaagtttctcaggccttctggcacgaatggcgtaaaggcaacaccatctccacgccgcgtggtgatgtggtttatctcgacctgcgtcacctcggcgagaaaaaactgcatgaacgtctgccgttcatctgcgaactggcgaaagcgtacgttggcgtcgatccggttaaagaaccgattccggtacgtccgaccgcacactacaccatgggcggtatcgaaaccgatcagaactgtgaaacccgcattaaaggtctgttcgccgtgggtgaatgttcctctgttggtctgcacggtgcaaaccgtctgggctccaactccctggcggaactggtggtcttcggccgtctggccggtgaacaagcgacagagcgtgcagcaactgccggtaatggcaacgaagcggcaattgaagcgcaggcagctggcgttgaacaacgtctgaaagatctggttaaccaggatggcggcgaaaactgggcgaagatccgcgacgaaatgggcctggctatggaagaaggttgcggtatctaccgtacgccggaactgatgcagaaaaccatcgacaagctggcagagctgcaggaacgcttcaagcgcgtgcgcatcaccgacacttccagcgtgttcaacaccgacctgctctacaccattgaactgggccacggtctgaacgttgctgaatgtatggcgcactccgcaatggcacgtaaagagtcccgcggcgcacaccagcgtctggacgaaggttgcaccaagcgtgacgacgtcaacttcctcaaacacaccctcgccttccgcgatgctgatggcacgactcgcctggagtacagcgacgtgaagattactacgctaccgccagctaaacgcgtttacggtggcgaagcggatgcagccgataaggcggaagcagccaataagaaggagaaggcgaatggctga

SEQ ID NO: 33106 - protein, 602 aa, Escherichia coli O157:H7 EDL933
MQTFQADLAIVGAGGAGLRAAIAAAQANPNAKIALISKVYPMRSHTVAAEGGSAAVAQDHDSFEYHFHDTVAGGDWLCEQDVVDYFVHHCPTEMTQLELWGCPWSRRPDGSVNVRRFGGMKIERTWFAADKTGFHMLHTLFQTSLQFPQIQRFDEHFVLDILVDDGHVRGLVAMNMMEGTLVQIRANAVVMATGGAGRVYRYNTNGGIVTGDGMGMALSHGVPLRDMEFVQYHPTGLPGSGILMTEGCRGEGGILVNKNGYRYLQDYGMGPETPLGEPKNKYMELGPRDKVSQAFWHEWRKGNTISTPRGDVVYLDLRHLGEKKLHERLPFICELAKAYVGVDPVKEPIPVRPTAHYTMGGIETDQNCETRIKGLFAVGECSSVGLHGANRLGSNSLAELVVFGRLAGEQATERAATAGNGNEAAIEAQAAGVEQRLKDLVNQDGGENWAKIRDEMGLAMEEGCGIYRTPELMQKTIDKLAELQERFKRVRITDTSSVFNTDLLYTIELGHGLNVAECMAHSAMARKESRGAHQRLDEGCTKRDDVNFLKHTLAFRDADGTTRLEYSDVKITTLPPAKRVYGGEADAADKAEAANKKEKANG

SEQ ID NO: 33107 - DNA, 1584 bp, Mycobacterium leprae TN
  CDS (1)..(1584): transl_table=11
atgatggccgttcccgactggaagcacgcggctgacgtggtggtaataggaaccggcgtggcgggcttggctgccgcgcttgccgcccaccgcgccggtcgcaacgtcgtcgtacttaccaaagccgatcagcggcgcggcgagacagcgacgcactacgcgcaaggcggcatcgcagtcgtgttaccgggttccgacgattctgttgacgcccatgcttccgacaccctggcggcaggggcaggcatgtgcaatctcgacaccgtgtattcgattgtagccgaaggctaccacgcggttaccgaattagtcggttacggagcgcgtttcgacgaatcgattcccgggcgatgggcggtgacgtgtgaaggagggcactcgcgacgacgcatcgtgcacgccggtggcgatgccaccggcgccgaggtgcagcgggcgctcgaccacgccgctgacgtgttggacatccgcactagccaccttgccctgcgagtgttgcacgatggcaccgtggtgaacggtgtgtcggtgctcaacccaaacgggtggggtatcgtcagcgcaccttcggtgatcctggcctccggtgggctcgggcacctctacggcgcgaccaccaatcctgaggggtccactggcgacggaatcgcgctggcgctgtgggctggcgtggcggttagcgatctcgagttcatccaattccacccgaccatgcttttcgcggcgggtactggcaccggtggtcggcggccactagtaaccgaagccatccgcggtgaaggtgcgattttgcttgatagcaaaggtaattcggtaacatcaggggtgcatccactgggtgatctggcgccgcgcgatgttgtcgctgctgctatcgacgcgcgcctgaaggccactggcgattcgtgcgtctacctcgacgcccgcggcatcgacggcttcgcttcccggttccccaccgtcaccgccgcatgccggactgttggtatcgacccggcccgtgaaccgatcccggttgttccgggcgcacactacagctgcggtggcatcgtcaccgatgcgtacggtcaaaccgagctggctgggctgttcgccgctggagaggtggcccgcaccgggatgcacggtgctaaccgtttggcgtccaacagcttgttggaaggcttggtggtcggtggccgcgccggaagggctgcggccgcacatgcggcggcggctgggcgtgcgtatgtatccaagctcgagcctgtcacccatcacgcgctgaagcgccgtgaactccaacgcgtgatgagccgagatgccgcggtgatgcgcaacgccgcaggtctgcagcggttgtccgacacgctggctgaggcgccgatccgccacgtgaccggccgccgcgatttcgaagacgttgcgttgacgctgactgcccgggcagtagcagctgcggccttggcccgcaatgaaagtcggggttgtcaccactgcacagagtatccggacaccgcgccagaacacgcccgcagcactgtgattcgactggctgacgaccaaaacttggtgcgtgcggaggcattggcgacggtgggttga

SEQ ID NO: 33108 - protein, 527 aa, Mycobacterium leprae TN
MMAVPDWKHAADVVVIGTGVAGLAAALAAHRAGRNVVVLTKADQRRGETATHYAQGGIAVVLPGSDDSVDAHASDTLAAGAGMCNLDTVYSIVAEGYHAVTELVGYGARFDESIPGRWAVTCEGGHSRRRIVHAGGDATGAEVQRALDHAADVLDIRTSHLALRVLHDGTVVNGVSVLNPNGWGIVSAPSVILASGGLGHLYGATTNPEGSTGDGIALALWAGVAVSDLEFIQFHPTMLFAAGTGTGGRRPLVTEAIRGEGAILLDSKGNSVTSGVHPLGDLAPRDVVAAAIDARLKATGDSCVYLDARGIDGFASRFPTVTAACRTVGIDPAREPIPVVPGAHYSCGGIVTDAYGQTELAGLFAAGEVARTGMHGANRLASNSLLEGLVVGGRAGRAAAAHAAAAGRAYVSKLEPVTHHALKRRELQRVMSRDAAVMRNAAGLQRLSDTLAEAPIRHVTGRRDFEDVALTLTARAVAAAALARNESRGCHHCTEYPDTAPEHARSTVIRLADDQNLVRAEALATVG

SEQ ID NO: 33109 - DNA, 1791 bp, Salmonella typhimurium LT2
  CDS (1)..(1791): transl_table=11
gtgcaaacctttcaagccgatcttgccattataggcgccggtggcgcgggattacgtgctgcaattgctgccgcacaggcgaatcccaatgctaaaatcgcactgatctcaaaagtgtacccgatgcgcagccacaccgtcgctgccgaagggggttcagccgctgtcgcccaggatcatgacagctttgactaccattttcacgatacggtagcaggcggagactggctgtgtgagcaggatgtcgtggattactttgtccaccattgtcccactgagatgacgcagctggagcaatggggctgcccgtggagccgccgtccggacggtagcgttaacgtgcgtcgcttcggtggtatgaaaatcgagcgtacctggttcgccgcggataaaaccggcttccatatgctgcataccctgttccagacttccctgcagttcccacaaatccagcgctttgacgaacatttcgtgctggatattctggttgatgacaaccatgcgcgcggcctggtggcaatgaacatgatggaaggcacgctggtgcaaatccgtgccaacgccgtggtcatggcgacaggcggcgcaggccgcgtataccgctataacaccaacggcggcatcgtcaccggcgacgggatgggcatggcgctgagccatggcgttccgctgcgtgatatggaattcgttcagtatcacccgaccggcctgccaggttccggtatcctgatgactgaaggttgccgcggcgaaggcggtattctggtcaataaaaatggctatcgttacctgcaagactacggcatgggccccgaaacgccgctgggcgagccgaaaaacaaatatatggaactggggccacgtgacaaagtatcccaggctttctggcacgaatggcgtaaaggcaacaccatctccacgccgcgcggcgatgtggttcacctcgacctgcgtcatctcggcgagaagaaactgcatgaacgtctgccgttcatttgcgaactggcgaaagcctatgtcggcgtcgatccggttaaagaaccgattccagtacgtccgaccgcgcactacaccatgggcggcattgaaaccgaccagaactgtgaaagccgtgtcaaagggctgtttgccgttggcgaatgctcctctgttggcctgcatggcgcgaaccgcctcggttccaactcactggcggaactggtggtgtttggtcgtctggctggcgaacaagcaatggaacgcgctgctacggcaggcgccgcaaatagcgccgcgctcgacgcccaggttgccgatattgaacagcgtctgaaaaatctggtgaaccaggaaggcaacgaaaactggtcgaagatccgcgatgagatgggtctgtctatggaagaaggttgcggtatttaccgtaccccggaactgatgcagaaaaccgttgataaactggccgagcttcaggaacgtttcaagcgcgtacgtatctccgatacctccagcgtgttcaacactgacctgctgtataccatcgaactgggtcatggtctgaacgtggcggaatgtatggcgcactctgcgctggcgcgtaaagagtcccgcggcgcgcatcagcgtctggatgaaggctgtaccgagcgcgacgatgtgaacttcctcaagcacaccctcgccttccgcgatgctgatggcacgacccgtctggaatacagcgacgtgaaaatcaccaccctgccgccagccaaacgtgtttacggcggtgaagcggaagcagccgataagaaggagaaggcgaatggctga

SEQ ID NO: 33110 - protein, 596 aa, Salmonella typhimurium LT2
MQTFQADLAIIGAGGAGLRAAIAAAQANPNAKIALISKVYPMRSHTVAAEGGSAAVAQDHDSFDYHFHDTVAGGDWLCEQDVVDYFVHHCPTEMTQLEQWGCPWSRRPDGSVNVRRFGGMKIERTWFAADKTGFHMLHTLFQTSLQFPQIQRFDEHFVLDILVDDNHARGLVAMNMMEGTLVQIRANAVVMATGGAGRVYRYNTNGGIVTGDGMGMALSHGVPLRDMEFVQYHPTGLPGSGILMTEGCRGEGGILVNKNGYRYLQDYGMGPETPLGEPKNKYMELGPRDKVSQAFWHEWRKGNTISTPRGDVVHLDLRHLGEKKLHERLPFICELAKAYVGVDPVKEPIPVRPTAHYTMGGIETDQNCESRVKGLFAVGECSSVGLHGANRLGSNSLAELVVFGRLAGEQAMERAATAGAANSAALDAQVADIEQRLKNLVNQEGNENWSKIRDEMGLSMEEGCGIYRTPELMQKTVDKLAELQERFKRVRISDTSSVFNTDLLYTIELGHGLNVAECMAHSALARKESRGAHQRLDEGCTERDDVNFLKHTLAFRDADGTTRLEYSDVKITTLPPAKRVYGGEAEAADKKEKANG

SEQ ID NO: 33111 - DNA, 1728 bp, Nostoc sp. PCC 7120
  CDS (1)..(1728): transl_table=11
atgctagagcatgatgtgattattgtcgggggtgggctggcgggatgtcgggcggctgtggaaattgcccgtactgaccctagtttaaatgtggcggtggttgccaaaactcaccccattcgttcccactctgttgcagctcaaggtggtatggctgcatcactgaaaaatgtagattctactgatacttgggaagctcacgcttttgatactgtcaaaggttctgattatttagcagaccaagatgcagtggcaattctgactcaggaagccccagatgtggtgatagacctggaacacatgggggttttattctcacgtctccctgatggtcggattgctcaacgggcttttggtggacactcccacaaccgcacctgttacgcagctgataagactggtcacgccattctacacgagttggtaaataatttgcggcgttacggtgtgcatatttaccaagagtggtacgtgatgcgcctgattttggaagaaaatgaggcgaagggtttagtcatgtacagcctattagacggacatattgaggttgtccgggctaaggcggtgatgtttgccacagggggttatggtcgcgtttataacaccacctccaatgattatgcgtctactggagatggcttggcaatgacagcgatcgccggtttacctctggaagatatggagtttgtccaattccatcccacgggtttgtatccggtgggtgtcttgatttccgaggctgtacggggggaaggggcgtatttaattaatagtgaaggcgatcgcttcatggcgacctatgcacccagtcgcatggaactagcaccccgcgatattacctcacgggcgatcgcttatgaaattcgggctggacgtggtgtaaatttggatggtagcccaggcggcccctttgtctatctggatttgcgccacatgggcaaagaaaaaatcatgagtcgcgttcccttctgttgggaagaagcccaccgcttagtcggtgtggatgcagtcactcaacccatgccagtccgtccgacaattcactattgtatgggtggtatccctgtaaacactgatggtagagtccgcagtagtggcgatggcttagttgaagggttttttgcggctggtgagacatcttgtgtatccgtccacggggcaaatcgtctcggtagtaattcgctattagaatgtgtagtctatggtaaacgaactggggcggcgatcgctcaatatgtgcagaaacgtaaattacctgccatagatgaacaacgttacatcaaacaagcccagcaagaaatccaagccctactggaacagccgggagagtaccgaatcaaccaagtccgccaagctttccaagatgcgatgacagattactgtggcgttttccgtactcaagagttaatgagccaaggttggcaaaaaattacagaaatacaacaaaaatacagtcaaatatacttagacgataaaggcagttgttggaatactgaactagtagaagctttagagttgcggagtttaatgatagtcggacagacgattttagcctctgctttaaatcgtcaagaaagtcgtggcgcacatttccgcgaagattacccacagcgagatgataccaagttcctgcaacacacaatggcttactattcacccgccgggattgacattcaatatcgcccagtcaccattaccatgtttgaaccacaggagcggaagtattag

SEQ ID NO: 33112 - protein, 575 aa, Nostoc sp. PCC 7120
MLEHDVIIVGGGLAGCRAAVEIARTDPSLNVAVVAKTHPIRSHSVAAQGGMAASLKNVDSTDTWEAHAFDTVKGSDYLADQDAVAILTQEAPDVVIDLEHMGVLFSRLPDGRIAQRAFGGHSHNRTCYAADKTGHAILHELVNNLRRYGVHIYQEWYVMRLILEENEAKGLVMYSLLDGHIEVVRAKAVMFATGGYGRVYNTTSNDYASTGDGLAMTAIAGLPLEDMEFVQFHPTGLYPVGVLISEAVRGEGAYLINSEGDRFMATYAPSRMELAPRDITSRAIAYEIRAGRGVNLDGSPGGPFVYLDLRHMGKEKIMSRVPFCWEEAHRLVGVDAVTQPMPVRPTIHYCMGGIPVNTDGRVRSSGDGLVEGFFAAGETSCVSVHGANRLGSNSLLECVVYGKRTGAAIAQYVQKRKLPAIDEQRYIKQAQQEIQALLEQPGEYRINQVRQAFQDAMTDYCGVFRTQELMSQGWQKITEIQQKYSQIYLDDKGSCWNTELVEALELRSLMIVGQTILASALNRQESRGAHFREDYPQRDDTKFLQHTMAYYSPAGIDIQYRPVTITMFEPQERKY

SEQ ID NO: 33113 - DNA, 1842 bp, Agrobacterium tumefaciens str. C58
  CDS (1)..(1842): transl_table=11
atggcatcgatcagttcaccttcccagaatggcaaggcctacacctatgtcgatcactcctatgacgtgatcgtggtgggcgccggtggcgccggtctacgcgcaacgctcggcatggcggaacagggtttccgcacggcctgcatcaccaaggttttcccgacccgctcccacacggtcgcggcgcagggcggcattgccgcatcgcttaccaacatgacgcccgactgttggcagtggcacctttacgacaccgtaaagggctccgactggctgggcgacgtcgatgcgatgcaatatctcgccatggaagcgccgaaggcggtctatgagctggaacattacggcgtgcccttctcgcgcaatgccgagggcaagatttaccagcgcccgttcggcggtcacatgcagaattacggcgaaggcccaccggtacagcgcacctgtgctgccgccgaccgtaccggccacgccattctgcacacgctctatggccagtcgctgcgcaacaatgcggaattcttcatcgaatatttcgcgctcgacctcatcatggcgccagatggtcgttgcacgggcgtcgttgcctggaacctcgatgacggcacgatccatcgattctccgccaagatggtggtgctggcgaccggcggttacggccgcgcctatttctcggcgacctctgctcacacctgcaccggcgacggcggcggcatgattgcccgtgccggcctgccgcttcaggacatggaattcgtacagttccatccaaccggcatttatggcgcaggctgcctcatcaccgaaggcgcgcgtggcgaaggcggttacctcgtcaactcagaaggcgaacgcttcatggagcgttatgcgccatcggcgaaggaccttgcctcccgtgacgttgtctcccgctgcatgacgatggaaatccgtgaaggccgcggcgtcggcaagaacaaggatcacatcttcctgcatctggatcacctcgatcctgcgatcctgcatgagcggcttccgggcatttccgaaagcgccaagatttttgccggcgtggacgtgacgcgcgagcccatcccggttctgccgacggttcactataatatgggcggtattccgaccaactattggggtgaagtgctgaatgccgatgccaataacccggaacgtatcgcgcccggtctgatggccgtcggcgaagccggttgcgcctcggttcacggtgccaaccgcctcggctccaactcgctgatcgacctcgtggtcttcggccgcgccgccgctattcgtgcagcacaggtcatcgaccgcgatgcgcccgttcctgcgctcgacattgcggcctgcgacaagatcatggagcgcttcgacagcctgcgttacgccaatggctcgacgccgacggcggtgctgcgcgacaagatgcagcgcgccatgcaggacgatgcggccgttttccgcacgcaggaatcgctggagagcggttgccagcgtctttccgccatctggaaggagctgccggacgtcaaggtcaccgaccgttcgatggtctggaactccgatctggtcgagacgctcgagctacacaatctgatggccaacgcgatcaccacggtctatggcgctgaagcgcgcaaggaaagccgcggttcacacgcccgtgaggatttcgtcgatggtcctttcggcggtcgcgacgacgtgaactggcgcaagcacacgctcgcctgggtcagccccgaaggggacgtcaaactcgattatcgcccggttcacaccgacctgatcgccgacggcatcgatcccaaaaagatcgagccgaaggcgcgcgtctactga

SEQ ID NO: 33114 - protein, 613 aa, Agrobacterium tumefaciens str. C58
MASISSPSQNGKAYTYVDHSYDVIVVGAGGAGLRATLGMAEQGFRTACITKVFPTRSHTVAAQGGIAASLTNMTPDCWQWHLYDTVKGSDWLGDVDAMQYLAMEAPKAVYELEHYGVPFSRNAEGKIYQRPFGGHMQNYGEGPPVQRTCAAADRTGHAILHTLYGQSLRNNAEFFIEYFALDLIMAPDGRCTGVVAWNLDDGTIHRFSAKMVVLATGGYGRAYFSATSAHTCTGDGGGMIARAGLPLQDMEFVQFHPTGIYGAGCLITEGARGEGGYLVNSEGERFMERYAPSAKDLASRDVVSRCMTMEIREGRGVGKNKDHIFLHLDHLDPAILHERLPGISESAKIFAGVDVTREPIPVLPTVHYNMGGIPTNYWGEVLNADANNPERIAPGLMAVGEAGCASVHGANRLGSNSLIDLVVFGRAAAIRAAQVIDRDAPVPALDIAACDKIMERFDSLRYANGSTPTAVLRDKMQRAMQDDAAVFRTQESLESGCQRLSAIWKELPDVKVTDRSMVWNSDLVETLELHNLMANAITTVYGAEARKESRGSHAREDFVDGPFGGRDDVNWRKHTLAWVSPEGDVKLDYRPVHTDLIADGIDPKKIEPKARVY

SEQ ID NO: 33115 - DNA, 1956 bp, Arabidopsis thaliana
  CDS (1)..(1956)
atggcggctcatgtttctactggaaacattcataatttctatcttgcggggcaggtttacaggggacaagctttttcatggagttctgcttctactttcatggcaaatccattcaaagagccctcttggtcaagtggggtatttaaggctctaaaagctgagagatgtggttgttactctcgtggtatttcccccatcagtgagacctcaaaacctatcagggctgtttcggtatcttcttcaacaaagtattatgatttcactgtgattggtagtggagtagcgggtctgcgttatgctttagaagttgcaaagcaaggaacagtcgcagtgattaccaaagatgagcctcatgagagtaacacaaactatgctcaaggtggtgttagtgctgtgttatgccctttggattctgttgaaagtcatatgcgggacactatggtcgctggtgctcatctttgtgatgaagaaaccgtaagagttgtgtgtactgaagggcctgaaaggattcgtgaactgattgcaatgggagcatcatttgatcacggcgaggatggaaatttgcatttggccagagagggtggtcactcgcattgtaggatcgttcacgctgctgatatgacaggaagagagattgagagagctttacttgaagctgtacttaatgatcccaacatatctgtcttcaaacaccattttgcaatcgatctgctcacttctcaggatggcttgaacacagtttgtcatggtgtggacactttgaatatcaaaactaatgaggtagtacgctttatatcgaaggtgacattgcttgcttcaggtggagctgggcatatctatccatcaaccacaaatcctctggtggctactggagatgggatggcgatggctcatcgagctcaagctgtgatctcaaatatggaatttgtgcagtttcatcctactgccctagccgacgaaggtcttcccatcaaactacaaactgctagggaaaacgcgttcctcatcaccgaggcggtgagaggtgatggtggcatcctctataatctaggaatggagcgattcatgcctgtttacgatgaacgagctgagcttgctccaagagacgtggttgcaagaagtattgatgaccagcttaagaaacgaaacgaaaagtatgtgttacttgacataagccataagccaagagaaaagattcttgcccatttcccgaacatagcttctgaatgtcttaaacacggtctggatatcacccgtcagcctattccggttgtccctgcagcccattacatgtgtggaggagttcgtgctggtttacaaggcgaaaccaatgtccttggattgtttgtagcaggtgaagtagcatgtacaggcctccacggggcaaatcgtcttgctagtaactcgcttttagaagctctggttttcgcgagacgggctgttcagccttcgactgagctcatgaaacgcacaagacttgatgtatgcgcatcagagaaatggacaaggcctgttgttgcgacagctagattgctaggagatgaagtaatagcaaagattatagctttgactaaagaagtgagaagagagcttcaggaggtaatgtggaagtatgttggtattgtcagatcgacaattcggctcaccactgctgagaggaaaatcgcagagctagaagcaaaatgggaaacatttttgtttgaacatggatgggaacaaacagtggtagctcttgaagcttgtgagatgagaaacttgttctgttgcgctaagcttgtggtgagcagcgcgttagctagacatgaaagcagaggtcttcattacatgacagactttccttttgtggaagaaagcaagcggattccgacgattattctaccgtcttctcctacaacagctagttggagctcaaggcggttacagaatataagtagcagctcacttattgattgctaa

SEQ ID NO: 33116 - protein, 651 aa, Arabidopsis thaliana
MAAHVSTGNIHNFYLAGQVYRGQAFSWSSASTFMANPFKEPSWSSGVFKALKAERCGCYSRGISPISETSKPIRAVSVSSSTKYYDFTVIGSGVAGLRYALEVAKQGTVAVITKDEPHESNTNYAQGGVSAVLCPLDSVESHMRDTMVAGAHLCDEETVRVVCTEGPERIRELIAMGASFDHGEDGNLHLAREGGHSHCRIVHAADMTGREIERALLEAVLNDPNISVFKHHFAIDLLTSQDGLNTVCHGVDTLNIKTNEVVRFISKVTLLASGGAGHIYPSTTNPLVATGDGMAMAHRAQAVISNMEFVQFHPTALADEGLPIKLQTARENAFLITEAVRGDGGILYNLGMERFMPVYDERAELAPRDVVARSIDDQLKKRNEKYVLLDISHKPREKILAHFPNIASECLKHGLDITRQPIPVVPAAHYMCGGVRAGLQGETNVLGLFVAGEVACTGLHGANRLASNSLLEALVFARRAVQPSTELMKRTRLDVCASEKWTRPVVATARLLGDEVIAKIIALTKEVRRELQEVMWKYVGIVRSTIRLTTAERKIAELEAKWETFLFEHGWEQTVVALEACEMRNLFCCAKLVVSSALARHESRGLHYMTDFPFVEESKRIPTIILPSSPTTASWSSRRLQNISSSSLIDC

SEQ ID NO: 33117 - DNA, 1671 bp, Methanopyrus kandleri AV19
  CDS (1)..(1671): transl_table=11
ttggagcatctggaatgtgacgtgctcgtgatcggaggtggtggtgcggccgcccgtgcggcgatcgaggccgctaggaggaatctgaacgtggtgatcgtctccaaaggtgccgtgggtagaagtggatgcaccgtcatggcggaagggggctacaacgcggtcttacgcacggccgatccggatgactccttcgacgctcacttccgcgacaccgtcgagggaggcgcctacctcaacgatcaggacatggtagaaatcctcgtacgagaagcacctaagcgcttactcgacctagagaacttcggagccgtgttcgaccgtaacgaggacggtaccctagcccagcgtcctttcggtggtcaatctaagccccgtacttgctacgccggtgaccgtacgggacacgagataatgatggcgttgctggacgaagttcgccgcctcgacggtatcaccgttctggaacgcacaatgggatacggactggttcgagatcacgacggaagggtagtgggcgcggtatgcgtggaccttcaaaccgaggataccatcgtcatcacggcctacgccaccgttctagctacagggggcgcgggtcagctctaccccgtcaccacgaaccccgtccacaagaccggtgacgggtacgccatggccttacgcgtcggttgcccgctcattgacatggaaatggttcagtttcaccccactggaatggtgtatcccgagagcgttcgcggagttttggttacggaagccgttagaggtgagggaggacggctttacaacgccagaggcgagcggttcatgaagcgctacgatcccgagaggatggagctggcgacgcgcgacgtcgtagctcgggctatttacagggagatcaaagagggacgtgggacggagcatggtggagtttacctggacgtcactcacctgcccgacgaggtgatcgaggagaagctcgagactacgctcaagcagttcctgcgcgtgggcgtggacattcgaaacgaacccatggaggtggctcccacggcccatcacttcatgggaggggtcccgatcgacgccgacgggaagacgccgatcccgggtctcttcgcgtgcggtgaggttacgggaggtatccacggagcgaaccgactcggcggaaacgccctggccgatacacaggttttcgggtaccgcgccggaagggccgccgccgagctcgccttgaagttacggagacgaggtcgtaggatacaggtgcgcaagaccgatgcgccgacggtggagtccgagatttggtccaccgtcggtcaagaggatccgattcgagtgcgcgagaagctccgggagacgatgtgggaatacgtgggtctggagaggtccgagaaaggtctcaagacggcgatcaaaaccctcaacgagctcaaggagaccgtggaatccggtctagacgatgaatacgggttacggccggtcttagaggtgcgcaacatggtagaggtggctatcgccgtcgcgcgatccgccctttatcggaccgagagccgtggagctcactatcggtcggattatcccgaacgcgatgacaaacggtggcttcgtcacactgtctacaggcccaacggctctctggccacccgtcccgctaagatcactcgactggatccccgtcagtga

SEQ ID NO: 33118 - protein, 556 aa, Methanopyrus kandleri AV19
MEHLECDVLVIGGGGAAARAAIEAARRNLNVVIVSKGAVGRSGCTVMAEGGYNAVLRTADPDDSFDAHFRDTVEGGAYLNDQDMVEILVREAPKRLLDLENFGAVFDRNEDGTLAQRPFGGQSKPRTCYAGDRTGHEIMMALLDEVRRLDGITVLERTMGYGLVRDHDGRVVGAVCVDLQTEDTIVITAYATVLATGGAGQLYPVTTNPVHKTGDGYAMALRVGCPLIDMEMVQFHPTGMVYPESVRGVLVTEAVRGEGGRLYNARGERFMKRYDPERMELATRDVVARAIYREIKEGRGTEHGGVYLDVTHLPDEVIEEKLETTLKQFLRVGVDIRNEPMEVAPTAHHFMGGVPIDADGKTPIPGLFACGEVTGGIHGANRLGGNALADTQVFGYRAGRAAAELALKLRRRGRRIQVRKTDAPTVESEIWSTVGQEDPIRVREKLRETMWEYVGLERSEKGLKTAIKTLNELKETVESGLDDEYGLRPVLEVRNMVEVAIAVARSALYRTESRGAHYRSDYPERDDKRWLRHTVYRPNGSLATRPAKITRLDPRQ

SEQ ID NO: 33119 - DNA, 1755 bp, Streptomyces coelicolor A3(2)
  CDS (1)..(1755): transl_table=11
atgaaggtacacaagtacgacaccgtcatcgtcggcgccggtggcgccggcatgcgcgcggccatcgagtcgaccaagcgcagccgcaccgccgtgctgacgaagctctacccgacccggtcccacacgggcgccgcgcagggcggcatggccgccgcgctggccaacgtggaggaggacaactgggagtggcacaccttcgacacggtcaagggcggtgactacctggtcgaccaggacgccgccgagatcctggcgaaggaggccatcgactcggtcctcgacctggagaagatgggcctgccgttcaaccggacgcccgacgggacgatcgaccagcgccgcttcggcggtcacagccgcaaccacggcgaggccccggtccgccgctcctgctacgcggccgaccgcaccggtcacatgatcctccagacgctctatcagaactgtgtcaaggagggcgtggagttcttcaacgagttctacgttctggaccagctgatcaccgaggtcgacggcgtcaagaagtcggccggcgtggtggcctacgagctggcgaccggcgagatccacgtcttccaggcgaagtccgtgatctacgcctccggcggcaccggcaagttcttcaaggtgacctccaacgcgcacacgctcaccggtgacggccaggcggccgtgtaccggcgcgggctgccgctggaggacatggagttcttccagttccacccgaccggcatctggcgcatgggcatcctgctgacggagggcgcccgcggtgagggcggcatcctccgcaacaaggacggcgagcgcttcatggagaagtacgcgccggtcatgaaggacctcgcgtcccgcgacgtcgtctcgcgctccatctacacggagatccgcgagggccgcggctgcggtcccgagggcgaccacgtctacctggacctcacccacctcccgccggagcagctggacgccaagctgcccgacatcacggagttcgcgcgcacctacctcggcatcgagccctacacggacccgatcccgatccagccgaccgcgcactacgccatgggcggcatcccgaccaacgtcgagggtgaggtcctcgcggacaacaccaccgtcgtaccgggcctgtacgcggccggcgaggtcgcctgcgtgtcggtgcacggcgccaaccgcctgggcaccaactcgctgctcgacatcaacgtcttcggccgccgcgcgggcatcgccgccgcggagtacgcccagaaggcggacttcgtcgagctgcccgaggacccggagaccctggtcgtcgagcagatcgagcggctgcgctcgtccaccggcaccgagcgggtggcgacgatccgccgcgagctccaggagtgcatggacgccaacgtcatggtgttccgcaccgagcagacgatcaagacggccgtcgagaagatcgccgaactgcgcgcccgctacaagaacgtgtcgatccaggacaagggccggcgtttcaacaccgacctgctggaggccgtcgagctgggcaacctgctcgacctggccgaggtgatggcggtctccgccctcgcccgcaaggagtcgcgcggcggtcactaccgcgaggacttccccaaccgcgacgacgtcaacttcatgcgccacaccatggcgtaccgcgaggtgggcgacgacggcgccgagtccatccggctcgactacaagccggtcgtccagacccgctaccagccgatggagcgtaagtactga

SEQ ID NO: 33120 - protein, 584 aa, Streptomyces coelicolor A3(2)
MKVHKYDTVIVGAGGAGMRAAIESTKRSRTAVLTKLYPTRSHTGAAQGGMAAALANVEEDNWEWHTFDTVKGGDYLVDQDAAEILAKEAIDSVLDLEKMGLPFNRTPDGTIDQRRFGGHSRNHGEAPVRRSCYAADRTGHMILQTLYQNCVKEGVEFFNEFYVLDQLITEVDGVKKSAGVVAYELATGEIHVFQAKSVIYASGGTGKFFKVTSNAHTLTGDGQAAVYRRGLPLEDMEFFQFHPTGIWRMGILLTEGARGEGGILRNKDGERFMEKYAPVMKDLASRDVVSRSIYTEIREGRGCGPEGDHVYLDLTHLPPEQLDAKLPDITEFARTYLGIEPYTDPIPIQPTAHYAMGGIPTNVEGEVLADNTTVVPGLYAAGEVACVSVHGANRLGTNSLLDINVFGRRAGIAAAEYAQKADFVELPEDPETLVVEQIERLRSSTGTERVATIRRELQECMDANVMVFRTEQTIKTAVEKIAELRARYKNVSIQDKGRRFNTDLLEAVELGNLLDLAEVMAVSALARKESRGGHYREDFPNRDDVNFMRHTMAYREVGDDGAESIRLDYKPVVQTRYQPMERKY

SEQ ID NO: 33121 - DNA, 1962 bp, Streptomyces coelicolor A3(2)
  CDS (1)..(1962): transl_table=11
atgtccgtggtcgaccggcaggaatgggacgtcgtcgtggtgggcgcgggcggtgccgggctgcgcgccgccgtcgaggcccgcgagcggggcgcccgtacggccgtgatctgcaagtcgctgttcggcaaggcgcacacggtgatggccgagggcggcatcgccgcctccatgggcaacgtcaactccggggacaactggcaggtccacttccgcgacaccatgcgcggcggcaagttcctcaaccagtggcggatggccgagctgcacgcccaggaggccccgcagcgggtgtgggagctggagacctggggcgcgctgttcgaccggacgaaggacggccggatctcgcagcgcaacttcggcggccacgagtacccgcgcctcgcccacgtcggcgaccgcacgggcctggagctgatccgcaccctccagcagaagatcgtctcgctccagcaggaggacttccgcgagaccggggaccacgagtcccggctgaaggtcttccaggagtgcacggtcacccgcctgctccaggaggaccggaaggtctcgggggtcttcggctacgagcgcgagagcggccgcttcttcgtcctccaggcgccctcggtggtgatcgcgacgggcggcatcggcaagtcgttcaaggtgacgtcgaactcgtgggagtacaccggcgacggccacgccctggcgctgctggccggggcgccgctgctcaacatggagttcgtgcagttccacccgacgggcatggtctggccgccctcggtgaagggcatcctcgtcaccgagtcggtgcgcggcgacggcggggtgctgaggaactccgagggcaggcggttcatgttcgactacgtcccggacgtcttcaaggagaagtacgccgagtcggaggccgagggcgaccgctggtacgacgacccggaccacaaccggcgcccgcccgaactcctcccccgcgacgaggtcgcccgcgcgatcaacgccgaggtgaaggagggccggggctcaccgcacggcggcgtcttcctcgacgtgtcgacccggatgcccgccgaagtgatcaggcgccggctgccctcgatgtaccaccagttcaaggagctggcggacgtggacatcacggcggaggcgatggaggtcgggccgacctgccactacgtgatgggcggcatcgccgtcgactccgacaccgccgccgcccgcggggtgccgggactgttcgcggccggtgaggtggccggcggcatgcacggctccaaccggctgggcggcaactcgctgtccgacctgctggtgttcgggcggcgggcgggccggtacgcggccgagtacgcggcggggcggacggaggagggcacccgcgcccgggtcgacgacgcccaggtcgacgcggccgccgcggaggccctgcggccgttctccgccgaggcgcaggagcccggcgcgggcccgccggagaacccgtacaccctccaccaggaactccagcagaccatgaacgacctggtggggatcatccgccgcgaggcggagatgaagcaggccctggagaagctggcggagctgcgggtgcgcgcccgccgggccggggtcgaggggcaccggcagttcaacccgggctggcacctcgccctggacctgcgcaacatgctgctggtcagcgaatgcgtggcgcgggccgcgctggagcgcaccgagtcgcgcggcgggcacacccgtgaggaccatccgtcgatggaccggcgctggcgcccggccaacctgctctgctcgctggccgacccggcgggcgaggcagcgggcgaggcggcggcgacggacccggagcgcggccggatcgccctggagcggcagaccaccgagcccatccggcccgacctgctcgccctcttcgacaaggaggagctggtgaagtacctcgccgacgaggaactggagggccggtccgaatga

SEQ ID NO: 33122 - protein, 653 aa, Streptomyces coelicolor A3(2)
MSVVDRQEWDVVVVGAGGAGLRAAVEARERGARTAVICKSLFGKAHTVMAEGGIAASMGNVNSGDNWQVHFRDTMRGGKFLNQWRMAELHAQEAPQRVWELETWGALFDRTKDGRISQRNFGGHEYPRLAHVGDRTGLELIRTLQQKIVSLQQEDFRETGDHESRLKVFQECTVTRLLQEDRKVSGVFGYERESGRFFVLQAPSVVIATGGIGKSFKVTSNSWEYTGDGHALALLAGAPLLNMEFVQFHPTGMVWPPSVKGILVTESVRGDGGVLRNSEGRRFMFDYVPDVFKEKYAESEAEGDRWYDDPDHNRRPPELLPRDEVARAINAEVKEGRGSPHGGVFLDVSTRMPAEVIRRRLPSMYHQFKELADVDITAEAMEVGPTCHYVMGGIAVDSDTAAARGVPGLFAAGEVAGGMHGSNRLGGNSLSDLLVFGRRAGRYAAEYAAGRTEEGTRARVDDAQVDAAAAEALRPFSAEAQEPGAGPPENPYTLHQELQQTMNDLVGIIRREAEMKQALEKLAELRVRARRAGVEGHRQFNPGWHLALDLRNMLLVSECVARAALERTESRGGHTREDHPSMDRRWRPANLLCSLADPAGEAAGEAAATDPERGRIALERQTTEPIRPDLLALFDKEELVKYLADEELEGRSE

SEQ ID NO: 33123 - DNA, 1731 bp, Streptomyces coelicolor A3(2)
  CDS (1)..(1731): transl_table=11
gtgcctctcaccgaacaacgtctttccaccacggtgctggtgatcggtaccggcggttccggcctgcgggcggcgatcgagctggccgaggctggcgtcgacgtcatcgccgtcggcaagcgtcccaaggaggacacccacacgtccctggcggccggcggcatcaacgcggccctggccacgatggaccccgaggactcctggcagcagcacgccgcggacaccctcaaggagagctatctgctcggcgacccccgtacggcggagatcgtcacccagggcgcggccctgggcatcgacgacctggagcggtacggcatggccttcgcccgtgaaggggacggccggatctcgcagcgcttcttcggtgcccacaagttccgccgtaccgccttcgccggggactacaccggcctggagatccagcgcaccctgatccggcgcgcggtccagctggacatcccggtactcgacagcgtctacatcacgcgtctgctggtccacgacggtgccgtcttcggggcctacggcttcgacctgaccaacggcacccgccacctcgtccacgcggacgccgtgatcctcgcggccggcgggcacacgcgcatctggcggcgcacctcgtcacgccgggacgagaacaccggcgactccttccgcctggccgtcgaggccggcgcccgcctgcgcgaccccgagctggtgcagttccacccgtccggcatcatcgaaccggagaacgccgcgggcaccctggtcagcgaggccgcccgcggtgagggcggcatcctgcgcaacgccctcggcgagcggtacatgaaccgctacgaccccgagcgcatggaactgtccacgcgcgaccgggtggccctcgcctcgtacaccgagatcaaggagggccggggcaccgcgaacggcggggtgtggctcgacgtctcccacctgccccgccagacgatcatgaaccggctgccccgggtctaccagacgctcctcgacctgcagatgctcgacatcacccgtgaacccatcgaggtggccccgacggcccactactcgatgggcggcgtctgggtccgtcccgaggaccacagcaccgacgtccgcggtctgtacgccatcggcgaggccgccagcggtctgcacggcgccaaccgcctcggcggcaacagcctgatcgaactcctcgtctacggccgtatcaccggccgggccgctgcggcctactcggagtccctcaccgcgcagccccggtccgcgaccgccgtggccgaggcacgcgccgaggtcgacgagctgctggccgcggacggccccgagaacgtgcgggcgctccagcgcgcgatccgcaacaccatgaccgagcacgccggcgtcgtccgggacgaagacggcctgcgcgccggcctggcggagctggacaccgtcgagaagcgcatgcagaacgtcggcgtccatcccgacatcgccggcttccaggacctcgcccacgccttcgacctcaagtcggccgccctggcggcccgcgccaccctcgaagcggctctggaacgccgggagacccgtggttgccacaaccgcagcgacttccccgacatggaccccgctttccgcgtcaacctggtctggtcgccgacgaccggaatcacccacgagcgcattcccgatgtcccggacgagatcgcttccctcatggcggacgtgtccaccgacggaaagctcgtcgagtaa

SEQ ID NO: 33124 - protein, 576 aa, Streptomyces coelicolor A3(2)
MPLTEQRLSTTVLVIGTGGSGLRAAIELAEAGVDVIAVGKRPKEDTHTSLAAGGINAALATMDPEDSWQQHAADTLKESYLLGDPRTAEIVTQGAALGIDDLERYGMAFAREGDGRISQRFFGAHKFRRTAFAGDYTGLEIQRTLIRRAVQLDIPVLDSVYITRLLVHDGAVFGAYGFDLTNGTRHLVHADAVILAAGGHTRIWRRTSSRRDENTGDSFRLAVEAGARLRDPELVQFHPSGIIEPENAAGTLVSEAARGEGGILRNALGERYMNRYDPERMELSTRDRVALASYTEIKEGRGTANGGVWLDVSHLPRQTIMNRLPRVYQTLLDLQMLDITREPIEVAPTAHYSMGGVWVRPEDHSTDVRGLYAIGEAASGLHGANRLGGNSLIELLVYGRITGRAAAAYSESLTAQPRSATAVAEARAEVDELLAADGPENVRALQRAIRNTMTEHAGVVRDEDGLRAGLAELDTVEKRMQNVGVHPDIAGFQDLAHAFDLKSAALAARATLEAALERRETRGCHNRSDFPDMDPAFRVNLVWSPTTGITHERIPDVPDEIASLMADVSTDGKLVE

SEQ ID NO: 33125 - DNA, 1596 bp, Chlorobium tepidum TLS
  CDS (1)..(1596): transl_table=11
atgacacaggaagtgaaaaccgacgtgctggttatcggcagcggcatcggagggttgtatttcgccatcaatatggccgaccacgccacggtcacgatcatcaccaaaaaagagagctccacctccaataccaactgggcacagggcggcatcgcggcggccatcgcgggtgacgacaccccggagctgcacatcgctgacacgctcgatgcgggcgcgggactgtgcaacgaggcaatagtgagcatcctggtgcacgaaggcccagcgcacatccgccgactcatcgagcttggcgtggagttcacgaccaaccccgaccatacgctcaacctcggcaaggaaggtggccattcgcgcaaccgcatcgtgcacgccaaagatttgacgggccgcgaggtggagagggcgctcctcgcgcgggccaacgcgcaccccaacatcacgctgctggagcaccactacgcgctcgaactcatcaccgagcaccacctcggcatcaagaccaacgacatcacctgctacggcgcgtacgtactcgacacgctcaaccacaagccaaaaaagattctggcgaaggtaacgatggtcgcctcgggcgggctgggccacgtctatctgcatacgaccaatcccgagatcgccacgggcgacggcatcgcaatggcctaccgcgccggagccgagatcgccaacatggagttcatccagttccacccgacctcactcttccacccgaaagcgaaatcgttcctgatctcggaggcggtgcgcggcttcggcggcattttgcgcaacaaggagggcgaggcgttcatgcaccgctacgaccggcgcgaaaatctcgccccgcgcgacatcgtggcgcgagcgatcgactcggagatgaaaaagaacggcgacgagtgcgtctttctcgacgtgacgcacatcaaggcggagaaggtcagggagcacttcccgcacatttacgagacctgcctcggtttcggcatcgacatgacaaaggagatgattccagtggttccagcggcgcactactcatgcggcggcatcagaacggacagctgggggcgcagcaccatcaaccacctctatgcctgcggcgagacaagctgcactggcgtacacggcgcaaaccggctggcgagcaactcgttgctcgaagcgctggttttcgcctggcgctccagcgaagatatccgggcggaactgaaatcgattcatttcaagcacgaattccccgactgggacgactccggcacaaccagcccggaggagtggatcctggtggcgcacaacaaaaaagaggcgcaggtgatcatgaacgactacgtcggcatcgtgaggagcgacctgcgcctcgaccgcgcccgacggcgcatcgatttcctgaaggaggagaccgaggcttactacaaaaaaacgaagatcacgccacagatcatcgaactgcgcaatatcatcaaggttgcaagcctcatcattcagggagcaatcaagcgccgcgaatcacggggcctgcattacacaacagatttcccgcagaaggacgacaagcattatctggcggacaccgtgctccggtcgttttga

SEQ ID NO: 33126 - protein, 531 aa, Chlorobium tepidum TLS
MTQEVKTDVLVIGSGIGGLYFAINMADHATVTIITKKESSTSNTNWAQGGIAAAIAGDDTPELHIADTLDAGAGLCNEAIVSILVHEGPAHIRRLIELGVEFTTNPDHTLNLGKEGGHSRNRIVHAKDLTGREVERALLARANAHPNITLLEHHYALELITEHHLGIKTNDITCYGAYVLDTLNHKPKKILAKVTMVASGGLGHVYLHTTNPEIATGDGIAMAYRAGAEIANMEFIQFHPTSLFHPKAKSFLISEAVRGFGGILRNKEGEAFMHRYDRRENLAPRDIVARAIDSEMKKNGDECVFLDVTHIKAEKVREHFPHIYETCLGFGIDMTKEMIPVVPAAHYSCGGIRTDSWGRSTINHLYACGETSCTGVHGANRLASNSLLEALVFAWRSSEDIRAELKSIHFKHEFPDWDDSGTTSPEEWILVAHNKKEAQVIMNDYVGIVRSDLRLDRARRRIDFLKEETEAYYKKTKITPQIIELRNIIKVASLIIQGAIKRRESRGLHYTTDFPQKDDKHYLADTVLRSF

SEQ ID NO: 33127 - DNA, 1641 bp, Thermosynechococcus elongatus BP-1
  CDS (1)..(1641): transl_table=11
ttgactcccgcaacttctggatttgatgtcttaatcattggcagtggtgctgcgggtctcagtgctgcccttgctcttcctgccacctatcgcattggcctgatcacaaaaaccgatctccagcaatccgccagcggctgggcacaggggggtatggctgcggccattgatcctacggattctcccttgctccatgcccaggatacccttgctgcgggagctggtctttgtgatccagtgagtgtccagtttttggttgagcaggcaccagcgcaggtggagcgcctgttggcgatgggagttgcctttgatcgtgcgggcgatcgcccggctctgaccctcgaagctgcccattctcgtcctcgagtactccatgccgctgataccaccggacaagccctaattacgacactgctcaaacaggtcactgctgcaccccatatcacgcttttgcccaatagctttgtcttggatctgtggctagagtcggggcgatgctgtggggtgtgtctgttgcatcagggacagcttcagtggctgcgctcgggggcggtcattctcgctacggggggtggcggtcaagtttttgcccaaactaccaatccccccctcagtactggcgatggtgtggcaatggcctggcgagccggtgcccagattcgcgatgtcgagttttttcagtttcatcccactgccctagccgtcgagggggcaccgcgatttcttatcagtgaagcagtacggggtgaaggggcccatttaatcgacaacacaggtcatcgctttctgacggattaccatcctgctggcgagcttgctccacgggatattgtcagccgtgccatttaccgtcaccttcagcacacccctgccccccatgtctggctagacctacgacccattgcccgcgatcgcctgcactaccgctttccgaaaatcatcgccgtctgtcggcagtggggcattgacgttgagcagcaacccattccggtgtctcccgcagcccattactggatggggggagtcgtcaccgatttacaggccaaaaccagccttcccggcctctatgccgttggcgaagtcgctagtactggtgtccatggtgccaatcgcctagccagtaactcccttttggaatgttttgtcttttcagctcaacttgcttatctggaacctcagccccatcccttggcagtgtcccctgctggccagaaatccctggaaattgagcccgtgagctttcgtcagtggcgccaagacttgcgggaactcctgtggcaaagtgcggggatttgtcgcgatgctcccacgctaatggctgcgctttcccaagtgaaggaatggcgccaagaattgctggttcatccagtcgcgatcgccttccatgaactcggccccaactactgttataccctcagcaatcaagccgtgcaggacactctttgggaatggggcgagctacgcaatctcttggatattgcctatttaattctcaaaagtgccctctttcgtgaggaaagccgcggtggtcactatcgccaagactacccccaacccgatcctaactggcaaatgcacaccctgatttcgggagaacactggcaaaaagcagcgattcaaggacttcagagtaaactatag

SEQ ID NO: 33128 - protein, 546 aa, Thermosynechococcus elongatus BP-1
MTPATSGFDVLIIGSGAAGLSAALALPATYRIGLITKTDLQQSASGWAQGGMAAAIDPTDSPLLHAQDTLAAGAGLCDPVSVQFLVEQAPAQVERLLAMGVAFDRAGDRPALTLEAAHSRPRVLHAADTTGQALITTLLKQVTAAPHITLLPNSFVLDLWLESGRCCGVCLLHQGQLQWLRSGAVILATGGGGQVFAQTTNPPLSTGDGVAMAWRAGAQIRDVEFFQFHPTALAVEGAPRFLISEAVRGEGAHLIDNTGHRFLTDYHPAGELAPRDIVSRAIYRHLQHTPAPHVWLDLRPIARDRLHYRFPKIIAVCRQWGIDVEQQPIPVSPAAHYWMGGVVTDLQAKTSLPGLYAVGEVASTGVHGANRLASNSLLECFVFSAQLAYLEPQPHPLAVSPAGQKSLEIEPVSFRQWRQDLRELLWQSAGICRDAPTLMAALSQVKEWRQELLVHPVAIAFHELGPNYCYTLSNQAVQDTLWEWGELRNLLDIAYLILKSALFREESRGGHYRQDYPQPDPNWQMHTLISGEHWQKAAIQGLQSKL

SEQ ID NO: 33129 - DNA, 1809 bp, Shigella flexneri 2a str. 301
  CDS (1)..(1809): transl_table=11
gtgcaaacctttcaagccgatcttgccattgtaggcgccggtggcgcgggattacgtgctgcaattgctgccgcgcaggcaaatccaaatgcaaaaatcgcactaatctcaaaagtatacccgatgcgtagccataccgttgctgcagaagggggctccgccgctgtcgcgcaggatcatgacagcttcgaatatcactttcacgatacagtagcgggtggcgactggttgtgtgagcaggatgtcgtggattatttcgtccaccactgcccaaccgaaatgacccaactggaactgtggggatgcccatggagccgtcgcccggatggtagcgtcaacgtacgtcgcttcggcggcatgaaaatcgagcgcacctggttcgccgccgataagaccggcttccatatgctgcacacgctgttccagacctctctgcaattcccgcagatccagcgttttgacgaacatttcgtgctggatattctggttgatgatggtcatgttcgcggcctggtagcaataaacatgatggaaggcacgttggtgcagatccgtgctaacgcggtcgttatggctaccggcggtgcgggtcgcgtttatcgttacaacaccaacggcggcatcgttaccggtgacggtatgggtatggcgctaagccacggcgttccgctgcgtgacatggaattcgttcagtatcacccaaccggtctgccaggttccggtatcctgatgaccgaaggctgccgtggtgaaggcggtattctggtcaacaaaaatggctaccgttatctgcaagattacggcatgggcccggaaactccgctgggcgagccgaaaaacaaatatatggaactgggtccacgcgacaaagtttctcaggccttctggcacgaatggcgtaaaggcaacaccatctccacgccgcgtggtgatgtggtttatctcgacctgcgtcacctcggcgagaaaaaactgcatgaacgtctgccgttcatctgcgaactggcgaaagcgtacgttggcgtcgatccggttaaagaaccgattccggtacgtccgactgcacactacaccatgggcggtatcgaaaccgatcagaactgtgaaacccgcattaaaggtctgttcgccgtgggtgaatgttcctctgttggtctgcacggtgcaaaccgtctgggctccaactccctggcggaactggtggtcttcggccgtctggccggtgaacaagcgacagagcgtgcagcaactgccggtaatggcaacgaagcggcaattgaagcgcaggcagctggcgttgaacaacgtctgaaagatctagttaaccaggatggcggcgaaaactgggcgaagatccgcgacgaaatgggcctggcaatggaagaaggttgcggtatctaccgtacgccggaactgatgcagaaaaccatcgacaagctggcagagctgcaggaacgcttcaagcgcgtgcgcatcaccgacacctccagcgtgttcaacaccgacctgctctacaccattgaactgagccacggtctgaacgttgctgaatgtatggcgcactccgcaatggcacgtaaagagtcccgcggcgcacaccagcgtctggacgaaggttgcaccgagcgtgacgacgtcaactttctcaaacacaccctcgccttccgcgatgctgatggcacgactcgcctggagtacagcgacgtgaagattactacgctgccgccagctaaacgcgtttacggtggcgaagcggatgcagccgataaggcggaagcagccaataataaggagaaggcgaatggctga

SEQ ID NO: 33130 - protein, 602 aa, Shigella flexneri 2a str. 301
MQTFQADLAIVGAGGAGLRAAIAAAQANPNAKIALISKVYPMRSHTVAAEGGSAAVAQDHDSFEYHFHDTVAGGDWLCEQDVVDYFVHHCPTEMTQLELWGCPWSRRPDGSVNVRRFGGMKIERTWFAADKTGFHMLHTLFQTSLQFPQIQRFDEHFVLDILVDDGHVRGLVAINMMEGTLVQIRANAVVMATGGAGRVYRYNTNGGIVTGDGMGMALSHGVPLRDMEFVQYHPTGLPGSGILMTEGCRGEGGILVNKNGYRYLQDYGMGPETPLGEPKNKYMELGPRDKVSQAFWHEWRKGNTISTPRGDVVYLDLRHLGEKKLHERLPFICELAKAYVGVDPVKEPIPVRPTAHYTMGGIETDQNCETRIKGLFAVGECSSVGLHGANRLGSNSLAELVVFGRLAGEQATERAATAGNGNEAAIEAQAAGVEQRLKDLVNQDGGENWAKIRDEMGLAMEEGCGIYRTPELMQKTIDKLAELQERFKRVRITDTSSVFNTDLLYTIELSHGLNVAECMAHSAMARKESRGAHQRLDEGCTERDDVNFLKHTLAFRDADGTTRLEYSDVKITTLPPAKRVYGGEADAADKAEAANNKEKANG

SEQ ID NO: 33131 - DNA, 1605 bp, Pseudomonas putida KT2440
  CDS (1)..(1605): transl_table=11
atgagccaacaattccaacatgatgtcctggtgatcggcagcggtgccgccggtctcagcctggcacttaacctccccagccaccttcgcgttgccgtattgagcaagggcgacctgtccaacggctcgaccttctgggcccagggcggcgtcgctgcagtgctggacaacaccgatactgtgcagtcgcatgtcgaggacaccctcaatgccggcggcgggctgtgccatgaagacgcagtgcgctttaccgtcgagcacagccgcgaagcgatccaatggctgatcgagcaaggcgtgcccttcacccgcgatgagcactacagcgtcgacgatggcggcttcgagttccacctcacccgtgaagggggccatagccaccggcgcatcatccacgccgccgacgctaccggcgcggcaatcttcaccacgctgctggaacaggctcgccagcgcccgaacatccagctgctggagcagcgggtggcggtcgacctgatcactgaacgccgcctgggcctgcccggcgaacgctgcctgggcgcctacgtgctcgaccgcaacaccggcgaggtggacaccttcggcgcgcgcttcaccgtgctggccacgggcggtgcggccaaggtctatctctacaccagcaaccccgatggtgcctgcggcgacggtatcgccatggcctggcgggccggctgccgagtggcgaacctggaattcaaccagttccacccgacctgcctgtatcacccacaggccaagagcttcctgatcaccgaagccctgcgcggcgagggcgccctgctgcgcctgcccaacggcgaacgtttcatgccacgcttcgacccacgcgaagagctggccccacgggacatcgtggcccgcgccatcgaccacgagatgaagcgcctgggcgtggactgcgtatacctggacatcactcacaagcctgcagatttcatcaagagccacttccccaccgtgtacgagcgctgcctggcctttggcatcgatatcacccgtcagccgatcccggtggtgcctgcggcgcattacacctgcggcggggtgatggtcgacgactgcggccacaccgatgtgcctggcttgtatgccatcggcgaaaccagtttcaccggcctgcacggcgccaaccgcatggccagcaactcgctgctggaatgttttgtgtacggtcgcgccgccgctgccgacatccaggcgcacctggagcaagtggccatgcccaaggccttgcccggctgggacgccagccaggtgaccgactcggacgaggacgtgatcattgcgcacaactgggacgaactgcggcgcttcatgtgggactacgtcggcatcgtgcgcaccagcaagcgcctgcagcgggcccagcaccgcattcgcctgctgctggatgaaatcgacgagttctacagcaactacaaggtcagccgtgacctgatcgagctgcgcaacctggcgcaagtggccgagctgatgatcctgtcagccatgcagcgcaaggaaagccgagggttgcattacacactggattatccagggatgctggacgaggccaaggacaccatccttaacccgctctga

SEQ ID NO: 33132 - protein, 534 aa, Pseudomonas putida KT2440
MSQQFQHDVLVIGSGAAGLSLALNLPSHLRVAVLSKGDLSNGSTFWAQGGVAAVLDNTDTVQSHVEDTLNAGGGLCHEDAVRFTVEHSREAIQWLIEQGVPFTRDEHYSVDDGGFEFHLTREGGHSHRRIIHAADATGAAIFTTLLEQARQRPNIQLLEQRVAVDLITERRLGLPGERCLGAYVLDRNTGEVDTFGARFTVLATGGAAKVYLYTSNPDGACGDGIAMAWRAGCRVANLEFNQFHPTCLYHPQAKSFLITEALRGEGALLRLPNGERFMPRFDPREELAPRDIVARAIDHEMKRLGVDCVYLDITHKPADFIKSHFPTVYERCLAFGIDITRQPIPVVPAAHYTCGGVMVDDCGHTDVPGLYAIGETSFTGLHGANRMASNSLLECFVYGRAAAADIQAHLEQVAMPKALPGWDASQVTDSDEDVIIAHNWDELRRFMWDYVGIVRTSKRLQRAQHRIRLLLDEIDEFYSNYKVSRDLIELRNLAQVAELMILSAMQRKESRGLHYTLDYPGMLDEAKDTILNPL

SEQ ID NO: 33133 - DNA, 1773 bp, Pseudomonas putida KT2440
  CDS (1)..(1773): transl_table=11
atggctagcattccaaccatttccttcgacgccatcatcatcggtggcggcggcgccggcatgcgcgcagcgctgcaactggctcaaggcggccacaagactgccgtagtcaccaaggtcttcccgacccgttcgcacaccgtatccgcccagggcggcatcacctgcgccatcgcttcggccgacccgaacgacgactggcgctggcacatgtacgataccgtcaagggttccgactacatcggtgaccaggacgctatcgaatacatgtgtcaggaaggcccggctgcggtcttcgaactggaccacatgggtctgccgttctcgcgcaccgaaaccggccgcatctatcagcgcccgttcggtggtcagtccaaggacttcggtaaaggtggccaggccgcccgtacctgtgccgcttccgaccgtaccggtcacgcgctgctgcacaccctgtaccagggcaacctgaaggcgggcaccacgttcctcaacgagtactacgcagttgacctggtgaaaaaccaggacggcgcattcgtgggtgtgatcgccatctgcatcgaaaccggcgaaaccctgtacatcaagtccaaggccaccgtgctggccactggcggtgcgggccgtatctacgcgtccaccaccaacgccctgatcaacaccggtgacggtatcggcatggccctgcgtgcaggcgtgccggtgcaggacatcgaaatgtggcagttccacccgaccggtatcgccggcgccggtgtactggtcaccgagggttgccgcggtgaaggtggctacctgatcaacgcccacggcgagcgcttcatggagcgttacgcgccgaacgccaaagacctggccggccgcgacgtggttgcccgttccatggtcaaggaaatcatcgccggcaacggcgtgggcccgaacaaggaccacgtactgctgaagctggaccacctgggcgaggaagtgctgcacagccgcctgccaggtatctgcgaactgtccaagaccttcgcccacgtcgaccctgtggtcgcgccggtgccggtcgtgccgacctgccactacatgatgggcggcgttgccaccaacattcatggccaggccatcaccatggacgccgacggccaggatcacatcatcccgggcctgttcgccgtaggtgaagtggcgtgcgtatcggttcacggtgccaaccgcctgggcggcaactcgctgctcgacctggtggtgttcggccgtgctgccggcctgcacctggagaaggcgctgagcgaaggcgtggaataccgcgacgccagcgacaccgacgtcgatgttgccctgaaccgcctgaacaagctcaacgagcgtaccagcggtgaagacgttgccagcctgaagcgcgagctgcagagctgcatgcagaactacttcggtgtattccgtactggcgaatacatgcagaagggtatcgagcagctggccggtctgcgtgaccgtatcgccaacgtcaagatcaacgacaagtcccaggccttcaacaccgcgcgtatcgaagcgctggagctgcagaacctgctggaagtcgccgaagctaccgccatcgcggccgaagcccgtaaagagtcccgcggcgctcacgcccgtgaagacttcgaagaccgtgacgacgaaaactggctgtgccacaccctgtactacccgggtgagaagcgcgttgccaagcgcggcgtcaactttgcgccgaagactgttccagccttcgaaccaaaagtccggacttactaa

SEQ ID NO: 33134 - protein, 590 aa, Pseudomonas putida KT2440
MASIPTISFDAIIIGGGGAGMRAALQLAQGGHKTAVVTKVFPTRSHTVSAQGGITCAIASADPNDDWRWHMYDTVKGSDYIGDQDAIEYMCQEGPAAVFELDHMGLPFSRTETGRIYQRPFGGQSKDFGKGGQAARTCAASDRTGHALLHTLYQGNLKAGTTFLNEYYAVDLVKNQDGAFVGVIAICIETGETLYIKSKATVLATGGAGRIYASTTNALINTGDGIGMALRAGVPVQDIEMWQFHPTGIAGAGVLVTEGCRGEGGYLINAHGERFMERYAPNAKDLAGRDVVARSMVKEIIAGNGVGPNKDHVLLKLDHLGEEVLHSRLPGICELSKTFAHVDPVVAPVPVVPTCHYMMGGVATNIHGQAITMDADGQDHIIPGLFAVGEVACVSVHGANRLGGNSLLDLVVFGRAAGLHLEKALSEGVEYRDASDTDVDVALNRLNKLNERTSGEDVASLKRELQSCMQNYFGVFRTGEYMQKGIEQLAGLRDRIANVKINDKSQAFNTARIEALELQNLLEVAEATAIAAEARKESRGAHAREDFEDRDDENWLCHTLYYPGEKRVAKRGVNFAPKTVPAFEPKVRTY

SEQ ID NO: 33135 - DNA, 1623 bp, Escherichia coli CFT073
  CDS (1)..(1623): transl_table=11
  misc_feature (1345)..(1345): n is a, g, c or t
  misc_feature (1471)..(1471): m is a or c
  misc_feature (1487)..(1487): y is t or c
atgaatactctccctgaacattcatgtgacgtgttgattatcggtagcggcgcagccggactttcactggcgctgcgcctggctgaccagcatcaggtcatcgttctaagtaaaggcccggtaacggaaggttcaacattttatgcccagggcggtattgccgccgtgtttgatgaaactgacagcattgactcgcatgtggaagacacattgattgccggggctggtatttgcgatcgccatgcagttgaatttgtcgccagtaatgcacgatcctgtgtgcaatggctaatcgaccagggggtgttgtttgatacccacattcagccgaatggcgaagaaagctaccatctgactcgtgaaggtggacatagtcaccgtcgtattcttcatgccgccgacgccaccggtagagaagtagaaaccacgctggtgggcaaggcgcagaaccatccgaatattcgcgtgctggagcgcagcaacgcggttgatctgattgtttctgacaaaattggcctgccgggcacgcgacgggttgttggcgcgtgggtatggaaccgaaataaagaaacggttgaaacctgccacgcaaaagcagtggtactggcaaccggcggtgcttcaaaagtttatcagtacaccaccaatccggatatttcttctggcgatggcattgctatggcgtggcgcgcaggctgccggattgccaatctcgaatttaatcagttccaccctaccgcgctgtatcacccacaggcacgcaatttcctgttaacggaagcactgcgcggcgaaggcgcttatctcaagcgcccggatggcacgcgttttatgcccgattttgatgagcgcggcgaactggccccgcgcgatattgtcgcccgcgccattgaccatgaaatgaaacgcctcggcgcagattgtatgttccttgatattagccataagcccgccgattttattcgccagcatttcccgatgatttatgaaaaattgctcgggctggggatagatctcacgaaaaaacccgtgccgattgtgcctgctgcacattatacctgcggtggtgtaatggttgatgatcatgggcgtacggacgtcgagggtttgtatgccattggcgaagtgagttataccggcttacacggcgctaaccgcatggcctcgaattcattgctggagtgtctggtctatggctggtcggcggcagaagatatcagcagacgtataccttatgcccacggcgtcagtacgttaccgccgtgggatgaaagccgcgttgagaaccctgacgaacgggtagtaattcagcataactggcacgagctacgtctgtttatgtggnattacgttggcattgtgcgcacaacgaagcgcctggaacgcgccctgcggcggataaccatgctccaacaagaaatagacgaatattacgcccatttccgcgtctcaaataatttgctggagctgmgtaatctggtacaggytgccgagttgattgttcgctgtgcgatgatgcgcaaggagagccgtggcctgcatttcacgctggattatccggaactgctcacgcattccggtccatcgatcctttctgccggcaatcattacataaacagataa

SEQ ID NO: 33136 - protein, 540 aa, Escherichia coli CFT073
  misc_feature (449)..(449): The Xaa at location 449 stands for Asn, Asp, His, or Tyr.
  misc_feature (491)..(491): The Xaa at location 491 stands for Arg, or Ser.
  misc_feature (496)..(496): The Xaa at location 496 stands for Ala, or Val.
MNTLPEHSCDVLIIGSGAAGLSLALRLADQHQVIVLSKGPVTEGSTFYAQGGIAAVFDETDSIDSHVEDTLIAGAGICDRHAVEFVASNARSCVQWLIDQGVLFDTHIQPNGEESYHLTREGGHSHRRILHAADATGREVETTLVGKAQNHPNIRVLERSNAVDLIVSDKIGLPGTRRVVGAWVWNRNKETVETCHAKAVVLATGGASKVYQYTTNPDISSGDGIAMAWRAGCRIANLEFNQFHPTALYHPQARNFLLTEALRGEGAYLKRPDGTRFMPDFDERGELAPRDIVARAIDHEMKRLGADCMFLDISHKPADFIRQHFPMIYEKLLGLGIDLTKKPVPIVPAAHYTCGGVMVDDHGRTDVEGLYAIGEVSYTGLHGANRMASNSLLECLVYGWSAAEDISRRIPYAHGVSTLPPWDESRVENPDERVVIQHNWHELRLFMWXYVGIVRTTKRLERALRRITMLQQEIDEYYAHFRVSNNLLELXNLVQXAELIVRCAMMRKESRGLHFTLDYPELLTHSGPSILSAGNHYINR

SEQ ID NO: 33137 - DNA, 1611 bp, Bradyrhizobium japonicum USDA 110
  CDS (1)..(1611): transl_table=11
atgacaacaaacaacatccacaacctcactcgcagcaccgacgatgtcgtcatcgtcggcggcggccttgccggactgttctgtgcgctgaagctcgcgccgcggccggtgacgctgatctcggcggcaccgctcggacagggcgcttcgtccgcatgggcgcaaggcggcatcgccgcggcggtggccgagggcgatactccggaagcacatgccgcagatacggttgccgtcggcggcggccttgtcgacgaagcggtcgcgctcgggatcgcccgcgaggccgcgccgcgcatccacgacctgctcgcctatggcgtgccgttcgaccgcgatctcgaaggcaggctcgcggtggggcgggaagctgcgcattcggcgcgccgcatcgtgcatgtgcgcggcgacggtgcgggcgcagcgatcatcgcggcgctgggcgaggccgcgcgccggacgccgtcgatccggctgatcgagggtttcgtcgccgaagcgctgttgacggaagacggcgccgtctccggccttcagctgcgcgaggccggcaatcctgccgccccgccggtcctgctcgcctcacgcgcggtggtgctcgcgaccggcggcctcggccatctctatgccgtcaccaccaatccgcttgaagcaagcggatcgggccttgcgatcgccgcgcgcgccggcgccgtgatcgccgatcctgaattcgtgcagtttcaccccaccgccatcatggtcggccgcgatccggcaccgctggcgacggaggcgctgcgcggcgaaggggcgacgctgatcaacgccgatggcgagcgtttcatgctggcgcgtcatccgctcgccgagctcgcgccgcgcgacatcgtggcccgcggcgtgttcgccgagatcgcggccgggcgcggcgcattcctcgacgcacggcaggcgctgggcgcacgcttcgccgacaaattcccgaccgtgcatgcgagctgcatcgccgccggcatcgatcccgccacgcaggccatcccgatcgcgcccgccgcgcactaccacatgggcggcatcgcggtggacgggcgcggccgcagctcgatcgacgggctatgggccggcggcgaagtgtcctccaccggtgcgcatggcgccaaccgcctcgcctcgaattcgctgctggaggccgtgatctacgccgcacgcatcgccgacgacatcgccggccgcgccatcccctcggctgcccgccttcccgacgcattggtggcgccgcgcggcggcgcaccggatgccgcggtcgtgaagcggctgcgcgcgacgatgagcgcgcatgtcggcgtgatccgtcacggtgacggtcttgcggaggccgtgcacagcttcgctgcgctcgaacgtgacgcaacgagcatcgctgtccgcaacatggcgacaacagccctgctcgtcgccgctgcggcctggacgcggtgcgagagccgcggcgcgcatttccgctccgatcatccggctgatctccccgcgcaggcgaagagaacgatgaccaccctcgcagcagcgcgcgaggtcgcagaaaacctcaccgaacgcccaatgccgcgcatcgcgcaacccatgatcgcctga

SEQ ID NO: 33138 - protein, 536 aa, Bradyrhizobium japonicum USDA 110
MTTNNIHNLTRSTDDVVIVGGGLAGLFCALKLAPRPVTLISAAPLGQGASSAWAQGGIAAAVAEGDTPEAHAADTVAVGGGLVDEAVALGIAREAAPRIHDLLAYGVPFDRDLEGRLAVGREAAHSARRIVHVRGDGAGAAIIAALGEAARRTPSIRLIEGFVAEALLTEDGAVSGLQLREAGNPAAPPVLLASRAVVLATGGLGHLYAVTTNPLEASGSGLAIAARAGAVIADPEFVQFHPTAIMVGRDPAPLATEALRGEGATLINADGERFMLARHPLAELAPRDIVARGVFAEIAAGRGAFLDARQALGARFADKFPTVHASCIAAGIDPATQAIPIAPAAHYHMGGIAVDGRGRSSIDGLWAGGEVSSTGAHGANRLASNSLLEAVIYAARIADDIAGRAIPSAARLPDALVAPRGGAPDAAVVKRLRATMSAHVGVIRHGDGLAEAVHSFAALERDATSIAVRNMATTALLVAAAAWTRCESRGAHFRSDHPADLPAQAKRTMTTLAAAREVAENLTERPMPRIAQPMIA

SEQ ID NO: 33139 - DNA, 1617 bp, Pseudomonas syringae pv. tomato str. DC3000
  CDS (1)..(1617): transl_table=11
atgagccaacattttcagcacgacgtactggtaatcggcagcggcgctgcaggcctgagcctggcgcttaccctccccgaccatctgcggattgcggttctgagcaagggtgacctgtccaacggctcgacattctgggcccagggcggtgttgcggcggtccttgatgacactgacactgtgcagtctcatgtcgaagacacgttgaacgccggtggcggcctgtgcaacgaagacgcagtgcgctttaccgtcgagcacagtcgtgaggcgattcagtggctgattgatcaaggcgtccctttcacccggggcgacgacgcagacgtcgatgaaagcggctttgaatttcacctgacccgcgagggcggccacagtcatcgtcgaatcattcatgccgccgacgccacaggcgcggccatctttcgtacactgcttgagcaggcccgcaaacggccgaacatcgaactgcttgaacagcgcgccgccatcgacctgatcaccgagcgccgcctgggccttgaaggccagcgttgcctgggcgcttacgtgctcaatcgcaacagcggcgaagtggatacatacagcgcgcgcttcacgatcctggcctcgggcggcgctgccaaggtctatctgtacaccagcaacccggacggtgcctgcggcgacgggatcgccatggcctggcgctccggctgtcgggtggctaaccttgaattcaatcagtttcacccgacctgcctgtaccacccgcaggccaagagctttctgattaccgaagccctgcgcggtgaaggcgcttacctcaagttgcccaacggcgaacgcttcatgccgcgattcgacgaacgggcagaactggcccctcgtgacatcgttgcccgcgccattgaccacgaaatgaagcggctgggtatcgactgcgtctatctggacatcagccacaagcccgaagctttcatcaaaacgcacttcccgaccgtctacgagcgctgcctggaattttccatcgacatcactcgcgagccgatccccgtcgtcccggcagcgcattacacctgtggcggcgtgatggtcgacagccagggccataccgatgtacccggcctgtacgctatcggcgaaaccagcttcaccggcctgcacggcgccaaccgcatggccagcaactcgctgctggaatgcttcgtctacgcccgctcggcagccgcagacatcgaaaagcagttgtccagtgtgccgatgccgactgacctgccagcgtgggatgccagccaggtaaccgactcggacgaagacgtgatcatcgcccacaactgggacgaattaaggaggttcatgtgggattacgtcggtatcgtgcgcaccaacaaacgcttgcagcgcgcccagcaccgtgtgcggttgttgctcgacgaaattgatgagttctacagcaactacaaggtcagccgcgacctgatcgagctgcgtaacctcgcccaggtggccgaactgatgatctgctcggccatgcaacgcaaggaaagccgcgggctgcattacacgctggattacccggacatgctcccggaggcactggacactattctggtaccgcccactttcgtcggctga

SEQ ID NO: 33140 - protein, 538 aa, Pseudomonas syringae pv. tomato str. DC3000
MSQHFQHDVLVIGSGAAGLSLALTLPDHLRIAVLSKGDLSNGSTFWAQGGVAAVLDDTDTVQSHVEDTLNAGGGLCNEDAVRFTVEHSREAIQWLIDQGVPFTRGDDADVDESGFEFHLTREGGHSHRRIIHAADATGAAIFRTLLEQARKRPNIELLEQRAAIDLITERRLGLEGQRCLGAYVLNRNSGEVDTYSARFTILASGGAAKVYLYTSNPDGACGDGIAMAWRSGCRVANLEFNQFHPTCLYHPQAKSFLITEALRGEGAYLKLPNGERFMPRFDERAELAPRDIVARAIDHEMKRLGIDCVYLDISHKPEAFIKTHFPTVYERCLEFSIDITREPIPVVPAAHYTCGGVMVDSQGHTDVPGLYAIGETSFTGLHGANRMASNSLLECFVYARSAAADIEKQLSSVPMPTDLPAWDASQVTDSDEDVIIAHNWDELRRFMWDYVGIVRTNKRLQRAQHRVRLLLDEIDEFYSNYKVSRDLIELRNLAQVAELMICSAMQRKESRGLHYTLDYPDMLPEALDTILVPPTFVG

SEQ ID NO: 33141 - DNA, 1623 bp, Vibrio parahaemolyticus RIMD 2210633
  CDS (1)..(1623): transl_table=11
atgaacacaaatcgtgaacatgaatgtgatgtgttagtggtagggagtggcgctgcgggcttgtcgttggctttacgtgtcgcaaaccactgtaaagtaatggtactcagcaaaggaccgcgcagcgaaggggcaacttactacgctcaaggcggtatcgccgctgtgttcgatgaatccgacaccattgagtcgcacgttgaagatacccaaattgccggggatggtatctgcgacgaagagaccgtgagattcattgcagaacactcaaaagaatgtgtgcaatggctgattgacggcggtgtaccatttgaccgtgaagacgatgattctgacgatgaacctcgttaccacctaactcgcgaaggtggccacagccgccgccgtattctgcacgctgcagacgcaaccggtatggcaatgcaaacctcattgcaggacaacgcccacaaccatcccaatattcatgttcttgaacgccacaacgctctggacttgatcactgaagataaaatcggcggtgataaaaacaaagtcatcggtgcctatatctggaaccgaaacgaagagcacgtagaaaccgtgcgcgccaaatttgtggttctagcgacaggtggcgcatcaaaggtttatcaatacacctctaaccctgatgtatcatcgggtgatggtattgctatcgcgtggcgagcgggctgtcgagtggcaaacttagagttcaaccagttccaccctacttgcctttaccaccctgaagctcgcaacttcttgctgaccgaagcccttcgtggtgaaggcgcttaccttcgtcgcccagacggcactcgctttatgccagattttgatgagcgaaaagaactcgccccccgcgatgttgtcgctcgtgccatcgacttcgaaatgaaacgcttgggtgcagactgcatgtatctcgacatcagtcataaaccagcggactttatcaccaagcacttcccgaccatttactcgcgcttgatggacttgggcattgatatgaccaaagagcctattccaatcgtaccagctgcgcactatacctgtggcggcgtgatggtggatcaaaacggccatactgatttgaaaaatctatacgcgattggcgaagtgagctacaccggcttgcatggtgctaaccgtatggcatcgaactcactgttggaatgtgtggtttatgcgtggtctgctgcaaaagatattctgaaacatcacaccagcgttgagctgccttcacgtgttccatgttgggatgaaagccaagtcaccaacagtgatgaagaagttattattcaacacaactggcacgaacttcgcttgttcatgtgggactacatgggcattgtgcgtaccgataagcgcttagaacgtgcattgcgccgcattcaactactacaacaagaaacgcatgagtactacagtaacttccgcgtatctaataacttgttggagctgcgtaatctactgcaagttgcagagcttatggttcgctgtgcaatgcagcgtaaagagagccgcggcctgcactacacgcttgattacccaaatcaactggaaaacagcggtccgacaattctggtaccagcaaagcagttaaccgataattaa

SEQ ID NO: 33142 - protein, 540 aa, Vibrio parahaemolyticus RIMD 2210633
MNTNREHECDVLVVGSGAAGLSLALRVANHCKVMVLSKGPRSEGATYYAQGGIAAVFDESDTIESHVEDTQIAGDGICDEETVRFIAEHSKECVQWLIDGGVPFDREDDDSDDEPRYHLTREGGHSRRRILHAADATGMAMQTSLQDNAHNHPNIHVLERHNALDLITEDKIGGDKNKVIGAYIWNRNEEHVETVRAKFVVLATGGASKVYQYTSNPDVSSGDGIAIAWRAGCRVANLEFNQFHPTCLYHPEARNFLLTEALRGEGAYLRRPDGTRFMPDFDERKELAPRDVVARAIDFEMKRLGADCMYLDISHKPADFITKHFPTIYSRLMDLGIDMTKEPIPIVPAAHYTCGGVMVDQNGHTDLKNLYAIGEVSYTGLHGANRMASNSLLECVVYAWSAAKDILKHHTSVELPSRVPCWDESQVTNSDEEVIIQHNWHELRLFMWDYMGIVRTDKRLERALRRIQLLQQETHEYYSNFRVSNNLLELRNLLQVAELMVRCAMQRKESRGLHYTLDYPNQLENSGPTILVPAKQLTDN

SEQ ID NO: 33143 - DNA, 1572 bp, Bacteroides thetaiotaomicron VPI-5482
  CDS (1)..(1572): transl_table=11
atggtaagaaaattcgatttcctcgttatcggctccggaattgccggtatgagttttgcgctcaaagtggcgcacaaaggtaaagttgctcttatctgtaaaagcgggctggaagaagccaatacgtacttcgcacaaggaggagtggcgtccgtcaccaacctgctggtggataatttcgacaaacacattgaagacacgatgattgccggcgactggatcagtgaccgtggcgcagtagaaaaagtagtgcgcgaagcgcctgcgcaaattgaagaactgatcaaatggggcgtggacttcgacaaaaacgagaaaggcgaatttgacttgcaccgcgagggaggacactccgagttccgcattcttcaccataaagataatacgggagcagagattcaggacagcctgatcaaagccgtgcaaaggcatccgaacatcgaggtgatcgaaaaccagtttgccgttgaaatactgacccaacatcatctgggagtaactgttacccgccagacaccggacatcaaatgctacggtgcctacatcctcgacccgaaaaccggaaaagtagatacctacctcgccaaagtgactcttatggccaccggtggagtaggagctgtttataaaacgaccaccaatccgctagtcgctaccggagacggtatcgccatggtctaccgtgccaaaggtacagtgaaggatatggagtttgtgcaattccaccccaccgccctgtaccatccgggcgaccgcccttcgttcctgattacggaagcgatgcgtggctacggtggcgtactccgcacaatggacggcaaggagttcatgcaaaaatacgatccccgtctttcactcgctccgcgcgatatcgtagcccgtgctattgacaacgaaatgaaaaatcggggtgatgaccatgtttatcttgacgtcacccacaaagacccggaagagacaaagaagcactttcccaatatttacgagaaatgcctcagcttgggcatcgacatcaccaaagattacattccggtagctccggcagcccactatctttgcggcggtatccttgtagacctgaacggacagtcttctatcgaacgcctctacgcagtgggagagtgctcctgcaccggtctccacggtggtaaccgtctggcttccaactcactgatcgaagctgtcgtatatgccgacgctgccgccaagcatagcctgagagttgtagaccagtatgcctacaacgaagccatccccgaatggaacgacgagggaacccgttcaccggaagagatggtactgatcacgcaaagcatgaaggaagttaaccagattatgagtacttatgtaggtattgtccgcagcgaccttcgtctgaaacgtgcctgggaccgactggatatcatttacgaagaaactgaaagcctgttcaaacgcagcgtagcctccagagagatttgcgaattgcgtaatatggtcaacgtaggatatctgattatgcgtcaggcaatggaacgcaaagaaagccgcggattgcattatacgattgattatccacacgctaaaaaataa

SEQ ID NO: 33144 - protein, 523 aa, Bacteroides thetaiotaomicron VPI-5482
MVRKFDFLVIGSGIAGMSFALKVAHKGKVALICKSGLEEANTYFAQGGVASVTNLLVDNFDKHIEDTMIAGDWISDRGAVEKVVREAPAQIEELIKWGVDFDKNEKGEFDLHREGGHSEFRILHHKDNTGAEIQDSLIKAVQRHPNIEVIENQFAVEILTQHHLGVTVTRQTPDIKCYGAYILDPKTGKVDTYLAKVTLMATGGVGAVYKTTTNPLVATGDGIAMVYRAKGTVKDMEFVQFHPTALYHPGDRPSFLITEAMRGYGGVLRTMDGKEFMQKYDPRLSLAPRDIVARAIDNEMKNRGDDHVYLDVTHKDPEETKKHFPNIYEKCLSLGIDITKDYIPVAPAAHYLCGGILVDLNGQSSIERLYAVGECSCTGLHGGNRLASNSLIEAVVYADAAAKHSLRVVDQYAYNEAIPEWNDEGTRSPEEMVLITQSMKEVNQIMSTYVGIVRSDLRLKRAWDRLDIIYEETESLFKRSVASREICELRNMVNVGYLIMRQAMERKESRGLHYTIDYPHAKK

SEQ ID NO: 33145 - DNA, 1818 bp, Streptomyces avermitilis MA-4680
  CDS (1)..(1818): transl_table=11
gtgaccggcacaggtactggcagcacaggcataggaccgcacggcaccggtacgggcatacgcctgcacgcgcccgcccccggctggtccatcgccgccgacgtcgtggtcgtcggctccggcgtggccggcctgaccgcggccctgcgctgcgaggccgcgggcctgacgacggtcgtcgtcaccaaggcccacctcgacgacggctccacccgctgggcccagggcggcatcgccgcggccctcggcgagggcgacacccccgaacagcacctcgacgacacgctggtggcgggcgcgggcctgtgcgacgaggaggccgtacgcatcctcgtcaccgagggccccgacgccgtacgccggctgatcgcgaccggcgcccacttcgacgagtcctccgagggcggcctcgaactcacccgcgagggcggccaccaccgccgccgcatcgcccacgcgggcggcgacgcgaccggcgcggagatctcccgtgccctcgtcgaggcggttcgcgcgcgcggcctgcgcaccgtggagaacgcgctcgtcctggacctcctcacggacgccgagggacgcaccgcgggtgtcaccctgcacgtcatgggagaaggccagcacgacggcgtaggagcggtccacgcccccgccgtggtcctcgccaccggcggcatgggccaggtcttctcggcgaccaccaacccgtccgtgtccaccggcgacggcgtggcgctcgccctgcgcgccggagcggaggtcagcgacctggagttcgtccagttccacccgaccgtgctcttcctgggcgcggacgcggagggccagcagcccctcgtctccgaagcggtacgcggcgagggcgcccacctggtcgacgcggacggcgtgcgcttcatggtggggcagcacgagctggccgaactcgccccccgggacatcgtcgccaagggcatcatgcgccgcatgcaggagcaggacgccgagcacatgttcctggacgcccggcacttcggcgccgccatgtgggaacaccgcttcccgacgatcctggccgcctgccgcgcccacggcatcgacccggtgcacgagcccgtccccgtcgccccggccgcccactacgcctccggaggcgtccgcacggactcccggggccgtacgaccgtgccgggcctgtacgcgtgcggtgaggtcgcctgcaccggcgtccacggtgccaaccgactggcctcgaactccctcctggagggcctggtctacgccgagcgcatcgccgccgacatcgcggcgggccccgcggagaacgcccgccacgcgcgcgtgccgcagccggtcccgcagccggagaagccggcccacccgctgctggcccccgaggcccgtttcgcgatccagcggatcatggcggacggagcgggcgtcctgcgctcggccgagtccctcgcgaaggccgccgaccgcctccagcaactgcacacggacgcccgcgacgccctagacgagaacggcaagacggccgagccgggcgtcgacacctgggaggccaccaacctcctgtgcgtggcccgcgtcctggtcgccgccgcccaggtgcgtgaggagacccgcggctgccactggcgcgaggaccacgccgaccgcgacgacaccacctggcgccgccacatcgtcgtacggctgaatccggatcgcgcactcgccgtacgcaccaccgacacagcagacttccccccgaccctccccccggcgctcggctccgcccgagcgggggaggcccccatggcccgaccggcgcgtccgtcccgtccccaggagcagtga

SEQ ID NO: 33146 - protein, 605 aa, Streptomyces avermitilis MA-4680
MTGTGTGSTGIGPHGTGTGIRLHAPAPGWSIAADVVVVGSGVAGLTAALRCEAAGLTTVVVTKAHLDDGSTRWAQGGIAAALGEGDTPEQHLDDTLVAGAGLCDEEAVRILVTEGPDAVRRLIATGAHFDESSEGGLELTREGGHHRRRIAHAGGDATGAEISRALVEAVRARGLRTVENALVLDLLTDAEGRTAGVTLHVMGEGQHDGVGAVHAPAVVLATGGMGQVFSATTNPSVSTGDGVALALRAGAEVSDLEFVQFHPTVLFLGADAEGQQPLVSEAVRGEGAHLVDADGVRFMVGQHELAELAPRDIVAKGIMRRMQEQDAEHMFLDARHFGAAMWEHRFPTILAACRAHGIDPVHEPVPVAPAAHYASGGVRTDSRGRTTVPGLYACGEVACTGVHGANRLASNSLLEGLVYAERIAADIAAGPAENARHARVPQPVPQPEKPAHPLLAPEARFAIQRIMADGAGVLRSAESLAKAADRLQQLHTDARDALDENGKTAEPGVDTWEATNLLCVARVLVAAAQVREETRGCHWREDHADRDDTTWRRHIVVRLNPDRALAVRTTDTADFPPTLPPALGSARAGEAPMARPARPSRPQEQ

SEQ ID NO: 33147 - DNA, 1584 bp, Nitrosomonas europaea ATCC 19718
  CDS (1)..(1584): transl_table=11
atgcaaccacttcgtttcgatgcactgatcattggcagcggtctggccgggctgacacttgccctgaatctcgcagaaacccaaaaggtcgcgctggtgaccaagcggacattgcatgacagctccagtgcctgggcgcagggggggattgccgccgtgctgtcgatcgaagattcaccggaggcacatatccgcgatacgctgatcgccggtgcaggtttgtgtaacgaagccatgacccgtcatatcgtggaaaacggtccacaggctgtcagatggctgattgccagaggggtcgattttacgcgggatgatcacaatgaaactggttatcacctgactcgtgagggtggtcatagtgtgcgtcgcatcattcattctggtgatgccactggtaaagtggtgcaacttacactgaccagacaggcagcacaacatccgaatatcaccgtgctggagcaccacattgcaatcgatctgatcaccagcgagaaattgtctcatgccggggaaaataaccgctgctacggcgcttatgtgctcgatatccgcgccggaaaagtgcgcacgattgcggcacgtaatacgattctggccaccggcggtgcgggtaaagtttatctctataccactaatcccgatgtatctaccggggatggtattgccatggggtggcgtgcggggtgccgtgttgccaatatggaatttgtccagtttcatcccacctgcttgtatcatccgcatgccaagtcctttctgatcactgaagcagtgaggggggaggggggtatactgaagctgcccgatggtgagcgtttcatgcttcggcatgatgaacgggccgaacttgctccgcgtgacatcgtggcgcgtgcaatcgacttcgaaatgaaaaaacgcgggctggattgtgtatttctggacatttcccaccagccagccgattttctggtgcagcattttccaactatttacaagcgttgtctggaactgggcatcgacatcactcgtgagcctattccggtcgtcccggcagctcactatacctgtggcgggatcatgaccgatcaatgcggacggactgatctcgacaatctgtatgccatcggtgaaacggcgcataccggtctgcacggcgccaatcgcctggccagtaattctttgctggaatgtctggtcactggtctttcggcggtcgaggatattctggttcgctctcctgcgccagatctgctgttaccggactgggatgaaagccgtgtgaccgatgccgacgaggaagtcgtgatttcccataactgggacgagttgcgccgttttatgtggaattatgtaggtatcgtgcgtaccagcaaacgtttgcagcgggcgcaacaccgcatcaggctgctgagtgaggaaatcggtgagtactattccaatttccgggtgaccagtgatttgctcgaactgcgcaatctcgtgtgtacttccgatctgatcgttcggagcgcaatgctgcggcacgagagtcgcggactgcacttcagccgggattaccctgaaatactgccgcaggccgttgacacgatcttgtcacgataa

SEQ ID NO: 33148 - protein, 527 aa, Nitrosomonas europaea ATCC 19718
MQPLRFDALIIGSGLAGLTLALNLAETQKVALVTKRTLHDSSSAWAQGGIAAVLSIEDSPEAHIRDTLIAGAGLCNEAMTRHIVENGPQAVRWLIARGVDFTRDDHNETGYHLTREGGHSVRRIIHSGDATGKVVQLTLTRQAAQHPNITVLEHHIAIDLITSEKLSHAGENNRCYGAYVLDIRAGKVRTIAARNTILATGGAGKVYLYTTNPDVSTGDGIAMGWRAGCRVANMEFVQFHPTCLYHPHAKSFLITEAVRGEGGILKLPDGERFMLRHDERAELAPRDIVARAIDFEMKKRGLDCVFLDISHQPADFLVQHFPTIYKRCLELGIDITREPIPVVPAAHYTCGGIMTDQCGRTDLDNLYAIGETAHTGLHGANRLASNSLLECLVTGLSAVEDILVRSPAPDLLLPDWDESRVTDADEEVVISHNWDELRRFMWNYVGIVRTSKRLQRAQHRIRLLSEEIGEYYSNFRVTSDLLELRNLVCTSDLIVRSAMLRHESRGLHFSRDYPEILPQAVDTILSR

SEQ ID NO: 33149 - DNA, 1683 bp, Rhodopirellula baltica SH 1
  CDS (1)..(1683): transl_table=11
atgatcacaccccggtatcttttgccgtttgattcgcgaagagcccttcatcgtttcacagacgtcctggtcattggcggtggtttggcgggtttgcgagcggccaacgcggtggaaccgaacctgtctgttttggttgtgaccaaagacgagcttcgtgagtccaacagcaactacgcacaaggcggcatcgccggcgtcttggatccccaagattgttttgacgatcatatccgagacacattgattgcgggtggcaacctttgtgatccggccgtcgtcgcgagggtcattcacgaaggcccgcgtcggatcgaagaactgatccactggggcacccagtttgacaaaagcgaaggtgaactcgctctcggacgagaaggcgggcacagccacgaacgcattgttcatgccatgggcgatgcgactggacgcgaagtgatgcgagccgtgatcgcacgttcacgcgaagccgccaacatcgacatctgggaaaacgcattcacagtcgatttgctcagccaagaagggcgttgccacggtgcgattgtcgtcaccagcgatggacgcccgacaatggtgtgggccaaagaaacgattctttgcaccggtggcgtgggccaggtttatcgcgaatcgaccaatccgccagtcgcaaccggtgacggaacctcgctggcttatcgagccggcgttgaactgagagacatggagttcattcagttccatcccaccgttttgtatatcgccggatcgtcccgttcattgatcaccgaagccgtccgtggcgacggagcttaccttcgtgatgcgaccggtcatcgcttcatgcccgactacgattctcgcggtgaactcgcgccccgagatatcgtcagtcaatcgatcgtcaatcaaatgaacgagaccgcacatccgtgtgtgtacttggacttatcccacctcaacgctgaacacgtgcgagctcgcttccctggcatcgcagagacttgcggcaagttcgggttggatatcgccaccgatcgcatcccggttcgtccgggagctcactacatgatcggcggcgttcgggtcgatatgttgggacgaaccagtctccctggattgtgggcggcgggcgaagcgaccagctctggactgcacggcgccaatcgattggccagtaacagcttgctcgaaggtttggtctatggtgcccacgccggagaagcggccagccgttccgccgcggaaggcccacataaaatggttgcgcgccgcatccaacacgcagaccacacgctcaacgaatcgttcgatgtcgccgacgtccgtgtgtcgttgaaaagtctgatgggtcgattggtaggcgttcaaagagatgccgaggggctacgccaagccgacgggcaaattcgatcgttggccgcttacgtgatgcgacaccaattcaacagcgtcgaaggttgggaacttcagaatctattgctgaccgcccactgcatggcctcatcggcactggcacggaccgaatctcgcggcgtgcatcttcgcagcgattaccccgaaccggacgacgagaattggcgttgccacctcagcgttcaagtcgacgttgatggtggcatgccacgaaaaggcgaaccaatgacgtctcccgtgatcacgcgtgaatcaacgcagacgaactcgacggtcgattga

SEQ ID NO: 33150 - protein, 560 aa, Rhodopirellula baltica SH 1
MITPRYLLPFDSRRALHRFTDVLVIGGGLAGLRAANAVEPNLSVLVVTKDELRESNSNYAQGGIAGVLDPQDCFDDHIRDTLIAGGNLCDPAVVARVIHEGPRRIEELIHWGTQFDKSEGELALGREGGHSHERIVHAMGDATGREVMRAVIARSREAANIDIWENAFTVDLLSQEGRCHGAIVVTSDGRPTMVWAKETILCTGGVGQVYRESTNPPVATGDGTSLAYRAGVELRDMEFIQFHPTVLYIAGSSRSLITEAVRGDGAYLRDATGHRFMPDYDSRGELAPRDIVSQSIVNQMNETAHPCVYLDLSHLNAEHVRARFPGIAETCGKFGLDIATDRIPVRPGAHYMIGGVRVDMLGRTSLPGLWAAGEATSSGLHGANRLASNSLLEGLVYGAHAGEAASRSAAEGPHKMVARRIQHADHTLNESFDVADVRVSLKSLMGRLVGVQRDAEGLRQADGQIRSLAAYVMRHQFNSVEGWELQNLLLTAHCMASSALARTESRGVHLRSDYPEPDDENWRCHLSVQVDVDGGMPRKGEPMTSPVITRESTQTNSTVD

SEQ ID NO: 33151 - DNA, 1767 bp, Wigglesworthia glossinidia endosymbiont of Glossina brevipalpis
  CDS (1)..(1767): transl_table=11
atgaaaattttaaaaaaaacatttgatgtgattgttataggatcaggtggatctggaatgagggctgctttagaaatagcaaaaaataagtcgtcatgtgctttaatttctaaggtttttccaaccagatctcatactgtatcagctcaaggaggaataacagttgctttgggaaatagccacgaagatgattggcaatggcacatgtatgacacaataaaaggatcagactacattggagatcaagacgcaattgaatatatgtgcaaaaatggacctaaagaaatattagaattagaacatatggggcttccattttctagatcagaaaatggtaaaatatatcaacgtgcgtttggaggacaatctataaattatggagaaagacaagctgaaagaaccgctgcagctgctgacagaaccggtcatgctcttttgcatacattatatcaacaaaatataaaaaataatactaaaattttttcagaatggtatgcattagatttagtaaaaaatcaagatgaatcaattgttggttgtacggcaatatgcatagaaaccggagaaacattttattttgaatcaaaaattactattttagcaactggaggagctggaaggatatatcaatctacaacaaatgcttatattaatactggagacggaataggtatggctttgagagctggaataccagtccaagatatggaaatgtggcaatttcatccaactggaattgctggggcggggatattgataacagaaggatgtagaggagaaggaggatatttattaaataagaatggagaaagattcatggaaagatatgctccaaattctaaagatcttgccggtagagatgtagtttctagatctatgatgattgaaatattagaaaatagaggatttaaaaataatctaggagactatgttcatttaaagttagatcatttaggtactaatatattaaattctagacttccaggaattttagaattatctcgtacatttgctcatgtagatccagtaaaaaaaccaattcctgtaatacctacttgtcattacatgatgggtggaataccaacaaaaataacaggacaagttatatctatagatgatttaaaaaatgaaatagaaatacccgggctatttgcaattggagaaaattcatgtgtatctgttcatggagcaaatcgtttaggtggtaattctcttttagacctagtagtatttggtaaatctgcaggagttcaaataaataaaatattatcttctcattattctcctaaaaaagcaagcaaatcagatattgaattttcgctaaaaagatatattaattggaataataaaaaaggaaaagaaaatccaaacaatattaaaaaaaatttgcaaatttgtatgcaaaatcacttttcagtatttagagacggaccatctatggaaaaaggaatattaaagatcaaagaacttaaacataggttaaaaaattctaaattacaagattcatctgataaatttaatataaatagaatagaatgcttagagttagataatttaatagacgtatcttatgcaacagctttatctgcaaaatttagaaaagaaagtagaggagcacattatcgtagtgattttccttttagagatgatgaaaattggttatgtcatactattttttttctaaaaagagaaattatgaaaaaaagaaacataaacatgaaacctatttatcgttcagcttttcaacctaaagaaagatcatattaa

SEQ ID NO: 33152 - protein, 588 aa, Wigglesworthia glossinidia endosymbiont of Glossina brevipalpis
MKILKKTFDVIVIGSGGSGMRAALEIAKNKSSCALISKVFPTRSHTVSAQGGITVALGNSHEDDWQWHMYDTIKGSDYIGDQDAIEYMCKNGPKEILELEHMGLPFSRSENGKIYQRAFGGQSINYGERQAERTAAAADRTGHALLHTLYQQNIKNNTKIFSEWYALDLVKNQDESIVGCTAICIETGETFYFESKITILATGGAGRIYQSTTNAYINTGDGIGMALRAGIPVQDMEMWQFHPTGIAGAGILITEGCRGEGGYLLNKNGERFMERYAPNSKDLAGRDVVSRSMMIEILENRGFKNNLGDYVHLKLDHLGTNILNSRLPGILELSRTFAHVDPVKKPIPVIPTCHYMMGGIPTKITGQVISIDDLKNEIEIPGLFAIGENSCVSVHGANRLGGNSLLDLVVFGKSAGVQINKILSSHYSPKKASKSDIEFSLKRYINWNNKKGKENPNNIKKNLQICMQNHFSVFRDGPSMEKGILKIKELKHRLKNSKLQDSSDKFNINRIECLELDNLIDVSYATALSAKFRKESRGAHYRSDFPFRDDENWLCHTIFFLKREIMKKRNINMKPIYRSAFQPKERSY

SEQ ID NO: 33153 - DNA, 1659 bp, Prochlorococcus marinus subsp. marinus str. CCMP1375
  CDS (1)..(1659): transl_table=11
atgaactctgcgcgtattacttctaattcttgggatgtgattgttgtaggtgctggtgctgcagggttgatgacatgcattgaattgccacctcacttgaaaatcttgcttcttaatcgtaatacgagcaaaagatctgcaagtcgatgggctcaaggaggtattgctgcagttactcgagaagaagatagtttacaaagtcatgcagatgataccttcagagcaggatgtggtttgtgtgatactgatgcagtgaaaatgcttgtggaacatgctcctcaatgcgttgagcggcttcagaagttaggaatggagtttgatagagactctaaaggattagctacaacactagaagctgctcatagtcataggcgtgtattacatgttcaggatcgcacagggagagctttagttgatgtactgcgagaacaagttgagaaaagatctaatattgttcattgtcgaggcgtaagagttacgcagcttttggttgagcataattgctgcgatggagtacaagttttagatggtcctttgctttattggattcaatccaaggctgttgttttagcttctggagggggcggacatttgtttgcaaatacaacaaatcctgctcaagcctgcggagaaggtttggctttggcttggaaagcaggtgcagctatagaggatcttgagttttttcagtttcatccaactgcacttaagcttcaaggggctacgtctttcttaatttcagaagctgttagaggtgagggagctgtattagttgatcgtgatggcaatagtcctgtcgctcatttgttgagaaaggatcttgctcctagagatcaggttagtagagctcttgtaaagacaatgcaatcgcaaggtgtaagtcatatagggcttgatttaatgaatattcctccagaaaaaatttttgcgcgcttcccttccattattcaaagatgtcgagaaatgggtattgaccccctgaataatttgataccagttgctccagcagcacattattggatgggtggcgttgctactgatatgcaagcagcaacatcagtttcaggactttatgccgtcggagaagttgcatgtactggagtacatggtgcaaaccgactggccagcaactccttattggaatgtttggtatttgcaagtcaaatgtctgttattaatgtaacggaatcctctcgtaaaaatatcatttcaaatcaaacttttctgactaaactttcaaataatttagattgtgagcaaagtgagaatgacttgcaatcttctatagaagacttaagaaaattattttggaaagaagtaggtgttaatcgttctaagaaaggaatgcaagatgctttgaacaatatacgattagatttagattctctaaataagaacgctttgttagagttagttagtaatcaatcaattgatatatgtaattcgtttgatgaaggtactcgaaggaaattgaatcttcttttggatttaaatcatcgtaaattgacgtgcttattaactttaaatgcctgcttatttcggacggaaagtagaggaggacattatcgattagattcacccgcaacattaccttattggagatgtcactctaggcagaaaaaaggtcaaacaatctcaacaagaccagttagagagtaa

SEQ ID NO: 33154 - protein, 552 aa, Prochlorococcus marinus subsp. marinus str. CCMP1375
MNSARITSNSWDVIVVGAGAAGLMTCIELPPHLKILLLNRNTSKRSASRWAQGGIAAVTREEDSLQSHADDTFRAGCGLCDTDAVKMLVEHAPQCVERLQKLGMEFDRDSKGLATTLEAAHSHRRVLHVQDRTGRALVDVLREQVEKRSNIVHCRGVRVTQLLVEHNCCDGVQVLDGPLLYWIQSKAVVLASGGGGHLFANTTNPAQACGEGLALAWKAGAAIEDLEFFQFHPTALKLQGATSFLISEAVRGEGAVLVDRDGNSPVAHLLRKDLAPRDQVSRALVKTMQSQGVSHIGLDLMNIPPEKIFARFPSIIQRCREMGIDPLNNLIPVAPAAHYWMGGVATDMQAATSVSGLYAVGEVACTGVHGANRLASNSLLECLVFASQMSVINVTESSRKNIISNQTFLTKLSNNLDCEQSENDLQSSIEDLRKLFWKEVGVNRSKKGMQDALNNIRLDLDSLNKNALLELVSNQSIDICNSFDEGTRRKLNLLLDLNHRKLTCLLTLNACLFRTESRGGHYRLDSPATLPYWRCHSRQKKGQTISTRPVRE

SEQ ID NO: 33155 - DNA, 1779 bp, Bordetella parapertussis 12822
  CDS (1)..(1779): transl_table=11
gtggtcgctgtcatgaattccttgccgcgccgccagtttgatgtggtggtggtcggcgccggcggagccggcatgcgctgttcgctgcaactggcccaggcgggcctgtcggttgcggtgctgtccaaagtgttcccgacccgttcgcacacggttgccgcgcaaggcggcgtgagcgcgtcgctgggcaacatgagcgaagacaactggtactggcatatgtacgacaccgtcaaggggtcggactggctgggcgaccaggatgccatcgagttcatgtgccgcgaggcgcccaatgccgtgtatgagctcgagcacttcggcatgccgttcgaccgcaacgccgacggcaccatctaccagcgtccgttcggcggccatacggccaatttcggcgagaagccggtgcagcgcgcctgtgccgccgccgaccgtaccggccacgcgctgctgcacacgctctaccagcgcaacgtcgccgcccgtacccagttcttcgtcgagtggatggcgctggacctgctgcgcaacgaagccggcgacgtgctgggcgtgaccgcgctcgaaatggaaaccggcgagatctacgtcctggaagccaagaccacggtgctggccaccggcggcgccggccgtatctgggccgcttccacgaacgccttcatcaacaccggcgacggcctgggcatggcggcgcgcgcgggcatcccgctgcaggacatggagttctggcagttccacccgaccggcgtggccggcgcgggcgtgctgatcaccgaaggcgtgcgcggcgaaggcggcatcctgctcaacaaggatggcgagcgcttcatggagcgctacgcgcccacgctgaaggacctggcgccgcgcgacttcgtgtcgcgctcgatggaccaggaaatcaaggaaggccgcggctgcggtcccgacggcagctacgtggtgctgaagctggatcacctcggcgccgacgtgatcaacaagcgcctgccgtcgatccgtgagatcgccatcaagttcggcaacgtcgacccgatcaaggaaccgatccccgtcgtgccgaccatccactaccagatgggcggcattcccgccaactaccacggccaggtgctcgagcgcgccaacggcgagaacaagatcgtcaacggcctgtacgccatcggcgaatgcgccgcggtgtcggtgcacggcgccaaccgcctgggcaccaattcgctgctggacctgatcgtcttcggccgtgccaccggcaaccatatcgtcgactcgcatcccgagcgccagcacgcccaccagccgctgcccaaggaagccgtcgaccggtcgcgggcgcgcgtcgacgagctggagtcgcgcacttcgggcgagaagacccaggacgtcgccaacgccatccgcatgtcgatgcagcgccattgcggcgtgttccgcacgctggagctgctcaacgagggcgtgggccagatcgaagacctggcgcagacggcccagcacatctacttcaaggacaagtcgaaggtgttcaacaccgcgcgcgtcgaggcgctggaactggccaacatgaccgaggtggcgcgcgccaccatcaagtcggccgccaaccgcaccgaaagccgcggcgcgcatgcgctgaacgaccatcccgagcgcgacgacgtgaactggctcaagcatacgctgtggtattcggaaggcagccgcctcgactacaaacccgttcagatgaagccgctgacagtggaatccttcccgcccaaggctcgtactttctaa

SEQ ID NO: 33156 - protein, 592 aa, Bordetella parapertussis 12822
MVAVMNSLPRRQFDVVVVGAGGAGMRCSLQLAQAGLSVAVLSKVFPTRSHTVAAQGGVSASLGNMSEDNWYWHMYDTVKGSDWLGDQDAIEFMCREAPNAVYELEHFGMPFDRNADGTIYQRPFGGHTANFGEKPVQRACAAADRTGHALLHTLYQRNVAARTQFFVEWMALDLLRNEAGDVLGVTALEMETGEIYVLEAKTTVLATGGAGRIWAASTNAFINTGDGLGMAARAGIPLQDMEFWQFHPTGVAGAGVLITEGVRGEGGILLNKDGERFMERYAPTLKDLAPRDFVSRSMDQEIKEGRGCGPDGSYVVLKLDHLGADVINKRLPSIREIAIKFGNVDPIKEPIPVVPTIHYQMGGIPANYHGQVLERANGENKIVNGLYAIGECAAVSVHGANRLGTNSLLDLIVFGRATGNHIVDSHPERQHAHQPLPKEAVDRSRARVDELESRTSGEKTQDVANAIRMSMQRHCGVFRTLELLNEGVGQIEDLAQTAQHIYFKDKSKVFNTARVEALELANMTEVARATIKSAANRTESRGAHALNDHPERDDVNWLKHTLWYSEGSRLDYKPVQMKPLTVESFPPKARTF

SEQ ID NO: 33157 - DNA, 1671 bp, Prochlorococcus marinus str. MIT 9313
  CDS (1)..(1671): transl_table=11
atgagtatctctaacccatccacgcccattcctaacggtccctgggatgtcgtggtgatcggcgcaggggcagcagggctgatgacctgccttgagctgcctgctcagctgaaggtgcttttgctgaaccgcaacaccagccgccactcctccagccgctgggctcaaggtggcatcgccgcagtaacaagacctaaagacagcgccgagagccatgcagaagacactctcaaagcaggcgcaggactctgtgatgctgatgctgtcagacaacttgtagaagaagctccccactgcgttcaacgtctccagaagcttgggatggcctttgaccgcgaaggtgatgcgctagccaccaccttggaggcagcccatagccatcgaagagtgctgcatgtgcaggaccaaactggccgcgccttggttgaagcactgcaagagcaagtggaacggcgccccaacctcttgcaccggcgaggggtacgcgccacccagctttggattgagcacaatcgctgctacggggtacaagtgctcgacggaacgctgctccattggctttcggccagagcggtagtcctggcaactggtggcggtggtcatttgttcgcaaacaccaccaatccggctcaggcctgcggagaaggcttagcccttgcctggcaagcaggcgccacgatcgaggatcttgaattcgtgcagtttcatcccacagctctgaaactggaaggagctccatgctttctgatttcagaagcagtcagaggcgaaggtgccgtactggttgatggccaagggcaaagtcctgtaaaggaattgagcgctggtgatcttgctccccgcgaccaagtaagccggtccctcatccaaaccatgcatcaccaaggggtccagcatcttggcctagatctcacacccatcccttcagggcaggccgaggtccgtttcccaaccatcctggaacgctgtcgggaattaggtttagatccactcaaccaaccgatcccggtagccccagcagctcactactggatgggaggaatcgccaccaaccttcaagccgcaaccaatcttccagggctctatgcgattggggaagtggcctgcaccggagtgcatggagccaaccgactcgctggcaactcgctgatggaatgcatggtatttgccagacaaatggccacaatcgacctgggctctttgcctcgtctgggtgttcatcaaagagattcttcccccgagccttgctgccagcaactccatggcactgcaactgccgagtctctaactcgcgccatcgcagatctgcgagaactttgctggcgaacggccggtgtagatcgctctgccaagggaatgaaacaaagcctcgcgagcatccgtaaggatctacagcacattggtgaacagcctttgctcaagctggtaagccatcagcctcaagacatttgccatcacctcgatgacacagccagaagggacctcaacttgcttctggacctcaaccatcgccagttgaccagctccttaatgctggaagcctgtttgttccgccgcgaaagtcgcggcggacatttcagaactgatgcccctgcagaaatgcctcaatggcaacgccactcacggcaaaagcgaggagaagacctctccacacggccagtgaggtcctaa

SEQ ID NO: 33158 - protein, 556 aa, Prochlorococcus marinus str. MIT 9313
MSISNPSTPIPNGPWDVVVIGAGAAGLMTCLELPAQLKVLLLNRNTSRHSSSRWAQGGIAAVTRPKDSAESHAEDTLKAGAGLCDADAVRQLVEEAPHCVQRLQKLGMAFDREGDALATTLEAAHSHRRVLHVQDQTGRALVEALQEQVERRPNLLHRRGVRATQLWIEHNRCYGVQVLDGTLLHWLSARAVVLATGGGGHLFANTTNPAQACGEGLALAWQAGATIEDLEFVQFHPTALKLEGAPCFLISEAVRGEGAVLVDGQGQSPVKELSAGDLAPRDQVSRSLIQTMHHQGVQHLGLDLTPIPSGQAEVRFPTILERCRELGLDPLNQPIPVAPAAHYWMGGIATNLQAATNLPGLYAIGEVACTGVHGANRLAGNSLMECMVFARQMATIDLGSLPRLGVHQRDSSPEPCCQQLHGTATAESLTRAIADLRELCWRTAGVDRSAKGMKQSLASIRKDLQHIGEQPLLKLVSHQPQDICHHLDDTARRDLNLLLDLNHRQLTSSLMLEACLFRRESRGGHFRTDAPAEMPQWQRHSRQKRGEDLSTRPVRS

SEQ ID NO: 33159 - DNA, 1590 bp, Chromobacterium violaceum ATCC 12472
  CDS (1)..(1590): transl_table=11
atgctcaagtttgatgtgctgattatcggcagcggcctggctgggatgacgctggcgctgcacctggcggaaacgcgcaaggtaggattgatcaccaagcgggatctgctggaaggcaactccacctacgcccagggcggcatcgccgcggtactggataccgaagactcggtagaagaccatatccgcgacacgctggtcgctggcgcgggactatgcaatgagaaggcgacccgcttcatcgtcgaacactccaaggaggcgatagactggctgatcaagctgggtgtgcccttcacccgcgacgacgaacaccagaccggctatcacctgactcgagaaggcggccacagccaccgccgcatcatccacgccgccgacgccaccggcgccgccgtgaccagcacgctgggacagaagatcaaggcccatcccaacatcaccgagctggaacactatatagcgatcgacctgatcacctcgcagaagctgggccagtccggcaagcgcgcctatggcgtgtacgcgctggacaagaatggcgacgaagtcgtcaccatcgccgcccaacacaccatcctcgcctccggcggcgccggcaaggtttacctttataccaccaatcccgacaccgccaccggcgacggcatcgcgatgggctggcgcgcaggttgccgggtgggcaatatggaattcatccagttccatcccacctgcctctaccacccgcacgccaagtccttcctgatatcggaagccgtgcgcggcgagggcggcatcctgaagctgccggatggcacccgtttcatgccgcagcacgatccgcgcggcgagctggcaccgcgcgacgtggtggcgcgcgcgatcgacttcgagatgaaaaagcacggcctggattgcgtctacctggatatttcctataaaccggcccagttcatcaaggaacacttccccaatatctacgcccactgcctggaactgggcatagacatcacccagcaaccaataccggtggtgcctgcggtgcatttcacctgcggcggcatcgtcaccgacctggccggccgcaccgatgtggacggactgtacgcggtgggcgaagtcgcctgtaccggcctgcacggcgccaaccgcctggccagcaactccttgctggaatgcctggtgatcggcaaggcggccgcggaggacatcctggcggcggacagcatcaaattgccggccatcccggcctgggacgacagccgcgtcaccgatccggacgaagaggtggtgatctcccacaactgggacgaactgcgccgcgcgatgtgggactacgtcggcatcgtccgcaccaataagcggctggagcgcgcgctgcaccggatcgacctgctgaaaggcgagatcgacgagtattacagccacttccacgtcagcaacgacctgatcgaactgcgcaacctggtgcagaccgccgaactgatcgtccgctccgcgctgctgcgcaaggaaagccgaggcctgcattacagccgtgactaccccaacctgctgcccgaggcggcggaaaccgtgctggcgccggatgcgccgctcggcggctga

SEQ ID NO: 33160 - protein, 529 aa, Chromobacterium violaceum ATCC 12472
MLKFDVLIIGSGLAGMTLALHLAETRKVGLITKRDLLEGNSTYAQGGIAAVLDTEDSVEDHIRDTLVAGAGLCNEKATRFIVEHSKEAIDWLIKLGVPFTRDDEHQTGYHLTREGGHSHRRIIHAADATGAAVTSTLGQKIKAHPNITELEHYIAIDLITSQKLGQSGKRAYGVYALDKNGDEVVTIAAQHTILASGGAGKVYLYTTNPDTATGDGIAMGWRAGCRVGNMEFIQFHPTCLYHPHAKSFLISEAVRGEGGILKLPDGTRFMPQHDPRGELAPRDVVARAIDFEMKKHGLDCVYLDISYKPAQFIKEHFPNIYAHCLELGIDITQQPIPVVPAVHFTCGGIVTDLAGRTDVDGLYAVGEVACTGLHGANRLASNSLLECLVIGKAAAEDILAADSIKLPAIPAWDDSRVTDPDEEVVISHNWDELRRAMWDYVGIVRTNKRLERALHRIDLLKGEIDEYYSHFHVSNDLIELRNLVQTAELIVRSALLRKESRGLHYSRDYPNLLPEAAETVLAPDAPLGG

SEQ ID NO: 33161 - DNA, 1557 bp, Porphyromonas gingivalis W83
  CDS (1)..(1557): transl_table=11
atgaatcggtttgattatatcgtagtcggaggcggccttgccggcctctatacggctttcaaggcttcgaagcatggtcgggtagctctgataaccaaagctgacatccatgagagcaattcgtactttgcacaagggggagtcgcagcggttactgctgctgacgatgcaccggacaaccactataacgatacggtcgaagcaggtcggggcctttgtgaggatgaagccgtaagggtacttgccgaagaggctccggagcggatcgatgagttgatccgttgggggatgcgtttcgatacggaagctgatggcctattggctctggggcttgaaggcggacaccaccacaagcggattctgcatgcagggggtgattctaccggtaggatgctcacgagctttatgatcgatagcgtgctgcaaacttctgcaatagagatatttgtcaatcaccaagcggtcgaattgctgatagacgacctcggttgccgtggcgtacgtacatgggattggggacatgggcgtgaagtcgttttctatggcaagcatacggtgatggccaccgggggatcggctgccatctaccgaagatccaccaatccgcagggtaccctcggagatgggattgccctctgctatcttgccggctgtgaggtgcgcgacatggagtttgtccaatttcatcccacagctctgtacaatccgaaaggagaagccttcctgatcagtgaggccgtacggggagaaggggcgcatctatataatagtagaggcgaacgcttcatgcaaggcgttcacgaattgggcgaattggcccctcgcgatgtggtggcacggcggatcttcttagagatgcgacgtttgggagacgaatatgtctatctcgatttgcgacatctggatccggatcatattcgcaaacgttttcccacgatatgtgctcgctgtgcagagttgggtttggatctgacagaccgtattcctgtggctccggctgcacactacacagtgggagggattagtacggatctgaatggctgtacggccgtacctcatctatatgctgtgggagaggtggcttctaccggaataatgggggcaaacaggttggcctccaattctctgatcgaatgcctcgtgttcggtcatcgtgttgtggctgatacgattgcctcggattcgattgactatccgacaatgccattgagcgtggttggctatcctaagccgaaagatgcatcgctctatcataaggtaaaagagcagttgtcccgtctgatgaccgattatgtcggtatcattcgtaacgaagaaggtcttctgtccgtggatcggaagatagaagaacttcggcggacactactcggaacagaagatctttatgcttgttttgccgagcagctgctgacagtgggtcagctcatcgttcggggggcgatagctcgccgagaaagtagaggagggcattatcgggaagactatcccgatacgagcgaagcctatcgcaagcactcctcttacacccttgccggcggagcgggaaataccaaataa

SEQ ID NO: 33162 - protein, 518 aa, Porphyromonas gingivalis W83
MNRFDYIVVGGGLAGLYTAFKASKHGRVALITKADIHESNSYFAQGGVAAVTAADDAPDNHYNDTVEAGRGLCEDEAVRVLAEEAPERIDELIRWGMRFDTEADGLLALGLEGGHHHKRILHAGGDSTGRMLTSFMIDSVLQTSAIEIFVNHQAVELLIDDLGCRGVRTWDWGHGREVVFYGKHTVMATGGSAAIYRRSTNPQGTLGDGIALCYLAGCEVRDMEFVQFHPTALYNPKGEAFLISEAVRGEGAHLYNSRGERFMQGVHELGELAPRDVVARRIFLEMRRLGDEYVYLDLRHLDPDHIRKRFPTICARCAELGLDLTDRIPVAPAAHYTVGGISTDLNGCTAVPHLYAVGEVASTGIMGANRLASNSLIECLVFGHRVVADTIASDSIDYPTMPLSVVGYPKPKDASLYHKVKEQLSRLMTDYVGIIRNEEGLLSVDRKIEELRRTLLGTEDLYACFAEQLLTVGQLIVRGAIARRESRGGHYREDYPDTSEAYRKHSSYTLAGGAGNTK

SEQ ID NO: 33163 - DNA, 1593 bp, Gloeobacter violaceus PCC 7421
  CDS (1)..(1593): transl_table=11
atgaaagcttacgatgcgatcgtgatcggcagcggcgcggcgggactgtatacggccctgaagctgccgcgcgagtggcgtatcgccctactcaccaaagaaaatttgaccctttcttcgagccaatgggcccagggggggatcgctgcggtagtcgagccggatgactcctttcggctccattacgaggacaccctggcggctggggcaggcttgtgcgagccggaggcggtgcgggtgctggtggaggaagcgcccgagcgcattcgcgaactgatcgcactgggggtcgagttcgatcgctaccaggggcggctcgcagtcaccctcgaagcggcccactcccgcaggcgcatcttgcacgccgccgacgccaccggccgcgaactggtgcgcgccctggtcgaggaggtgcgcgaccttggcaacatccgcgtcgtcgaggaggcccttgccatcgacctggccctcgacggcgggcgctgtcgcggggtgctggtggacgcgctcggggtgcgcgaatggtacatgtcgccggtgacagtgcttgccaccggcggggccgggcaggtgttcgcctacaccaccaaccccgcagtcgctacaggcgacgggatcgccatggcggcccgggcgggggtggcgctgcgggatctcgaattcgtccagtttcatccgacggcgcttgccatcgacggggcgccgcgctttttgatctcagaagcggtgcgcggcgaagggggacaactggtcaacctggccggcgagcgcttcatgggccgctaccaccctcagggggaactggctccgcgcgacgtggtcgcccgggccatcttcgatcagatgcaatcgagcggcgccacccacgtgcttatcgacctgcggcccatcggcgaagcgacgattgagcagcgctttcccaacatcgcccacgtctgccgcaagttcggcgtcgatgtcttcagtgaagcggtccccgtcgcccccgccgcccactactggatgggcggcgttctcaccgatctcgatggccgcacaagcttgccggggctgtttgccgtgggtgaagtcgcttccaccggcgtgcacggcgccaatcgcctcgcgagcaattcgctgctggaatgtctggtttttgcccaccgcatcgccgaggccgtgcgcagtagcggcatcagccgtaccgccgcaggcatcattcactttccgcccgccgccgcccagagcccggtcaactttgaactggttcaacgcatccgcaacgaaatgccgtggttggtttggcgcacctgcgggatcatccgcgaggcagacggcctcaggcgcggcttggagcagttgcaaatgtggaaacagcaactgagcggcgtcgatgccaccaccgagcgagccaccctggaggtgcgcaatctggtgattgctgcggaactgttgctcaaaagcgccctcttgcgcaccgagtcgcggggggggcactaccgcagcgaccacccggccccggatcccgcctggcaggtacacactgagattgccgagggccgcttgtttcaaaccccgctcgcggtcgctaaaataagaccaacttcaggctag

SEQ ID NO: 33164 - protein, 530 aa, Gloeobacter violaceus PCC 7421
MKAYDAIVIGSGAAGLYTALKLPREWRIALLTKENLTLSSSQWAQGGIAAVVEPDDSFRLHYEDTLAAGAGLCEPEAVRVLVEEAPERIRELIALGVEFDRYQGRLAVTLEAAHSRRRILHAADATGRELVRALVEEVRDLGNIRVVEEALAIDLALDGGRCRGVLVDALGVREWYMSPVTVLATGGAGQVFAYTTNPAVATGDGIAMAARAGVALRDLEFVQFHPTALAIDGAPRFLISEAVRGEGGQLVNLAGERFMGRYHPQGELAPRDVVARAIFDQMQSSGATHVLIDLRPIGEATIEQRFPNIAHVCRKFGVDVFSEAVPVAPAAHYWMGGVLTDLDGRTSLPGLFAVGEVASTGVHGANRLASNSLLECLVFAHRIAEAVRSSGISRTAAGIIHFPPAAAQSPVNFELVQRIRNEMPWLVWRTCGIIREADGLRRGLEQLQMWKQQLSGVDATTERATLEVRNLVIAAELLLKSALLRTESRGGHYRSDHPAPDPAWQVHTEIAEGRLFQTPLAVAKIRPTSG

SEQ ID NO: 33165 - DNA, 1605 bp, Photorhabdus luminescens subsp. laumondii TTO1
  CDS (1)..(1605): transl_table=11
atgcaatcattatcctctcaacattacagcgatgtacttattattggcagcggtgtcgccggtctatctctggctttacggctagcctcacaatataaaatcacggtattaagtaagagtattcttagcgaaggtgcatcctattatgcacaagggggtatcgccgctgtatttgataaaacggacagtatcgcatctcatgttgaagatacccttatcgccggagcagggctttgcgataaaagtgctgttgagtttatcaccagtaatgcccgtcattgcgtgcaatggttggttgatcacggtgttatgtttgatacagaaaccagcgaagatggagaaaaacaataccatctgacccgtgaaggtggtcacagccatcgtcgtattctgcatcatgctgatacaaccggcaaagaagtagaaacgacactggttgataaagcgatgtctcatccgaatatcacagtgagagagcgctgcaacgcagtggatttaattacgtcaaataaagcccggttagacggtgagaaccgagtcgtcggcgcttatatctggaaccgtcagcaagaacaggtggaaacttatcgcgctaaggttgtggtactggcaacaggcggtgcagctaaggtctatcaatatacgacaaatcccgatatctcatccggtgatggcattgcaatggcatggcgcgcaggctgccgtatcgccaatctggaatttaaccagtttcacccgacctgcctgttccatccacaggcgcgtactttcctgttgacagaagccctgcgaggtgaaggcgcatatctgaaacgaccagacggcagccgctttatgcccgattttgatgaacgcgctgaactagctcctcgcgatatcgtagcacgagcaattgaccatgaaatgaaacgccttggtgctgactccatgtttctggatatcagccataaaccagcggatttcattatccagcattttccaatgatttatgaaaaattgctgacactgggctttgatctaacaaaagagccgattccaatcgttcctgccgcgcattacacctgcggtggtattgttgtcgatcatcagggacatactgacctcaacaacttatatgctatcggtgaagtcagctatacgggtctgcacggtgcaaaccgtatggcatctaattctctgctggagtgtctggtgtatggctggtctgctgcggaggatatccaacaacagatcgaaacaatagaagaagtaccgcaactccctttctgggatgagagccgggttgacaattcagatgaacaagttgtcattcagcacaactggcacgaattacgtctatttatgtgggattacgtcggcattgtgcgtacaaccaaacgcttagagcgagcactgcgccgtattaatatgctgcaacaggaaattcacgattattactctaatttcaggatttctaacaatctgctggaattacgaaatctggtgcaaatcgctgaattaatcgtacgttgtgcgctagaaagaaaagagagccgaggtctgcacttcacactggattatcccgatttactaccagaatcaaaaccaacgattttgacaccctga

SEQ ID NO: 33166 - protein, 534 aa, Photorhabdus luminescens subsp. laumondii TTO1
MQSLSSQHYSDVLIIGSGVAGLSLALRLASQYKITVLSKSILSEGASYYAQGGIAAVFDKTDSIASHVEDTLIAGAGLCDKSAVEFITSNARHCVQWLVDHGVMFDTETSEDGEKQYHLTREGGHSHRRILHHADTTGKEVETTLVDKAMSHPNITVRERCNAVDLITSNKARLDGENRVVGAYIWNRQQEQVETYRAKVVVLATGGAAKVYQYTTNPDISSGDGIAMAWRAGCRIANLEFNQFHPTCLFHPQARTFLLTEALRGEGAYLKRPDGSRFMPDFDERAELAPRDIVARAIDHEMKRLGADSMFLDISHKPADFIIQHFPMIYEKLLTLGFDLTKEPIPIVPAAHYTCGGIVVDHQGHTDLNNLYAIGEVSYTGLHGANRMASNSLLECLVYGWSAAEDIQQQIETIEEVPQLPFWDESRVDNSDEQVVIQHNWHELRLFMWDYVGIVRTTKRLERALRRINMLQQEIHDYYSNFRISNNLLELRNLVQIAELIVRCALERKESRGLHFTLDYPDLLPESKPTILTP

SEQ ID NO: 33167 - DNA, 1617 bp, Rhodopseudomonas palustris CGA009
  CDS (1)..(1617): transl_table=11
atgagcaccacgcccgagttcgcacatcttggcgtccatggtgacgtcgttatcgtcggcggcggtctcgccggcctgttctgcgcgctgaaattggcgccgcggccggtgacggtgatcagcgccgcaccgctcggcgaaggcgcctccactgcctgggcgcagggtggcatcgccgctgcggtcggcgaaggcgacagcgccgaatcgcatgcggccgacaccatcgcggtcggcgccggactggtcgacgaagcggtggcgcatcgcctcgccggcgaagcggccgcgcggatccacgatctcctcagctacggcgtgccgttcgaccgcgacctcgagggccggctggcggtggcgcgcgaggcggcgcattcggcccggcgcatcgtccacgtccgcggcgacatggcgggccaggcgatcatcagcgcgctcaccgaagcggtgcgcaacacgccgtcgatcaaggtgatcgaaggctggtttgccgacgggctgctgatgcacgacgatgcggtcgccggactgcggctgcgcaaggtcggcaacgccgccggctcgccgatgcacatcgcggcacgcgcggtggtgctcgccaccggcggcatcggtcatctttatgccgtcaccaccaatccgatcgaggcccgcggcgtcgggctggcgatcgcggcccgggccggcgcgcgaattgccgaccccgaattcgtgcagtttcatccgacggccatcatggtcggccgcgatccggcaccgctcgccaccgaggcgctgcgcggtgaaggcgcgatcctgatcaacggccagggcgaacgcttcatgctggccgcgcatccgctcgccgagctggcgccgcgcgacatcgttgcccgcggcgtgtttgccgaagtcgcctccggccgcggcgcctatctcgacgccaccaaggcgcttggcgcgcatttcgccgagcatttcccgaccgtgtacgagagctgcatctcggctggcatcgatccggcgacacagccgatcccgattgcgccggcggcgcactaccacatgggcggcatcgcggtggacatgcgcggacgcagttcgctgcacgggctgtgggcggcgggcgaagtgtcctgcactggcgcgcacggcgccaaccggctcgcctccaactcgctactggaagccgtggtgtacgcggcgcggatcgccgaggacatcgccagcaccgaactcgccgcgaccaagtcgcggctcgacgtgcacgagacacacagcacgccaatcgatccagcgcaggagctgctgctgcgccagaccatggccggcaaggtcggcgtggtccgcgaccgcgacggactaaccgaagcggtgcgaaccttcgcggcgctggaggccgaaacgacctcgaccacgctcgccaacatggcgaccaccgcgctgctggtcgccaccgcagcgctggcacgcaccgaaagccgtggcgcgcactatcgcgccgactatccgaccgaaaacccggcgcaggcgaaacgcaccaccacctcgctggctcaggcccgcgagcgcgccgccgcgctcggcggcggtgcgccgcgctcccctcgcctctctgcgcaatccgcgctcgcctga

SEQ ID NO: 33168 - protein, 538 aa, Rhodopseudomonas palustris CGA009
MSTTPEFAHLGVHGDVVIVGGGLAGLFCALKLAPRPVTVISAAPLGEGASTAWAQGGIAAAVGEGDSAESHAADTIAVGAGLVDEAVAHRLAGEAAARIHDLLSYGVPFDRDLEGRLAVAREAAHSARRIVHVRGDMAGQAIISALTEAVRNTPSIKVIEGWFADGLLMHDDAVAGLRLRKVGNAAGSPMHIAARAVVLATGGIGHLYAVTTNPIEARGVGLAIAARAGARIADPEFVQFHPTAIMVGRDPAPLATEALRGEGAILINGQGERFMLAAHPLAELAPRDIVARGVFAEVASGRGAYLDATKALGAHFAEHFPTVYESCISAGIDPATQPIPIAPAAHYHMGGIAVDMRGRSSLHGLWAAGEVSCTGAHGANRLASNSLLEAVVYAARIAEDIASTELAATKSRLDVHETHSTPIDPAQELLLRQTMAGKVGVVRDRDGLTEAVRTFAALEAETTSTTLANMATTALLVATAALARTESRGAHYRADYPTENPAQAKRTTTSLAQARERAAALGGGAPRSPRLSAQSALA

SEQ ID NO: 33169 - DNA, 1596 bp, Geobacter sulfurreducens PCA
  CDS (1)..(1596): transl_table=11
atgaagatccagagcgattttctggtcattggcagcggaatcgccggcctcgccttcgcgctccaggcagcgcgtcatggaaccgtcgcaatagtgacaaaacgcgaagtaaccgagtcggcgacgaattacgcccaaggtggaatcgcatcggttttttcccaagacgatacttttgacgctcacgtggaagacaccctggtcgccggcgcgggtatctgccacgaagacgtggtcagaatggtggtggaggaaggcccgaaggtcatcaggaacctgatcgaatggggagtgcagtttacccgcagcggcgaggccttcgacctgacccgcgagggcggtcacagccagcggcgcatcctgcacgccgacgacgtcaccggccgcgaaatcgagcgggcgctggtggcggcggcccgggaaaaccccaacatccgcatttacgaacaccatattgccatcgacctcatcacagaggcgaaagtgacccgcaagcgggtggcccccaaccgctgcctcggcgctcatgtcctcggtatcgaagacaatgtcgtgagaacattcaccgccaagatcaccctgcttgccaccggcggggcgggcaaggtctatctctacacctgcaatcccgacgtggccacgggcgatggcgtcgccatggcctaccgtgccggcgccaccatcgccaatatggagttcatgcagttccaccccaccaccctttaccacccccatgcaaaatccttcctcatatccgaggcggtgcgtggcgaaggggcgattctgcggcgtcgcgacggcaccgcgttcatggaaaaatatcacaagctcaaggacctggctcctcgcgacatcgtggcgcgggccatcgacaacgagatgaaaacccatggggaagactgcgtcttccttgacattacccacaaggaccccgagtacgtcagaaatcgcttccccaacatctaccagacctgccttgagtttgggctcgacatgaccagggatccgctgccggtggttcccgcagcacactatctctgcggtggggtggccgtggatgccaacggcgaaaccgatatccgctacctttatgcgatcggcgaagccgccttcaccggcctgcacggggcaaaccgcctggcgagcaactccctgcttgaggccgcggtctatgccggacgcgcctatcagcacgcagtggaggaactgcggcagaaccacttcgaattcccggtcattcccgagtgggattcaggcactgccacggatagcgacgagatggtggtcgtctcccagaactgggacgaaatacggcgctttatgtggaattacgtgggaatcgtccgttccgacaagcggctggagcgtgccctgcggcgcatccgcctcatccaggaggaaatcgaggattactactggaacttcaccgtaacttccgacctgatcgagctgcgcaacatcgccaccgtggccgaactcatcgtcaagtgcgctctccagcgcaaggaatcccggggactccactacaccatcaactacccggaacgcgacgacatccactgcagacacgataccttcatcaagaagcaattctga

SEQ ID NO: 33170 - protein, 531 aa, Geobacter sulfurreducens PCA
MKIQSDFLVIGSGIAGLAFALQAARHGTVAIVTKREVTESATNYAQGGIASVFSQDDTFDAHVEDTLVAGAGICHEDVVRMVVEEGPKVIRNLIEWGVQFTRSGEAFDLTREGGHSQRRILHADDVTGREIERALVAAARENPNIRIYEHHIAIDLITEAKVTRKRVAPNRCLGAHVLGIEDNVVRTFTAKITLLATGGAGKVYLYTCNPDVATGDGVAMAYRAGATIANMEFMQFHPTTLYHPHAKSFLISEAVRGEGAILRRRDGTAFMEKYHKLKDLAPRDIVARAIDNEMKTHGEDCVFLDITHKDPEYVRNRFPNIYQTCLEFGLDMTRDPLPVVPAAHYLCGGVAVDANGETDIRYLYAIGEAAFTGLHGANRLASNSLLEAAVYAGRAYQHAVEELRQNHFEFPVIPEWDSGTATDSDEMVVVSQNWDEIRRFMWNYVGIVRSDKRLERALRRIRLIQEEIEDYYWNFTVTSDLIELRNIATVAELIVKCALQRKESRGLHYTINYPERDDIHCRHDTFIKKQF

SEQ ID NO: 33171 - DNA, 1593 bp, Mycobacterium avium subsp. paratuberculosis K-10
  CDS (1)..(1593): transl_table=11
atgatcgcccgtccccagtggacacacagcgccgacgtcgtcgtgatcggcaccggcgtcgccggattggccgccgcgctggccgcccaccgcgccggccgcagcgtcgtcgtgctgagcaaggccgaccaggcgcgcggggccaccgccacccactacgcgcagggcggcatcgcggtggtgttgccgcacaacgacgattcggtcgaggcccatgtcgccgacaccgtcgtcgcgggcgcgggcctgtgcgacccgcaggcggtctactcgatcgtggccgacgggtacgcggcggtctccgaattggtcggtgacggagcgcgattcgacgaatcggcccccggccagtgggcgctgacccgcgagggcgggcactcccggcgccgcatcgtgcacgccggcggcgacgccaccggcgccgaggtgcagcgcgcgctcgaccacgccgcacggatgctggacatccgcaccgcgcacgtggcgctgcgggtgctgcacgacggctccatgggcgacgaagccgtcaccggcgtgctggtcggcaacccgcacggctgcgggatcatcagcgcgccgtcggtgatcctggcctcgggcggtctcgggcacctctacggcgcgaccaccaacccggagggctccaccggcgacggcatcgcgctgggcctgtgggccggtgtcgcggtcagcgacctggagttcatccagttccatcccaccatgctcttcgcccccggcgccggcggcggtcggcgcccgctggtcaccgaggccatccgcggcgagggagcgaaactgattgattcccaaggcgattcggtgaccgccggggtgcacccgatgggcgacctggcgccgcgcgacgtggtcgccgccgccatcgacgcgcggctgaaagccaccggcgacgcctgcgtctacctggacgcgcggcacatcttcgacttcgccgaccggttcccgaccgtgacggcggcctgccgggccgccggcatcgacccggtgcgccaacccatccccgtggtgcccggggcgcactacagctgcggcggcgtcgtcaccgacgtgtacggccggaccgagctgcccggcctgttcgccgccggcgaggtggcccgcaccgggctgcacggcgccaaccggctggcgtccaacagcctgctggaaggtctggtggtcgggggccgggccggcagggcggcggccgcgcatgcggcggaggccggccgcccccgcgcgctggcgcccgagcccgttgcgcacaccgcgccgccgcgcgcggagttgcaggccgcgatgagccgcgacgcgtcggtggtgcgcgacccggccgggctgacccggttgtcggccaccctgtcgcaggcgccggcccgcagcatcggcggccgccgcgacttcgaggacgtggcgttggccgtcgccgcccgcgcggtcgcggccgcggccctggcccgcaccgagagccgcggctgccaccaccgcgaggagcatccgcaggccgcgcccgagcaggcgcgcagcaacctgctgcgactggccgacgaccagaactcggtgctggtgcaggcgctggcggcggtggtgtga

SEQ ID NO: 33172 - protein, 530 aa, Mycobacterium avium subsp. paratuberculosis K-10
MIARPQWTHSADVVVIGTGVAGLAAALAAHRAGRSVVVLSKADQARGATATHYAQGGIAVVLPHNDDSVEAHVADTVVAGAGLCDPQAVYSIVADGYAAVSELVGDGARFDESAPGQWALTREGGHSRRRIVHAGGDATGAEVQRALDHAARMLDIRTAHVALRVLHDGSMGDEAVTGVLVGNPHGCGIISAPSVILASGGLGHLYGATTNPEGSTGDGIALGLWAGVAVSDLEFIQFHPTMLFAPGAGGGRRPLVTEAIRGEGAKLIDSQGDSVTAGVHPMGDLAPRDVVAAAIDARLKATGDACVYLDARHIFDFADRFPTVTAACRAAGIDPVRQPIPVVPGAHYSCGGVVTDVYGRTELPGLFAAGEVARTGLHGANRLASNSLLEGLVVGGRAGRAAAAHAAEAGRPRALAPEPVAHTAPPRAELQAAMSRDASVVRDPAGLTRLSATLSQAPARSIGGRRDFEDVALAVAARAVAAAALARTESRGCHHREEHPQAAPEQARSNLLRLADDQNSVLVQALAAVV

SEQ ID NO: 33173 - DNA, 1800 bp, Wolbachia endosymbiont of Drosophila melanogaster
  CDS (1)..(1800): transl_table=11
atggataagtcagcgtatgagatcatagaacatgagtatgacgtggtagtagtaggtgcaggtggagcagggctcagagcaacgcttgggatggctgcaactaatttttcagttgcctgcatttctaaaattttccctacacgaagtcatacagttgcagcacaaggcggaattagtgcagctttaggtaatatcggtgaagacgattggcgctggcatgcatatgacacaataaaaggttcagactggcttggtgatcaagatgcaatagaatatatgtgtaaaaacgctgctaaagctgttattgaacttgaaaattttggcgtacctttttctcgtacagaagatggcaaaatataccagcgttcctttggtggaatgacaactcactttggtaaaggaaaatcagcgcagcgcacttgtgcggcagcagataagactgggcacgcaatccttcacactctatatcagcagtgtcttaaattcaacgctgaattttttgttgaatactttgtgattgatttaattatggatagcgaaacatgctgcggagttcttgcttggtcgctatgcgacggcacattacatagatttcgtgcgcatagagtggtgctagcaacaggtggatatggacgtgtttatttctctgcaacaagtgcgcatacctgcacaggtgatggtaatggcatggtagtaagggctggattaccacttgaagatatggaatttgtacaatttcatccaacaggaatatatggctcagggtgcttgatgacagaaggatgccgtggtgaaggggggtacctcgttaattctcagggcgagaagtttatggaacgttacgcaccaaaagcaaaagatttagcttcccgtgatgtggtaagtcgcgcaataacaattgaaattagagagggaaggggggttggaccaaaaaaagatcatatgtatttaactatagcgcatcttgatccggaagtaataaaactcagattgccgggcatcagcgaaaccgcaagaacttttgctggagttgatgtcactaaagatccaataccggtcattccgactgttcactataacatgggtggcattccaaccaattattatggagaagtgatcacgctgaagcaaggtaaggaagaggtagtagatggactatttgcaattggagaagctgcgtgtgtctctgtgcacggtgcaaatcgacttggctctaactcgcttcttgatcttgtggtttttggtagagctgcagcgctcagagcaaaagagaagctaaagtccggtacaccacataaaaaattgcattcagactgcacagactggatagtagatagatttaataaaatgcgatttgcttccggtgggctaaaagtagcaaaaatacgcggtgaaatgcagaacactatgcaaaaatacgcatcagttttccgtgttgctgaagttttagaagaaggcaaaaaagctataaaaaaggtagcaaaaatgatgcctgatatttcacttgaggatcgcagtatgatgtggaacagtgatttagttgaagcgctggagcttgctaacatgatcccacaagcggttattaccatggaatgcgcagctaatcgcgaggaaagcagaggtgcacatgctcgtgaagactttcctgaacgtgatgacaaaaactggatgaagcacactatagcgtggcttgaagaaaagaaagggcaaattaacgtaaaaattgattataaaaaagtggctgaaaaaactctgagcggtgagattgatttcatagcgccagagaagagggtttattag

SEQ ID NO: 33174 - protein, 599 aa, Wolbachia endosymbiont of Drosophila melanogaster
MDKSAYEIIEHEYDVVVVGAGGAGLRATLGMAATNFSVACISKIFPTRSHTVAAQGGISAALGNIGEDDWRWHAYDTIKGSDWLGDQDAIEYMCKNAAKAVIELENFGVPFSRTEDGKIYQRSFGGMTTHFGKGKSAQRTCAAADKTGHAILHTLYQQCLKFNAEFFVEYFVIDLIMDSETCCGVLAWSLCDGTLHRFRAHRVVLATGGYGRVYFSATSAHTCTGDGNGMVVRAGLPLEDMEFVQFHPTGIYGSGCLMTEGCRGEGGYLVNSQGEKFMERYAPKAKDLASRDVVSRAITIEIREGRGVGPKKDHMYLTIAHLDPEVIKLRLPGISETARTFAGVDVTKDPIPVIPTVHYNMGGIPTNYYGEVITLKQGKEEVVDGLFAIGEAACVSVHGANRLGSNSLLDLVVFGRAAALRAKEKLKSGTPHKKLHSDCTDWIVDRFNKMRFASGGLKVAKIRGEMQNTMQKYASVFRVAEVLEEGKKAIKKVAKMMPDISLEDRSMMWNSDLVEALELANMIPQAVITMECAANREESRGAHAREDFPERDDKNWMKHTIAWLEEKKGQINVKIDYKKVAEKTLSGEIDFIAPEKRVY

SEQ ID NO: 33175 - DNA, 1614 bp, Bdellovibrio bacteriovorus HD100
  CDS (1)..(1614): transl_table=11
atgagtactcaccgctgcgacattttgattatcggctctggcactgctggcttggctttggctctgaagctttcggaaaatggaaaagtgatcgtgctggccaaagaaagcgccggcgggacgaactcggccatggctcaaggtggaatttccgcggtgatgtcggaagaggacagcttcgaggctcatctgcaggacactttgaccgccggagccggcctctgcaaagaaactgtcgttcgcaattacgtagagcaagcccctgatcgcattaaagatttaacaaactggggcgttcatttcgacgtccgcagacgtggctctgaagaaaccaacgaagtggatttgacgcgcgagggcggacacagcaaaagacgcattcttcacttcgaggaccaaaccggtttagagatccatcgcactttattggcgcgagttcgcgaaaatccgaacatcaccctgatggaaaagtattacgccatcgacctgatcgtgaacaaagaagtcgaccctgcggacatggatccggtgacctgcataggctgttacgcccttagcaaggacaccggagaggtgcatacttttatagcaaaaaacaccgccctagccacagggggtgcgggtaaggtttatctttacacttccaactggggtggcgcgaccggtgacggcatcgcgatggcctaccgagtgggcgcccgcatcgccaatctggaattcatgcagttccacccgacgtgcctgttccaccgcgaatcccgcaacttcctgatttctgaagctctgcgtggcgaaggtggcgagttgatcgacagcaagggcaacgccttcatgcgcaagtatcacgagctgggctcgctggctccgcgtgatgtggtggctcgttcgattgacaacgaaatgaagaaaaccggggccgagtgcgtgtatctggacatgaccaaactggatcgtgaattccttaagcagcgcttcccgactattttcaacaagtgtttggaatttggcatcgacatgagcacacagccgatcccggtggtgccggccgcgcactacctgtgcggcggagttttgacagatgtttcagggcgcacggacatcaccggtctgtgggccattggcgaaaccgcctgcaccggtctgcacggcgccaaccgtctggccagcaactctttgctggaatgcctgaccacggctcacaactgcgctgaggaaatcaaaaagcactgggacagttacaagctgaccgacaaagaacccaaagcctggactcatcctcaggaatccaatgatgacgagatgatcgtgatcaaccacatgtgggacgaaatccgccgtctgatgtggaactatatggggattgtccgctctaacaaacgtctggaacgcgcgcagcaccgtctgaaaaacattctttcagagaccaaagaatattattcgaacatgaagatccacccggacattctggagcttcgtaacatcgcgatcgtagcggatctgtcagtggaatgcgctttgcgcagacatgagtccagaggcatccattacaatctcgactatccggaaaagagcaagaccgcccaggatacaatcgtggttcgaggcctgaattga

SEQ ID NO: 33176 - protein, 537 aa, Bdellovibrio bacteriovorus HD100
MSTHRCDILIIGSGTAGLALALKLSENGKVIVLAKESAGGTNSAMAQGGISAVMSEEDSFEAHLQDTLTAGAGLCKETVVRNYVEQAPDRIKDLTNWGVHFDVRRRGSEETNEVDLTREGGHSKRRILHFEDQTGLEIHRTLLARVRENPNITLMEKYYAIDLIVNKEVDPADMDPVTCIGCYALSKDTGEVHTFIAKNTALATGGAGKVYLYTSNWGGATGDGIAMAYRVGARIANLEFMQFHPTCLFHRESRNFLISEALRGEGGELIDSKGNAFMRKYHELGSLAPRDVVARSIDNEMKKTGAECVYLDMTKLDREFLKQRFPTIFNKCLEFGIDMSTQPIPVVPAAHYLCGGVLTDVSGRTDITGLWAIGETACTGLHGANRLASNSLLECLTTAHNCAEEIKKHWDSYKLTDKEPKAWTHPQESNDDEMIVINHMWDEIRRLMWNYMGIVRSNKRLERAQHRLKNILSETKEYYSNMKIHPDILELRNIAIVADLSVECALRRHESRGIHYNLDYPEKSKTAQDTIVVRGLN

SEQ ID NO: 33177 - DNA, 1620 bp, Methanococcus maripaludis S2
  CDS (1)..(1620): transl_table=11
atgataacagatgtactcataattggtggtgggggtgctgcagcaagggccgcaatagaatgcggacagaaaaatgttgtaattgcttcaaaaggcctttttggaaaaagcggatgcacggtaatggctgaaggtgggtacaatgcagttttaaacgaaaaagattcgtttgaaaaacattattcggacacgatgaagggtggaggatacataaacgataaaaaactcgtagatgttttggtaaaaaatgcaccaaatgaatttaagaacttggaaaaatttggatgtatttttgataggtctgaaagtgcagaatttgcgcaaaggccatttggtggacagagttttaatagaacttgctacagtggggacaggacaggccacgaaatgattgcaggattgatggagtatttaaacaaatttgagcgtataaaaattttagaagacacaatggcaataaaattaattgtcgatgaagtcgaagaaaacggaaaaaaactcaaaaaatgttttggggcagtatttttagatttattaaatggtgatatttatccagtttatgcaaaatctacaattcttgcaactggcggggcaggccaaatttatcctataacttcaaatcctaaacaaaaagttggggatggatttgcaattgcttatcgtgaaggggtcgaactagtcgacatggaaatggttcagtttcacccaacaggaatgcttggaaccggaattttagtaaccgaagctgtaaggggcgaaggcggaattttatacaataaaaataaagaaagattcatgaaaaactacgattcaaaaagaatggaattatcaacaagagacgtggttgctaaagccatatataatgagattcaggaaggaagaggaatcgatggcggagtttatctggacgtaactcatttagaaccagaagttattaaagaaaagcttgagacaatgttttcacagtttaagcttgttggcgtagatattagaaaagagccaatgaaagtagctccaacagcacaccactttatgggcggaattaagataaatgaagattgtgagacaaatatttcaggattatttgcatgtggggaagttgcaggtggacttcacggcgcaaaccggcttggtggaaatgcacttgctgaaacacaagtttttggatcaattgcgggaagaaatgctttaaattatgctgaagagaaaattgatatttcaaaagtatatgattcagttgaaaaatacattgaaaaattaaaaaatacatttaaaggttcaaattctggaaataatgtatattccttaatcgatgaattaaaaaataccatgtgggattttgtttctatttcaagagatgaaaacgggttaaaaacggctctcgaaaaaataaatgaaattgcaggaaaaaaagttttgataaatggagttgttgacttttcaaaaaaattggaactagaaaacatggttttagtttcaaaaattgttataaattcagccctccttagaaaagagtcccgtggggcacattttagaaacgattatccaaaaactaatgaagaatgcacgggaaactttgtagcagttgacggaaaaattaattttgtaaaaattgaataa

SEQ ID NO: 33178 - protein, 539 aa, Methanococcus maripaludis S2
MITDVLIIGGGGAAARAAIECGQKNVVIASKGLFGKSGCTVMAEGGYNAVLNEKDSFEKHYSDTMKGGGYINDKKLVDVLVKNAPNEFKNLEKFGCIFDRSESAEFAQRPFGGQSFNRTCYSGDRTGHEMIAGLMEYLNKFERIKILEDTMAIKLIVDEVEENGKKLKKCFGAVFLDLLNGDIYPVYAKSTILATGGAGQIYPITSNPKQKVGDGFAIAYREGVELVDMEMVQFHPTGMLGTGILVTEAVRGEGGILYNKNKERFMKNYDSKRMELSTRDVVAKAIYNEIQEGRGIDGGVYLDVTHLEPEVIKEKLETMFSQFKLVGVDIRKEPMKVAPTAHHFMGGIKINEDCETNISGLFACGEVAGGLHGANRLGGNALAETQVFGSIAGRNALNYAEEKIDISKVYDSVEKYIEKLKNTFKGSNSGNNVYSLIDELKNTMWDFVSISRDENGLKTALEKINEIAGKKVLINGVVDFSKKLELENMVLVSKIVINSALLRKESRGAHFRNDYPKTNEECTGNFVAVDGKINFVKIE

SEQ ID NO: 33179 - DNA, 1986 bp, Nasonia vitripennis
  CDS (1)..(1986)
atgagcggactgctgaagctctcgggcctcctggccaagggcctgccctcgacgacgctgaacaaattaggcctacccattatcagccaacgggctctacattacacacccaacagtggttttgctaaaacttcagatggaatttcgcaaaactaccctgtagtcgatcatacttttgatgcagtggtagttggtgctggtggtgctggtctccgagctgcctatggtctagtcgaggagggtttcaagactgctgtggtcaccaaattatttccaacaagatctcacactgttgctgcccaaggaggtatcaatgcagcgcttggaaatatggaggaagataattggcagtggcacatgtatgacacagtcaagggttctgattggcttggagatcaagatgccattcactacatgaccagggaggccccaaaagctgtgattgaattagaaaattgcggcatgcctttcagtcgaactactgagggtaaaatctaccaacgagccttcggaggtcaatctctcaagttcggcaagggaggtcaggctcatcgttgctgctgcgtcgccgacagaacgggacactcgcttctgcatacactgtacggacagtctctaagtttcgattgcaattacttcatcgagtacttcgctctggacctgctgatggaggatggtgagtgtcgaggcgtcatcgctctctgcctcgaggatggcacgctccaccgtttccacgccaagaacacggtgctggccaccggtggatacggtcgtgcttacttctcctgtacgtccgcccacacttgtactggtgacggtactgctatggtctctagggcgaacctgcccaaccaggatcttgagttcgtgcagttccatccgaccggtatctatggtgctggttgcctgatcaccgagggcagcagaggagaaggtggctacttggtgaacagcgagggtgagagatttatggagcgttacgctcccgtggccaaggatctcgcgtctcgagacgtagtctcaagatccatgaccatcgagatccgcgaaggcagaggagtcggtcccgagaaagatcacatttacctgcagttgcatcacctgccaccagagcagctcgctgccaggctacccggaatctccgagacagcgatgatcttcgctggagtcgacgttacacgcgaaccaatccctgtgttacccactgtgcattacaatatgggtggcgttccaacgaattacagaggacaagttttgacgtccaagaacaaccaagactcggtggtaccaggcctctatgcttgcggtgaatctgcttgcgcctccgtccacggagctaaccgacttggtgctaactcgctgctggatctggttgtatttggcagagcttgcgcgaagaccatttctgaggagaacaagcctggcgaaaagattggaagcctccgaactaacgctggagaagaatcagtagcaaacctcgataaaataagaaatgctaaaggaaacatctcgactgctgaattaagactgactatgcagaagactatgcagactcacgccgctgtctttaggcaggctgacaccttgcaagaaggttgcaagaaaatgtcggcgttgtacaaaaagctggatgaccttaaaattaccgatagatccctcgtctggaattctgacctgatcgagaccctcgagcttcagaatctgatggtcaatgcaatgcagacaatctacgccgcagagaaccgcaaggagagtcgtggtgcccacgcacgagaggacttcaaagacagaatcgacgagtacgattacagcaagccactcgaaggacagcagcccaagcctttggatcagcactggcgaaagcatactctcacgcacgtcgacatcaacactggagacgtcaaaatcgactacaggcctgttatagaccacacactagacgacaaggaatgcaaaactgtaccacctgcaattcgttcttattag

SEQ ID NO: 33180 - protein, 661 aa, Nasonia vitripennis
MSGLLKLSGLLAKGLPSTTLNKLGLPIISQRALHYTPNSGFAKTSDGISQNYPVVDHTFDAVVVGAGGAGLRAAYGLVEEGFKTAVVTKLFPTRSHTVAAQGGINAALGNMEEDNWQWHMYDTVKGSDWLGDQDAIHYMTREAPKAVIELENCGMPFSRTTEGKIYQRAFGGQSLKFGKGGQAHRCCCVADRTGHSLLHTLYGQSLSFDCNYFIEYFALDLLMEDGECRGVIALCLEDGTLHRFHAKNTVLATGGYGRAYFSCTSAHTCTGDGTAMVSRANLPNQDLEFVQFHPTGIYGAGCLITEGSRGEGGYLVNSEGERFMERYAPVAKDLASRDVVSRSMTIEIREGRGVGPEKDHIYLQLHHLPPEQLAARLPGISETAMIFAGVDVTREPIPVLPTVHYNMGGVPTNYRGQVLTSKNNQDSVVPGLYACGESACASVHGANRLGANSLLDLVVFGRACAKTISEENKPGEKIGSLRTNAGEESVANLDKIRNAKGNISTAELRLTMQKTMQTHAAVFRQADTLQEGCKKMSALYKKLDDLKITDRSLVWNSDLIETLELQNLMVNAMQTIYAAENRKESRGAHAREDFKDRIDEYDYSKPLEGQQPKPLDQHWRKHTLTHVDINTGDVKIDYRPVIDHTLDDKECKTVPPAIRSY

SEQ ID NO: 33181 - DNA, 1983 bp, Anopheles gambiae str. PEST
  CDS (1)..(1983)
atgagtggaatgattcgacttccaacggtgcttgccaagaacgcgctttcagcggtaagtgaaagcttgactgctggtacgtcacagcgcaacctgcatttcaccgttggacagaataatgcaaaatcgaacccggatgccatttcgcgagagtatcccgtcgttgaccatacctacgatgcggtcgttgttggggccggcggtgcaggactgcgtgccgcttttgggctggttgcggaaggattcaagactgccgttattacgaagctgttccctacccgttcccacaccgtcgccgcacagggtggcatcaatgccgcactgggtaacatggaggaggacgactggaagtggcacatgtacgatacggtgaagggatccgactggttgggagaccaggatgccatccactacatgacgcgcgaggcgccgaaagcggtcattgagctggaaaactatggtatgccgttctcccgcacgcccgatggcaagatttaccagcgtgccttcggaggacagagcttgaagtacggtaagggtggacaggcgcatcgctgctgttgcgttgcggatcgtaccggccactcgctgctgcacacgctgtacggccagtcgctcagctacgactgcaactacttcatcgaatactttgccatggacttgttgatgcagaacggcgagtgtgtcggtgtgattgcgatgaacctggaggatggtagcattcatcgcttccgtgcgaagaacacggtgctggctactggtgggtacggtcgtgcgtacttctcctgcacctcggcgcatacctgcaccggcgacggtacggcaatggtggcgcgcgctggactgccctcggaagatttggagtttgtgcagttccacccgacgggcatctacggtgccggttgcctgatcacggagggctgccgcggtgagggtggctatttgatcaactcgcagggtgaacggttcatggagcgctacgcgccggtggcgaaggatttggcctcgcgtgacgttgtgtcccgctcgatgacgatcgaaatccgcgagggacgcggttgcggtccggagaaggatcatgtctacctgcagctgcaccatctgcccccagagcagctggcccagcgcctgccgggcatttcggagacggcaatgattttcgccggcgttgatgtaacccgcgaacccattcccgtactgccgaccgtgcattacaatatgggtggcgtaccgacgaactacaagggccaggtgctgaccacgcaaaatggtgccgatcgtgttgtgccgggattgtacgcttgcggtgaggccgcttgttcctcggtgcacggtgcaaatcgtctcggtgccaattcgctgctcgatctcgtggtgttcggtcgtgcctgcgccaaaacgatcgctgaggagaatcgtccaggagagaaggtgcaggatctgaagccgaatgcgggcgaagcatcggttgccaacttggactgggtgcgtaacgctgacggacaggtgccgacctcgacgctgcgtttgaatatgcagaagactatgcagacgcatgctgccgttttccgcgaggagaaaacgctccaggagggcgtgcgcaagatgggcgacatctacaagaccatcaaggacgtgaaagtgtcggacaggtcactggtgtggaactcggatctggtggaaacgcttgagctgcagaatttgctgctgaacgcaaacatgaccatcgtcgctgctgaaaaccgtaaggaatcgcgcggtgcccatgctcgtgaggactacaaacaacgtgtcgacgaatacgactttagcaagccgctcgagggacagcagaagaagccggtggaagagcactggcgtaaacatacgctgacgtggatcgatccagccaccggtaacgtcaccatcgactaccgtccggtcattgacgaaacgctcagcgaggaatgtgctaccgtgccgccagccattcggtcttattaa

SEQ ID NO: 33182 - protein, 660 aa, Anopheles gambiae str. PEST
MSGMIRLPTVLAKNALSAVSESLTAGTSQRNLHFTVGQNNAKSNPDAISREYPVVDHTYDAVVVGAGGAGLRAAFGLVAEGFKTAVITKLFPTRSHTVAAQGGINAALGNMEEDDWKWHMYDTVKGSDWLGDQDAIHYMTREAPKAVIELENYGMPFSRTPDGKIYQRAFGGQSLKYGKGGQAHRCCCVADRTGHSLLHTLYGQSLSYDCNYFIEYFAMDLLMQNGECVGVIAMNLEDGSIHRFRAKNTVLATGGYGRAYFSCTSAHTCTGDGTAMVARAGLPSEDLEFVQFHPTGIYGAGCLITEGCRGEGGYLINSQGERFMERYAPVAKDLASRDVVSRSMTIEIREGRGCGPEKDHVYLQLHHLPPEQLAQRLPGISETAMIFAGVDVTREPIPVLPTVHYNMGGVPTNYKGQVLTTQNGADRVVPGLYACGEAACSSVHGANRLGANSLLDLVVFGRACAKTIAEENRPGEKVQDLKPNAGEASVANLDWVRNADGQVPTSTLRLNMQKTMQTHAAVFREEKTLQEGVRKMGDIYKTIKDVKVSDRSLVWNSDLVETLELQNLLLNANMTIVAAENRKESRGAHAREDYKQRVDEYDFSKPLEGQQKKPVEEHWRKHTLTWIDPATGNVTIDYRPVIDETLSEECATVPPAIRSY

SEQ ID NO: 33183 - DNA, 1929 bp, Magnaporthe grisea 70-15
  CDS (1)..(1929)
atggcgatgagagctgcacggaatgtgttccgcacaactactgctaggcagatcaggccgttctcgtcgacccgacctgcggcaagaatattcggcaatgcgcctctgagggcaaaggaggcatctcctcatgtcagcggcaaatacccggtcattgaccacgagtacgatgcgatcgttgtcggtgccggtggtgccggtctacgcgccgccttcggtctggccgaggccggcttcaacactgcctgtatatcgaagcttttccctaccaggagtcacactgtcgccgcacagggtggtatcaacgctgcccttggtaacatgcacgaagacgactggaggtggcacatgtacgataccgtcaagggctccgactggcttggagaccaggatgctattcactacatgacccgcgaggctcccgcatcgattatcgagcttgagaactacggttgcccgttctcgcgtaccgaggatggcaagatttaccagcgcgctttcggtggtcagtcgcagaagtatggcaagggcggacaggcataccgctgctgtgctgctgccgacaggacaggacacgcccttctgcacaccctttacggacagtctctgcgccacaacacgaactacttcattgaatacttcgccatggacctgatcatgcaagacggcgagtgtgtcggtgttgttgcgtacaaccaggaggacggcactctgcacaggttcttcgccaagaacaccgttcttgccactggtggatacggtcgtgcatacttcagctgcacatcggcgcacacttgcactggtgacggtatggccatggttgcccgtgccggcctgcccaaccaggatctggagttcgttcagttccaccctaccggtatttacggagctggctgcctgattactgagggctctcgtggtgagggtggttaccttctcaactcagagggtgagcgcttcatggagcgttatgcccctactgctaaggatctggcctctcgtgacgtcgtctctcgttccatgaccatggagatccgcgagggacgtggtgttggccctgagaaggaccacatctacctgcagctcagccatcttcctgccgaggttctggcggagcgtctgcccggtatctctgagactgccgccatcttctctggtgtggatgtcaccaagcagcccatccccgtcctgccgaccgtccactacaacatgggtggtatccccacgaggtacactggtgaggttatcactgtcgacgagagcggcaaggacaaggtcgtccccggtcttttcgcttgtggtgaggctgcctgtgtgtctgtgcacggtgccaaccgtctgggtgccaactctctgcttgacttggtcgtcttcggtcgtgctgtctcgcacaccatccgtgacaacttcagccccggccagaagcacacccccgccgccgccgacgctggtgccgagtcgatcgaggttctcgatcaggtccgcactgctgacggccccaagagcaccgccgaggtcaggctggcgatgcagaaggccatgcagaccgatgtcagcgtcttccgtacccaggagtcgcttgatgagggtgtccgcaaggtgaacgaggttgaccagatgttcagccaggtcggcaccaaggacaggagcatgatctggaactctgacctggttgagacccttgagctgaggaatctgttgacttgcgctactcaaaccgccgtctcggctgccgcaaggaaggagtcgcgtggtgcccacgcccgtgaggactaccccgaccgtgacgatgacaactggatgaagcacactcttagttaccagaagaagccgcatggcaaggttgagctttcataccgtggagtcattggtcacaccctagacgagaaggagtgcgcggcggtcccgcctttcaagcgtgtatactaa

SEQ ID NO: 33184 - protein, 642 aa, Magnaporthe grisea 70-15
MAMRAARNVFRTTTARQIRPFSSTRPAARIFGNAPLRAKEASPHVSGKYPVIDHEYDAIVVGAGGAGLRAAFGLAEAGFNTACISKLFPTRSHTVAAQGGINAALGNMHEDDWRWHMYDTVKGSDWLGDQDAIHYMTREAPASIIELENYGCPFSRTEDGKIYQRAFGGQSQKYGKGGQAYRCCAAADRTGHALLHTLYGQSLRHNTNYFIEYFAMDLIMQDGECVGVVAYNQEDGTLHRFFAKNTVLATGGYGRAYFSCTSAHTCTGDGMAMVARAGLPNQDLEFVQFHPTGIYGAGCLITEGSRGEGGYLLNSEGERFMERYAPTAKDLASRDVVSRSMTMEIREGRGVGPEKDHIYLQLSHLPAEVLAERLPGISETAAIFSGVDVTKQPIPVLPTVHYNMGGIPTRYTGEVITVDESGKDKVVPGLFACGEAACVSVHGANRLGANSLLDLVVFGRAVSHTIRDNFSPGQKHTPAAADAGAESIEVLDQVRTADGPKSTAEVRLAMQKAMQTDVSVFRTQESLDEGVRKVNEVDQMFSQVGTKDRSMIWNSDLVETLELRNLLTCATQTAVSAAARKESRGAHAREDYPDRDDDNWMKHTLSYQKKPHGKVELSYRGVIGHTLDEKECAAVPPFKRVY

SEQ ID NO: 33185 - DNA, 2133 bp, Candida glabrata CBS 138
  CDS (1)..(2133)
atggagacggacttctccgagaaccaatcagaaacgaccaaatgtgaagcagcgcagtgctgccccctctacgctgcgctagtcccctacccttcccttccagcgggctctcgggctcgggctcgggctcgggtgctgtgtggaagtgaaacatatataagagacatgcttcgctatgtggtgggactgggaggagagacaatccacagatctggagaacaggaaataagtaaaaacccaaacacctccacccataagaaaatgttgaggacgggattgagactgagacaactatctaccagctgcgtgaggagacacgcagcgcctgcggggctaggcgcgggcaagtacaacgttatagaccacgagtacgactgtctggtcgtcggtgccggtggtgcggggctgcgggccgcgttcgggctggcggaggccgggttcaagactgcgtgtatctctaagctgttccctacgagatcgcacactgtggccgcacagggtggtatcaacgctgcgctggggaacatgcacaaggacaactggaagtggcacatgtacgacaccgtgaagggctcagactggctcggggaccaggacgcgatccactacatgacgcgtgaggcgcccaagtccatcatcgagctggagcactacggtatgcctttctcgcgtaccgaggaaggccggatctaccagagggccttcggtggccagtcgaaggagttcggcaagggcgggcaggcgtaccgtacctgtgccgtcgcggacagaacgggccacgcgatgctgcacacgctgtatggccaggcgctgaaccacgactgccacttcttcatcgagttcttcgccatggacctgctgacccacaacggcgaggtcgtcggtatcatcgcgtacaaccaggaggacggtaccatccacaggttccgcgcgcacaagaccgtgctagccaccggtggctacgggagagcgtacttctcctgtacctccgcgcacacctgcaccggtgacggtaacgccatggtctcccgtgcgggcttccccttgcaggacctcgagttcgtgcagttccacccctccggtatctacggctccggctgcctgatcacagagggtgcccgtggtgaaggtggcttcctgctgaacagcgagggtgagcggttcatggagcgttacgcgccaaccgccaaggacctggcctccagagacgtcgtgtcccgtgccatgaccatggagatcagggagggcagaggtgtcggcaagcacaaggaccacatctttttgcagctgagccacctgccacccgcggtgctgaaggaaagactgccaggtatctccgagaccgccgccatcttcgcaggtgtcgacgtcaccaagcagcccatcccagtgctgcccacagtccactacaacatgggtggtatccccaccaagtggaccggtgagtgtctcaccatcgacgagaacggcgaggacaaggtgatcccaggcctgatggcctgcggtgaagccgcctgtgtctccgtccacggcgccaacagactgggcgccaactccctgctggacctggtcgtcttcggccgtgccgtcgccaacaccgtcgcggacaccttgcagccgggcacaccacacaagcctctgcctgccgacctgggcaaggagtccctcgcttcgctggacgccatcagaaacgccagcggcgacaagaccaccgcacagatcagactgaacatgcagaagaccatgcagaaggacgtctccgtgttcagaatgcaggagaccctggacgaaggtgtcaagaacatcaccgccgtcgacaagaccttcaaggacgtacacgtcaccgacaagtccatgatctggaacagcgacctcgtcgagaccatggagctgcgcaacctgttgacctgcgccacacagacagccgtctccgccgcagagagaaaggagtcccgtggtgcccacgcaagagaggactacccatccagagacgacgagaactggagaaagcacaccttgtcctggcaacagcacaccggcgacccagtctccatcaagtacagaaaggtcatcgccacaaccttggacgaagccgagtgcccaccagtgccaccagccgtgagatcatactga

SEQ ID NO: 33186 - protein, 710 aa, Candida glabrata CBS 138
METDFSENQSETTKCEAAQCCPLYAALVPYPSLPAGSRARARARVLCGSETYIRDMLRYVVGLGGETIHRSGEQEISKNPNTSTHKKMLRTGLRLRQLSTSCVRRHAAPAGLGAGKYNVIDHEYDCLVVGAGGAGLRAAFGLAEAGFKTACISKLFPTRSHTVAAQGGINAALGNMHKDNWKWHMYDTVKGSDWLGDQDAIHYMTREAPKSIIELEHYGMPFSRTEEGRIYQRAFGGQSKEFGKGGQAYRTCAVADRTGHAMLHTLYGQALNHDCHFFIEFFAMDLLTHNGEVVGIIAYNQEDGTIHRFRAHKTVLATGGYGRAYFSCTSAHTCTGDGNAMVSRAGFPLQDLEFVQFHPSGIYGSGCLITEGARGEGGFLLNSEGERFMERYAPTAKDLASRDVVSRAMTMEIREGRGVGKHKDHIFLQLSHLPPAVLKERLPGISETAAIFAGVDVTKQPIPVLPTVHYNMGGIPTKWTGECLTIDENGEDKVIPGLMACGEAACVSVHGANRLGANSLLDLVVFGRAVANTVADTLQPGTPHKPLPADLGKESLASLDAIRNASGDKTTAQIRLNMQKTMQKDVSVFRMQETLDEGVKNITAVDKTFKDVHVTDKSMIWNSDLVETMELRNLLTCATQTAVSAAERKESRGAHAREDYPSRDDENWRKHTLSWQQHTGDPVSIKYRKVIATTLDEAECPPVPPAVRSY

SEQ ID NO: 33187 - DNA, 1917 bp, Debaryomyces hansenii CBS767
  CDS (1)..(1917)
atgattattacttttcttcattctaatctgataatgttacgtagatattttggtacatcagctactagattccaaactattggaaacatcaaaggaactcaattgaatgcaaccaaatacttgtcaaaggactaccatgttattgaccatcagtatgattgtcttgtcgtgggtgccgggggtgctgggttaagagcagcatacggattatcggaggccgggtataaaactgcttgtatttcgaagttatttccaactagatcacacacggttgcagctcaggggggtataaatgctgcgttgggtaatatgcataaggatgactggcattggcacatgtatgataccgtgaagggatcagattggttgggagatcaagatgctatccattacatgaccaaggaagcccctgcctcgatctacgaattagaaaactatggtgttccattctccagaaacgaagaaggcagaatctaccaaagagcatttggtggacaagcgaaagaattcggtaagggaggacaagcatacaggacttgtgctgttgcagacagaactggacattcattattgcacacattatacgggcaatccttgagaaacgatacccatttctttattgaattttttgccatggatttgatgatgcaggacggtgaatgtattggtgttatcgcgtataaccaagaggacggtacaattcataggttccaagcgcacaagacaattattgctaccggtggttacggaagaacctatttctcatgcacatcagcacatacgtgtaccggtgacggtttcgctatggtctctagagctggcttaccattagaagacatggaattcgtccaattccacccatctggtatttacggctctggctgtttgatcactgaaggtgcaagaggtgaaggtgggttcttgcttaattccgaaggtgaaagatttatggaacgttatgctccacacgctaaagacttggcatcaagagatgtggtttctcgtgccatgactttggaaataaacgagggcagaggtgtcggtaaggaaaaggatcacatctacttgcaattgtctcacttgcctccgtctgtattgaaggaaagattaccaggtatttctgaaactgcgcatattttcgcgggggttgatgtcaccaaggagccaattccaattttgcctaccgtccactacaatatgggtggtattccaactaactataagacggaagttttgaagaagggtgctgacggaaaggatgaaattgtcccaggattgttcgcttgtggtgaagctgcatgtgcctccgtccacggtgccaacagattgggtgcaaactcattattggacttggttgtgttcggaagagccgtcggtcacactatcagcgagcaattgactcctggtacacctttcaagccattggatgagcacatgggtaaggaatcgatcgaaaacttgcaccatttgagaacagccgacggtagccagacgaccgcctctatcagagcagaaatgcagaaaactatgcaaaaaggatgtgctgtcttcagaacacaagacttattggaccaatgtgtcgaagacatcgacaagatcgacaagaccttcgaacacgtgaagactaccgacagatcgatgatctggaactcggacttggtcgaaacaatggaattgcaaaatttgttgacctgcgctacccagaccgcatattcagctgctgctagaaaggaatcaagaggtgcccacgcaagagatgattatccaaacagagatgatgaaaactggcgtaagcacaccttgtcctaccagaaaaacttcggtgataaggttgaattggattacagagatgttgttagaacaaccttggatgaaagcgactgtaagcccgtgcctccagcagttcgtgtttactaa

SEQ ID NO: 33188 - protein, 638 aa, Debaryomyces hansenii CBS767
MIITFLHSNLIMLRRYFGTSATRFQTIGNIKGTQLNATKYLSKDYHVIDHQYDCLVVGAGGAGLRAAYGLSEAGYKTACISKLFPTRSHTVAAQGGINAALGNMHKDDWHWHMYDTVKGSDWLGDQDAIHYMTKEAPASIYELENYGVPFSRNEEGRIYQRAFGGQAKEFGKGGQAYRTCAVADRTGHSLLHTLYGQSLRNDTHFFIEFFAMDLMMQDGECIGVIAYNQEDGTIHRFQAHKTIIATGGYGRTYFSCTSAHTCTGDGFAMVSRAGLPLEDMEFVQFHPSGIYGSGCLITEGARGEGGFLLNSEGERFMERYAPHAKDLASRDVVSRAMTLEINEGRGVGKEKDHIYLQLSHLPPSVLKERLPGISETAHIFAGVDVTKEPIPILPTVHYNMGGIPTNYKTEVLKKGADGKDEIVPGLFACGEAACASVHGANRLGANSLLDLVVFGRAVGHTISEQLTPGTPFKPLDEHMGKESIENLHHLRTADGSQTTASIRAEMQKTMQKGCAVFRTQDLLDQCVEDIDKIDKTFEHVKTTDRSMIWNSDLVETMELQNLLTCATQTAYSAAARKESRGAHARDDYPNRDDENWRKHTLSYQKNFGDKVELDYRDVVRTTLDESDCKPVPPAVRVY

SEQ ID NO: 33189 - DNA, 2136 bp, Yarrowia lipolytica CLIB122
  CDS (1)..(2136)
atgtcagactgtcttgaaaatttcagtctgtcaaccgccgatgctctcacagtctatccccacaacacaccctctgataccacaaccactatatacagtcactgcggaccactctgcagtaaatcatccagacaactattctctacctaccggaatacgcaaaacacctctccaccccacaacgcctgcagaaaaccccacaacacaactaacacagaaatgcttagagctatcaaaaacccccgagccgttctcaagtctcgtcacttctccacctccccggtggtggccaaggtcttcgccaacggccccgtcaaggcccaggaggccccctcccacgtggcgtccaagtacgccgtcgtcgaccacgagtacgattgtgttgttgttggagccggtggagccggtctccgagccgccttcggtctggccgaggctggcttcaacaccgcttgtatctccaagctgttccccacccgatcccacaccgtcgctgcgcagggaggtatcaacgccgctctcggaaacatgcaccccgataactggaagtggcacatgtatgacaccgtcaagggttccgattggctcggagaccaggacgccatccactacatgaccaaggaggcccccaagtccattatcgagctggaacactacggtgttcccttctctcgaaacgacgagggccgaatctaccagcgagccttcggtggtcagtccaaggactacggtaagggaggccaggcctaccgaacctgtgccgttgccgaccgaaccggccacgccatgctgcactctctttacggacagtctctccgacacaacactcacttctttattgagtacttcgccatggacctgctcatggaggacggcgcctgtgtcggtgtcgttgcctacaaccaggaggacggaaccctgcatcgattccgagcccacaagaccgttctggccaccggtggttacggacgagcctacttctcctgtacctctgcccacacctgtactggtgacggtatggccatggtcacccgagccggccttcccctccaggatctggagtttgtccagttccaccctaccggtatctatggctccggctgtctgattactgagggatcccgaggtgagggaggatacctgctcaacaagaacggtgagcgattcatggagcgatacgctcccaccgccaaggatctggcctcccgagatgtcgtgtctcgatccatgaccctggagatccgagagggccgaggtgttggccagcacggcgaccacatcttcctccagctgtcgcatctgcccgcctccgtgctccacgagcgactccccggtatttccgagaccgccgccattttcgctggtgttgacgttaccaaggagcccatccccgttctccccaccgttcactacaacatgggtggtatccccacgcgatacaccggtgaggtccttactcaggatgagaacggtcaggacaaggttgtcgagggtctgttcgcctgtggtgaggccgcctgtgtctccgtccacggtgccaaccgacttggagccaactccctgctcgatctggttgtcttcggccgagccgttgcccaccgaatcaccgagactcttacccccggtgctcctcttccccctgtctctgctgacattggttacgagtccattgctaaccttgacaagatgcgaaacgccgacggtcctctgtccaccgctaccattcgagacaagatgcagcgaaccatgcagatggatgtctccgttttccgaacccaggagtctcttgaggatggtgtccgaggtatcactgctgttgaccgactcattgaccaggttggtgtcaccgaccgatccatgatctggaacactgatcttaccgagaccctcgagctgcagaacctgctcacctgcgccatgcagaccgcctactctgccgtcgcccgaaaggagtctcgaggtgcccatgcccgagaggattaccccgaccgagacgatgtcaactggatgaagcataccctctcctggcaggataagcccggtgacgagatcaagctcggctaccgagccgtccagatgcacaccctcgatgagtctgagtgtcctaccgtccctcccgccaagcgagtctactaa

SEQ ID NO: 33190 - protein, 711 aa, Yarrowia lipolytica CLIB122
MSDCLENFSLSTADALTVYPHNTPSDTTTTIYSHCGPLCSKSSRQLFSTYRNTQNTSPPHNACRKPHNTTNTEMLRAIKNPRAVLKSRHFSTSPVVAKVFANGPVKAQEAPSHVASKYAVVDHEYDCVVVGAGGAGLRAAFGLAEAGFNTACISKLFPTRSHTVAAQGGINAALGNMHPDNWKWHMYDTVKGSDWLGDQDAIHYMTKEAPKSIIELEHYGVPFSRNDEGRIYQRAFGGQSKDYGKGGQAYRTCAVADRTGHAMLHSLYGQSLRHNTHFFIEYFAMDLLMEDGACVGVVAYNQEDGTLHRFRAHKTVLATGGYGRAYFSCTSAHTCTGDGMAMVTRAGLPLQDLEFVQFHPTGIYGSGCLITEGSRGEGGYLLNKNGERFMERYAPTAKDLASRDVVSRSMTLEIREGRGVGQHGDHIFLQLSHLPASVLHERLPGISETAAIFAGVDVTKEPIPVLPTVHYNMGGIPTRYTGEVLTQDENGQDKVVEGLFACGEAACVSVHGANRLGANSLLDLVVFGRAVAHRITETLTPGAPLPPVSADIGYESIANLDKMRNADGPLSTATIRDKMQRTMQMDVSVFRTQESLEDGVRGITAVDRLIDQVGVTDRSMIWNTDLTETLELQNLLTCAMQTAYSAVARKESRGAHAREDYPDRDDVNWMKHTLSWQDKPGDEIKLGYRAVQMHTLDESECPTVPPAKRVY

SEQ ID NO: 33191 - DNA, 1986 bp, Apis mellifera
  CDS (1)..(1986)
atgagtggtctattaaagctgtcgtctttactagtgagaaatcctcccacaacgacgttgaataaattgggattacctgttattacaaatcgcaaattacattatacaccagatggcaaagctgcaaaaatctcagatggtgtttctaagcattatccattagtagatcatacttatgatgctgttgttgttggtgctggtggagcaggattacgtgcagcttatggtttagttgctgaaggatttaagacagcagttgttactaaattatttcctacaaggtcacatactgttgctgctcaaggaggtatcaatgctgccttgggtaatatggaagaagataactggcagtggcatatgtatgacactgtgaagggatctgactggttaggtgatcaggatgctattcattatatgacacgtgaagccccaaaggcagtcattgaattggagaattgtggcatgcctttcagtcgaacttcagatggtaaaatatatcaacgtgcttttggtggacaatctctgaaatttggaaaaggtggccaagctcacagatgttgctgtgtagcagacaggacaggtcactctttacttcatacattgtatggtcaatctttgagttatgactgtaattattttgttgaatattttgctctggatttattaatggaagatggagagtgtagaggagtgattgctctttgtttggaagatggtacacttcatcgttttcattctaaaaatacagtattagcaactggaggatatggacgtgcatatttctcttgtacatctgctcatacatgcactggtgatggcactgcaatgatatctagagccaatttacctaatcaagatttggaatttgtacaatttcatcctacaggaatatatggagctggttgtcttatcacagaaggtagtcgtggtgaaggaggctatcttgtaaatagtgaaggtgaaaggtttatggaacgttatgctccagttgcaaaagatttagcctctagagatgttgtatctagatctatgactattgaaattcgggaaggcagaggtgttggtcctgaaaaagatcatatttatttgcaattacatcacttaccacctgaacagttagcagctaggctacctggaatctctgaaacagcaatgatatttgctggagttgatgtaaccagagaacctattccagttatacctacggtacattataacatgggaggaatacctacaaattacaaaggacaggttctaacgagaaaaaatgatcaggatacagttgtgcccggactttatgcttgtggagaatcagcttgtgcgtctgttcatggtgctaatcgtcttggtgcaaattcattattagatttagttgtattcggccgtgcctgtgctaaaacaattgcagcggaaaataagccaggagaaactattggccctctaaaacccaatgccggagaagaaagtgtggcgaacttggattgggtcagaaatgcgaatggtaatgtttctactgcagaattaagattgagcatgcaaaaaactatgcaaactcatgcagctgtatttagaacagctgaaacattacaagaaggatgtcagaagatgtctgccttatataaaaaattgaacgatcttaaggttttggacaaatctatgatatggaattctgatcttatagaatctcttgaattacaaaatttaatgattaatgccatgcaaacaatagtagctgctgaaaataggaaagaaagtcgtggagctcatgcacgtgaagattttaaagatagaatcgacgaatatgactacagtaagtcaacagaaaaccaaaaacctagaccattggatcaacattggcgaaagcatactcttacaaaaataaatgttagatcaggagaagtatctatcgatttcagaccagttatagacaatactttaaataaacaagaatgtgcgacagttccacctgcaattcgttcctattag

SEQ ID NO: 33192 - protein, 661 aa, Apis mellifera
MSGLLKLSSLLVRNPPTTTLNKLGLPVITNRKLHYTPDGKAAKISDGVSKHYPLVDHTYDAVVVGAGGAGLRAAYGLVAEGFKTAVVTKLFPTRSHTVAAQGGINAALGNMEEDNWQWHMYDTVKGSDWLGDQDAIHYMTREAPKAVIELENCGMPFSRTSDGKIYQRAFGGQSLKFGKGGQAHRCCCVADRTGHSLLHTLYGQSLSYDCNYFVEYFALDLLMEDGECRGVIALCLEDGTLHRFHSKNTVLATGGYGRAYFSCTSAHTCTGDGTAMISRANLPNQDLEFVQFHPTGIYGAGCLITEGSRGEGGYLVNSEGERFMERYAPVAKDLASRDVVSRSMTIEIREGRGVGPEKDHIYLQLHHLPPEQLAARLPGISETAMIFAGVDVTREPIPVIPTVHYNMGGIPTNYKGQVLTRKNDQDTVVPGLYACGESACASVHGANRLGANSLLDLVVFGRACAKTIAAENKPGETIGPLKPNAGEESVANLDWVRNANGNVSTAELRLSMQKTMQTHAAVFRTAETLQEGCQKMSALYKKLNDLKVLDKSMIWNSDLIESLELQNLMINAMQTIVAAENRKESRGAHAREDFKDRIDEYDYSKSTENQKPRPLDQHWRKHTLTKINVRSGEVSIDFRPVIDNTLNKQECATVPPAIRSY

SEQ ID NO: 33193 - DNA, 1902 bp, Aspergillus nidulans FGSC A4
  CDS (1)..(1902)
ttgccagttgcaaccctagatcagagacgtttgttctcctcatcccgccctgcagcccgcattttcggcacgaaccctttgcgcgctaagcctgctgaaggctatatctcagagaaatatccggtcattgaccacgagtacgatgcggtcgtcgtcggtgctggaggcgctggtctgcgtgccgcgttcggtttggcggaagctggattcaacactgcctgtgtctcgaagctcttccctactcgatctcacaccgttgctgctcagggtggtatcaacgctgctcttggaaacatgcaccccgatgactggagatggcacatgtacgataccgtgaagggttccgattggcttggtgaccaggatgctattcactacatgacgagggaggcccccgctagtgtccgtgagctcgagggctacggatgccccttctcgcgtaccgaggaaggcctcatctaccagcgtgctttcggtggtcagtccaaggagttcggtaagggcggacaggcgtaccgttgctgcgccgtcgccgaccgtaccggccacgctcttctgcacaccctctacggacagtctctgcgccacaacaccaactacttcattgagtacttcgccatggatctgctgatggagaacggcgagtgccgcggtatcatcgcttacaaccaggaggatggaactctccaccgtttcaaggctcaccacacagttcttgctaccggtggatacggtcgtgcctacttcagttgtacctctgctcacacctgtaccggtgacggtatggccatggttgcccgtgccggtctccctaaccaggatctggagttcgtccagttccaccccactggtatctacggtgctggatgcttgatcacagagggtgcccgtggtgagggtggttacctgctcaactccgagggtgagcgtttcatggagcgttacgcccctaccgctaaggatctggcctcccgtgacgtcgtctcccgttccatgaccatggagatccgtgagggccgtggtgtcggtcccgaaaaggaccacatctaccttcagctcagccaccttcccgcctctctcctgcacgagcgtctccccggtatctctgagaccgcttccatctttgctggtgttgatgtgaccaagcagcccatccccgtcctgcccaccgtccactacaacatgggtggtatccccaccaagttcaccggtgaggtcctgacccaggatgagaacggcaacgacaaggttgttcccggtttgtacgcttgcggtgaagccgcctgtgtctctgtccacggtgccaaccgtctcggtgccaactccctcctggatctggtcgtcttcggtcgtgctgtttctcaccgtgtcaaggagatcgcctcccccggcaagccccacgccgagctggcctccgacgctggtgccgaatccatcaaggaccttgacactgtccgcactgctgagggccctaagtccaccttcgagatccgcaacgccatgcagaagaccatgcagaccgacgtctctgtcttccgtacccaggagagcttggatgagggtgttgagaagatcaccaaggtcgaccagttgttcgaccaggtcggtaccaaggaccgcagcatgatctggaactccgatcttgttgagactcttgagcttcgtaaccttttgacttgcgccactcaaactgccgttgccgccgccaaccgcaaggagtcccgtggtgcccacgcccgtgaggactaccccgaccgtgacgacgagaactggatgaaacacactctcacatggcagaagaagcctcacggcaaggtcgagatcggctaccgcagcgtcgtgcacaacacccttgacgagaacgagtgcaagcctgttcctcccttcaagcgtgtctactaa

SEQ ID NO: 33194 - protein, 633 aa, Aspergillus nidulans FGSC A4
MPVATLDQRRLFSSSRPAARIFGTNPLRAKPAEGYISEKYPVIDHEYDAVVVGAGGAGLRAAFGLAEAGFNTACVSKLFPTRSHTVAAQGGINAALGNMHPDDWRWHMYDTVKGSDWLGDQDAIHYMTREAPASVRELEGYGCPFSRTEEGLIYQRAFGGQSKEFGKGGQAYRCCAVADRTGHALLHTLYGQSLRHNTNYFIEYFAMDLLMENGECRGIIAYNQEDGTLHRFKAHHTVLATGGYGRAYFSCTSAHTCTGDGMAMVARAGLPNQDLEFVQFHPTGIYGAGCLITEGARGEGGYLLNSEGERFMERYAPTAKDLASRDVVSRSMTMEIREGRGVGPEKDHIYLQLSHLPASLLHERLPGISETASIFAGVDVTKQPIPVLPTVHYNMGGIPTKFTGEVLTQDENGNDKVVPGLYACGEAACVSVHGANRLGANSLLDLVVFGRAVSHRVKEIASPGKPHAELASDAGAESIKDLDTVRTAEGPKSTFEIRNAMQKTMQTDVSVFRTQESLDEGVEKITKVDQLFDQVGTKDRSMIWNSDLVETLELRNLLTCATQTAVAAANRKESRGAHAREDYPDRDDENWMKHTLTWQKKPHGKVEIGYRSVVHNTLDENECKPVPPFKRVY

SEQ ID NO: 33195 - DNA, 1917 bp, Candida albicans SC5314
  CDS (1)..(1917): transl_table=12
atgttcacaaaatgctctagacaagcagtaaatagactgggacgttttttcagcaacagttccattacttttcagacaattggcagaattaaaggaacagaagccaactcaaagaaatatttgcaacaaaaatacgttgtcattgatcatgaatatgattgtgtggttgtcggagctggtggagccggattgcgagctgcatttggattggcagagtcaggatttaaaacagcatgtatatcaaaattgtttcccactaggtcacatacagttgcagcacagggaggtattaatgcagcactaggtaatatgcataaagatgactggcattggcatttttacgacactgtgaaaggatctgattggctaggcgaccaagatgccatccattatatgacaaaagaagcaccagattctatctacgaattagagcattttggagttccattttctagaaatgacgaaggcagaatctaccaaagagcatttgggggccaaacaaaagaatttggtaaaggtggacaagcctatagaacatgtgctgttgctgacagaactggccatgctttgttgcactcattgtacggtcaagctttgagacacgattgtcattttttcatcgagttctttgctatggatttgctcatgcaagacggtgaatgtgttggtgtaatagcctacaaccaggaggatggaactatacatagattccgatctcataaaaccgtgattgctactggtggttacggcagagcatatttttcatgcacttcagcacacacatgcaccggcgacggatacgctatggcatctagagcaggattacctttacaagatttagaatttatccaatttcatccttctgggatatatggatcaggttgtcttataacagagggagcaagaggtgaaggtggatttttagttaattccgagggtgagagatttatggaaagatatgcacctactgccaaggacttagcatgcagagacgtggtctctcgtgcaattacgatggagataaatgaaggcagaggagttggttctgagaaggaccatatgtatttacaattgagtcatcttcctgcagctgttttaaagcaaagattaccaggtatttctgaaactgctcatatttttgctggtgtcgatgtaacgaaggagccaattcctatattgccaactgtacattataatatgggtggtatcccaactaactggcaaggggaagttttaaaaaagggtactgacggcaaagacgaagttgtccctgggttgcttgcttgtggtgaagctgcctgtgcatctgttcatggtgccaacagattgggcgctaactccttgttagacttggtagtttttggaagggcggtttctcatacaataagagataacctcacaccaggagctcccttacacgcatcaccagctgatttaggtaaggcttccattgaaaacttacatagattgagaaatgcagaaggtacaaaatcaacagctgaaattagactagatatgcaaaaaacaatgcaaaagggttgtgcagtgtttagaacagaagaaacgttagaggaatgcgttgacaatatcaacgaggttgacaaatcatttgctaacgttaagaccactgatcgttcgatgatttggaattctgacttggtggagactatggaattacaaaatttgttaacgtgtgccacacagactgcagcatctgctttagcaaggaaagaatcaagaggatcacactctcgtgaggattatcctgacagagatgatgtgaattggtggaaacatactttgtcttaccaaaacagtgttggttctaaagtaaaattggactatagagatgtgataaaaaccacgttggataccacagactgccaaccggtaccgccagctgttcgtaaatactag

SEQ ID NO: 33196 - protein, 638 aa, Candida albicans SC5314
MFTKCSRQAVNRSGRFFSNSSITFQTIGRIKGTEANSKKYLQQKYVVIDHEYDCVVVGAGGAGLRAAFGLAESGFKTACISKLFPTRSHTVAAQGGINAALGNMHKDDWHWHFYDTVKGSDWLGDQDAIHYMTKEAPDSIYELEHFGVPFSRNDEGRIYQRAFGGQTKEFGKGGQAYRTCAVADRTGHALLHSLYGQALRHDCHFFIEFFAMDLLMQDGECVGVIAYNQEDGTIHRFRSHKTVIATGGYGRAYFSCTSAHTCTGDGYAMASRAGLPLQDLEFIQFHPSGIYGSGCLITEGARGEGGFLVNSEGERFMERYAPTAKDLACRDVVSRAITMEINEGRGVGSEKDHMYLQLSHLPAAVLKQRLPGISETAHIFAGVDVTKEPIPILPTVHYNMGGIPTNWQGEVLKKGTDGKDEVVPGLLACGEAACASVHGANRLGANSLLDLVVFGRAVSHTIRDNLTPGAPLHASPADLGKASIENLHRLRNAEGTKSTAEIRLDMQKTMQKGCAVFRTEETLEECVDNINEVDKSFANVKTTDRSMIWNSDLVETMELQNLLTCATQTAASALARKESRGSHSREDYPDRDDVNWWKHTLSYQNSVGSKVKLDYRDVIKTTLDTTDCQPVPPAVRKY

SEQ ID NO: 33197 - DNA, 1965 bp, Ustilago maydis 521
  CDS (1)..(1965)
atgatcttcgcaaggtcgctctcgcgcgccgttgcgcgtgcgccttcttcctctagccttgtcaccccttcgcaccgagtcgctggcttccactccacccccaaggcatcgcgcatcattgcttctcagcctctccgtgctaaggaggccgccaccccacttgacgccgccaagggttaccctgtcattgaccatgagtacgatgctatcgttgtcggtgccggtggctctggtctccgtgccgccttcggtcttgctgaggccggtctcaacactgcttgtatcaccaagctcttccctacccgttcgcacaccgttgccgcccagggcggtatcaacgccgcgcttggaaacatgaccgaggatgactggcggtggcacatgtacgacactgtcaagggctccgactggctcggtgaccaggacgccattcactacatgtgtcgtgaggctccgcgtactgttattgagctcgagcacttcggtctccccttctcccgaaccaaggacggcaagatctaccagcgagctttcggtggtcagtcgctcaactacggcaagggtggtcaggcgtaccgatgtgccgctgccgctgaccgaactggtcacgccatgctgcacaccctgtatggtcagtcgcttcgacacaacacaaacttctttatcgagtactttgccctcgacttgatcatggaggacggcgagtgcgtcggtgttactgcactcaacatggaggacggcaccattcaccgcttccgtgctcacaagaccgttcttgccaccggtggttacggacgtgcttacttctctgccacttcggctcacacgtgcactggtgacggtatggctatggtctcgcgtgctgggcttcccctgcaagatctcgagttcgttcagttccaccctaccggtatctacggtgctggttgcttgatcaccgagggttcgcgtggtgagggtggttacctgctcaactcggagggtgagcgattcatggagcgatatgctcctaccgccaaggatcttgcctcgcgtgacgttgtctcgcgttccatgactatcgagatccgtgagggccgtggtgttggccccgagaaggatcacatctacctgcagctctcgcacttgccgcccgaggttctccacgagcgtctccctggtatctcggagaccgccgccatctttgccggtgttgatgtcaccaaggagcctattcctgtgcttcctacggtgcactacaacatgggtggtatccccaccaagtacaccggtgaggtgatcaccaagggccccaacggcgaggacaagatcgttcctggtctctatgccgccggtgagactgcatgtgtgtcggtgcatggcgctaaccgtctgggtgccaactcgttgcttgacattgtcgtctttggtcgtgcttgtgccaaccacatcaaggagaacctcgatcccggtaagccgcacaaggagctcaagggtgacgcgggtgccaagtcaatcaacgacctcgactgggtgcgaaacgccaacggcaccaagaccaccgctgatatccgcaacgacatgcagcgtgtcatgcagtctgacgccgctgtgttccgtacgcagaagacgctcgacgagggtgtcgagaagatcgacaaggtgtactcgaccttccccgatgtctcgattcaggaccgctccatgatctggaactcggatctggttgaaacgctcgagctcaagaacctgctgacctgcgcaactcagaccatgcactcggctgctgcccgaaaggagtcaaggggtgctcatgctcgtgaggactaccctgaccgagatgacgagcaatggatgcgtcacactctgtcctggcagcacgagggcaccggcgacaaggtcaagctcgactaccgaggtgtcattagcacgaccctcgatgaggccgagtgcaagcccgttccccccttcaagcgccagtactga

SEQ ID NO: 33198 - protein, 654 aa, Ustilago maydis 521
MIFARSLSRAVARAPSSSSLVTPSHRVAGFHSTPKASRIIASQPLRAKEAATPLDAAKGYPVIDHEYDAIVVGAGGSGLRAAFGLAEAGLNTACITKLFPTRSHTVAAQGGINAALGNMTEDDWRWHMYDTVKGSDWLGDQDAIHYMCREAPRTVIELEHFGLPFSRTKDGKIYQRAFGGQSLNYGKGGQAYRCAAAADRTGHAMLHTLYGQSLRHNTNFFIEYFALDLIMEDGECVGVTALNMEDGTIHRFRAHKTVLATGGYGRAYFSATSAHTCTGDGMAMVSRAGLPLQDLEFVQFHPTGIYGAGCLITEGSRGEGGYLLNSEGERFMERYAPTAKDLASRDVVSRSMTIEIREGRGVGPEKDHIYLQLSHLPPEVLHERLPGISETAAIFAGVDVTKEPIPVLPTVHYNMGGIPTKYTGEVITKGPNGEDKIVPGLYAAGETACVSVHGANRLGANSLLDIVVFGRACANHIKENLDPGKPHKELKGDAGAKSINDLDWVRNANGTKTTADIRNDMQRVMQSDAAVFRTQKTLDEGVEKIDKVYSTFPDVSIQDRSMIWNSDLVETLELKNLLTCATQTMHSAAARKESRGAHAREDYPDRDDEQWMRHTLSWQHEGTGDKVKLDYRGVISTTLDEAECKPVPPFKRQY

SEQ ID NO: 33199 - DNA, 1914 bp, Cryptococcus neoformans var. neoformans B-3501A
  CDS (1)..(1914)
atgctcgccctctctcgtacaagggccctcgcccgccccctccgcaacaacttcgcaaggaactatgtcgtcgcttcccagacagcccgcgctacagaagctcccaacttcggccagaaaaagggatacccaatcatcgaccacgagtttgacgctgtagttgtcggtgctggtggtgccggtttgcgagctgctttcggtcttgccgagggtggactcaagaccgcctgtatcaccaagcttttccccactcgatcccacactgtcgccgctcagggtggtgtcaacgctgctctcggtaacatgacggaggacgactggagatggcacatgtacgacactgtcaagggttctgattggttaggtgaccaggatgctatccactacatgtgtagggaggcccctcacactgttatcgaacttgaacactacggtgtgcccttctcccggaccaaggagggcaagatctaccagcgagctttcggtggtcagtctctcaagtacggtaagggtggtcaggcctaccgatgtgctgccgccgccgaccgaactggtcacgccattctccacaccttgtacggtcaatctctccgacataataccaacttcttcatcgagtactttgctctcgaccttctcatgcaggatggcgagtgtgttggtgtgcttgctattaacatggaggacggtaccctacacagattccgaagccacaagactgtcttggctacaggtggttacggccgagcgtatttctcctgtacttctgcccacacctgttccggtgacggtaacgcgatggccgtgagggctggtttgcctttgcaagatttggagtttgttcagttccaccctactggtatttacggcgcaggttgtcttatcactgagggttctcgaggtgagggtggttacctcgtcaactctgagggtgagcgattcatggagcgatacgcccccaccgccaaggaccttgcttctcgagatgtcgtctcccgatccatgaccctcgaaatccgagaaggtcgaggtgtcggccccgagaaggaccacatcttcctccaactcagtcacttgcctgccgaagtcttgcacgaacgattgcctggtatctctgagaccgctgctatctttgccggtgtcgatgttaccaaggagcctatcccagttttgcctactgtccattataacatgggcggtattcccactaaatacaccggcgaagtcctcaccatcgatgagcaaggcaacgacaaggtcgttcccggtctttatgccgccggcgaagccgcctgtgtctctgtccacggtgctaaccgactcggtgccaactccttgctcgacattgtcgtctttggccgtgcttgcgcaaaccacattaaagaaactcttgcccccaacactcctcataagcctatgaaccccgagcttggcaaggagtctattgaggatcttgacaagattaggaatgctagcggtcctttgcctacttcccagatcaggttgaacatgcagaagacaatgcagaccgacgccgccgtcttccgaactcaacaatctttggacgagggtgttgctaagatgagggaagtctacaagtcttacgaccaggtcggtatcaaggacaggagtatgatctggaactccgacctcattgagaccctcgagcttaggaacattatgcagaacgccatgcagactgtcgtttcagctgctgctaggaaggagtctcgaggtgcccacgcccgagaggactaccccgagcgtaacgacgaggagtggatgaagcacaccctttccttccagcatgatcccaactcccccgacgtcgagctcaaataccgaggcgttattgccaacactcttgacgaggctgagtgcaagcccgttcctcctttcaagcgaacttattaa

SEQ ID NO: 33200 - protein, 637 aa, Cryptococcus neoformans var. neoformans B-3501A
MLALSRTRALARPLRNNFARNYVVASQTARATEAPNFGQKKGYPIIDHEFDAVVVGAGGAGLRAAFGLAEGGLKTACITKLFPTRSHTVAAQGGVNAALGNMTEDDWRWHMYDTVKGSDWLGDQDAIHYMCREAPHTVIELEHYGVPFSRTKEGKIYQRAFGGQSLKYGKGGQAYRCAAAADRTGHAILHTLYGQSLRHNTNFFIEYFALDLLMQDGECVGVLAINMEDGTLHRFRSHKTVLATGGYGRAYFSCTSAHTCSGDGNAMAVRAGLPLQDLEFVQFHPTGIYGAGCLITEGSRGEGGYLVNSEGERFMERYAPTAKDLASRDVVSRSMTLEIREGRGVGPEKDHIFLQLSHLPAEVLHERLPGISETAAIFAGVDVTKEPIPVLPTVHYNMGGIPTKYTGEVLTIDEQGNDKVVPGLYAAGEAACVSVHGANRLGANSLLDIVVFGRACANHIKETLAPNTPHKPMNPELGKESIEDLDKIRNASGPLPTSQIRLNMQKTMQTDAAVFRTQQSLDEGVAKMREVYKSYDQVGIKDRSMIWNSDLIETLELRNIMQNAMQTVVSAAARKESRGAHAREDYPERNDEEWMKHTLSFQHDPNSPDVELKYRGVIANTLDEAECKPVPPFKRTY

SEQ ID NO: 33201 - DNA, 1980 bp, Tribolium castaneum
  CDS (1)..(1980)
atgagtggccttttaaagatacaaacgatttttccgaaacatattttgacgaatgtcgcaaagaacccgaaggttctggcgcaagggttgcacatcggcgtcgacaagaaaaatgccaaggttagcagtgacgccgtctcgaaggtgtaccccattgtggaccacacgtacgacgctgtggtcgtgggggccgggggcgccggcttgcgggcggcgttcgggctcgtggccgagggcttcaagaccgcggtggtgaccaaactgttccccaccaggagccacacggtggcggcccaagggggcatcaacgcggcgctaggtaatatggaggaggacaactggcagtggcacatgtacgacacggtcaagggctccgattggttgggggaccaggacgccattcactacatgacgcgggaagcccccaaggcggtcatcgaactcgaaaattacggaatgccgttctcgcgcacttccgaggggaaaatctatcagagggcttttggggggcagagtcttaagtttgggaaaggggggcaggcccatagatgttgttgcgtggctgatagaaccgggcacagcctgcttcatacgctctatggacagtcattgcgctacgattgcaattattttatcgaatattttgcgttggatttgattatggaggacggggaatgccgaggagtcattgctttgtgtcttgaagacggcacaattcaccggatccgggccaaaaacaccgttttggctaccggtggctacggccgtgctttcttctcgtgcacttcggcccacacatgcaccggtgatggtacggcaatggtcgccagagccggcctaccctcgcaagacctcgaattcatccagttccacccgactggcatttacggtgctgggtgtctcataaccgagggctgtcggggcgaaggcggctacctgatcaactcgcaaggcgaacgcttcatggagcgctacgcccccgtcgccaaagacttagccagtcgtgacgtcgtctcccgaagcatgacgatcgaaatcagggaaggccgcggctgtggccccgaaaaagaccacgtctacttacagttacatcacttaccggccgagcagttgcacacacgcttgccgggcatttccgaaactgccatgatttttgccggcgtggacgtcaccagggaaccaatcccagtgctaccaaccgtccactacaacatggggggaatccccaccaattacaagggacaggttttaacaaatgtgaacaaccaggataaggtggttaaggggttgtatgcgtgtggcgaggcggcgtcgtcttcggtccacggtgccaaccgtcttggggcaaattccctgctcgatttggttgtttttggacgtgcttgcgccaaaacaatcgccgaggagcacaaaccgggcgagaaaatcggcgatattcgggaaaatgccggggaggcgtccgtggccaacctggactggtgtcgctacgccaagggggcgattccgacggcgactttgcgcctccagatgcagaagacaatgcaaacgcatgcggctgttttccgtaccgaggaaacactgcaagaggggtgcaagctgatggaagggttgtactcaaatctcaaggatttgcaagtgaccgatagcagtttgatctggaattcggacctggtggagacgctcgagctgcagaatttgatgctgaacgcgtgccagaccatcgtggcggccgagaacaggaaggagtcaaggggggcgcacgcccgcgaggactacaagttgaggatagatgagtatgattatagtaagccggttgaggggcagcagaagaagccgcttgagcagcattggcgtaaacatactttgactactattgatgaaaaaacaggcaaagttagtattagatatcggccggtgattgatgatactttgaacaaaaatgaatgttccactgttccgccagcaattcgatcttattaa

SEQ ID NO: 33202 - protein, 659 aa, Tribolium castaneum
MSGLLKIQTIFPKHILTNVAKNPKVLAQGLHIGVDKKNAKVSSDAVSKVYPIVDHTYDAVVVGAGGAGLRAAFGLVAEGFKTAVVTKLFPTRSHTVAAQGGINAALGNMEEDNWQWHMYDTVKGSDWLGDQDAIHYMTREAPKAVIELENYGMPFSRTSEGKIYQRAFGGQSLKFGKGGQAHRCCCVADRTGHSLLHTLYGQSLRYDCNYFIEYFALDLIMEDGECRGVIALCLEDGTIHRIRAKNTVLATGGYGRAFFSCTSAHTCTGDGTAMVARAGLPSQDLEFIQFHPTGIYGAGCLITEGCRGEGGYLINSQGERFMERYAPVAKDLASRDVVSRSMTIEIREGRGCGPEKDHVYLQLHHLPAEQLHTRLPGISETAMIFAGVDVTREPIPVLPTVHYNMGGIPTNYKGQVLTNVNNQDKVVKGLYACGEAASSSVHGANRLGANSLLDLVVFGRACAKTIAEEHKPGEKIGDIRENAGEASVANLDWCRYAKGAIPTATLRLQMQKTMQTHAAVFRTEETLQEGCKLMEGLYSNLKDLQVTDSSLIWNSDLVETLELQNLMLNACQTIVAAENRKESRGAHAREDYKLRIDEYDYSKPVEGQQKKPLEQHWRKHTLTTIDEKTGKVSIRYRPVIDDTLNKNECSTVPPAIRSY

SEQ ID NO: 33203 - DNA, 2577 bp, Tribolium castaneum
  CDS (1)..(2577)
atggactttaagactgttattccatcccccgatgcaatcactctcaatgaaataaatgtctgcttaatcagccaatttaaagctgttcttggtgtgaagacatactggcacaagttttttattatcgaaacttttggcttaacgcgcaatgtggtgctaaaaactctcctagaacacgtaaaacccttggaatttattcccctgttttacacgcaagaaggcaaaggggcgtatttttttgcaagaatttgtggcccagttatcgaaaaattttgtagggacaaactgacagtacccaacccttttggctctaggaagcctttcaaattaaaaatagtccttaaatacaccaccacttatcaggtgacggtagacttgtactgcagaaatgtcctgcaagttttacaaaaacgcctcaaatcgcgcgttttgtgtttgaataatttcgtggacgatccggatttgaacgattttcttctgttatcggaaccaaagctcctagctttcgttctaaacctagctaaagtcttaaaacccacagctattaagttgtgtaacaatgaaatcaagtctctggacgcactcaaaatcgtggatcttgcggagttaaagcatttgtcaaattttgatattactgagttgtggttggaaggaaaccctctgtgtgacttgtatgacgagcacagttatgtggaacagatggttaagtactgtcccaaaatcgaaaaacttgatagtgaagttccagtgtttgaccacttttacgactgtttagtgatcggtgctggcggggccggccttcgggccgcttacggcttaacagccaaaggttttaacaccgccgttgtgacaaaaattttcccgactcgctcccacaccgtctcggcccaaggcggcataaacgcagccctaggcaattatgagcccgacaagtggtactggcattttttcgacacggtcaagggctccgactggctcggagaccaagacgccattcactacatgaccaaaaatgccccaagtgcaattctagaattggaaaacgtgggaatgcccttttcgcgattcaaggacggcagaatttatcagagggctttcgggggccagtctttggaatgcgggaaagggggccaggcccataggacgtgtgcggccgctgacagtacgggccagttcatgctgcacacgttgtatggacaagcggtcaagtataattgtaaatttttcgtcgaatatttcgccttggatttgataatggatgacgagcggtgttgtggggcgatcacttgggatttgagcagtgggactttccaccggttttttgcaagaaatactgttatagcgacaggggggtacgaaagggcgtacttttcctgcacaactgcgcacacttccaccggggacgggacagccatggtgtcccgagcggggctgcccttgcaggacctggagttcgtccagttccatcccacaggaatttacggtgttggggtgcttgtgaccgagggcgcaaggggcgaaggtggctacataaccaacagcaaaggggagcgtttcatggagcgatacgcccctcatgccaaggatttagcctccagagacgtagtctccagaagttgcgccatggaaatcctggaaggtcgaggagtaggtcccgaaaaagaccacgtccatttggaactaatgcacttgccgcatgaattaatcagaaaacaattaccgggaatttcaaacttagtcgccggttttgttggccgcgatgtcacaaaagaaccgattccaattgtacctacagttcactataacatgggtgggatccctacgaattataagggtcaagtcatcacccaatcgccggaaaaatgcgagcagttggtcacaggactttacgcgtgcggcgaatgtgcttgcgtttcagtccacggagcgaacagacttggcgctaattcgttactcgaaactgttatttttggacgtgctgttgcccatgacattggcgagtgtaacaaaccgggtgacgacatcccacaagctgaagattggatgggtgcaagcgctatcgataatttagaaaaactgaaacggcaaaatggcaatcgtaccgtcggcgatttgcgtctagagttacaaaaaacgatgcaaaaattcgccggagtgtttcgcgatcaaaagttactggaggaaggttgtttgaaagtcgccgaattatataaggaaatagataacataaaagttaacgacgactcaatgatctggaattcagatcttctcgaagctttggaattacaaaatttgtttattaatgccattcaaacgatacgtgccatggagatgaggaaggaatcgcggggcgcgcacgcgagggacgattataaggtaagaatagacgagtacgattacgcaaaaccggtcgaagggcagtcgaaaaagtcgtttgagcagcactggcggaagcatacgttaagctggttggaaattgagaccggaaaagtttgtttcacgttccgtcccgtgaacgacaagacgctagacgaggacgagtgcccccacgtgcctccgataatcagggcgtactga

SEQ ID NO: 33204 - protein, 858 aa, Tribolium castaneum
MDFKTVIPSPDAITLNEINVCLISQFKAVLGVKTYWHKFFIIETFGLTRNVVLKTLLEHVKPLEFIPLFYTQEGKGAYFFARICGPVIEKFCRDKLTVPNPFGSRKPFKLKIVLKYTTTYQVTVDLYCRNVLQVLQKRLKSRVLCLNNFVDDPDLNDFLLLSEPKLLAFVLNLAKVLKPTAIKLCNNEIKSLDALKIVDLAELKHLSNFDITELWLEGNPLCDLYDEHSYVEQMVKYCPKIEKLDSEVPVFDHFYDCLVIGAGGAGLRAAYGLTAKGFNTAVVTKIFPTRSHTVSAQGGINAALGNYEPDKWYWHFFDTVKGSDWLGDQDAIHYMTKNAPSAILELENVGMPFSRFKDGRIYQRAFGGQSLECGKGGQAHRTCAAADSTGQFMLHTLYGQAVKYNCKFFVEYFALDLIMDDERCCGAITWDLSSGTFHRFFARNTVIATGGYERAYFSCTTAHTSTGDGTAMVSRAGLPLQDLEFVQFHPTGIYGVGVLVTEGARGEGGYITNSKGERFMERYAPHAKDLASRDVVSRSCAMEILEGRGVGPEKDHVHLELMHLPHELIRKQLPGISNLVAGFVGRDVTKEPIPIVPTVHYNMGGIPTNYKGQVITQSPEKCEQLVTGLYACGECACVSVHGANRLGANSLLETVIFGRAVAHDIGECNKPGDDIPQAEDWMGASAIDNLEKLKRQNGNRTVGDLRLELQKTMQKFAGVFRDQKLLEEGCLKVAELYKEIDNIKVNDDSMIWNSDLLEALELQNLFINAIQTIRAMEMRKESRGAHARDDYKVRIDEYDYAKPVEGQSKKSFEQHWRKHTLSWLEIETGKVCFTFRPVNDKTLDEDECPHVPPIIRAY

SEQ ID NO: 33205 - DNA, 1668 bp, Prochlorococcus marinus str. MIT 9515
  CDS (1)..(1668): transl_table=11
atgttaaggcaaccattttcgcaagaagcaatatctattgataagtgggacgtgatcgttattggtgcaggagcagcgggtttaatgacttgtttggaattgccagaaaatttaaatgttcttcttttaaatagaaatacaagtaaaagatcttcgagcagatgggcccaaggagggattgcatcagtagtaagacctgaagattcttttgctcttcatgtagaagataccttaaaagctggagatgatttgtgtgataaatctgcagttgaaatgcttgttagtgaagctcccggctgcgttgataggttgcaaaatttaggtatgatttttgatcagagctctgatcaattggcaacaactttagaagctgcccactcttgtagaagagttttacatgttaaagatcgaacaggtagagcacttgtagaggtattagaagatcatatcgaaaacaaagagaatattttgcattgtagaggtgtgagagtaacagaattgcttattgaaaaccaagtatgtactggagttcaagtattagatggatctaatttatattggattacttctaaagctgttgttttagctacgggcggaggcggacacttatttaccaatactacaaatcctgcccaatcttcaggagaaggaattgctctctcatggaaagctggagctgcaattgaggatttagaatttatacaatttcatcctacagctttaaagttttatggctctccttgctttttaatatctgaagcccttcgaggagagggcgcagttcttgttgataagaatggcgaaagcccagtaaggcatttacaaaatggcgatttggcaacaagagaccaagttagtagagcaattatgaatagtatgcaagaaaatgatattgatcatgttggcctagatttaagatttattgatccaaaaaaaattgtagaaagatttcctacaatcattagtagatgtcaagattatggagttaatcctttgacggaggtcattcctgttgcgccggcggctcattattggatgggaggcgttcatactgatttggatgcatcttctacagtcaaaggcttatatgccgtaggagaagtagcctctacaggcgtgcatggtgcaaacagactagctagtaattcgctgatggaatgccttgtattcgcacgaaaattgtcttcaattgagttgaattctcctttcaacttgagaaggctagatagacataataaggaaatttatatggatagtccaaaggaggattttatctcaagtatttcagagaaaattaatagtttaagaaaatcatgctggtctcatttaggggtctcccgcaataaaaaaagtatgatcgaactattaaaaattcttcaagaagagaaagatgaaatacaaaaaaatccgttgcttgagtgtcttaagaaaatagaaattgatcagaaattgaaattaagtgaaccaaataggcgagctcttaatctattgcttgatttgaataatagacaaattacgacattattattattaaaagcttgtctttttcgagaggaaagtcgaggtgggcattatagggacgattatccttctaaagaaaaaatttgggaatgtcatactaggcagcaattaaatcacaaaataattaaaaggtttattaaaaattag

SEQ ID NO: 33206 - protein, 555 aa, Prochlorococcus marinus str. MIT 9515
MLRQPFSQEAISIDKWDVIVIGAGAAGLMTCLELPENLNVLLLNRNTSKRSSSRWAQGGIASVVRPEDSFALHVEDTLKAGDDLCDKSAVEMLVSEAPGCVDRLQNLGMIFDQSSDQLATTLEAAHSCRRVLHVKDRTGRALVEVLEDHIENKENILHCRGVRVTELLIENQVCTGVQVLDGSNLYWITSKAVVLATGGGGHLFTNTTNPAQSSGEGIALSWKAGAAIEDLEFIQFHPTALKFYGSPCFLISEALRGEGAVLVDKNGESPVRHLQNGDLATRDQVSRAIMNSMQENDIDHVGLDLRFIDPKKIVERFPTIISRCQDYGVNPLTEVIPVAPAAHYWMGGVHTDLDASSTVKGLYAVGEVASTGVHGANRLASNSLMECLVFARKLSSIELNSPFNLRRLDRHNKEIYMDSPKEDFISSISEKINSLRKSCWSHLGVSRNKKSMIELLKILQEEKDEIQKNPLLECLKKIEIDQKLKLSEPNRRALNLLLDLNNRQITTLLLLKACLFREESRGGHYRDDYPSKEKIWECHTRQQLNHKIIKRFIKN

SEQ ID NO: 33207 - DNA, 1671 bp, Prochlorococcus marinus str. MIT 9303
  CDS (1)..(1671): transl_table=11
atgagtctctctaacccatccacgcccattcctaacggtccctgggatgtcgtggtgatcggcgcaggggcagcagggctgatgacctgccttgagctgcctgctcacctgaaggttcttttgctgaaccgcaacaccagccgccactcctccagccgctgggcacaaggtggcatcgccgcagtaacaagacctaaagacagcgccgagagtcatgcagaagacactctcaaagcaggcgcaggactctgtgatgctgatgctgtcagaaaacttgtagaagaagctccccactgcgttcaacgtctccagaagcttgggatggcctttgaccgcgaaggtgatgcgctagccaccaccttggaggcagcccatagccatcgaagagtgctgcatgtgcaggaccaaacgggccgcgccttggttgaagcgctgcaagagcaagtggaacggcgccccaacctcttgcaccggcgaggggtacgcgccacccagctttggattgagcacaatcgctgctacggagtacaagttctcgacggaacgcagctccattggctttcggccagagccgtagtcctggcaactggtggcggtggccatctgttcgcaaacaccaccaatccggctcaggcctgcggagaaggcttagcccttgcctggcaagcaggcgccacgatcgaggatcttgaattcgtgcagtttcatcccacagctctgaaactggaaggagctccatgctttctgatttcagaagcagtcagaggcgaaggtgccgtactggttgatgcccaggggcaaagtcctgtaaaggaattgagcgctggtgatcttgctcctcgcgaccaagtaagccggtccctcatccaaaccatgcatcaccaaggggtccagcatcttggcctagatctcacacccatcccttcagggcaggccgaggtccgtttccccaccatcctggaacgctgtcgggaattaggtttagatccactcaaccaaccgatcccggtagccccagcagctcactactggatgggaggaatcgccaccaaccttcaagccgcaaccaatcttccagggctctatgcgattggggaagtcgcctgcaccggagtgcatggagccaaccgactcgctggcaactcactgatggaatgcatggtatttgcaagacaaatggccacaatcgaactgggctctttgcctcgtctgggtgttcatcaacgagattcttcccccgagccttgctgtcagcaactccatggaactgaaagtgccgagtctctaactcgcgccatcgcagatcttcgagagctttgctggcgaaaggcgggtgtagatcgctcagcaaagggaatgaaacaaagcctcgcgagcatccgtaaggatctacagcacattggtgaacagcctttgctcaagctggtaagccatcagcccaaagaaatttgccatcgcctcgatgacacggccagaagggacctcaacttgctactggacctcaaccatcgccagttgaccagctccttactgctggaagcctgtttgttccgccgcgaaagtcgcggcggacatttcagaactgatgcccctgcagcaatgcctcagtggaaacgccactcacgccaaaaacgaggagaagacctctccacgcggccagtgaggtcctaa

SEQ ID NO: 33208 - protein, 556 aa, Prochlorococcus marinus str. MIT 9303
MSLSNPSTPIPNGPWDVVVIGAGAAGLMTCLELPAHLKVLLLNRNTSRHSSSRWAQGGIAAVTRPKDSAESHAEDTLKAGAGLCDADAVRKLVEEAPHCVQRLQKLGMAFDREGDALATTLEAAHSHRRVLHVQDQTGRALVEALQEQVERRPNLLHRRGVRATQLWIEHNRCYGVQVLDGTQLHWLSARAVVLATGGGGHLFANTTNPAQACGEGLALAWQAGATIEDLEFVQFHPTALKLEGAPCFLISEAVRGEGAVLVDAQGQSPVKELSAGDLAPRDQVSRSLIQTMHHQGVQHLGLDLTPIPSGQAEVRFPTILERCRELGLDPLNQPIPVAPAAHYWMGGIATNLQAATNLPGLYAIGEVACTGVHGANRLAGNSLMECMVFARQMATIELGSLPRLGVHQRDSSPEPCCQQLHGTESAESLTRAIADLRELCWRKAGVDRSAKGMKQSLASIRKDLQHIGEQPLLKLVSHQPKEICHRLDDTARRDLNLLLDLNHRQLTSSLLLEACLFRRESRGGHFRTDAPAAMPQWKRHSRQKRGEDLSTRPVRS

SEQ ID NO: 33209 - DNA, 1599 bp, Clostridium thermocellum ATCC 27405
  CDS (1)..(1599): transl_table=11
ttggatgagaacagatatttggtggattttgacacagatgagctgcctacggagtttcatgatgttattataataggcagcggaatagcaggagtttacactgcgcttgaaatacctgaaaaatacgatgttgtcatactcacaaaggaaaccattgaaataagcaactcggttcttgcccagggaggaatagccgtttcccttgacaaaggtgattctccggagttgcattttaaggatacaatttatgccggagcaggcctgtgtgacgaggaaagtgtgtgggttttggttaacgaggctgcggcaaatattgaaactttgtgccaatttggagtcaatttcgacagaaaaagcaatgacgagcttgccctctcgagggaaggggctcacagcaaaaacaggattatacatgccggggatacaacaggcaaggaagtttgcgacaagctcatatcggtggtgagaacgaaacagaacgttaaaataaaggaaagagttgccgcgatagatttaattaccgaagacaatgtgtgcaaaggcatactggcctatcatgaggatagttcttcctatgtgttttacagagcaaatgttgtggtgtgtgcaacaggaggatacgggcagttgtactccaacacaacaaatcccgaagtggcaacgggggacggggccggtcttgcctacagggccggtgcggagctcatggatttggagtttgtgcaatttcatcccacggttcttttccaccccgagaacaaaagctttcttatttccgaggcggtaagaggggaaggtgccatattaagaaatattaaaggcgaaaggtttatgcccaaatatcatgagcttaaagagctagcacccagagacatagtttcaagatccatttttcatgaaatgcaaaaaacaaattcaaaccatgtatatctggatatcacattcaaaggaaaggaatatttggaaaacaggtttcccaatatttacaacacatgcttaagttacggcatagatatgtccaaagattatattcccgttgctccggctgaacattactgtatgggcggaataaggacggatgtgtttggacgcacaaatataaaaggtttctatgcctgcggtgaagttgcatgcaatggaatacacggtgcaaacaggctggccagcaattcgcttcttgaaggtttggtgtttggccgcaagataggcaaagaggtggaaaatgtaattgaaggcagccgaaaagagcctcaaaaagtcagtatcaaagtgaagtcaaacagggtggaaaaaaatatagatgtaaataaaattaaaaaggatatccaggaaacaatgacccgctatgttggaatagtaagagacagggaaggacttgaaaaagcaaagaaaaaggttgatgattactacgaattgataaaagatatgaaaaataacagcgtaagcgactttgaaatgcaaaacattgttcttgtttcaaagcttgtcattgaagcggctttggaacgcaaagaaagccgtggggcgcattttagactggattatcaaaaaactgacgatgaaaattggaaaagaaacataataaaaagaaaaatttag

SEQ ID NO: 33210 - protein, 532 aa, Clostridium thermocellum ATCC 27405
MDENRYLVDFDTDELPTEFHDVIIIGSGIAGVYTALEIPEKYDVVILTKETIEISNSVLAQGGIAVSLDKGDSPELHFKDTIYAGAGLCDEESVWVLVNEAAANIETLCQFGVNFDRKSNDELALSREGAHSKNRIIHAGDTTGKEVCDKLISVVRTKQNVKIKERVAAIDLITEDNVCKGILAYHEDSSSYVFYRANVVVCATGGYGQLYSNTTNPEVATGDGAGLAYRAGAELMDLEFVQFHPTVLFHPENKSFLISEAVRGEGAILRNIKGERFMPKYHELKELAPRDIVSRSIFHEMQKTNSNHVYLDITFKGKEYLENRFPNIYNTCLSYGIDMSKDYIPVAPAEHYCMGGIRTDVFGRTNIKGFYACGEVACNGIHGANRLASNSLLEGLVFGRKIGKEVENVIEGSRKEPQKVSIKVKSNRVEKNIDVNKIKKDIQETMTRYVGIVRDREGLEKAKKKVDDYYELIKDMKNNSVSDFEMQNIVLVSKLVIEAALERKESRGAHFRLDYQKTDDENWKRNIIKRKI

SEQ ID NO: 33211 - DNA, 1605 bp, Herminiimonas arsenicoxydans
  CDS (1)..(1605): transl_table=11
atgaaatttgatgtcgcaattgtcggcagcggactggctggcctcaccgttgcccttcacctggcagaaacccgcaaagtcactatcatttccaaacgcaccctgctcgacggcgccagcaattgggcccaaggcgggattgctgcggtactggattccaacgacagcgtagacgaacatgtggccgatacgctggtcgccggtggcggtctgtgtgatgaacccgccacccgcttcattctcgaacacgggcgcgaagcgattgaatggctgatcgagcaaggcgtacccttcacgcaggatgccagcgccgaactcggcttccatctgacgcgtgaaggcggccacggccagcgtcgcatcatccacgccgccgatgccaccggacacgcggtgcaggtgacgctggaagaaaaagtgcgcaaccatccgaacattaccctgatggaacatcattacgcgatcgacgtcatcacgtccgatgtgctggagaaaaaaaagggcgtcccgcgctgcctcgggctgtatgtgcaggatgtcaaaaccggcaaggtcatcacgatcgcagccgaacacaccgtactggctaccggcggtgccggcaaagtgtatctgtacaccaccaatcccgacaccgcgaccggcgacggcattgcgatggcgtggcgcgccggctgccggattgcgaatatggaattcatccagtttcacccgacctgcctgtatcacccctacgcaaaatccttcctgattacggaagcggtgcgcggcgaaggcggtgtcctgaaattacctgtgactgccgggaaaaatcgcggcaagcgtttcatgccctcgcacgatgagcgcgccgaactggcgccacgtgatatcgtggcgcgcgccatcgatgccgaaatgaaaaagcgcggtatcgattatgtcgatcttgatatcagcgacaagtcgccggaattcctcaaggaacacttccctaccatcatggcgcgctgcctggaactcggcatcgacatgaccaagggaccgattcctgtcgtaccggctgcgcattacacttgcggcggcgtgattaccgacctgtccggccgcaccgacctgcccggcctgtatgcggtcggcgaagccacttgcaccggcctgcacggcgccaatcgcctggccagcaattccctgctcgaatgcctggtgctgggacgctccacagcccagtacattgatacgcaacccaagcaaaaagccgtcagcctgccagcctgggatgaaagccgcgtcacggatgccgatgaagaagtcatcatcgccaacaactgggacgagctgcgtcgcttcatgtggaattacgtcggcatcgtgcgcactaccaaacgactggaacgtgcacaacataggatccgcttgctgaaggaagaaatcgacgagtattacgccaacttccgcatcacgccggatttgctggaattgcgcaacctggttgaagtcgcctcgctgatcgtcaacagtgcattgtcgcgccgtgaaagccgcggcctgcattacagccgggattatccggatactctgcccaaggctttgcctagcgtgttgtcgccggatcgcaggcattga

SEQ ID NO: 33212 - protein, 534 aa, Herminiimonas arsenicoxydans
MKFDVAIVGSGLAGLTVALHLAETRKVTIISKRTLLDGASNWAQGGIAAVLDSNDSVDEHVADTLVAGGGLCDEPATRFILEHGREAIEWLIEQGVPFTQDASAELGFHLTREGGHGQRRIIHAADATGHAVQVTLEEKVRNHPNITLMEHHYAIDVITSDVLEKKKGVPRCLGLYVQDVKTGKVITIAAEHTVLATGGAGKVYLYTTNPDTATGDGIAMAWRAGCRIANMEFIQFHPTCLYHPYAKSFLITEAVRGEGGVLKLPVTAGKNRGKRFMPSHDERAELAPRDIVARAIDAEMKKRGIDYVDLDISDKSPEFLKEHFPTIMARCLELGIDMTKGPIPVVPAAHYTCGGVITDLSGRTDLPGLYAVGEATCTGLHGANRLASNSLLECLVLGRSTAQYIDTQPKQKAVSLPAWDESRVTDADEEVIIANNWDELRRFMWNYVGIVRTTKRLERAQHRIRLLKEEIDEYYANFRITPDLLELRNLVEVASLIVNSALSRRESRGLHYSRDYPDTLPKALPSVLSPDRRH

SEQ ID NO: 33213 - DNA, 1599 bp, Leptospira interrogans serovar Copenhageni str. Fiocruz L1-130
  CDS (1)..(1599): transl_table=11
atgccccgtatcaaaacggactttttagtcctagggagcggaattacaggtctttttgcggccttaaaactcgctccctacggctccgtaatcataatcacaaaaaaatcggactatgaatccaacacaaactatgcacaaggtgggatcgcttccgtatttgcagaaggagataagctagaagatcacgtaagagatactctagaagcaggagcctggctttgtgatcctgcggcggttcaagttttagtagaagaagggcctcctctagtaaaagaacttttaaattatggagttccgttcaatttagaaccttccggtaaatttgatctttccagagaaggggggcacggtaaaaaccgaattgtacacgcacacgacagaaccggaagagaaatcgaaaaaactcttttaaatgtagtaaaacaaaatataaacattcagatattagaatatcatactttagtagatttaattactccacatcatttaaaacaaaaaggtttaatctgttacggggcctacgtcctttccaaccatacgggagaagtatttcctattttagcaagagaaacaattcttgccaccggcggagcaggccaggtttattctcataccactaatcctaaaatcgctaccggagacggtgtagcttctgcatacagagcgggtgccctgattaaaaacatggaattctatcaatttcatcctactgcactttatcacaaagacggaaattcttttttgatctcagaagcggtacgtggtaaaggagcaattttactcaatcgagacggcgaaacgtttatgaaacgttatcatcctatgggcgatctggctcctagggacgtggtagcaagagccatagattcagagatgaaaaaaagaggagaagctcatgtttggttggacgttacacaccttccttcttctcaaattagagaatcctttccttccatttatgaaaaatgtaaggaactgggtattgatatcaccacggatcggattccggtcgttccggttgcacattttttatgtggaggtgtagcttcggatttagaaggtagaactacgatttctaatctttcagcagctggagaaaccgcttgtactggtgttcacggtggcaaccgtcttgcttctaacagtcttttagaatgtctcgtattctctaatcggatcgctggaagaatttcaaaagaaagtccgaaatttaccaaagcacacgatgaaattccttcttggaacaaagagggtatggtcaacacagaagagtgggttttgatttctcacgatctaaacgaaattaaaaatacgatgagcaattacgttggaatcgtccgctctaatctcagattagaaagggcaaaacgtagaatggatctgatctacgacgaagtaaaggactactacaatcgaaccgtgatcacaaatccactcatcgaattgcgtaacttggtaattgtaggagaactgatcattcgttctgcacttgccagaaaagaaagtagaggtcttcatttttccacagattatcctgaaaatagaaatccttctagaatagatacggaaatcagaaacgaaaaagttcttctttga

SEQ ID NO: 33214 - protein, 532 aa, Leptospira interrogans serovar Copenhageni str. Fiocruz L1-130
MPRIKTDFLVLGSGITGLFAALKLAPYGSVIIITKKSDYESNTNYAQGGIASVFAEGDKLEDHVRDTLEAGAWLCDPAAVQVLVEEGPPLVKELLNYGVPFNLEPSGKFDLSREGGHGKNRIVHAHDRTGREIEKTLLNVVKQNINIQILEYHTLVDLITPHHLKQKGLICYGAYVLSNHTGEVFPILARETILATGGAGQVYSHTTNPKIATGDGVASAYRAGALIKNMEFYQFHPTALYHKDGNSFLISEAVRGKGAILLNRDGETFMKRYHPMGDLAPRDVVARAIDSEMKKRGEAHVWLDVTHLPSSQIRESFPSIYEKCKELGIDITTDRIPVVPVAHFLCGGVASDLEGRTTISNLSAAGETACTGVHGGNRLASNSLLECLVFSNRIAGRISKESPKFTKAHDEIPSWNKEGMVNTEEWVLISHDLNEIKNTMSNYVGIVRSNLRLERAKRRMDLIYDEVKDYYNRTVITNPLIELRNLVIVGELIIRSALARKESRGLHFSTDYPENRNPSRIDTEIRNEKVLL

SEQ ID NO: 33215 - DNA, 1587 bp, Desulfovibrio vulgaris subsp. vulgaris str. Hildenborough
  CDS (1)..(1587): transl_table=11
atgagcaccaacaggtttcacacgcccgtcctcgtcatcggcagcggtatcgccggttgcaccgccgccctcaccctcgccgacctcggggccgaggtcaccctcatctccaccggcacacgcctcgacaccggcaattcgccgcttgcgcagggaggcatcgtcttcaaggcagtggacggcgacccgcgtcttctcgaacacgacatcatggtcgccgggcaccatatcaactaccgccgcgctgtacgacagatcagcgtgaaaggcccgcaggcggtacagggcattctcgtcgacaggctcggcattcccttcgcacgaagcggaaaaccccagtgcgaatgggacctcaccatggaaggtgggcacgcggcgcaccgcatcatgcactgtgccgactacacgggccgcgccatcatggatggcctcatcgccgccatcgaagaggcacccaacgtacgagtcctctccggaaggacggcggtcgacctgctcaccacgcaccatcaggcccgcagcaacgaattccgctatcagatcaacaaccagtgcgtcggagcctatgtcctcaacgagcatacccgctcggtggagaccatgctggcggacgtcactgtccttgccaccggcggggtcggtcaggtctacctgcacacgaccaacagccccaatgccatcgggtcgggcgtatccatggcacagcgcgcgggggtacgcatcgagaacgccgagttcgtgcagttccaccccacggccctcttccaccgctcgcaacgtcgcttcctcatctcggaggcgttgcgaggcgaaggcgggagactggtcaacgggtctggcgaagccttcatgcacaactacgaccgccggggcgacctcgcgccccgcgacatcgtggcgcgtgccatcgtcgaagagatgctccgtaccggtgaggactgcgtctaccttgatgcatcgcaggtcgaacaggaccttgaacagcggttcccgaccatctaccagcactgtcaggacatgggcatcgacatcagggtcgaacccattcccgtcgttcccgccgcccattacttctgcggcggcatcctcaccgacctcacagggcgcaccaccctggacaggctctatgccgtgggggaatgcgcctgtaccggggtgcacggggcgaaccgcctcgccagcacgtcacttctggaagccctgctatggggccgcacggcgggtgaagacatcgcacgcaggctgcacaggcaacgccccatgagcaaacggcttcatgccgccatccccgactggcagccgcttggtgacgaacgcaacgacgacccggcactggtcgcacaggattgggccaccatcaggcacaccatgtggaactatgtcggcatcacccgcagcacgggcagacttcgccgtgcgttcgaagacctgcgcgacctgtcgcgccacctgcacgacttctacaagcgcacgacgctctcaaaaccgctggtcgacctcttccatggctgccacacggcctataccataacgcaggcggcactccgcaaccgccagagtctgggctgccattatcgcatagattga

SEQ ID NO: 33216 - protein, 528 aa, Desulfovibrio vulgaris subsp. vulgaris str. Hildenborough
MSTNRFHTPVLVIGSGIAGCTAALTLADLGAEVTLISTGTRLDTGNSPLAQGGIVFKAVDGDPRLLEHDIMVAGHHINYRRAVRQISVKGPQAVQGILVDRLGIPFARSGKPQCEWDLTMEGGHAAHRIMHCADYTGRAIMDGLIAAIEEAPNVRVLSGRTAVDLLTTHHQARSNEFRYQINNQCVGAYVLNEHTRSVETMLADVTVLATGGVGQVYLHTTNSPNAIGSGVSMAQRAGVRIENAEFVQFHPTALFHRSQRRFLISEALRGEGGRLVNGSGEAFMHNYDRRGDLAPRDIVARAIVEEMLRTGEDCVYLDASQVEQDLEQRFPTIYQHCQDMGIDIRVEPIPVVPAAHYFCGGILTDLTGRTTLDRLYAVGECACTGVHGANRLASTSLLEALLWGRTAGEDIARRLHRQRPMSKRLHAAIPDWQPLGDERNDDPALVAQDWATIRHTMWNYVGITRSTGRLRRAFEDLRDLSRHLHDFYKRTTLSKPLVDLFHGCHTAYTITQAALRNRQSLGCHYRID

SEQ ID NO: 33217 - DNA, 1530 bp, Bacillus anthracis str. Sterne
  CDS (1)..(1530): transl_table=11
atgccaagtgcagatgtcttaattattggaagtggtattgcggcacttcgtgttgcaaaagagatttgccacgaaaagaatgtgattattatcacaaaggaaacgaatcgtaataataatacacatttagcgcaaggtggaattgccgcagcggttgctacatatgacaatccgaatgatcattttgaagatacgttagtagcaggatgtcgttataacaatgaagatgtggtccgttatttagttgaagaaggaccgaaagaaatgaagaatctcattgaaaatggaatgcaatttgatggagatgaaacgggtccccatcttggaaaagaaggcgcacatcgaaagcgtcgcattttacatgcaggtggcgatgcaacaggaaagaatttattagagcatttcattcaagaagtagttccgcatgttacggtagtggaacaggaaatggtgcttgattttattatagaaagtgaaaaatgtgttggagttttaacgcgaaatagtgaagggaagttgaagcgttatgatgcagattatactgtgctagcctcaggcggggttggtggtttatacgcctttacttctaatgataaaacaattacgggtgatggacttgcgatggtataccgcgcaggcggcgagctcgtagatttagagtttgtacaatttcatccaacaatgttatatgcaggcgggcaatgctgtggcctcgtttctgaagctgtccgtggtgaaggagctgtccttataaatggaaaagggcagcgttttatgatggatatacacgatgattacgatctcgcaccgcgtgatgtggtggcaagagcgattcatgaacagcttttgtcgggtgaaaaagtgtatttgaatattgggtctatccaaaatttccaagaacgttttccaactgtatcagcattgtgtaaaaagaatggtgttgatattactaaaaaacgcattccggtcgtacccggagctcattttcatatgggcggtgtgaaaacaaacattgatggggagacgtctattccaaatttatatgcagtcggtgaagtagcttgtaatggtgttcatggagcaaatagattagcgagtaattcgttattagaaggtcttgtgtttggaaaaagaataggacaacatattttaacgaaagcgacaaaagacaaattgaacgacttcgctgagaaggaaaagaaatttatcgttctaaatcatttgccgacgaaagaagaaatacaagaatgcatgatgaaatatgttgggattgtacgaacagagcaaagtttatcttatgcgaagagatggcttagtaaatacggtgttcgaaatatgatattacaacatgatgctcttacaaatgaagagataacgcttattaatatgttaacagtttgtgagcttatcgttgtatcagctttacaaagagaagagagtattggtggtcattatcgaagtgattatccacatagaaatagcgcacaaaaagagatcattcgagtgaaaagaaaactacaacttgtgtaa

SEQ ID NO: 33218 - protein, 509 aa, Bacillus anthracis str. Sterne
MPSADVLIIGSGIAALRVAKEICHEKNVIIITKETNRNNNTHLAQGGIAAAVATYDNPNDHFEDTLVAGCRYNNEDVVRYLVEEGPKEMKNLIENGMQFDGDETGPHLGKEGAHRKRRILHAGGDATGKNLLEHFIQEVVPHVTVVEQEMVLDFIIESEKCVGVLTRNSEGKLKRYDADYTVLASGGVGGLYAFTSNDKTITGDGLAMVYRAGGELVDLEFVQFHPTMLYAGGQCCGLVSEAVRGEGAVLINGKGQRFMMDIHDDYDLAPRDVVARAIHEQLLSGEKVYLNIGSIQNFQERFPTVSALCKKNGVDITKKRIPVVPGAHFHMGGVKTNIDGETSIPNLYAVGEVACNGVHGANRLASNSLLEGLVFGKRIGQHILTKATKDKLNDFAEKEKKFIVLNHLPTKEEIQECMMKYVGIVRTEQSLSYAKRWLSKYGVRNMILQHDALTNEEITLINMLTVCELIVVSALQREESIGGHYRSDYPHRNSAQKEIIRVKRKLQLV

SEQ ID NO: 33219 - DNA, 1635 bp, Acinetobacter sp. ADP1
  CDS (1)..(1635): transl_table=11
atgtctaatttagattccactcatcattttgatgtggtgattgttggaagtggtggggctggtctgagtcttgctctttcattgccaagccattataaaatcgcaatattagcgaaatcttcccttactgaagcaagcaccttttatgcacaaggcggtgttgcggcggttttggataaaaccgactctattcaacagcatattgatgacacgatgattgcaggtgctcatttatgtgagcttgatgcggtcaaacaaaccgtggaaggtggtcgtccatcagtcaattttttattgaagcatggtgtggaattcacacttgatgaagatgatcaattacatttgacacgtgagggtggtcactcgcagcgacgtattattcatgcagcagatgctacgggaaaagcaatttcaaccacattggtgcaacgtgccaaagaagcatccaatctgacgatttttgaaaattttattgcaattgatatcattacattacataaactaggccatatccagcaagataatcgtgctgtcggtttatatgtactggatgaacaaaatgaaaaagtccacaccttcttagctccttttatcgctctggcttgtggcggcgcgatgaaagcttatctatatacatcaaatcctgatattgcaacaggtgatggtattgcgatggcctatcgcgcgggttgccgagtcgcaaatatggaatttaatcaattccatccgacttgtttatatcacccacaagcgcgttcatttttaattaccgaagccatgcgtggcgaaggtgcttacttgcgcttgccagatggcgaaagatttatgctccgctttgatgagcgggcagaacttgcaccacgcgacattgtagctcgtgcaattgattatgaaatcaaacgcctaggcatccgccatgtgtggctagatattacacacaaatctgctgaatttattcagcaacattttccaaccctgtatacacggctattagaacttggcatcgatatcaccaaagatatgatccctgttgtacctgccgcgcattatacctgtggtggggtcgtggtaaatgcacagagccagacggatatcgaaggcttatatgctatcggtgaaacatcctacactggtttgcatggtgcaaatcgtatggccagtaactctttattggaatgctttgtttatggcttgagtgccgcagaagatattcaacaaaagtttgagcaggattttaatttacctaacattccagagtgggatgactctcaagttacagatgccgatgaagatgtagtcattctacaaaactgggatgaattacgttccaccatgtggaactatgtggggatcgtacgcaccaccaagcgtctacaacgcgcattacatcgtatcgaaatgctaaagcgtgaaatcaccgaatactatcaggattaccgtgtcagcaagaacttgattgaattgcgcaatttagtacttgtatcagagatgattgtacgttgtgccatgcaacgcaaggagtcccgcggtttgcactatacactggactatcctgagcttgaacaacaactcaaaaagacggttttaacaccgccaaattttgaagttaaacaaattccggtcaatacgctttaa

SEQ ID NO: 33220 - protein, 544 aa, Acinetobacter sp. ADP1
MSNLDSTHHFDVVIVGSGGAGLSLALSLPSHYKIAILAKSSLTEASTFYAQGGVAAVLDKTDSIQQHIDDTMIAGAHLCELDAVKQTVEGGRPSVNFLLKHGVEFTLDEDDQLHLTREGGHSQRRIIHAADATGKAISTTLVQRAKEASNLTIFENFIAIDIITLHKLGHIQQDNRAVGLYVLDEQNEKVHTFLAPFIALACGGAMKAYLYTSNPDIATGDGIAMAYRAGCRVANMEFNQFHPTCLYHPQARSFLITEAMRGEGAYLRLPDGERFMLRFDERAELAPRDIVARAIDYEIKRLGIRHVWLDITHKSAEFIQQHFPTLYTRLLELGIDITKDMIPVVPAAHYTCGGVVVNAQSQTDIEGLYAIGETSYTGLHGANRMASNSLLECFVYGLSAAEDIQQKFEQDFNLPNIPEWDDSQVTDADEDVVILQNWDELRSTMWNYVGIVRTTKRLQRALHRIEMLKREITEYYQDYRVSKNLIELRNLVLVSEMIVRCAMQRKESRGLHYTLDYPELEQQLKKTVLTPPNFEVKQIPVNTL

SEQ ID NO: 33221 - DNA, 1602 bp, Erwinia carotovora subsp. atroseptica SCRI1043
  CDS (1)..(1602): transl_table=11
atgcaaacgactactgaacacgtctgtgatgttttaatcattggcagcggtgctgccgggctttcactagcgctgcgtctggcttcacaggccaacgtgacagtactaagcaaaggcccgctcaatgaaggcgcgacgttttatgctcaaggcggcatcgcagccgttttcgatgaaaccgacacgattgactcccatatcgacgataccctgatcgccggcgatggcctgtgtgaacgcgaagccgttgaattcatcgccagtaatgccaaacactgcgtgcaatggctgatcgaacaaggcgtgctattcgataccgaaaccagcaccagcggcgaagaacgctatcatctgacgcgcgaaggtggacatagccaccgtcggattctgcacgcagcggatgcaaccggaaaagaagtggaaaatacgctggtacagaaagcgttatcccatccgaatattcggattatggaacgctgcaacgccgtcgatttaattacctccaataagctgggtttgcccggtactcgccgtattattggtgcttatatatggaaccgtgaacaggaacgcgtagagtcctgccgggcgaaaacggtagttttagcgaccggtggcgcatccaaagtttatcaatacaccacgaaccccgatatttcgtctggcgacggtatcgcgatggcgtggcgtgcgggttgtcgcgtagcaaatctggaattcaatcaatttcacccgacctgcctgttccatccgcaggcgcgaaacttcctgctaacggaagcgctacgcggtgaaggcgcgtacctcaaacgccctgacggctcacgctttatgcccgatttcgatgccagaggcgaactggcaccgcgcgatgtagtcgccagagcgattgaccatgagatgaaacggcttggtgcagactgtatgtatctggatatcagccacaagcccgaagcgttcatcaaacagcacttccctaccatccatgaaaagctacagtctctcggcattgatctgacgcgcgaagcgataccgatcgtcccagcagcgcactatacctgtggcggcgtgatggtcgaccagcatgggcgtaccgaccttgacggactgtatgcgattggcgaagtcagctataccggattacatggtgcaaaccgtatggcgtccaattcactgctggaatgtctggtttacggctggtcagccgcagaagatattttgcagcgcttaccgcaaatcaaagcagtgaaaaagttgccggattgggatgaaagtcaggtcgataattccgacgaacaggtggtgatccagcataactggcacgaactacgtctgtttatgtgggattacgttgggatcgtgcggaccaccaagcggctggaacgagcgcaacgccgtatccatctgcttcagcaggaaatcgatgagtactacgcccacttccgtatttccaacaacttgctagaactgcgtaatctggtgcaggtcgccgagctcatcgtccgctgtgcgctagaaagaaaagaaagccgtggactgcattataacttggattatcccgaacaattcgaggcaccgacaccaactattctggtgccatag

SEQ ID NO: 33222 - protein, 533 aa, Erwinia carotovora subsp. atroseptica SCRI1043
MQTTTEHVCDVLIIGSGAAGLSLALRLASQANVTVLSKGPLNEGATFYAQGGIAAVFDETDTIDSHIDDTLIAGDGLCEREAVEFIASNAKHCVQWLIEQGVLFDTETSTSGEERYHLTREGGHSHRRILHAADATGKEVENTLVQKALSHPNIRIMERCNAVDLITSNKLGLPGTRRIIGAYIWNREQERVESCRAKTVVLATGGASKVYQYTTNPDISSGDGIAMAWRAGCRVANLEFNQFHPTCLFHPQARNFLLTEALRGEGAYLKRPDGSRFMPDFDARGELAPRDVVARAIDHEMKRLGADCMYLDISHKPEAFIKQHFPTIHEKLQSLGIDLTREAIPIVPAAHYTCGGVMVDQHGRTDLDGLYAIGEVSYTGLHGANRMASNSLLECLVYGWSAAEDILQRLPQIKAVKKLPDWDESQVDNSDEQVVIQHNWHELRLFMWDYVGIVRTTKRLERAQRRIHLLQQEIDEYYAHFRISNNLLELRNLVQVAELIVRCALERKESRGLHYNLDYPEQFEAPTPTILVP

SEQ ID NO: 33223 - DNA, 1590 bp, Desulfotalea psychrophila LSv54
  CDS (1)..(1590): transl_table=11
atggatgttgattttcttgttataggaagtggcattgctggtttatcctttgcccttaaggcatcaaagttgggcaaggtggcggttgttaccaagaaggcaaaagtcgataccgcgaccaaccttgctcagggtggtgttgctgctgtactgagtgccacggatacctttgatgagcacattcacgatacccatgcatctggggatggcctctgtgataaagctgttgttaagatggttattgaaaacggtccagctcgcgtagaagagcttattgaactcggggtagattttataagaaatgagaagggcgagcttgatcttggtcgagaaggtggccactctcagcgtcgggttgcccatgcttacgaccttacaggccatgaaattgaacgggccctggtggagaatgttgccaacaaccccaatatagaggtttttgaaaaccataccttggtggatctgttgatggtgcctggtcaagatgccagtggccaaaaagagtgtgtaggcgcctatattctcgacgaagaacgtaatgttatcccctaccgggccaaagtgactgtgctctgcactggtggtaccggcaaggtctatctctatacaaccaatcctgatattgctaccggtgatggtattgccgccgcttaccgggccggggccagtgttgccaatctcgaatttgttcagtttcaccccacctgtctcttccatcatctggagaagaacttcctgatctctgaagctgttcgcggtgagggtgcccgtctggtcaacgctgagggtgagggctttatggagaagtatgagcccgatatgaaggatctggctaccagagacaaggtggctcgggccattgatcaggagatgaaggagaatggctgtgactgtgtttacctggatattacccataagagtcgtgagtttctgcaaaaacgtttccccgctatctttggcaaatgcctgagccttggcattgatatgtcaaaggattttattcctgtcgtccccgcagcccattatttttgtggtggggtgatcaccgatcaagagggtggcacttccgttgaaggtctctatgcccttggcgaaacttcctgtaccggcctgcatggaggcaataggttggccagtaactctctcttggaggcagttgtttatgctgagaacctttttcagtactgccaggaaaattggcaggaaattgagaaaagacctcttcctgaggttgatgcctgggcagcaggaacggcccgtgagttaagggaagagatacttattaatcataattgggatattatccgccgcattatgtggaattatgtgggtattgttcgcaagaagagccgtcttgagcttgcccagaagcgcattgctgaaattcgtcaggagattgaagagcactataagaactattttgtaacccctaatatgattgagctgcgtaatataagtttgttggcagcacttattattcgggctgctttgaagaggaaagaatcgcgtggtctgcattatatgcttgattatcctaccaagaaagatgcggagaaaagaggacataccttttcaaagtacctgcgatag

SEQ ID NO: 33224 - protein, 529 aa, Desulfotalea psychrophila LSv54
MDVDFLVIGSGIAGLSFALKASKLGKVAVVTKKAKVDTATNLAQGGVAAVLSATDTFDEHIHDTHASGDGLCDKAVVKMVIENGPARVEELIELGVDFIRNEKGELDLGREGGHSQRRVAHAYDLTGHEIERALVENVANNPNIEVFENHTLVDLLMVPGQDASGQKECVGAYILDEERNVIPYRAKVTVLCTGGTGKVYLYTTNPDIATGDGIAAAYRAGASVANLEFVQFHPTCLFHHLEKNFLISEAVRGEGARLVNAEGEGFMEKYEPDMKDLATRDKVARAIDQEMKENGCDCVYLDITHKSREFLQKRFPAIFGKCLSLGIDMSKDFIPVVPAAHYFCGGVITDQEGGTSVEGLYALGETSCTGLHGGNRLASNSLLEAVVYAENLFQYCQENWQEIEKRPLPEVDAWAAGTARELREEILINHNWDIIRRIMWNYVGIVRKKSRLELAQKRIAEIRQEIEEHYKNYFVTPNMIELRNISLLAALIIRAALKRKESRGLHYMLDYPTKKDAEKRGHTFSKYLR

SEQ ID NO: 33225 - DNA, 1650 bp, Legionella pneumophila subsp. pneumophila str. Philadelphia 1
  CDS (1)..(1650): transl_table=11
atgagtgatcagctatcacaacaaggccaatcgttcgaattcgatgttctcgtcattggaacaggattagccgggttacattattgtttgcagcttttagctatccaacccaagctaaacattgcgttaatcagcaaagcagagtccattgagtgtaacagccgctatgctcaaggggggattgctgccgccatttcgccagaagattccctggagtctcatatatctgatactgtattggctggagatgggctatgctacttacctgcggtggaatttattatccgccaagggccagatattataaaacaacttgatcagtataaagttcaatttaaaagagaaaatgatggtcgctttcatcttgccaaagaaggtggccattcacaccggcgcatttttaattgtggcgatcaaacgggattaacgctaacacaaactctcaatcatttggcaaggcaacatcaacagatccagttttttgaacatcacgtggcggttaacctgattactcaatatcatcctcaccggacagataaccagggtgaggtattaggagcctatatactcgactgccaacataatcgcattcacacctttcttgcgaaatgcgtcattttagcgaccggtggcgccggcaaaacctacaggtatacgactaaccctatggttgcaacaggtgatggtgtcgcgatggcatacagggctggagctcgtgtgggcaacatggaattttatcaatttcaccctaccctcttgcaccatcacaccattaacaattttttaatttccgaagcagttcgaggcgaaggcgctttgcttaaaaaccctgaaacaggcgagcgttttatgaaacgatacgcacctgaccaacttgagttagcaaccagagacgtcgtggcaagagctatttttagtgaaattgagcaaggccaggctggatatgtgcatctggatatttctcatcaaagcaaatctttcctgaaaaaacgtttcccacaaatttattccacattgttatctattggaattgatatgagccaggatttgattcctgtcgttccggccgctcattaccaatgcggtggggttcttactgatgtggacggccgcaccgatctggcacgattatacgctatcggtgaagtggcttttactgggctgcatggtgcgaacaggctggcaagcaattccctacttgaagccttggtcatgggttccaatgcggcacgctgtacacttaaagacattgctactccgttaaaacttatcgatcatatccccagctggagctctccaggagaagtcaatgcaagaagagccagtcaaatcaacgcccaatggagaggcttaagaggggaaatgacttcctatgcaggcattgtgcgcactgaagcaggccttgaagatctactacaattaatattgaagcgtaagaaaattattgaagagtattactggaaacattgcattaccagagattttattgagttaaggaacattatccttaatgcagaattgattgttagagcagccctttccagaagggaatcacgtggtggacattttcgtgaagatttccccaataaaaatttcaaagcccaggaaagtattgcaaaactgggacaggcagacagttcattaggatag

SEQ ID NO: 33226 - protein, 549 aa, Legionella pneumophila subsp. pneumophila str. Philadelphia 1
MSDQLSQQGQSFEFDVLVIGTGLAGLHYCLQLLAIQPKLNIALISKAESIECNSRYAQGGIAAAISPEDSLESHISDTVLAGDGLCYLPAVEFIIRQGPDIIKQLDQYKVQFKRENDGRFHLAKEGGHSHRRIFNCGDQTGLTLTQTLNHLARQHQQIQFFEHHVAVNLITQYHPHRTDNQGEVLGAYILDCQHNRIHTFLAKCVILATGGAGKTYRYTTNPMVATGDGVAMAYRAGARVGNMEFYQFHPTLLHHHTINNFLISEAVRGEGALLKNPETGERFMKRYAPDQLELATRDVVARAIFSEIEQGQAGYVHLDISHQSKSFLKKRFPQIYSTLLSIGIDMSQDLIPVVPAAHYQCGGVLTDVDGRTDLARLYAIGEVAFTGLHGANRLASNSLLEALVMGSNAARCTLKDIATPLKLIDHIPSWSSPGEVNARRASQINAQWRGLRGEMTSYAGIVRTEAGLEDLLQLILKRKKIIEEYYWKHCITRDFIELRNIILNAELIVRAALSRRESRGGHFREDFPNKNFKAQESIAKLGQADSSLG

SEQ ID NO: 33227 - DNA, 1608 bp, Burkholderia mallei ATCC 23344
  CDS (1)..(1608): transl_table=11
atgcagatgaatttcgatgtggcgatcgtgggcagcggcctcgccggcctgtcggtcgcgctcaatctcgcgcaaacacggcgcgtcgcgctgatcgcgaagcgctcgatgatggaaggcgcgagcgactacgctcagggcggcatcgccgcggtgctcgattcggcggacagcgtcgagaatcacgtgaacgacacgctgatcgcgggcggcggcctgtgtgacgaagcggcgacgcgctacatcgtcgagcacggccgcgaggcaatcgagtggctgatctcgcagggcgtgccgttcacgaaggacgatgccgccgaactcggctttcatctgacgcgcgaaggcggccacagccatcgccgcatcatccacgcggccgacgcgacaggccatgcggtgctcgcgacgctgtccgagcgcgcccgcgcgcacccgaacatcacgttcttcgaagatcaccacgcgatcgacctgatcacctccgatcgcctcgggctgcctggcctgccgggccggcactgcgtcggcctctatgcgctcgacgtgcagacgggccggacgatgacgatcgaggcgccgcacacggtgctcgcgacgggcggcgcgggcaaggtctatctgtacacgacgaacccggacaccgcgacgggcgacggcatcgcgatggcgtggcgcgcgggcgcccgcgtcgcgaacatggagttcatccagttccatccgacctgcctcttccatccgtatgcgaaatcgttcctgatttccgaggcggtgcgcggcgaaggcggcctcctcaagctgccggacggcacccgcttcatgcccgcgcacgatccgcgcgcggagctcgcgccgcgcgacatcgtcgcgcgcgcgatcgatttcgagatcaagaagcgcgggatcgactgcgtgtatctcgacatcagccaccagcccgaagcgttcctgcgcgagcatttcccgacgatctacgcacgctgcgccgagttcggcatcgacatctcgaaacagccgatcccggtcgtgccggccgcgcattacacgtgcggcggcgtcgtcaccgatctggccgggcgcaccgacatcacgggcctgtacgcggtcggcgaaacgtcgtacacgggcctgcacggcgcgaaccgcctcgcgagcaattcgctgctcgaatgcctcgtgatcggccgcgcgacggccgaggccatcgaagccgccggctatgattcggcgacgcacggcccgttgcccgcgtgggacgagagccgcgtggcggacgccgacgaggaagtggtcgtcgcgcacaactgggacgaactgcgccgcctgatgtggaactacgtcggcatcgtgcgcaccgacaagcgcctcgagcgcgcgcaacatcggctcaagctgctgcgcgacgagattcacgagtactacgcgaacttccgcgtgagtcgcgacctactcgagctgcgcaatctcgtcgatgtcgcgtcgctgatcgtcgacagcgcgcgggctcgccacgaaagccgcgggctgcactacagccgcgactggccgcacgcgttgccgaaggcgctgccgaccgtgctcacgccgccgcggcgcgcatcgaagtaa

SEQ ID NO: 33228 - protein, 535 aa, Burkholderia mallei ATCC 23344
MQMNFDVAIVGSGLAGLSVALNLAQTRRVALIAKRSMMEGASDYAQGGIAAVLDSADSVENHVNDTLIAGGGLCDEAATRYIVEHGREAIEWLISQGVPFTKDDAAELGFHLTREGGHSHRRIIHAADATGHAVLATLSERARAHPNITFFEDHHAIDLITSDRLGLPGLPGRHCVGLYALDVQTGRTMTIEAPHTVLATGGAGKVYLYTTNPDTATGDGIAMAWRAGARVANMEFIQFHPTCLFHPYAKSFLISEAVRGEGGLLKLPDGTRFMPAHDPRAELAPRDIVARAIDFEIKKRGIDCVYLDISHQPEAFLREHFPTIYARCAEFGIDISKQPIPVVPAAHYTCGGVVTDLAGRTDITGLYAVGETSYTGLHGANRLASNSLLECLVIGRATAEAIEAAGYDSATHGPLPAWDESRVADADEEVVVAHNWDELRRLMWNYVGIVRTDKRLERAQHRLKLLRDEIHEYYANFRVSRDLLELRNLVDVASLIVDSARARHESRGLHYSRDWPHALPKALPTVLTPPRRASK

SEQ ID NO: 33229 - DNA, 1647 bp, Burkholderia pseudomallei K96243
  CDS (1)..(1647): transl_table=11
atggcgggaaagataagacaaaacgcgcaagaaacggagatgcagatgaatttcgatgtggcgatcgtgggcagcggcctcgccggcctgtcggtcgcgctcaatctcgcgcaaacacggcgcgtcgcgctgatcgcgaagcgctcgatgatggaaggcgcgagcgactacgctcagggcggcatcgccgcggtgctcgattcggcggacagcgtcgagaatcacgtgaacgacacgctgatcgcgggcggcggcctgtgtgacgaagcggcgacgcgctacatcgtcgagcacggccgcgaggcaatcgagtggctgatctcgcagggcgtgccgttcacgaaggacgatgccgccgaactcggctttcatctgacgcgcgaaggcggccacagccatcgccgcatcatccacgcggccgacgcgacaggccatgcggtgctcgcgacgctgtccgagcgcgcccgcgcgcacccgaacatcacgttcttcgaagatcaccacgcgatcgacctgatcacctccgatcgcctcgggctgcctggcctgccgggccggcactgcgtcggcctctatgcgctcgacgtgcagacgggccggacgatgacgatcgaggcgccgcacacggtgctcgcgacgggcggcgcgggcaaggtctatctgtacacgacgaacccggacaccgcgacgggcgacggcatcgcgatggcgtggcgcgcgggcgcccgcgtcgcgaacatggagttcatccagttccatccgacctgcctcttccatccgtatgcgaaatcgttcctgatttccgaggcggtgcgcggcgaaggcggcctcctcaagctgccggacggcacccgcttcatgcccgcgcacgatccgcgcgcggagctcgcgccgcgcgacatcgtcgcgcgcgcgatcgatttcgagatcaagaagcgcgggatcgactgcgtgtatctcgacatcagccaccagcccgaagcgttcctgcgcgagcatttcccgacgatctacgcacgctgcgccgagttcggcatcgacatctcgaaacagccgatcccggtcgtgccggccgcgcattacacgtgcggcggcgtcgtcaccgatctggccgggcgcaccgacatcacgggcctgtacgcggtcggcgaaacgtcgtacacgggcctgcacggcgcgaaccgcctcgcgagcaattcgctgctcgaatgcctcgtgatcggccgcgcgacggccgaggccatcgaagccgccggctatgattcggcgacgcacggcccgttgcccgcgtgggacgagagccgcgtggcggacgccgacgaggaagtggtcgtcgcgcacaactgggacgaactgcgccgcctgatgtggaactacgtcggcatcgtgcgcaccgacaagcgcctcgagcgcgcgcaacatcggctcaagctgctgcgcgacgagattcacgagtactacgcgaacttccgcgtgagtcgcgacctgctcgagctgcgcaatctcgtcgatgtcgcgtcgctgatcgtcgacagcgcgcgggctcgccacgaaagccgcgggctgcactacagccgcgactggccgcacgcgttgccgaaggcgctgccgaccgtgctcacgccgccgcggcgcgcatcgcagtaa

SEQ ID NO: 33230 - protein, 548 aa, Burkholderia pseudomallei K96243
MAGKIRQNAQETEMQMNFDVAIVGSGLAGLSVALNLAQTRRVALIAKRSMMEGASDYAQGGIAAVLDSADSVENHVNDTLIAGGGLCDEAATRYIVEHGREAIEWLISQGVPFTKDDAAELGFHLTREGGHSHRRIIHAADATGHAVLATLSERARAHPNITFFEDHHAIDLITSDRLGLPGLPGRHCVGLYALDVQTGRTMTIEAPHTVLATGGAGKVYLYTTNPDTATGDGIAMAWRAGARVANMEFIQFHPTCLFHPYAKSFLISEAVRGEGGLLKLPDGTRFMPAHDPRAELAPRDIVARAIDFEIKKRGIDCVYLDISHQPEAFLREHFPTIYARCAEFGIDISKQPIPVVPAAHYTCGGVVTDLAGRTDITGLYAVGETSYTGLHGANRLASNSLLECLVIGRATAEAIEAAGYDSATHGPLPAWDESRVADADEEVVVAHNWDELRRLMWNYVGIVRTDKRLERAQHRLKLLRDEIHEYYANFRVSRDLLELRNLVDVASLIVDSARARHESRGLHYSRDWPHALPKALPTVLTPPRRASQ

SEQ ID NO: 33231 - DNA, 1602 bp, Methylococcus capsulatus str. Bath
  CDS (1)..(1602): transl_table=11
atggacaaggacatcacctacgacgcgctcatcatcggcagcggcgcttcgggtctcagcctggctctgaggctcgccgaccgggcccgggtcgctgtcctgtcgaaggtcgccctgagtgaaggcaacacccgctacgcccaaggcggcatttccgcggtcctggatgcccaggactcactcgaatcgcatattgaagacacgctggcggccggtgccggtctgtgcgattcggacatcgtgcgcctggtggtctcccaaggcaaggagtgcatcgactggctgctccagcacggggtcgccttcaccgaagtcgaaagcaccgacggcgcccatcatctgcatctgacccgggaaggcggacacacccaccggcgggtcgtgcatgccgccgacgccactggtcgggccgtggagtcatcgctggagcaacatgcccgggcccatcccagcatcgacctgttcgaataccacaacgtcatcgacctgatcacctcccgcaagctcggcctcgccggcccgcaacgcgtgctgggcgcctacgcgctggatacgagaacccaccgtacccgcacgttccgcgcgcgcgtcattgcgctggcgaccggtggtgccagcaaggtatatctttacaccagcaatcccgacgtttccaccggcgacggcatcgccttggcctggcgggccggtgcgcgagtggcgaacatggaattcattcaattccaccctacctgtctctatcatccccacgcccggtcgtttctgatttccgaggcggtgcgcggagaaggcggccgcttgctgttgcccgatggcagccccttcatgcagcggttcgatccgcgtggtgaactggctccccgtgacatcgtggcgcgcgccatcgaccatgaaatgaaacgcctcggcgccgattgtgtctacctcgacatcagccatcggccggccgatttcatcacgagccatttcccgacgattcatgcacgctgtctggaattggggatcgacatgacccgtgagcccatcccggtggtgcccgcagcccattacacgtgtggcggagtggtgaccgaccggctggcgcggacggacatcgatggcctttacgcagtcggcgaggtggcctgcaccggcctccacggcgccaaccgcatggccagcaattctctgctcgaatgcctggtcttcgccaagcaggccagcctggacatcctgcagcgtctgagcgagattcctgcccctccgccgctgccggactgggacgagtcgcaggtcacggactccgacgaagaagtcgtcgtgtcccacaactgggacgaaatccggcgcttcatgtgggactacgtcgggatcgtccggaccgacaaacgactgcagcgcgccctgcaccgggcggagctgctcaagcaggagatcgccgagtactacggcaacttccgcgtcaccagcgatctgctggagcttcggaacctgatcatcgtggccgaactcatcatccgttcggccctcctgcggaaggaaagccgtgggctgcatttcacgctggactatccggagcgggacgagacccgcccgccgcggaacaccatactccagccctaa

SEQ ID NO: 33232 - protein, 533 aa, Methylococcus capsulatus str. Bath
MDKDITYDALIIGSGASGLSLALRLADRARVAVLSKVALSEGNTRYAQGGISAVLDAQDSLESHIEDTLAAGAGLCDSDIVRLVVSQGKECIDWLLQHGVAFTEVESTDGAHHLHLTREGGHTHRRVVHAADATGRAVESSLEQHARAHPSIDLFEYHNVIDLITSRKLGLAGPQRVLGAYALDTRTHRTRTFRARVIALATGGASKVYLYTSNPDVSTGDGIALAWRAGARVANMEFIQFHPTCLYHPHARSFLISEAVRGEGGRLLLPDGSPFMQRFDPRGELAPRDIVARAIDHEMKRLGADCVYLDISHRPADFITSHFPTIHARCLELGIDMTREPIPVVPAAHYTCGGVVTDRLARTDIDGLYAVGEVACTGLHGANRMASNSLLECLVFAKQASLDILQRLSEIPAPPPLPDWDESQVTDSDEEVVVSHNWDEIRRFMWDYVGIVRTDKRLQRALHRAELLKQEIAEYYGNFRVTSDLLELRNLIIVAELIIRSALLRKESRGLHFTLDYPERDETRPPRNTILQP

SEQ ID NO: 33233 - DNA, 1584 bp, Azoarcus sp. EbN1
  CDS (1)..(1584): transl_table=11
ttgtcaatacaatacgacgtactcattctcggcagtggcgctgccggccaatcgctggcgctgcgccttgcggaccacctgcgcgttgcgctggtgaccaaacgttccatcgcggatagcgcgagttcctgggcccagggcggcattgcggcggtactcgacgccaccgacagcatcgaagctcatatacaggacaccttcacggcgggcgcaggcctttgcgacccggctgcgacccgctttgtcgtggaacacggcaaagctgcgatcgaatggctcatacgctggggcgttcccttcacccgggaagaccagtccgcgatcggataccacctgacgcgcgaaggcgggcactcccatcgccgcatcatccatgctgccgatgccaccggagccgccgtccaggccacgctcaccgaacgcgtctgcgcccatccgaacatccacatcctcgaaaaccatatcgcgatcgacctgatcctcggcgacaaggtcggacgcagtggcgaaggctgtctcggggcgtacgtgctcgacatcgccgacggacgcgtgatcacgatcgcggcgcgcagcacggtactcgcgaccggaggcgccggcaaggcctacctctacacgacgaatccggacgtcgccaccggcgacgggatcgcgatggcctggcgcgccggctgtcgcgtcgcgaacctcgagttcatccagtttcatccgacctgcctctaccatccccaagccaagtcgttcctgatttcggaggctgtccgcggcgaaggggggatcctgaggctccctgatggcacacgcttcatgccggagcacgaccctcgggcggagcttgccccgcgcgacgtcgtggcccgcgcaatcgacttcgagatgaagaaacgcggcctcgactgcgtctatctcgatatcagccacaagccggccgactggctgcgggaacatttcccgaatatccacgcgcgctgcctcgaactcggcatcgacatgacgcacgaaggcattcccgtcgtcccggcggcccattacacctgcggcggcgtcgtcacggacctcgccgctcgtaccgacgtcgccggcctctattgcgtgggcgaatcagcgtgcaccggcctgcacggcgcgaaccggctcgcgagcaactcgctgctcgaatgcctggtattcggggaagctgccgcgaaagacatccaggcgcgtccccgcgacccgatcgcggcactgcccgagtgggacgagagccgggtcaccgacgtcgatgaagaggtcgtgattgcccacaactgggcagaactgcggcgagcgatgtgggactacgtcggcatcgtcaggacaacgaagcgcctgcagcgcgctcagcaccggatccgcctgctgacgagcgagatcaatgagttctactcgaacttccgcgtgaccaacgatctcatcgaactgcgcaatctggtcgtcacttccgatctcatcgtgcgctgcgcgctcgagcgcaaggaaagccgcggcctgcacttctcgcgcgactatccggaaatgctcgacgaggctctcccgacgatcctgcagccccagaaaacctga

SEQ ID NO: 33234 - protein, 527 aa, Azoarcus sp. EbN1
MSIQYDVLILGSGAAGQSLALRLADHLRVALVTKRSIADSASSWAQGGIAAVLDATDSIEAHIQDTFTAGAGLCDPAATRFVVEHGKAAIEWLIRWGVPFTREDQSAIGYHLTREGGHSHRRIIHAADATGAAVQATLTERVCAHPNIHILENHIAIDLILGDKVGRSGEGCLGAYVLDIADGRVITIAARSTVLATGGAGKAYLYTTNPDVATGDGIAMAWRAGCRVANLEFIQFHPTCLYHPQAKSFLISEAVRGEGGILRLPDGTRFMPEHDPRAELAPRDVVARAIDFEMKKRGLDCVYLDISHKPADWLREHFPNIHARCLELGIDMTHEGIPVVPAAHYTCGGVVTDLAARTDVAGLYCVGESACTGLHGANRLASNSLLECLVFGEAAAKDIQARPRDPIAALPEWDESRVTDVDEEVVIAHNWAELRRAMWDYVGIVRTTKRLQRAQHRIRLLTSEINEFYSNFRVTNDLIELRNLVVTSDLIVRCALERKESRGLHFSRDYPEMLDEALPTILQPQKT

SEQ ID NO: 33235 - DNA, 1551 bp, Silicibacter pomeroyi DSS-3
  CDS (1)..(1551): transl_table=11
atgcaggacctgcgcaccgaccgcgtggtcatcatcggcgccgggctggccgcgatctatgcggcactgaaactggcgccgcacccggtgctgatgatctcacccgatccgctgggccatggcgccagctcggcctgggcgcagggcggtgtggccgcagcgatggaccctgccgacacgcccgaggcgcatgcgcgcgacaccctgcgcgcgggcgcgggaacggtgctgcaagaggtggccgactacgtcacccgggcggcgcgcgcgcatatcctcgacctgaccgatctgggcaccgccttcgaccggacccgggacggcggctatgtgatgtcgcgcgaggcggcgcattcggcggcccgcgtggtgcgggtcaagggcgatcaggccggggccgagatcatgcgcgccctgatcgcggaattgcggcagacccggtcggtccaggtcctcgaaggcgcccaggtcacgcgcctgctggtcgaggccgggcgggtcagcggcgtctgcctaacctctgccgcgcccgaggggtcggcccccgtcacgttgcgcgcgcctgccgttttgctggcggcaggcggggcggcggggctttatgcccagaccaccaatcccgcccgcatccgcggtcaggccttgggcatggccgcccgcgcgggtgcgcggatcgccgacggcgaattcgtgcagtttcacccaaccgccatcgcgaccggcgccgatcccgcgcctttggcgaccgaggcgcttcgcggcgaaggcgcgatcctgatcgaccggcacggccagcggttcatgcccgcgctgcatcccgacgctgaactggcaccgcgcgacgtggtggcccgtgccgtctatctgcagacacaggcgggcaatgcccccgcgctggatacccgcgcggccatcggcgcgcatctgcccaccctgtttcccgccgttgcccaggcctgcgccgaggcggggatcgacccgctctctgccccgatcccggtggcggcggcagcgcattaccatatggggggcgtggccgccgacctggatggaaagtgcagcctgccaggcctctgggtctgtggcgaggccgcctcgaccgggttgcatggcgccaaccggctggcctcgaacgggctcttggaggcgctggtctttgcccgcgcctgtgcccgcgacatcgcccggcaggtgcgccagacagtggcggcgcgggtggacatctcctttgctcccggcggcgatgcgccagatgcgcagacggttgccgaactgcgccggatcatgaccgatcatgtgggcgtggtccgcgatgtcgacgggctgcgccgcgccctgcgcgccatcgcacagatcgagggtgcgcatccaccctgcgacgcgcttgccaacatgaccgccaccgccacgatgattgccgccgccgcactgatgcggcaggaaagccgcggcgcccattaccgcaccgatttcccgcaggccgcgcccggccccggccagcgctcggacctgacgctggaacaggcgctgacgctgcgcaacacgctttga

SEQ ID NO: 33236 - protein, 516 aa, Silicibacter pomeroyi DSS-3
MQDLRTDRVVIIGAGLAAIYAALKLAPHPVLMISPDPLGHGASSAWAQGGVAAAMDPADTPEAHARDTLRAGAGTVLQEVADYVTRAARAHILDLTDLGTAFDRTRDGGYVMSREAAHSAARVVRVKGDQAGAEIMRALIAELRQTRSVQVLEGAQVTRLLVEAGRVSGVCLTSAAPEGSAPVTLRAPAVLLAAGGAAGLYAQTTNPARIRGQALGMAARAGARIADGEFVQFHPTAIATGADPAPLATEALRGEGAILIDRHGQRFMPALHPDAELAPRDVVARAVYLQTQAGNAPALDTRAAIGAHLPTLFPAVAQACAEAGIDPLSAPIPVAAAAHYHMGGVAADLDGKCSLPGLWVCGEAASTGLHGANRLASNGLLEALVFARACARDIARQVRQTVAARVDISFAPGGDAPDAQTVAELRRIMTDHVGVVRDVDGLRRALRAIAQIEGAHPPCDALANMTATATMIAAAALMRQESRGAHYRTDFPQAAPGPGQRSDLTLEQALTLRNTL

SEQ ID NO: 33237 - DNA, 1797 bp, Ehrlichia ruminantium str. Welgevonden
  CDS (1)..(1797): transl_table=11
atgtctagttctacgtacagtattatagaccatgagtatgatgttgtaataataggtgctgggggagctggcttgagggcaacttttgggatgacttctgttggcttgtctgttgcatgcatatctaaggtttttccaacgaggagtcatacagtagctgctcaaggtggtattagtgctgctctaggtaatgttactgaggatgactggagatggcatatgtttgatacagtcaaaggttctgactggcttggtgatcaagatgctattgaatatatgtgtaaaaatgcagcagaagctgttattgaacttgagcgttatggagtacctttctcacgtactagtgatggtaaaatatatcagcgtccttttggtggtatgactacagaatttggtaaaggtaaaccagcaattcgtacttgtgctgcatctgataaaacaggtcatgctatacttcatactctatatcagcaatctttaaagcacaatgctgaattttttgtggagtattttgctattgatttaattatgaatgaagttggtcagtgtcaaggtgtaattgcatggtcattatgtgatgggacgttacataggttccgttctcatgctgttgttcttgctacaggtgggtatggtaggatatatttttctgcaactagtgctcatacttgtactggtgatggtggaggaatggtatctcgtattaatttgcctttagaagatatggaatttgtacaatttcatccaacagggatatatggttctgggtgtttaatgaccgaaggatgtagaggagaaggtggttatttaattaattctgagggtgaaagatttatggagcgttatgctccaaaagctaaagatttagcatctcgtgatgttgtgagtagggccatgactttggaaataagagaaggtcgtggtgtaggacctaacaaggatcatgtatatttatctatatctcatttaggagcagaagttatacatgataaattaccaggtattagtgaaactgctcgtacttttgctggagtggatgttacgaaagaacctatacctgtattaccaactgttcattataatatgggtggtattcccacaaattattatggtcaagtgattacgttaacagatagtgaagaaaagatcgtacctgggctttttgcgataggagaggcagcatgtgtttctgtgcatggagcaaatcgtttgggttctaattcattacttgatttagttgtatttggtagagctgcagctattaaagcgaaggaattgataaagcctggtatgttacatgctcctataaacaaagctagtgaagaaaaaataattgctcgttttgatggaattaggttctctaaggggagtttacgtgttgcggaagtacgtggtaaaatgcagcatgttatgcaaaatcatgcagctgtttttcgtacagcagaagtgttagatgaaggaaaagtcaagattaaagatgtagctaagctaatgcctgagattgtagtgcaggataagagcatgatatggaatagtgatctggttgaagcattggaattgactaacatgatgccgcaagcagttgtaactatggaatgtgcagcaaaccgtcaggaaagtagaggagctcatgcacgagaagattttcctgagcgtgatgatgaaaattggatgaaacatactttagcttggtatgatgctgctaattgttctgtagaaattaagtataaggatgttgctaagacgactttaacaaatgatgttcaatattttcccccacagagaagagtatattag

SEQ ID NO: 33238 - protein, 598 aa, Ehrlichia ruminantium str. Welgevonden
MSSSTYSIIDHEYDVVIIGAGGAGLRATFGMTSVGLSVACISKVFPTRSHTVAAQGGISAALGNVTEDDWRWHMFDTVKGSDWLGDQDAIEYMCKNAAEAVIELERYGVPFSRTSDGKIYQRPFGGMTTEFGKGKPAIRTCAASDKTGHAILHTLYQQSLKHNAEFFVEYFAIDLIMNEVGQCQGVIAWSLCDGTLHRFRSHAVVLATGGYGRIYFSATSAHTCTGDGGGMVSRINLPLEDMEFVQFHPTGIYGSGCLMTEGCRGEGGYLINSEGERFMERYAPKAKDLASRDVVSRAMTLEIREGRGVGPNKDHVYLSISHLGAEVIHDKLPGISETARTFAGVDVTKEPIPVLPTVHYNMGGIPTNYYGQVITLTDSEEKIVPGLFAIGEAACVSVHGANRLGSNSLLDLVVFGRAAAIKAKELIKPGMLHAPINKASEEKIIARFDGIRFSKGSLRVAEVRGKMQHVMQNHAAVFRTAEVLDEGKVKIKDVAKLMPEIVVQDKSMIWNSDLVEALELTNMMPQAVVTMECAANRQESRGAHAREDFPERDDENWMKHTLAWYDAANCSVEIKYKDVAKTTLTNDVQYFPPQRRVY

SEQ ID NO: 33239 - DNA, 1572 bp, Bacteroides fragilis NCTC 9343
  CDS (1)..(1572): transl_table=11
atggttaaaaagttcgatttcctcgtaatcggttctggtatcgccggaatgagttttgccctaaaagtggcacataaaggaaaagttgcccttgtttgcaaaagcgggctggaagaagcaaacacttattttgcccaaggaggagtggcctcagtgaccaatctgctggtagacaattttgaaaaacatattgaagatacaatgattgccggtgactggatcagtgaccgtaccgctgtagaaaaagtcgtacgtgaagctcccgcacagatacaagaactgatcagttggggtgtaaacttcgataaaaacgaaaaaggagagttcgatcttcaccgggaaggaggtcattcggagtttcgtatcctgcaccataaagataataccggcgccgaaattcaggacagcctgattcgagccgtacaacaacatccgaatataacggttattgaaaatcattttgccatcgaaatcctgacacaacaccatttaggagtaaccgtcacccgtcagacaccgaacatcaaatgttatggagcctacatactcgatccgaaaacagggaaagtggatacttatctggccaaagtgacattaatggcaacaggtggagtaggggctgtctaccagactacaaccaacccgcttgtagcaaccggcgacggcattgccatggtatatcgggcaaaaggaaccgtaaaagatatggaattcgtacaattccacccgacagcgctttaccatccgggcgatcgtccttctttcctcattaccgaggcgatgaggggatacggtggtgtacttcgtaccatggacgggaaagagttcatgcagaaatatgatccccgtttgtctctggcaccgcgtgatatcgtagcgcgtgctatcgataatgaaatgaaaaaccgtggagacgaccacgtttacctcgacgtaactcataaagatccggaagagactaaaaaacacttccccaatatatatgagaagtgcctgagcctgggaatcgatattaccagagaatatatccctgtagcaccatcggctcattacctttgcggaggtattaaagtggatttgaatggccaatcttctatcgagcggctatacgctgccggcgaatgttcgtgtacaggtttgcatggtggcaaccggttggcttcaaactcactgatagaagcagtggtttatgcagatgctgctgccagacattgtttatcggttatcgaccaatatacttataacgaagaaattccggaatggaatgacgaaggtacccgctcaccggaagaaatggtacttattactcaaagcatgaaagaagtcaatcagatcatgagtacctatgtaggtatcgtccgcagcgatctccggttgaaacgtgcatgggatcgtctggatatcttatatgaagagaccgaaagccttttcaagcgtagtgtagcatctaaagaaatatgtgagctgcgtaatatgatcaatgtaggttatctgattatgcgtatggccatggagcgtaaagagagccgcggtcttcactacacggtcgattatccgcatgccggtaaatag

SEQ ID NO: 33240 - protein, 523 aa, Bacteroides fragilis NCTC 9343
MVKKFDFLVIGSGIAGMSFALKVAHKGKVALVCKSGLEEANTYFAQGGVASVTNLLVDNFEKHIEDTMIAGDWISDRTAVEKVVREAPAQIQELISWGVNFDKNEKGEFDLHREGGHSEFRILHHKDNTGAEIQDSLIRAVQQHPNITVIENHFAIEILTQHHLGVTVTRQTPNIKCYGAYILDPKTGKVDTYLAKVTLMATGGVGAVYQTTTNPLVATGDGIAMVYRAKGTVKDMEFVQFHPTALYHPGDRPSFLITEAMRGYGGVLRTMDGKEFMQKYDPRLSLAPRDIVARAIDNEMKNRGDDHVYLDVTHKDPEETKKHFPNIYEKCLSLGIDITREYIPVAPSAHYLCGGIKVDLNGQSSIERLYAAGECSCTGLHGGNRLASNSLIEAVVYADAAARHCLSVIDQYTYNEEIPEWNDEGTRSPEEMVLITQSMKEVNQIMSTYVGIVRSDLRLKRAWDRLDILYEETESLFKRSVASKEICELRNMINVGYLIMRMAMERKESRGLHYTVDYPHAGK

SEQ ID NO: 33241 - DNA, 1617 bp, Pseudomonas syringae pv. syringae B728a
  CDS (1)..(1617): transl_table=11
atgagtcaacattttcagcatgacgtactggtaatcggcagcggagctgccgggttgagcctggcactgaccctgcccgaccacctgcggattgcagtcctgagcaagggcgatctcgccaatggctcgacattctgggcgcagggcggtgttgcggcagtgctggatgacaccgacaccgtgcagtctcatgttgaggacacgctgaacgcaggcggcggcctttgccacgaagacgctgtgcgtttcactgtcgaacacagccgcgaggcgattcaatggctgatcgatcaaggcgtgcctttcactcgtggcgataacgcagacaccgacgaaagtggatttgaatttcacctgacgcgtgaaggcggccatagccatcggcggatcattcatgctgcagatgccacaggtgccgccatttttcgcaccctgctggaacaggccatcaagcgacccaacatcgaattgctcgagcagcgcgctgccatcgacctgatcaccgaacgccgtctcggcctggacggagagcgctgccttggtgcctatgtgctcaatcgccacagtggcgaagtggatacgtacagcgcgcgcttcaccatcctggcgtcgggcggcgccgccaaggtctacctgtacaccagcaaccctgacggagcctgcggcgacggcatcgccatggcctggcgttccggctgccgggtggcgaaccttgagttcaaccagtttcaccccacttgcctgtatcacccgcaagccaagagctttctgatcaccgaggcacttcgcggtgaaggggcctacctcaagctgcccaacggcgagcgcttcatgcaacgcttcgatgagcgggcagaactggccccgcgcgatatcgtggcccgcgcgatagaccatgagatgaagcgactgggcatcgactgtgtgtatctggacatcagccacaagccggaagccttcatcaagacgcactttccaaccgtctatgaacgctgcctggaattttccatcgacatcactcgcgagccgatcccagtggtccccgccgcgcattacacctgtggcggcgtgatggtggacagcaaggggcataccgacgtgccgggcctgtacgccatcggcgagaccagcttcacaggcctgcatggcgccaaccgcatggccagcaactcactgctggaatgcttcgtctatgcccgatcggccgccgcagacatcgagaaacaattggctgacgtgcagatgcccgccgaccttccggcctgggatgccagccaggtcactgactcggacgaggacgtgatcattgcgcacaactgggacgagctgaggcggttcatgtgggactacgtcggcattgtgcgcaccaacaaacgcctgcagcgcgctcagcaccgcgtgcgcttgctgctggatgagattgacgagttttacagcaactacaaggtcagccgcgacctgatcgagttgcgcaatctggcgcaggtggcggaactgatgatccgctcggccatgcagcgcaaggaaagccgcggtctgcactacacgctggactatcccgatatgttgccggaggcgctggacactattctggtgccgcccacctatgcctgctga

SEQ ID NO: 33242 - protein, 538 aa, Pseudomonas syringae pv. syringae B728a
MSQHFQHDVLVIGSGAAGLSLALTLPDHLRIAVLSKGDLANGSTFWAQGGVAAVLDDTDTVQSHVEDTLNAGGGLCHEDAVRFTVEHSREAIQWLIDQGVPFTRGDNADTDESGFEFHLTREGGHSHRRIIHAADATGAAIFRTLLEQAIKRPNIELLEQRAAIDLITERRLGLDGERCLGAYVLNRHSGEVDTYSARFTILASGGAAKVYLYTSNPDGACGDGIAMAWRSGCRVANLEFNQFHPTCLYHPQAKSFLITEALRGEGAYLKLPNGERFMQRFDERAELAPRDIVARAIDHEMKRLGIDCVYLDISHKPEAFIKTHFPTVYERCLEFSIDITREPIPVVPAAHYTCGGVMVDSKGHTDVPGLYAIGETSFTGLHGANRMASNSLLECFVYARSAAADIEKQLADVQMPADLPAWDASQVTDSDEDVIIAHNWDELRRFMWDYVGIVRTNKRLQRAQHRVRLLLDEIDEFYSNYKVSRDLIELRNLAQVAELMIRSAMQRKESRGLHYTLDYPDMLPEALDTILVPPTYAC

SEQ ID NO: 33243 - DNA, 1692 bp, Pseudomonas fluorescens Pf-5
  CDS (1)..(1692): transl_table=11
gtggctgctttgacttgccgattcaggcgtcttgcgccaaccccttcccgggtcgctttgagcggaatccttcaaatgagccaacagtttcaacacgatgttctggtgattggcagcggtgccgccggcttgagcctggccctgaccctgcccagccacctgcgtattgccgtcttgagcaaaggcgacctcgccaacggctcgacattcagggcccagggcggcgtcgcggccgtgctggatgataccgacaccgtagaatcccacgtcgatgacaccctcaatgccggcggcggcctgtgccacgaggatgcggtgcgctttaccgttgaacacagccgcgaggccatccagtggctgatcgaccagggcgtgccctttacccgcgacgaagactccagcagcgacgacagcggcttcgaattccacctgacccgcgagggcggccacagccaccggcggatcatccacgcggcggacgccaccggtgcggccatcttcaagaccctgctggcccaggctcggcaacaccccaatatcgaattgctggaacaacgggtcgccgtcgacctgatcaccgaaaaacgcctggggctggaaggcgaccgctgcctgggagcctacgtgctcaaccgcagcaccggccaggtcgacacctttggcgcacgcttcgtgatcctcgcctccggcggcgcagccaaggtctacctctataccagcaaccccgacagtgcctgcggcgacggtatcgccatggcctggcgctcgggctgccgggtggccaacctggaattcaaccagttccaccccacctgcctgtatcacccattggccaagagcttcctgattaccgaagccctgcgtggcgaaggcgcccacctcaagctgcccaacggcgaacgcttcatgccgcgcttcgaccctcgggccgagctggcaccacgggacatcgtggcccgggccatcgaccatgaaatgaagcgcctgggcatcgactgcgtgtacctggacatcagccacaagccggaagccttcatcaagagccacttccccaccgtttacgagcgttgcctggagttttccatcgatatcacccggcagccgatcccggtggtgccggccgcgcactacacctgcggcggggtgatggtggaccaacagggccgcaccgacgtgccgggcctgtacgccattggcgaaaccagcttcaccggcctgcacggcgccaaccggatggccagcaactcattgctggagtgcttcgtctacgcccgttcggcggcggccgacatccttcggcaactgccccaggtgtcgatccccatcgccctgcccgcctgggatgccagccaggtcaccgattccgatgaagacgtgatcattgcgcacaactgggacgagttgcggcggttcatgtgggactacgtaggcatagtgcgtaccaacaagcgcctgcagcgggcccagcaccgggtgcgcctgctgctggacgagatcgacgagttctacagcaactacaaggtcagccgtgacctgatcgagctgcgcaacctggcccaggtggccgagctgatgattctctcggccatggagcgcaaggagagccgcggcctgcactacaccctggactacccgcagatgctgcccgaggcccgggacactattctggtgccgcccacctacgccggctga

SEQ ID NO: 33244 - protein, 563 aa, Pseudomonas fluorescens Pf-5
MAALTCRFRRLAPTPSRVALSGILQMSQQFQHDVLVIGSGAAGLSLALTLPSHLRIAVLSKGDLANGSTFRAQGGVAAVLDDTDTVESHVDDTLNAGGGLCHEDAVRFTVEHSREAIQWLIDQGVPFTRDEDSSSDDSGFEFHLTREGGHSHRRIIHAADATGAAIFKTLLAQARQHPNIELLEQRVAVDLITEKRLGLEGDRCLGAYVLNRSTGQVDTFGARFVILASGGAAKVYLYTSNPDSACGDGIAMAWRSGCRVANLEFNQFHPTCLYHPLAKSFLITEALRGEGAHLKLPNGERFMPRFDPRAELAPRDIVARAIDHEMKRLGIDCVYLDISHKPEAFIKSHFPTVYERCLEFSIDITRQPIPVVPAAHYTCGGVMVDQQGRTDVPGLYAIGETSFTGLHGANRMASNSLLECFVYARSAAADILRQLPQVSIPIALPAWDASQVTDSDEDVIIAHNWDELRRFMWDYVGIVRTNKRLQRAQHRVRLLLDEIDEFYSNYKVSRDLIELRNLAQVAELMILSAMERKESRGLHYTLDYPQMLPEARDTILVPPTYAG

SEQ ID NO: 33245 - DNA, 1890 bp, Psychrobacter arcticus 273-4
  CDS (1)..(1890): transl_table=11
atgagtgcgctagagttgaatggcgaagataacggtaatgtgcctcagaatcctgatgctgtcataaagacagatgtactcatcattggtgcagggcttgcaggactaagtaccgcgcttgctttgccaaagtcgctgagcattactgtattaagtaaagcagcactggaagtctgctcaagccattatgctcaaggcggtatcgccgcaagcttagataaaaatgactcagtcgctgaccatatcgctgatacactaatcgctggtgcaggattatgtgcagcggataatacggcaattattttaagcgcagggcaacaagccgttcaatggctatgtgagcaaggcgtaccctttacccagattcctcaagataataatgggcaaaaccacagcgcaaaacctgtcactgaactacaaactgccaatttgcatctaaccaaagaaggcggtcatggctgtagacgcgttgcccatgctgatgatgcaacgggtcgccacgttatggaagccttaatgataaaagcgcaagtcgcgtctaatatcactctattgccctatcatgaagcgttaagacttttaaaaggaaataatgatagctcgtgccaaggtgcacttgtttttgaccataacagccaacgccaacttacctttcatagtcgcgccgttgttttagctagtggcggtttagggcagttatttcaacgagctagcgcgcccaatgtctgtgtcggtgatggcgttatgatggcgtggcaagccggttgtcgcttggcaaatttagaatttatccaatttcatccgacggggctagcactggatgatagcagcttcttgatatcagaagctttacgcggtgaaggtggtcgcctgtactgtccacaatctagcaagcgctttatgctcgctattgataaacgtgcggaattagcgccacgagatattgtggctcgtgcgatagctgagcaaattaacaataatggacttggctatgtgtatctagatgttagccacttaccagccgtttttttgcaggaacattttccgcaaatttatgagacgctattagcacttggtattgatatgaccaaagagcccattcctgttgcaccaacggctcactatagctgtggtggcgtagttactgatgccaatggcgtcactgacgtcgccggtctttatgctgctggtgaagtcgcttatacaggcttgcatggggcaaatcgtttggcaagtaactcattattggaatgtgtggtggttggacgtaatatcgctactgacttaccacgctatttaaaagcattagagaatttagatccggttgccatttataatagctcggatttagcagcacctaccgtttggacagcaccaacgcttaaagacattcaaacgattaaaccaccttctgctactgcatctccatttaatttatctgcatttaatttacctgcatttaattcatcttattgtgatgaggattatattgacagcaatatcgttactgatgaacaggctgccaagataatcacagcgttaaaatctttgatgacatcaaacatgggtatcactcgcactgccgagtcattagagcaaatgttgatgcagatacagcaatggcaagagtggcttgaaaaaatcgaattaagccagtccaatataaatactccaaatgacgctatgacggctgataggctaataattttccaattagcaaggcaactaccattagcgactttaattgttcagtctgcttatcagcgccttgaaagtcgtggtggacattatcggacagactatcctcacttagcagccactgctcgcattagtgtgattgagccattatcagaccaagctattcttccaataagtgatatcatttattga

SEQ ID NO: 33246 - protein, 629 aa, Psychrobacter arcticus 273-4
MSALELNGEDNGNVPQNPDAVIKTDVLIIGAGLAGLSTALALPKSLSITVLSKAALEVCSSHYAQGGIAASLDKNDSVADHIADTLIAGAGLCAADNTAIILSAGQQAVQWLCEQGVPFTQIPQDNNGQNHSAKPVTELQTANLHLTKEGGHGCRRVAHADDATGRHVMEALMIKAQVASNITLLPYHEALRLLKGNNDSSCQGALVFDHNSQRQLTFHSRAVVLASGGLGQLFQRASAPNVCVGDGVMMAWQAGCRLANLEFIQFHPTGLALDDSSFLISEALRGEGGRLYCPQSSKRFMLAIDKRAELAPRDIVARAIAEQINNNGLGYVYLDVSHLPAVFLQEHFPQIYETLLALGIDMTKEPIPVAPTAHYSCGGVVTDANGVTDVAGLYAAGEVAYTGLHGANRLASNSLLECVVVGRNIATDLPRYLKALENLDPVAIYNSSDLAAPTVWTAPTLKDIQTIKPPSATASPFNLSAFNLPAFNSSYCDEDYIDSNIVTDEQAAKIITALKSLMTSNMGITRTAESLEQMLMQIQQWQEWLEKIELSQSNINTPNDAMTADRLIIFQLARQLPLATLIVQSAYQRLESRGGHYRTDYPHLAATARISVIEPLSDQAILPISDIIY

SEQ ID NO: 33247 - DNA, 1599 bp, Colwellia psychrerythraea 34H
  CDS (1)..(1599): transl_table=11
atgactcaacaaaacaattgtgatgttttaatcattggcagtggcgccgcaggtttaactttggcactccatttagctcaaaatgccgatgtcgtcattttaagtaaaggtccattaaacgaaggttccaccttttatgctcaaggtgggattgcggcggtatttgatgaaaacgatagtgttgcttcccacgttgaagacaccatcgttgctggtgcaggtctgtgtgatgaagatacggttcgatttaccactgaaaatgctaagtcttgtttagagtggttgatagaccaaggcgttgaatttgataaagaacaaagtagtaagggcgagtcacgttatcatttaactcgtgagggcggacatagtcatcgaagaattttgcattcagcggatgctactggccaagcaattcagaccactttagccgatcaagtaagacaacattcacgtattagaatctttgaacgtttcaatgccattgatcttatttgccaagctagtactactggtaaccaacccaaacaatgtattggtgcctatatttggaatagaaataccgagaaagttgaaagtatttacgcacaaaaaactattttagccacaggcggtgcgagtaaagtttatcaatatacttcaaatcccgatgtcgcgagcggtgatggtattgcgatggcatggcgagcaggctgtcgcgttgcgaatatggaatttaatcaatttcatcctacctgcttatttcacccttctgctggaacttttttacttaccgaggcacttcgcggtgaaggcgctaaattaagacgtcctgatggcagccgttttatgcctgcttttgatgagcgcgctgaattagcaccccgtgatatagttgcgcgagcgattgattatgaaatgaaacgtttaggtgcagattgtatgtatctagatatcagtcataaacccagtgattttatcaaacaacatttcccaaccatttatgaaaaaactatgtcccttggcatagatatcactaagcaacccattcctattgttccggccgcacattatacctgtggtggagtaatggttgatcatcaaggtaaaacagatattagccaactttatgctattggcgaaatgtcatatacaggcttgcatggtgcaaaccgtttagcgagtaactcgctacttgaatgtcttgtttttgcccgcgctgctgccatagagattggtgaaaccttagtacaaagtaatcactatttaaccctacctcattgggatgatagtcgtgtaacagactcagatgaagaagttgtcattcaacacaactggcacgagcttagattatttatgtgggattatgtaggtattgtacgtactaccaaacgtctagagcgcgcattacatcgtgttgaattacttcaacaagaaattgaagattattatcaaaactttaaagtaagtaataatttacttgagttaagaaacttggtgcaggtggcagagcttataataaggtgtgccatggaacgtaaagaaagcaggggtctacattacactttagattatcctgacttattaacaacagctaaaccaacaatactttcgccagtataa

SEQ ID NO: 33248 - protein, 532 aa, Colwellia psychrerythraea 34H
MTQQNNCDVLIIGSGAAGLTLALHLAQNADVVILSKGPLNEGSTFYAQGGIAAVFDENDSVASHVEDTIVAGAGLCDEDTVRFTTENAKSCLEWLIDQGVEFDKEQSSKGESRYHLTREGGHSHRRILHSADATGQAIQTTLADQVRQHSRIRIFERFNAIDLICQASTTGNQPKQCIGAYIWNRNTEKVESIYAQKTILATGGASKVYQYTSNPDVASGDGIAMAWRAGCRVANMEFNQFHPTCLFHPSAGTFLLTEALRGEGAKLRRPDGSRFMPAFDERAELAPRDIVARAIDYEMKRLGADCMYLDISHKPSDFIKQHFPTIYEKTMSLGIDITKQPIPIVPAAHYTCGGVMVDHQGKTDISQLYAIGEMSYTGLHGANRLASNSLLECLVFARAAAIEIGETLVQSNHYLTLPHWDDSRVTDSDEEVVIQHNWHELRLFMWDYVGIVRTTKRLERALHRVELLQQEIEDYYQNFKVSNNLLELRNLVQVAELIIRCAMERKESRGLHYTLDYPDLLTTAKPTILSPV

SEQ ID NO: 33249 - DNA, 1578 bp, Dechloromonas aromatica RCB
  CDS (1)..(1578): transl_table=11
gtgcagaaatttgatgtcctgatcatcggtagcgggcttgctggccagtctgccgcattgagactcgcccctcattgccgagtggtactcgtcagcaagcgtagccttgaagactccgcatccggctgggctcaaggggggattgctgcggtactggacagccaggattccatcgaagcgcatattcgggatacgctgattgccggcgcttggttgaacgacgaaaaagctacccgccatgtcgttgaaaacgggcgccgagttatcgagtggctgattgaacaaggcgtccctttcaccaaagacgactctggctaccaccttacccgcgaaggaggccacagtgctcgccgtgttatccacgttgctgacgcgactggtcttgccgtacaggacacgttaaccaagaaagttcgcgccaatccaaacattaccgttctggaagatcacatcgcgatcgacctgatcacgggagacaagctcggtcaaaacgataagcgctgctatggcgcctacattctgaataatcgtaatggtgaagtgatcaccattggcgcccagaacacccttatcgccacaggcggtgccggcaaggtttatctctatacgaccaaccccgatacctccacaggtgatggcatagccatggcttatcgtgcgggttgccgggtatcgaacatggaatttatccagtttcacccgacctgtctctatcacccccaggctaaatcattccttatatctgaagcagtacgtggcgaaggcgggctactccgcctgccggacggaactcgcttcatgcctgagcacgatgaccgcgcagaactggcaccgcgtgacatcgtcgctcgtgccatcgacttcgaaatgaagaaacgcggcctcgattgtgtcttcctcgatatttcacacaaggatgaagcgttcattcgcggtcatttcccgaatatttacgctcgctgcctggaactgggtattgatatcacccaggaagcgattcctgtcgtgcctgctgcccactacacctgcggcggtattgtcagcgatcttcacggccgcaccgatgtgtcaggactgtacgtcgccggtgaagcctcctgcaccggactgcacggtgccaaccgccttgcttccaactcattgcttgaatgcctagtgtttgccgaagcagcggttaacgacatcttgagcaagaaatccgaaaaaatccccacattgccgcgctgggatgaaagccgggtgactgatgccgatgaagaagtggtcatatcccataactgggatgagctccgtcgcttcatgtgggattacgtcggtattgtccgaacgaccaaacgactgaaacgggcaaaacatcgcattggtttgttgatgcgggaaattgacgagttttatgccaatttccgggttagccatgaccttattgagttacgcaatttggtagtaaccgcggacttgatcgtgcgctgtgccatgttgcgcaaagaaagccggggactacatttttcccgagattttcctgatatggccagcaagccgaagaacacggtcctcaagcgtcgccgacaagcgggctga

SEQ ID NO: 33250 - protein, 525 aa, Dechloromonas aromatica RCB
MQKFDVLIIGSGLAGQSAALRLAPHCRVVLVSKRSLEDSASGWAQGGIAAVLDSQDSIEAHIRDTLIAGAWLNDEKATRHVVENGRRVIEWLIEQGVPFTKDDSGYHLTREGGHSARRVIHVADATGLAVQDTLTKKVRANPNITVLEDHIAIDLITGDKLGQNDKRCYGAYILNNRNGEVITIGAQNTLIATGGAGKVYLYTTNPDTSTGDGIAMAYRAGCRVSNMEFIQFHPTCLYHPQAKSFLISEAVRGEGGLLRLPDGTRFMPEHDDRAELAPRDIVARAIDFEMKKRGLDCVFLDISHKDEAFIRGHFPNIYARCLELGIDITQEAIPVVPAAHYTCGGIVSDLHGRTDVSGLYVAGEASCTGLHGANRLASNSLLECLVFAEAAVNDILSKKSEKIPTLPRWDESRVTDADEEVVISHNWDELRRFMWDYVGIVRTTKRLKRAKHRIGLLMREIDEFYANFRVSHDLIELRNLVVTADLIVRCAMLRKESRGLHFSRDFPDMASKPKNTVLKRRRQAG

SEQ ID NO: 33251 - DNA, 1587 bp, Ralstonia eutropha JMP134
  CDS (1)..(1587): transl_table=11
atgaacttcgacgtcgccatcgtaggcagcgggctggccggtctcacggtcgcgctgcaactggccgacacccatcgggttgtcatcctcagcaagcgcgccatgacgcagggcgccagcgactgggcacagggcggcattgccgccgtgcttgattcgggcgacagccacgacgagcatacgcaggacacgctcgtggccggtgcgggcctctgcgatgaagaggcaacgcgcttcatcgtcgagcatggacgtgaagcgattcagtggctgatcgaccgcggcgtgccgttcaccaaagatgagcaggccgaactcggctatcacctgacacgcgaaggcggacatagccggcgccgcatcatccatgccgcggatgcaacgggtcacgccgtggtcagcacgctgtcggagatggcccgccagcatccgaacatcactgttattgaagaccagtttgcgatcgacctgatcacgtcgcgcaagctggggctgccggggaaccgctgctacggcctgtacgtgctcgacgacagcaccggagaagtccgtaccatcaccgcgacgcacacggtgctggcggccggcggcgcaggcaaggtgtacctgtacacgaccaacccagacacggccaccggcgacggcattgccatggcatggcgcgcgggttgccgcgtgtcgaacatggaattcatccagtttcatccgacctgcctgtaccacccgtacgccaagtccttcctgatctcggaagccgtgcgcggcgaaggcggcctgctcaagctgccggacggcacccgcttcatgcccgagcacgatgagcgcgcagaactcgcgccgcgtgacgtggtggcacgggcgatcgacttcgaaatgaagaagcgcggcctggactgcgtctatctcgatatcacgcaccagcccgaggccttcctgaaggaacatttccccacgatccacgcgcgctgcctggaactgggcatcgacatcgcgcgcgaaccgatccccgtggtaccggctgcgcattacacctgcggcggcgtggtgaccgacaccctgggccgaaccgacatcggcaatctctacgccgtgggcgagacggcatgcaccgggctgcacggcgctaaccgtcttgcatcgaattcgctgctcgaatgcattgtgatcggccgcgcggccgcgaccgacatcgcaagccaggacaaggccggcctgccggatctcgcactgccgtcctgggatgaaagccgcgtctccgacgccgacgaggaagttgtggtctcgcacaactgggacgagctgcgccgcatgatgtggaactacgtcggcatcgtgcgcaccagcaagcgcctggaacgcgcgcagcaccgtatccgcctgctgcgcgaggagatcgccgagtactacgcgaacttccgcgtcacgcgcgacctgctcgagctgcgcaatctcgtcgaagtcgcctcgctgatcgtcgatagcgcgtactcccgccacgaaagccgcggcctgcatttcagccgggactatccggatacgttgccgaaggctcttcctaccgtgatgcagccggcccgcaagcgctaa

SEQ ID NO: 33252 - protein, 528 aa, Ralstonia eutropha JMP134
MNFDVAIVGSGLAGLTVALQLADTHRVVILSKRAMTQGASDWAQGGIAAVLDSGDSHDEHTQDTLVAGAGLCDEEATRFIVEHGREAIQWLIDRGVPFTKDEQAELGYHLTREGGHSRRRIIHAADATGHAVVSTLSEMARQHPNITVIEDQFAIDLITSRKLGLPGNRCYGLYVLDDSTGEVRTITATHTVLAAGGAGKVYLYTTNPDTATGDGIAMAWRAGCRVSNMEFIQFHPTCLYHPYAKSFLISEAVRGEGGLLKLPDGTRFMPEHDERAELAPRDVVARAIDFEMKKRGLDCVYLDITHQPEAFLKEHFPTIHARCLELGIDIAREPIPVVPAAHYTCGGVVTDTLGRTDIGNLYAVGETACTGLHGANRLASNSLLECIVIGRAAATDIASQDKAGLPDLALPSWDESRVSDADEEVVVSHNWDELRRMMWNYVGIVRTSKRLERAQHRIRLLREEIAEYYANFRVTRDLLELRNLVEVASLIVDSAYSRHESRGLHFSRDYPDTLPKALPTVMQPARKR

SEQ ID NO: 33253 - DNA, 1548 bp, Dehalococcoides sp. CBDB1
  CDS (1)..(1548): transl_table=11
ttgaactccaggtacgactatataattgtgggcagcggtattgccggtttgtatactgctttactggcgcgtggccggggaagtgttttgctggttaccaaaggcaagatacaggattgcaatacccgccatgctcagggaggcatagccgccgccattggcccggatgattctccccgtttgcattttgaagataccctgatagccggagacggtttatgtgaccgtgagatggtgcgtttgctggcagacgaagctccacagcgtattgccgagcttgtttatctgggagtgccttttgacagtgtaaacggtgaaatagctcttaccttagaggctgctcacagtcgtccccgcatacttcatgccgggggggatgccaccggcaaacacattgaaatcaccctgaacaactgggtacggactaccgagattgaggttctggaagatactctggccaaagagctgattatagaaaacggccagatcaagggtgtggcaactctggatacaaataccggtgccatccagaactacctgtgccgttttgtgatactggctaccggcggagctggtcagcttttcagttttaccactaacccggaggttgccactgctgatggggtagctctggctttcagggctggggctgagataaaagatatggagttttaccagttccatcctaccgctattcacctgccgggggttgccccttttcttatttcagaggcagttcggggagaaggcggtattttgcggaatatagagggcaaacgctttatgcccgaatattcccctcaggccgaacttgccccaagagacgtggtagctcgcagtattcaccttgagatgcttaaaaccggtgctgaccatgtttatctggatgttacccatttgcctccccacaaagtaagcagccgctttcctcagatataccgtttttgtctggatcacggactggatattacccgtgaggccatacctgtttctccggcggcccattatatgataggcgggataaaagtagacagctggggagaaaccaatatcaaggggctttttgcctgcggcgaagtagcctgtaccggtgttcacggggcgaaccgtctggcttcaaattcgcttttagaggtgttggtattcggtaggcggattatagaatacactgccggtgaaaaccagcctgaaatgcttgctccgctgccccaactgactaaaagattgctgggatggggcaaatacgtgcgtgatttacccgagccttcaatacccgctctccagaagcttctctgggaagactctggtataataagaagctatggcggtttggtgaaagctcaggagatactctcaggctggcaatacagtctgggtgacgtttccaaccgcaaagggattgaacttgcaaaccttattttggccggaaggcttatggtagaatcagccctgctcaggcaggaaagccgcggggcacattaccgtactgattttcctgaccaccagcccgaatgggaaaaacatatagtctttattaaggaggattaa

SEQ ID NO: 33254 - protein, 515 aa, Dehalococcoides sp. CBDB1
MNSRYDYIIVGSGIAGLYTALLARGRGSVLLVTKGKIQDCNTRHAQGGIAAAIGPDDSPRLHFEDTLIAGDGLCDREMVRLLADEAPQRIAELVYLGVPFDSVNGEIALTLEAAHSRPRILHAGGDATGKHIEITLNNWVRTTEIEVLEDTLAKELIIENGQIKGVATLDTNTGAIQNYLCRFVILATGGAGQLFSFTTNPEVATADGVALAFRAGAEIKDMEFYQFHPTAIHLPGVAPFLISEAVRGEGGILRNIEGKRFMPEYSPQAELAPRDVVARSIHLEMLKTGADHVYLDVTHLPPHKVSSRFPQIYRFCLDHGLDITREAIPVSPAAHYMIGGIKVDSWGETNIKGLFACGEVACTGVHGANRLASNSLLEVLVFGRRIIEYTAGENQPEMLAPLPQLTKRLLGWGKYVRDLPEPSIPALQKLLWEDSGIIRSYGGLVKAQEILSGWQYSLGDVSNRKGIELANLILAGRLMVESALLRQESRGAHYRTDFPDHQPEWEKHIVFIKED

SEQ ID NO: 33255 - DNA, 1830 bp, Anabaena variabilis ATCC 29413
  CDS (1)..(1830): transl_table=11
gtgattggtgattacccgttattcattacccatgacccttcgggtgacgctccttacgtcgctaccgctacgctaacgccagttccctacggagggaaaccctcctacaggactggactcacccattacccattacccagatttctaaccttgtcacaaatagagtttcctagccaatttgatgttttagtagtcggtgctggtgcggctggactgtatacagcattatgtctgccagaatccttacgagtcggcttgattaccaaagaaactgttgctttatctgctagtgattgggcgcagggtggtatagctgctgcgatcgcccctaatgattctccttctttacatattgaagatacaattcacgcaggagcgggcttgtgtgatgttacagccgtagaatttttggctcaacaagcccccaaatgtatcaaatctttggtggacttgggagtggcctttgaccgacatggacaagctttagcgttaactttagaagccgcccattctcgtaaccgtgttcttcacgccgccgacactacaggtagggaagtcacaaccactctcaccacccaagtattacgtcgtccaaatatccaagtaattcagcaagctttggctttgagtctttggctggaaccagaaaccggtcattgtcagggaatcagcctcttttatcaaggtgcaattacatgggtcagggctggggctgtagtcttggcgactggtggcggtggtcaagtatttgcccaaaccacgaacccggcggtaagtacaggtgatggagtcgcaattgcatggcgggctggggctattctccgtgacttagaatttgtccaattccaccccacagccttaactaaatcaggtgcagaccgtttcctgatcagtgaagcagtccgtggtgaaggcgcacaccttgtagatgatgaagggcggcgatttgcctttgattatcacccggctggagaattagcacccagagatgtggtgagtcgggctatatttagtcatctacaacgcactgcggtcgatcctgctacagcctatgtctggttggatatgcgccccatcccggaagaaaagattcgtctgcggtttcccaatattgttaaggtttgtcaacgttggggtatagatgtttttcacgaaccgattcctgtagccccagccgcccattattggatgggtggtattgccacagatttaaataatcaaactaatatacctggattgtatgcagtgggagaaaccgctagtacgggtgtacatggagcgaatcgtttagcgagtaattcattgttggagtgtattgtctttggggcgcagttagcaaatctcacgccagcagatttgacacagcacacagaaacaccagccttacccacaaaagaatttaagattgatgccagcgagtggcaaaaccagcaatcacaattaaccatactgcgagaaaagttaccgcgtctagtttggcaaagcgctggtatttgtcgagaacagtctactttatctgtggcgatcgctactgtagaatcttggcaacaggattttgctgcgttgcctttaagccaatttttcttatctctacaacccaacgagccagttagctttaatttctcagataccgaccaacaactacgactttgggcagaaacaggcaatttactcgatgttgcctatttaattctcaaaagcgctgcttttaggactgaaagccgtggcggacacttccgtttagactatcccgactcaaatcctgattggcaagtccacaccctagtacaaaagcaccaatggtggcaatctctgatcatgaaatcttaa

SEQ ID NO: 33256 - protein, 609 aa, Anabaena variabilis ATCC 29413
MIGDYPLFITHDPSGDAPYVATATLTPVPYGGKPSYRTGLTHYPLPRFLTLSQIEFPSQFDVLVVGAGAAGLYTALCLPESLRVGLITKETVALSASDWAQGGIAAAIAPNDSPSLHIEDTIHAGAGLCDVTAVEFLAQQAPKCIKSLVDLGVAFDRHGQALALTLEAAHSRNRVLHAADTTGREVTTTLTTQVLRRPNIQVIQQALALSLWLEPETGHCQGISLFYQGAITWVRAGAVVLATGGGGQVFAQTTNPAVSTGDGVAIAWRAGAILRDLEFVQFHPTALTKSGADRFLISEAVRGEGAHLVDDEGRRFAFDYHPAGELAPRDVVSRAIFSHLQRTAVDPATAYVWLDMRPIPEEKIRLRFPNIVKVCQRWGIDVFHEPIPVAPAAHYWMGGIATDLNNQTNIPGLYAVGETASTGVHGANRLASNSLLECIVFGAQLANLTPADLTQHTETPALPTKEFKIDASEWQNQQSQLTILREKLPRLVWQSAGICREQSTLSVAIATVESWQQDFAALPLSQFFLSLQPNEPVSFNFSDTDQQLRLWAETGNLLDVAYLILKSAAFRTESRGGHFRLDYPDSNPDWQVHTLVQKHQWWQSLIMKS

SEQ ID NO: 33257 - DNA, 1737 bp, Anabaena variabilis ATCC 29413
  CDS (1)..(1737): transl_table=11
atggttaatatgctagagcatgatgtgattattgtcgggggtgggctggcgggatgtcgggcggctgtggaaattgcccgtactgaccctagtttaaatgtggcggtggttgccaaaactcaccccattcgttcccactctgttgcagctcaaggtggtatggctgcatcactgaagaatgtcgattcttctgatacttgggaagctcacgcttttgatactgtcaaaggttctgattatttagcagaccaagatgctgtggcaattctgactcaggaagccccagatgtagtgatagacctggaacatatgggggttttgttctcacgtctccctgatggccgcattgctcaacgggcttttggtggacactcccacgatcgcacctgttacgcagctgataagactggtcacgctattctacatgagttggtaaataatttgcggcgttatggtgtgcatatttatcaagagtggtacgtgatgcgcctgattttagaagaaaatgaggcgaagggtttagtcatgtacagcctgttagacgggcatattgaggttgtccgggctaaggcggtgatgtttgccaccgggggttatggtcgcgtttataacactacttctaacgattatgcctctactggtgatggcttggcgatgagtgcgatcgctgggttacctctggaagacatggagtttgtccaattccatcccacgggtttgtatccagttggtgtcttgatttccgaggctgtgcggggagaaggggcgtatttaattaatagtgaaggcgatcgctttatggcgacttatgcacccagtcgtatggaactagcaccccgcgatattacctcacgggcgatcgcttatgaaattcgggctggacgtggtgtcaatttggatggcagccctggtggcccctttgtctatctggatttacgccacatgggcaaggaaaaaattatgagtcgcgtccccttctgttgggaagaagcccaccgcctagtcggtgtggatgcagtcactcaaccaatgccagtccggccgacaattcactattgtatgggtggtatccctgtaaataccgatggtagagtccgcagcagtggcgatggcctggttgaagggttttttgcggctggtgaaacatcttgtgtatctgtccacggggcaaatcgtctcggtagtaattctttattagaatgtgtagtttatggtaaacgaactggggcggcgatcgctcaatatgtacagaaccgtaaattacctgccatagatgaacaacgttacgtcaaacaagcccagcaagaaattcaagctttactggaacagccaggagagtatcgaatcaatcaagtccgtcaagcttttcaagacgcaatgacagattactgtggcgttttccgcactcaagatttaatgagtcaaggttggcaaaaaatcacagaaatacaacaaaaatacagtcaaatatacttagatgataaaggcagttgttggaatactgaactagtagaagctttagagttgcggagtttaatgatagtcggacagatgattttagcctcagctttaaatcgtcaagaaagtcgtggcgcacacttccgcgaagattacccacagcgagatgataccaagttcctgcaacacacaatggcttactattcacctgcggggattgacattcaatatcgcccagtgacaattaccatgtttcagccacaggagaggaagtattag

SEQ ID NO: 33258 - protein, 578 aa, Anabaena variabilis ATCC 29413
MVNMLEHDVIIVGGGLAGCRAAVEIARTDPSLNVAVVAKTHPIRSHSVAAQGGMAASLKNVDSSDTWEAHAFDTVKGSDYLADQDAVAILTQEAPDVVIDLEHMGVLFSRLPDGRIAQRAFGGHSHDRTCYAADKTGHAILHELVNNLRRYGVHIYQEWYVMRLILEENEAKGLVMYSLLDGHIEVVRAKAVMFATGGYGRVYNTTSNDYASTGDGLAMSAIAGLPLEDMEFVQFHPTGLYPVGVLISEAVRGEGAYLINSEGDRFMATYAPSRMELAPRDITSRAIAYEIRAGRGVNLDGSPGGPFVYLDLRHMGKEKIMSRVPFCWEEAHRLVGVDAVTQPMPVRPTIHYCMGGIPVNTDGRVRSSGDGLVEGFFAAGETSCVSVHGANRLGSNSLLECVVYGKRTGAAIAQYVQNRKLPAIDEQRYVKQAQQEIQALLEQPGEYRINQVRQAFQDAMTDYCGVFRTQDLMSQGWQKITEIQQKYSQIYLDDKGSCWNTELVEALELRSLMIVGQMILASALNRQESRGAHFREDYPQRDDTKFLQHTMAYYSPAGIDIQYRPVTITMFQPQERKY

SEQ ID NO: 33259 - DNA, 1617 bp, Pseudomonas fluorescens PfO-1
  CDS (1)..(1617): transl_table=11
atgagccaacagtttcaacacgatgttctggtgattggcagcggcgctgccggtttgagtctcgcgctgaccctgcccggtcacttgcgcatcgccgtactgagcaaaggcgatcttgccaacggctcgacctattgggcacagggtggcgtcgcagccgtgctggacgacaccgacactgtcgaatcccatgtcgatgacaccctcaatgctggcggcggtttgtgccatgaagacgcggtgcgtttcaccgtcgagcacagcaaggaagcgatccaatggctgatcgaccagggcgtgccgttcactcgcgacgaacagtccggcaccgaagacggcggcttcgaatttcacctcacccgcgaaggcggtcacagccatcgacggatcatccacgccgccgatgccactggcgctgcgatcttcacgaccctgctggcccaggccaaagaacgcccgaacatcgaactgctcgaacagcgggtagcggtcgatctgatcaccgagcgtcggctggggctggaaggcgaacgctgcctcggcgcctacgtactcaaccgcaaaaccggggaagtcgataccttcggtgcacgcttcgtgatcctggcgtccggcggcgccgcgaaagtctatctatatacaagcaaccccgacggcgcctgtggtgacggcatcgccatggcctggcgctcgggctgccgagtggcgaacctggagttcaaccagttccaccccacctgcctctaccacccgcaagccaagagttttctggtaaccgaagccctgcgcggtgaaggtgcccatttgaagctgccgaacggcgaacgcttcatgcagcgcttcgactcacgcgcagaactggcaccacgggacatcgtcgcccgcgccatcgaccacgaaatgaagcgcctgggtgtcgattgcgtctacctcgacatcagccacaaacccgaagccttcatcaaatcgcacttcccgaccgtctacgaacgctgcctcggattcggcatcgacatcaccaagcaaccgatcccggtcgtaccggctgcgcattacacctgcggcggagtgatggtcgatcaacagggccgcaccgatgtgcccggcctgtacgccattggcgaaaccagcttcaccggcctgcatggcgccaaccgcatggccagcaactcgctgctggaatgcttcgtttacgcccgatcggcagcggcggacattctcgagcaactgcccgacgtcttgatcccgcgcgccctgcccgcctgggacgccagccaggtgaccgactccgatgaagacgtgatcatcgcccacaactgggacgaattgcggcgcttcatgtgggactacgtgggcatcgtgcgcaccaacaagcgcctgcaaagggcacaacaccgcgtgcgtctgctgctggatgaaatcgacgagttctacagcaactataaagtcagtcgcgacctgatcgagttgcgcaacctggcgcaagtagcggaactgatgatccgctcggccatggagcgcaaggaaagccgaggcctgcattacacactcgactacccagacctgctgcccgaagcactcgacactattctggtgccgcccacctacgtcggctga

SEQ ID NO: 33260 - protein, 538 aa, Pseudomonas fluorescens PfO-1
MSQQFQHDVLVIGSGAAGLSLALTLPGHLRIAVLSKGDLANGSTYWAQGGVAAVLDDTDTVESHVDDTLNAGGGLCHEDAVRFTVEHSKEAIQWLIDQGVPFTRDEQSGTEDGGFEFHLTREGGHSHRRIIHAADATGAAIFTTLLAQAKERPNIELLEQRVAVDLITERRLGLEGERCLGAYVLNRKTGEVDTFGARFVILASGGAAKVYLYTSNPDGACGDGIAMAWRSGCRVANLEFNQFHPTCLYHPQAKSFLVTEALRGEGAHLKLPNGERFMQRFDSRAELAPRDIVARAIDHEMKRLGVDCVYLDISHKPEAFIKSHFPTVYERCLGFGIDITKQPIPVVPAAHYTCGGVMVDQQGRTDVPGLYAIGETSFTGLHGANRMASNSLLECFVYARSAAADILEQLPDVLIPRALPAWDASQVTDSDEDVIIAHNWDELRRFMWDYVGIVRTNKRLQRAQHRVRLLLDEIDEFYSNYKVSRDLIELRNLAQVAELMIRSAMERKESRGLHYTLDYPDLLPEALDTILVPPTYVG

SEQ ID NO: 33261 - DNA, 1803 bp, Rhodobacter sphaeroides 2.4.1
  CDS (1)..(1803): transl_table=11
atggcagcttacacttacgagacgcatgactacgacgtcgtggtggtgggcgccggcggcgccggcctccgcgcgacgctcggcatggccgaacagggcctgcgcaccgcctgcgtcaccaaggttttccccacgcgcagccacacggtggcggcgcagggcggcatcgccgcctctctcgccaacatgggcccggacaactggcagtggcacatgtacgacaccgtgaaagggtcggactggctgggcgacacggacgcgatggaatatctcgcccgcgaggccccgaaggcggtctacgagctcgagcattacggcgtgcccttctcgcgtaccgaggagggcaagatctaccagcgcccgttcggcggccacaccacccagttcggcgagggcccgcccgtgcagcgcacctgcgccgcggccgaccgcaccggccacgcgatcctgcacacgctctacggccagtcggtcaagaacaacgccgagttcttcatcgaatatttcgcgctggatctcatcatccaggacggccgctgcaccggcgtggtggcgtggaagctggaagacggcacgatccatgtcttcaacgccaagctcacggttctggccacgggcggctacggccgcgcctacttctcggccacctcggcccacacctgcaccggcgacggcggcgggatggtggcgcgcgccggcctgccgcttcaggacatggagttcgtacagttccacccgaccggcatctacggctcgggctgcctcatcaccgagggcgcgcgcggcgagggcggctacctcaccaactcgaacggcgaacggttcatggagcgctacgctccgacctacaaggatctggcctcccgcgacgtggtcagccgctgcatgacgctcgagatccgcgagggtcgcggcgtgggcgagcatggcgaccatatccacctgcacctgaaccacctgccgcccgagacgctggccctgcgcctgccgggcatctcggaatcggccaagatcttcgcgggggtcgacctccacaaggagccgatcccggtgctgccgaccgtgcattacaacatgggcggcatccccaccaactactggggcgaggtgctggcacccaccgagggcgatcccgaccgcgtcttccccggcctgatggccgtgggcgaggcgggctgcgcctcggtgcacggggcgaaccgcctcggctcgaactcgctcatcgacctcgtggtcttcggccgcgccgcggcgatccgcgcgggccagatcgtgaagccgcacgaattccatcccgacgtgccgaaggtccaggtggacgagatcctcggccggttcgacgatctgcgccacgcgaacggcgcggtgccgacggccgagctgcggctcgagatgcagcgcaccatgcaggccgacgcggcggtgttccgcaccgacaagacgctggccgaaggcgtcgagaagatgaagggcatcgcggcgaagctcggggacctgaaggtcaccgaccgcagcctcatctggaactcggacctgatggagacgctcgagctcacgaacctcatgccgaacgcgctcgccaccatcgtcgcggccgaggcgcgcaaggagagccgcggggcccatgcccacgaggactggcccaaccgcgacgacgagaactggcgcgtccacagcctggcggtcgtgaagggcaacgaggtcacgctgaccacccggcccgtccatctcgatccgctcacgaagcagaccgagggcgggatcgatctgaagaagatcgcccccaaggcgcgggtctactga

SEQ ID NO: 33262 - protein, 600 aa, Rhodobacter sphaeroides 2.4.1
MAAYTYETHDYDVVVVGAGGAGLRATLGMAEQGLRTACVTKVFPTRSHTVAAQGGIAASLANMGPDNWQWHMYDTVKGSDWLGDTDAMEYLAREAPKAVYELEHYGVPFSRTEEGKIYQRPFGGHTTQFGEGPPVQRTCAAADRTGHAILHTLYGQSVKNNAEFFIEYFALDLIIQDGRCTGVVAWKLEDGTIHVFNAKLTVLATGGYGRAYFSATSAHTCTGDGGGMVARAGLPLQDMEFVQFHPTGIYGSGCLITEGARGEGGYLTNSNGERFMERYAPTYKDLASRDVVSRCMTLEIREGRGVGEHGDHIHLHLNHLPPETLALRLPGISESAKIFAGVDLHKEPIPVLPTVHYNMGGIPTNYWGEVLAPTEGDPDRVFPGLMAVGEAGCASVHGANRLGSNSLIDLVVFGRAAAIRAGQIVKPHEFHPDVPKVQVDEILGRFDDLRHANGAVPTAELRLEMQRTMQADAAVFRTDKTLAEGVEKMKGIAAKLGDLKVTDRSLIWNSDLMETLELTNLMPNALATIVAAEARKESRGAHAHEDWPNRDDENWRVHSLAVVKGNEVTLTTRPVHLDPLTKQTEGGIDLKKIAPKARVY

SEQ ID NO: 33263 - DNA, 1560 bp, Carboxydothermus hydrogenoformans Z-2901
  CDS (1)..(1560): transl_table=11
ttgcgccggtatttaattgactttgatttatccggcgttccggtttataaatccgattacctggtaatcggtagcggaattgctgggctttatgctgctttaaatgctgcccgctacggtgaggtaatcgtcttaaccaagaaaaatttaggggataccaataccgatttggcccagggtggaattgcggcagcggtagataccgaagaagactcaccggaacttcattatcaggatacgattgcagcgggagcaggactgtgcaatccggaagcggtaagagttttggtggaggatggcatcgagagggtccaccacctggtggagttaggggctgattttaaccgcaaagatggtaaattggccctgaggatggaaggtgcccaccgccgccggagaattctgtaccggggcgatactaccggagaagaaattcaaagggttttatctgcagccgtaaaaaatcattctaatatccgggtgatggagaatcactttgccttagatttaattaccgaggaccgggaatgcttgggtgctctagcttgggatgaaaatggaaatttacgtttatttttaagtaagtttacgatattggctaccggtggtgctgggcaagtattccgggagaccaccaatccggatgtggctaccggtgacggaatagccatggcctaccgggcgggagcgggagttatggacatggaatttttccagtttcatccgaccgctttaaatttgcccggacggcagaagtttctgatcagtgaagcggtgcgcggggaaggggcaaggctggtaaacgctgccggcgagtatttcatgaaaaactaccatgagcttgctgaccttgcaccgcgggatgtggtggcccgggccatttgggaccaggcgcaaaaaggccaggtatatttggatatcagaagctttaccgacgaacaattggccggaataccgcgaatagtaaaaactttaaaggaaaacggtttagaccccagaaaagatttgataccggttttaccggctgcccattactttatgggtggggtgaggaccaacatttggggggaaacggatttagcccggctttatgcctgcggtgaagtagcgtgccagggggtacacggagctaaccgtctggcttccaattcccttttagatgggctggtttttggttaccggatagttgaacgaacgaaaaatattttaaaatctacccggattaattatccggagatctcaatttaccagggggaaaatagggaaggtattggagccagggaagctattgcccagattaaagatttgatgtgggagaatgccggaattattcgtaacggacagggattaagggtgctattggaaaatttacgtaaactcaaactttcttatccggtgaaaaatattgaagaagcggtggctgcaaatttataccaaacagctattttaattgctctggctgctttaatccgggaggaaagccggggagcgcattttcgttccgattatccccaaagggatgattttctctggcagaaacacattgttttatcgaggtga

SEQ ID NO: 33264 - protein, 519 aa, Carboxydothermus hydrogenoformans Z-2901
MRRYLIDFDLSGVPVYKSDYLVIGSGIAGLYAALNAARYGEVIVLTKKNLGDTNTDLAQGGIAAAVDTEEDSPELHYQDTIAAGAGLCNPEAVRVLVEDGIERVHHLVELGADFNRKDGKLALRMEGAHRRRRILYRGDTTGEEIQRVLSAAVKNHSNIRVMENHFALDLITEDRECLGALAWDENGNLRLFLSKFTILATGGAGQVFRETTNPDVATGDGIAMAYRAGAGVMDMEFFQFHPTALNLPGRQKFLISEAVRGEGARLVNAAGEYFMKNYHELADLAPRDVVARAIWDQAQKGQVYLDIRSFTDEQLAGIPRIVKTLKENGLDPRKDLIPVLPAAHYFMGGVRTNIWGETDLARLYACGEVACQGVHGANRLASNSLLDGLVFGYRIVERTKNILKSTRINYPEISIYQGENREGIGAREAIAQIKDLMWENAGIIRNGQGLRVLLENLRKLKLSYPVKNIEEAVAANLYQTAILIALAALIREESRGAHFRSDYPQRDDFLWQKHIVLSR

SEQ ID NO: 33265 - DNA, 1659 bp, Synechococcus sp. CC9605
  CDS (1)..(1659): transl_table=11
atggcccagccccgctgctctgaccccatcccctcaggtccttgggacgtggtggtgatcggtgccggagccgctggcttgatgacctgccttgatctgcctgcggagctcaaggtgttgctgctcaatcgcaacacagggcgacgttcctccagccgctgggcccaggggggcatcgccgcggtgacccgcaatgaggacagcgccgaaagccatgcggaggacaccgttctggctggagcaggcctttgcgatggtgatgcagtgcggctgttggtgcaggaggcgccgcattgcgtggagcgcctggggcagctggggatggccttcgaccgggatcaggacggtctggccaccaccctggaagcagcccacagtcacagacgagtgctgcatgtgcaggaccgcacggggcgagccctggtggatgtgctgcgggatcgtgtagagcaacggccggggttactgcatcgccgcggcgttcgcgtgacgcagctgctggtgcgcgatgggcgctgttgcggcgtgcaggtgctggatggggctcatcttcacggcatcgaagcccgcgcagtggtgctggccagcggagggggggggcatctgtttgccaacaccaccaatccagcccaggcctgcggcgaaggcatcgccctcgcctggcaggcgggtgcagccgtggaagatctggaatttgttcagttccatccaactgccatccgcctggatgacgccccctgctttctgatctccgaagccgttcgtggcgaaggcggggtgctgatggattccctggggggcagccctgtggcccacctgccccaacgcgacctctcaccgcgagaccaggtgagccgtgccttgatgcaggccatgcagcggcagcaggtgaaacagatgtggctcgacttcgccgccatcccgcgcgaccaggcggagcaacgcttcccaacgatcctggaccgctgcgacgaactcggactgaatccattggaacggccaatccccgtggcaccagccgcccattactggatgggaggggtggccacggacctgcaggccgccaccacgctgcccgggctccatgccgtaggggaagtggcctgcacaggcctgcatggcgcgaaccgactggccagcaactccctgatggaatgcctggtgttcgcccatcgcctcaaagagatcgagctcggccctgtcccaacggccctcggcagcagcacgacacaaacgcttgccttgggcctcaacggcagcagcagttcgcagttgatcgacgccatcgagcagctgcggcaactctgctggcaacgggcgggggtggaacgatccgccgctggactgcgccaggccctcggcaacgtgaaagcccacgaacaacagctggagcagcaggcgctgctccaggccctgctacgggacgacccctgttctcccaggctgttggcggaaagcagccgacgtgatctgaacctgttgctagatctccaccacagattgctgaccagccgtctgatgctggaggcctgcctgtttcggggagaaagccggggaggccactaccgcagcgatgctcctgcaccgctgccgcaatggagacagcattcccggcaacaacggcagcggggcatcgtcacccgcgccgtccgggactga

SEQ ID NO: 33266 - protein, 552 aa, Synechococcus sp. CC9605
MAQPRCSDPIPSGPWDVVVIGAGAAGLMTCLDLPAELKVLLLNRNTGRRSSSRWAQGGIAAVTRNEDSAESHAEDTVLAGAGLCDGDAVRLLVQEAPHCVERLGQLGMAFDRDQDGLATTLEAAHSHRRVLHVQDRTGRALVDVLRDRVEQRPGLLHRRGVRVTQLLVRDGRCCGVQVLDGAHLHGIEARAVVLASGGGGHLFANTTNPAQACGEGIALAWQAGAAVEDLEFVQFHPTAIRLDDAPCFLISEAVRGEGGVLMDSLGGSPVAHLPQRDLSPRDQVSRALMQAMQRQQVKQMWLDFAAIPRDQAEQRFPTILDRCDELGLNPLERPIPVAPAAHYWMGGVATDLQAATTLPGLHAVGEVACTGLHGANRLASNSLMECLVFAHRLKEIELGPVPTALGSSTTQTLALGLNGSSSSQLIDAIEQLRQLCWQRAGVERSAAGLRQALGNVKAHEQQLEQQALLQALLRDDPCSPRLLAESSRRDLNLLLDLHHRLLTSRLMLEACLFRGESRGGHYRSDAPAPLPQWRQHSRQQRQRGIVTRAVRD

SEQ ID NO: 33267 - DNA, 1596 bp, Geobacter metallireducens GS-15
  CDS (1)..(1596): transl_table=11
atgaaattagcgactgattttcttgttatcggcagcggtatcgccgggctcacctttgctctccaggcagcacgacacggcaccgtggccatcgtcaccaaacgcgaagtgacggaatccgccaccaactatgcgcaggggggcatcgccacggtcttttcccaggaagacacctttgatgcccatgtagaggatactcttgtggctggcgcaggcatctgccatgaagatgtggtgcggatggtggtcgaagaaggccccaaggtcatccgcaacctcatcgagtggggggtccagtttacccgcagtggcgaggcatttgacctgacccgcgagggtgggcacagccagcgacgcatcctccacgctgacgatgtcacgggccgcgaaattgagcgggcactggtggcggcggtccgcgataaccccaacatacagctctacgagcatcacattgccattgatttgatcaccatgtcaaaggtgacccacaagcgagtcaagccggaccgttgcctcggcgctcatgttctggacatcgctaccaacagcgtgaagaccttcagggcaaaaatcacccttctcgctaccggaggcgccggcaaggtctacctctacacctgcaaccccgacgtggccaccggcgacggcgtagccatggcgtaccgggccggcgctaccgtcgccaacatggaattcatgcaatttcatcccaccaccctctaccatccccatgcaaaatcttttctcatttccgaagcggtacggggcgagggagccatcctgcgccgccgtgacggaactgcgttcatggagaaataccacaagctgaaggatctggccccccgtgacatcgtggcgagggccatcgacaatgagatgaagacccatggcgacgactgtgtctacctggatatcacccacaaagacccggaatacgtccgcacccgcttccccaatatctaccagacatgtctggaattcggattggacatgactaaagaaccgctgcctgtggttcctgcggcccactacctttgcggcggtgtggcggtggacatgaacggtgaaactgacctaagccgtctctatgctatcggtgaggtagctttcaccggtctccacggcgcaaatcgcctggcaagcaactccctccttgaagcggcagtcttagcgggacgtgcctacaaacgggcgattgaggaactgcaacagaaccatttcgagtttccggaaatccccgagtgggatgcgggaactgccaccgacagtgacgaaatggtcgtcgtctcccaaaactgggacgaaattcggcggtttatgtggaattacgtgggaattgtccgttcggacaagcgtctcgagcgtgcacagcaccgcatccgcttgatccaggaagaaattgatgactactactgggatttcaccatcacctctgaccttattgagctgcgaaacatcgccacggtggcggaactgatcgtcaaatgcgccctgcaacggaaggaatcccgcggcctccactacaccatcgattatctggaacgtgacgacgtgcactggaagaaagatacttttttgaaaaaacagttctga

SEQ ID NO: 33268 - protein, 531 aa, Geobacter metallireducens GS-15
MKLATDFLVIGSGIAGLTFALQAARHGTVAIVTKREVTESATNYAQGGIATVFSQEDTFDAHVEDTLVAGAGICHEDVVRMVVEEGPKVIRNLIEWGVQFTRSGEAFDLTREGGHSQRRILHADDVTGREIERALVAAVRDNPNIQLYEHHIAIDLITMSKVTHKRVKPDRCLGAHVLDIATNSVKTFRAKITLLATGGAGKVYLYTCNPDVATGDGVAMAYRAGATVANMEFMQFHPTTLYHPHAKSFLISEAVRGEGAILRRRDGTAFMEKYHKLKDLAPRDIVARAIDNEMKTHGDDCVYLDITHKDPEYVRTRFPNIYQTCLEFGLDMTKEPLPVVPAAHYLCGGVAVDMNGETDLSRLYAIGEVAFTGLHGANRLASNSLLEAAVLAGRAYKRAIEELQQNHFEFPEIPEWDAGTATDSDEMVVVSQNWDEIRRFMWNYVGIVRSDKRLERAQHRIRLIQEEIDDYYWDFTITSDLIELRNIATVAELIVKCALQRKESRGLHYTIDYLERDDVHWKKDTFLKKQF

SEQ ID NO: 33269 - DNA, 1653 bp, Synechococcus elongatus PCC 7942
  CDS (1)..(1653): transl_table=11
ttgtctgactctgctgcgcctgctgccggttccaccgcctacgacgtgatcatcgtcggtgccggtgcggctggcctctacaccggtctctgcctgccgtcccattatcgggtggcaattctcagtaaggatctgccgcagcgatcggccagtgactgggcgcaggggggcttggcggcagtgacagctccagatgattcagccgatttgcactacgctgacacccttaaagcgggtgcagacctctgtgaaccggcagcggtccgcttgctggttgagtcggctccacgttgtgtggcttcgctgcttgaactgggggttgccttcgatcgcacgaacgatcatctggccttgaccctggaggccgctcattcccgccatcgggtgttgcacgcggctgacaccacggggcgggcgatcgtgacgacgctgcttgagcaagttctgcagcgccccaatcttgaaattttggctcagagcctggcagttgacctttggcgcgatcgcgagggtcactgctgtggtctcttgctcctgcaaggtcagcagctacgctggctagctgcccgcgccgtcattctggcttgtggcggtggggggcaagtcttctcgcagacgaccaatccagctttgagcaccggcgatggcgtggctttggcaggccgagcaggagcgaagctgcgagatctcgagtttttccaattccatccgactgcactggtttggccgggtgcaccgcgctttttgatcagtgaagcagtccggggcgaaggggctcatgtggtggatgcccagggcgatcgcttcctgtttcgctacgacgatcgcggcgaactggcaccccgcgatattgtcagccgtgctatctaccggcatttactagagacgggtacggagcaggtctggctagatttgcgaccgattccggcagcgaccgtcgagcatcgcttccccaatatcttgcagaagtgtcgccgctggggtttggatcccctccagcaaccgctaccgattgcgcctgctgcgcactactggatgggtggcgtctacaccaatctcaacggcgcaaccacttgtcctggcctctacgccgttggcgaaacagcttgtacgggcgtgcatggagccaaccgccttgccagtaattccctgctggaatgtttggtgtttggtcgtcagtttcaaaacctgcaacttcctgctgcgatcgccgcttctagtcgcctcgattcagtccacccattaagcgtgatgggcgatcgcgatcgctggaaaaagcaacgacaagcgctgcaggatttggtctggaaagctgcaggcatctgtcgcgatgccgatcgcttgcaggcggcgttagcccaggtcgaagtctggcaagccgacttggacgctgagcccctcagtcaagcaatcgcggcgattcccctgggacagacccagcagctagacggtctagacgctgaagcgctgagggattggggcgaactgcgcaacctcttagcgatcgcccagttgatcctcaaaagcgctgatttccgcacagaaagccggggtggtcactaccggagcgactaccccaaatccaatccaggttggcgagtccatacggatgttcaatcaggccgatggggcacgaccgcgatcgggccatga

SEQ ID NO: 33270 - protein, 550 aa, Synechococcus elongatus PCC 7942
MSDSAAPAAGSTAYDVIIVGAGAAGLYTGLCLPSHYRVAILSKDLPQRSASDWAQGGLAAVTAPDDSADLHYADTLKAGADLCEPAAVRLLVESAPRCVASLLELGVAFDRTNDHLALTLEAAHSRHRVLHAADTTGRAIVTTLLEQVLQRPNLEILAQSLAVDLWRDREGHCCGLLLLQGQQLRWLAARAVILACGGGGQVFSQTTNPALSTGDGVALAGRAGAKLRDLEFFQFHPTALVWPGAPRFLISEAVRGEGAHVVDAQGDRFLFRYDDRGELAPRDIVSRAIYRHLLETGTEQVWLDLRPIPAATVEHRFPNILQKCRRWGLDPLQQPLPIAPAAHYWMGGVYTNLNGATTCPGLYAVGETACTGVHGANRLASNSLLECLVFGRQFQNLQLPAAIAASSRLDSVHPLSVMGDRDRWKKQRQALQDLVWKAAGICRDADRLQAALAQVEVWQADLDAEPLSQAIAAIPLGQTQQLDGLDAEALRDWGELRNLLAIAQLILKSADFRTESRGGHYRSDYPKSNPGWRVHTDVQSGRWGTTAIGP

SEQ ID NO: 33271 - DNA, 1599 bp, Rhodospirillum rubrum ATCC 11170
  CDS (1)..(1599): transl_table=11
atggccagcgtttcgcccgacgcgccggtggtgatcgtcggcggtggtctggccgggctgttttgcgccctgaagctggcgccacgcccggtcaccctggttgtcgccgcccccttgggccagggcagttcctctgcctgggcccaggggggcatcgccgccgccctgggcgacgacgacagcgccagcgcccatgcccgcgataccatcgccgccggcgccggccttgtcgatccgctgagcgcgagcatccttgccggggaggccggggcgcggatcaccgatcttcttggctatggcgtgccctttgatcgcgacgccgccggccggcttgtgttgtcgcgcgaagccgcccattcggcgcggcgcatcgtgcgggtgcgcggcgatggcgccggggcggcgatcatggccgccctgatcggcacggttggccgcacaccctcgatccgggtgatcgaaggcgtggccgaggggcttctaagcgatggccaaaggatcggcgggatcgtggtgcgcccccgccccgacgcggcggccgaggccctggcggcgggcgccgtcgtgctggcttcggggggcgtcggcgccctctatggcgtcaccaccaatccgcccgaggctttcggcggcggcttggcgatggcggccgaggccggcgccttgctcgccgattgcgaattcgtgcagttccaccccactgccctcgccgttggccttgatccggcgccgctggccaccgaggccctgcgcggcgagggggcgatcctggtcgatgcccaaggccggcgcttcatgaccgccctcgaccccgccgccgagcttgcgccgcgcgatgtggtgacccggggggtggcggcggcgatcaaggccggcaagggcgccttcctggatgcccgcaccgcccttggtgcggcctttccgcaagctttcccaacggtttacgcggcctgtcgcgcctcggggatcgatccggtccgccaaccgatcccgatcgcccccgccgcccattatcacatgggtggggtgctgaccgacagcttcggccgcacatcgatcgacgggctgtgggcggttggcgaggtcgcctgcacgggggcccatggcgccaatcgtctggcctcgaactccttgctcgaagccgtggtcttcgccgcccgggtggccggggatgtgggcgccgccccgctccgccgcggctggccgccgccggcgccgcccgacctttccccccgccccccaccggccgaggacgccgccgccatcacccgcctgcgggcaacgatgagcgcccgggtcggcgtgatccgcgacggccagggcctggaaagcgccctggcgacgatcgaaaccatcgccgctggcgcccgctcgccccgcctgcgcgccatgaccaccgccgcccggctgatcaccgccgccgccctggcgcggcgcgaaagccggggcgcccatttccgcgccgattatccggcgaccgatccggcgcaaagccaccgcgcgacggcgccgtttggccccttgcgcaccgttccgccccaccccgcccagagcctgggggagggtctggccgcacccccgatggagacccgctcatga

SEQ ID NO: 33272 - protein, 532 aa, Rhodospirillum rubrum ATCC 11170
MASVSPDAPVVIVGGGLAGLFCALKLAPRPVTLVVAAPLGQGSSSAWAQGGIAAALGDDDSASAHARDTIAAGAGLVDPLSASILAGEAGARITDLLGYGVPFDRDAAGRLVLSREAAHSARRIVRVRGDGAGAAIMAALIGTVGRTPSIRVIEGVAEGLLSDGQRIGGIVVRPRPDAAAEALAAGAVVLASGGVGALYGVTTNPPEAFGGGLAMAAEAGALLADCEFVQFHPTALAVGLDPAPLATEALRGEGAILVDAQGRRFMTALDPAAELAPRDVVTRGVAAAIKAGKGAFLDARTALGAAFPQAFPTVYAACRASGIDPVRQPIPIAPAAHYHMGGVLTDSFGRTSIDGLWAVGEVACTGAHGANRLASNSLLEAVVFAARVAGDVGAAPLRRGWPPPAPPDLSPRPPPAEDAAAITRLRATMSARVGVIRDGQGLESALATIETIAAGARSPRLRAMTTAARLITAAALARRESRGAHFRADYPATDPAQSHRATAPFGPLRTVPPHPAQSLGEGLAAPPMETRS

SEQ ID NO: 33273 - DNA, 1635 bp, Syntrophus aciditrophicus SB
  CDS (1)..(1635): transl_table=11
atggaaattaaaacggatttcctggttctgggcagcggcatcgctggtctcagtttcgccatcagggcggctgagctgggaacggttgccattgttacaaaaaaagaaaaatcagagtcaaataccaattacgcccagggaggaattgccgcggtttacgattcgcaggatcgatttgaatatcatatccgcgatacattaatttgtggagcgggtctctgcaagaaggatgtggtcgaatttgtcgttcgggaagggccacagcgtgtccaggagctcgtagactggggagtcgacttcactcgagctgcgcctggctcttccaccctttatgatctgggtcgggagggaggccattccatgcgtcgcgttctgcatgccaaggatctcacaggaagcgaaatcgagcgcgcattgaatgaaaaagccagctccaattcgaatatccaggtttatgagaatcatctggccgtcgatcttataacaatgtcttcccttatggaaatgggaaaggaagagagttctcctgatcgctgcctcggtgcgtatgtgctcgatatcaataacagtcaggttcacacctttgtcgctgagtatgttgttctggccacgggtggagcgggcaaggtttacctgattacaaccaacccggatattgcgactgcggacggcatcgccatggcctacagggccggagcgaggattgcaaacatggaattcatccagtttcaccccacctgcctttatcaccccgatgccaagtcatttctgatcagcgaagcggttagaggcgaagggggcatcctgaagctgaaaagcggtgataccttcatggaaaagtatcattccatgcaaagcctggcaccccgggacgtggttgccaaagccattgacaacgaattgaaaaaatccggcgatgactttgttctgctcgatatttcccataaggacagagaatttatcctcaaccgcttcccgaacatttatcacaaatgcctggaattcggtattgacatgactcgggaagccattcccgtcgtccccgcggcacattatctctgcggaggcgtagaggtgaaccatcatggagagacaagcatcgaccggcttttcgctcttggcgaggtttcctgcacgggacttcacggagccaaccggctggccagcaattctcttcttgaagcggtggtttacgcccatcgggccttcatgagggcctccgaattaccgcgccggtacagggaagcgcctgtttccattccgtcctggggtcagcggcgggccattgaaagcgacgaatccgtcgttgtttcccataactgggatgaggttcgtcggtgcatgtggaattatgtcgggattgttcgctccaacaaacgcctggacagggccgcacgccgcatcgacctgatcaatcgggaaattgacgaatactatcagaaatttctaatcactaaggatcttattgaactgcgcaacatcgcgacggcggccatgctgatcgttcagtgcgccaaaatgagaaaagaaagcagagggctgcattacaacatcgactaccccgaaagggacgacaaaaactggcagacggacacctgcatctccaagcgaatgatctgccggcagggggaatga

SEQ ID NO: 33274 - protein, 544 aa, Syntrophus aciditrophicus SB
MEIKTDFLVLGSGIAGLSFAIRAAELGTVAIVTKKEKSESNTNYAQGGIAAVYDSQDRFEYHIRDTLICGAGLCKKDVVEFVVREGPQRVQELVDWGVDFTRAAPGSSTLYDLGREGGHSMRRVLHAKDLTGSEIERALNEKASSNSNIQVYENHLAVDLITMSSLMEMGKEESSPDRCLGAYVLDINNSQVHTFVAEYVVLATGGAGKVYLITTNPDIATADGIAMAYRAGARIANMEFIQFHPTCLYHPDAKSFLISEAVRGEGGILKLKSGDTFMEKYHSMQSLAPRDVVAKAIDNELKKSGDDFVLLDISHKDREFILNRFPNIYHKCLEFGIDMTREAIPVVPAAHYLCGGVEVNHHGETSIDRLFALGEVSCTGLHGANRLASNSLLEAVVYAHRAFMRASELPRRYREAPVSIPSWGQRRAIESDESVVVSHNWDEVRRCMWNYVGIVRSNKRLDRAARRIDLINREIDEYYQKFLITKDLIELRNIATAAMLIVQCAKMRKESRGLHYNIDYPERDDKNWQTDTCISKRMICRQGE

SEQ ID NO: 33275 - DNA, 1713 bp, Syntrophus aciditrophicus SB
  CDS (1)..(1713): transl_table=11
gtgtcgatgctgccgcaattgatcaacatggatacacagcatacagagatcgttgttacagatatcctgatcattgggagtggcatcgcgggactcagagcggctctcgaagcaagtaaatgcgggaaaaaagtaattatactgactaaaagcagaatcaccgattcgaatacctattacgcccaaggcggaatcacaggtttagaccctgaacgtgtagccagagggaaagacagttatgaatcgctcatacagaatacactggcagcaggtgatggcctgtgcaacaagcaagttgtggatttttttgcacatcattcttacgaaccaataaagtttttgattcagcagaatgttcctttttcaaaggatgctgacggctggatactgcaccaggaaggcggccatgagcatgaaagaatatactgtgtcgcggattatacgggcaaagcgattgaagaaacactggcaggcaaggtgctgcaggacaaaaacataaaagtatatgaacattttcttaccttcacattaataaccaggcgtaaactcaggaaaaatccaaaccttgacgacaggtgtcttggtgtttacgcgatagaccgcctgaatgaaacagtggcagcattcaaggcaaacgccgtaatactggcaacgggtggagctggaagagtatttcagtacacaagcaacccggacaatgctaccggcgacgggattgcaatggcatattacgttggggcaaaaatcgctaatatggaattctttcagtttcatccgacggtattatacgaaccctttggaatgcagcctaatgaacggagatttctgctgaccgaagcattacgtggagtcagcgtgggcggaatactgaccaccagcccggattctacggaagattttgtattagcgtatcatcctgacggatcgcacgcgactcgtgataaagtatcgcaggctgtcgatgctgaaatgaaaagatcagggttaaaacatgtttatttgaatgtcaccacgagaatttcaggaaaaactcccgaatatatcaaggaacattttccccagatatacgctcactgcctcaacaaaggcatagatataaccgtgcagccaatccctgtcgttccggctgcacattatacttgtggaggagtactggttgatatccgcgggagaacaagcattcccggattgtttgcaataggcgaagtatcatgtaccgggctgatgggagcgaatcgtctggcgtctaattcgttggctgaagcggcattatttggaaaagttgcagcagatgaagcgataaaattttctgaaaacaaaaatacagaggatgtgcctgcctggtataccaccggaatcatcagccatgcagacgtcgcgacagtaaaccagatatgggatgtggccagaacgacgatgatgagtttatgcggaatcgacagaactgaagagagattaagagcagccgtcggcatattggatagtttatatgacacaataaacaaaatatactgggggtattatcccaacgatcaaatatttgaaaccagaaacctggtgcaggcagcaaaattaatcgccaaagcggcattattcagaaaggaaagtcgtggagggcattacaggtcagattatccacagaaaaaacctgaatacgaatccatgacattaatacagaacggaacagagatgaaactagtgcccgtagaataa

SEQ ID NO: 33276 - protein, 570 aa, Syntrophus aciditrophicus SB
MSMLPQLINMDTQHTEIVVTDILIIGSGIAGLRAALEASKCGKKVIILTKSRITDSNTYYAQGGITGLDPERVARGKDSYESLIQNTLAAGDGLCNKQVVDFFAHHSYEPIKFLIQQNVPFSKDADGWILHQEGGHEHERIYCVADYTGKAIEETLAGKVLQDKNIKVYEHFLTFTLITRRKLRKNPNLDDRCLGVYAIDRLNETVAAFKANAVILATGGAGRVFQYTSNPDNATGDGIAMAYYVGAKIANMEFFQFHPTVLYEPFGMQPNERRFLLTEALRGVSVGGILTTSPDSTEDFVLAYHPDGSHATRDKVSQAVDAEMKRSGLKHVYLNVTTRISGKTPEYIKEHFPQIYAHCLNKGIDITVQPIPVVPAAHYTCGGVLVDIRGRTSIPGLFAIGEVSCTGLMGANRLASNSLAEAALFGKVAADEAIKFSENKNTEDVPAWYTTGIISHADVATVNQIWDVARTTMMSLCGIDRTEERLRAAVGILDSLYDTINKIYWGYYPNDQIFETRNLVQAAKLIAKAALFRKESRGGHYRSDYPQKKPEYESMTLIQNGTEMKLVPVE

SEQ ID NO: 33277 - DNA, 1701 bp, Frankia sp. CcI3
  CDS (1)..(1701): transl_table=11
gtgaccgtgctaccttgccggctcggcgcgccccgcccgggatggatgcgcgccgcggacgtcgtcgtcatcggttcgggcatcgccgggctcacgacggtcctgcacctgcgccgggcgctgcccgccgcccgggtgctgctggtgaccaaggcgcacctcgacgccgggtcgacccggtgggcgcagggtgggatcgccgccgcgctcgccgcggaggactcgcccgatgatcatcttgccgacaccctggtcgccggcgtcgggctgtgcgacgaggacgcagcccgagtgctggtccgcgacggaccggcgcgggtgcgtgagctcgccgagctcggcgcccggttcgatcggaccaccgacggctcgttcgccctcactcgggagggcggccatctgcgcaaccgcatcatccatgcgggtggggacgccaccggcctggaggtggaacgcgccctgatcaccgccgtccgggccgatgagagcatcgaggtcatcgaacacgccctggtcctcgacctgctgctcgactccgacggccgggccgccggcgctaccctgcacgtgctgggggagggcagccgggacggcgtcggcgcggtgacggcgggcgcggtggtcctggcgaccggcgggatggggcagatcttcgcgtcgacgaccaatcccggcgtctccaccggggacggggtggcgctggctctgcgcgcgggcgccgtcgtcgcggacctggagttcgtccagttccacccgaccgccctgtggctacccccgtccaggccgggcgccgtcgccgaactgctcgggggccagcagccactggtcagcgaggccatgcggggggagggtgccgttctcgtcgacgcggccggcgaacgggtgatggcgggcgtccatcggctggccgacctcgcgccgcgcgacgtcgtcgccaagcagatgtcgcgggtcatggcggcccagggggtcgatcacctgttcctggacgcccgggggctgggcgcggcgaccatcgagcggcggtttccctcgatcaccgcgcgctgccggtccgccggcatcgatccggtcgccaggccgatccccgtcgcgccggccgcccactacgccagcggcggggtgcgcacggatctgtggggccgcacgagcgtggccggcctgtacgcctgcggggaggtggcctgcaccggggtgcacggcgccaaccggctcgcgtcgaacagcctgctggaggggctggtcttcgccgcacgcatcgcggagcacctggccggcacagcgcccggcggccggcaccgcgtcgccatccccgccgcgccggtggtcggtcgcggcagtggtctgaccgaccccgccgaacgcgcggagctcgcgcgcgcgatgaccgacggtgccggggtgctgcgcagcgcggacagcctgcgggcgacggcgaaggtactggccggtctcggggacctgcgggtcagcggggcgacggtcacggccgggccgccggcctgggagatgaccaacctgcgcacggttgcgacggccctcgccgccgccgccgccagccggacggagacccgcgggtcccattggcgagaggacttcggtgagcgggacgacgaacactggctcggccggatcctcacccggctcaatccagaaggggaactgatcgtggacgtcgagcccatgcgcggctcgcggtga

SEQ ID NO: 33278 - protein, 566 aa, Frankia sp. CcI3
MTVLPCRLGAPRPGWMRAADVVVIGSGIAGLTTVLHLRRALPAARVLLVTKAHLDAGSTRWAQGGIAAALAAEDSPDDHLADTLVAGVGLCDEDAARVLVRDGPARVRELAELGARFDRTTDGSFALTREGGHLRNRIIHAGGDATGLEVERALITAVRADESIEVIEHALVLDLLLDSDGRAAGATLHVLGEGSRDGVGAVTAGAVVLATGGMGQIFASTTNPGVSTGDGVALALRAGAVVADLEFVQFHPTALWLPPSRPGAVAELLGGQQPLVSEAMRGEGAVLVDAAGERVMAGVHRLADLAPRDVVAKQMSRVMAAQGVDHLFLDARGLGAATIERRFPSITARCRSAGIDPVARPIPVAPAAHYASGGVRTDLWGRTSVAGLYACGEVACTGVHGANRLASNSLLEGLVFAARIAEHLAGTAPGGRHRVAIPAAPVVGRGSGLTDPAERAELARAMTDGAGVLRSADSLRATAKVLAGLGDLRVSGATVTAGPPAWEMTNLRTVATALAAAAASRTETRGSHWREDFGERDDEHWLGRILTRLNPEGELIVDVEPMRGSR

SEQ ID NO: 33279 - DNA, 1599 bp, Novosphingobium aromaticivorans DSM 12444
  CDS (1)..(1599): transl_table=11
gtgagcggccaggatctgaaaagtcacgatgtcctgatcatcggttcgggcgcggcgggcctgaccgcagcgctggtgcttgctgaaacctgccgcgtgcttgtcctggccaagggcgggctcgacggcggctcgaccaactgggcgcaaggcgggatcgcggcggtgctcgacgccggcgacactttcgaagaccacatccgcgacacgatgatcgccggcgcgggcctgaaccgccgcgagacggtggagttcgtggtcgaacatgcgcccgccgcgatccgccggctggtcgaccttggcgtgcccttcaacgccgaggcgggttcgctccatctgacgcgggaaggcgggcattcgcatcgccggatcgtccatgtcgacgatgccacgggcgcggcagtgcagaaggcgctgctcaaggccgcgcgcgaacatcccaacgtgacgctcctgcccggccgcacctgcatcgacctgatcacgggccgccacgaggccgcgcgctattccggttctggccgggtctggggggtctatgccctcgacgaagcgagcggcaccgtggaagcgcataccgcccgggcgacgatcctggccaccggcggcgcgggccgcgtctatcagttcagcaccgccccgcgcggcgcaacgggcgacggcatcgccatggcatggcgggcaggcgcgcgcgtctccaacatggaaatgatgcagttccacccgacctgcctctacaacctcgaggtcaagaacttcctcatcaccgaggcagtgcgcggcgaaggcgggcgcctcatcaatccgcgcactggcgcgcggttcatggaattctacgatccccagcgcctcgaactcgcgcctcgcgacgtcgtggcgcgggcaatcgacgccgagatcaagaagttcgggctcgacttcgtgcatctcgacatcagccacatgccggcggatttcgtgcgggggcatttccccaacatccacgagaagctgctggggctgggcatcgacatgacgacccagccgatcccggtggtgcccgcgcagcattatacctgcggcggcgtgctgatcgatctcgacgggcggacggacctgccagggctctatgctgccggcgaatgcaccgaaagcgggcttcatggcgcgaaccggctggcgtccaattccctgctggaatgcttcgtcttcggcgatgcggccgcgcgcgacatcctgcgccgctgggacagcttcgaggcaccgcccgaagtgcgcgcctgggacgagagccgggtgacggactcggacgaggaagtggtcatcaagcagaactggaccgaaatccgccggttcatgtggaactacgtcggcatcgtgcggaccaacaagcggctcgagcgcgcggcgcaccgcatccagatgctgtctgacgaggtcaacgactactacggccacttccgcgtgaccacggatctcatcgaactgcgcaacctgctgcagagcgcggaactgatcgtgcgttccgcccgcgcccggcacgagagccggggtctgcactatacgctcgactatccgcagaccaacgaagtggcgcgcgataccgtgctggtgccctga

SEQ ID NO: 33280 - protein, 532 aa, Novosphingobium aromaticivorans DSM 12444
MSGQDLKSHDVLIIGSGAAGLTAALVLAETCRVLVLAKGGLDGGSTNWAQGGIAAVLDAGDTFEDHIRDTMIAGAGLNRRETVEFVVEHAPAAIRRLVDLGVPFNAEAGSLHLTREGGHSHRRIVHVDDATGAAVQKALLKAAREHPNVTLLPGRTCIDLITGRHEAARYSGSGRVWGVYALDEASGTVEAHTARATILATGGAGRVYQFSTAPRGATGDGIAMAWRAGARVSNMEMMQFHPTCLYNLEVKNFLITEAVRGEGGRLINPRTGARFMEFYDPQRLELAPRDVVARAIDAEIKKFGLDFVHLDISHMPADFVRGHFPNIHEKLLGLGIDMTTQPIPVVPAQHYTCGGVLIDLDGRTDLPGLYAAGECTESGLHGANRLASNSLLECFVFGDAAARDILRRWDSFEAPPEVRAWDESRVTDSDEEVVIKQNWTEIRRFMWNYVGIVRTNKRLERAAHRIQMLSDEVNDYYGHFRVTTDLIELRNLLQSAELIVRSARARHESRGLHYTLDYPQTNEVARDTVLVP

SEQ ID NO: 33281 - DNA, 1668 bp, Saccharophagus degradans 2-40
  CDS (1)..(1668): transl_table=11
gtgaaaaaagccaaaccctctcgcaaaacgctcgcccacccctcccaaacacacaatgtcgatgtacttgttataggtagcggtgctgcaggcttaacccttgcactcaatcttgctgggcattgtaaagttgccgtactcagtaaaggcaacctgcgtgcaggctcaacctggtacgcacaaggcggtattgctgcagttttagataataacgacagtgttgaatctcatgttaaagacacactcgttgcgggcgcaggcctttgtcatgaagacgccgtagactttaccgttagaaacagcaaaagcgcgattgaatggctaatcaacctcggcgttaactttacccgtaatgaagattccgaaaactaccacctaacccgtgagggtggccacagccacagacgaatcattcacagtgctgatgcaacaggtaaagccgtgcacactaccctgctcgagtctgcgcaggttgccaaaggtgtggagctatttgaaaactacattgcactggacctcattcgacaaccagacccaaacagcaaacgcttgcgctgcacgggggcctatgtatttaaccgccaccaagaccgagtggaactgtttaatgcaaaagccgtggtcttggccacaggtggtgcaagtaaggtgtacctctataccagtaacccagacagcgctaccggcgacggaatagccatggcgtggcgtgcaggctgccgagtggccaatatggaatttaatcagttccaccccacttgcctttaccaccccaaggccaaaaccttccttattaccgaagcattgcgcggcgaaggggctaaattgagattgcccgacgggtcgcagtttatgcacaacttccattcgctgggcgaattagcacctagggatgtcgtagctcgcgcaattgaccatgagatgaaacgcctaggtagcgattgcctgtatttggatattagccatcgcacaccagagtttatcgaatctcacttccctaccgtgcgagaaaagtgcttagaatttgggatagatatcaccaaggagccaatacctgttgtaccagccgcgcactatacctgcggtggcgttgtggtgaacaacaaaggccaaaccgatttacttaacctttacgcaataggtgaaacctcattcacaggcctgcacggcgctaatcgcatggcgagcaattcgctactagagtgcattgtatacgcccgctctgcatccgaatcgatactcgccactttaaataacattgccccaccgcaggcttcaccacaatgggatgaatcgcgggtaaccaactccgatgaagacgttgtgatttcgcacaactgggatgaattgcgccgctttatgtgggattacgtgggcattgttcgcacccacaaacgcttagagcgcgcaactcatcgcattaagcttttgcaaaaagaaattaacgattactactctaactacaaagtaagtaacgatttaatcgaactgcgcaacctcgccgtcgctgccgagctgattattcgctcagccattcaacgcagagaaagccgaggactacattattccttggattaccccgaactatcccccatcgctcaagataccatcctcgtacccatgaactacgcggcacaaaacattattgttcacgcccctacacaataa

SEQ ID NO: 33282 - protein, 555 aa, Saccharophagus degradans 2-40
MKKAKPSRKTLAHPSQTHNVDVLVIGSGAAGLTLALNLAGHCKVAVLSKGNLRAGSTWYAQGGIAAVLDNNDSVESHVKDTLVAGAGLCHEDAVDFTVRNSKSAIEWLINLGVNFTRNEDSENYHLTREGGHSHRRIIHSADATGKAVHTTLLESAQVAKGVELFENYIALDLIRQPDPNSKRLRCTGAYVFNRHQDRVELFNAKAVVLATGGASKVYLYTSNPDSATGDGIAMAWRAGCRVANMEFNQFHPTCLYHPKAKTFLITEALRGEGAKLRLPDGSQFMHNFHSLGELAPRDVVARAIDHEMKRLGSDCLYLDISHRTPEFIESHFPTVREKCLEFGIDITKEPIPVVPAAHYTCGGVVVNNKGQTDLLNLYAIGETSFTGLHGANRMASNSLLECIVYARSASESILATLNNIAPPQASPQWDESRVTNSDEDVVISHNWDELRRFMWDYVGIVRTHKRLERATHRIKLLQKEINDYYSNYKVSNDLIELRNLAVAAELIIRSAIQRRESRGLHYSLDYPELSPIAQDTILVPMNYAAQNIIVHAPTQ

SEQ ID NO: 33283 - DNA, 1617 bp, Methylobacillus flagellatus KT
  CDS (1)..(1617): transl_table=11
atgcagcaatacgacgtccttatcatcggcagcggcttagcaggcctcactctcgccctcaaggtcggggcaagtaaaaaagtctgcttgatcagcaaacgcagcatcaacgatggctcaagcaactgggcgcaaggcggcattgctgccgtgcttgcagatgatgactcaacagaggcgcatattcaagatacccttatcgctggcgcgggtttatgcgatgctgccgttacccgcctggttgcagaacatggccgggaaacagtcgagtggctgattgcagaaggcgtgcctttcacacgtgaagatgacaatagtggtttccatcttacccgcgaaggcggtcacagccatcggcgcatcattcatgcagccgatgccactggacatgccgtccagaaaacccttgccgaaaaagtgcgcaagcaccccaacatcaccgtcttggaagagcatattgcagtcgacctcatcactgctggcaaagtcaacatggaaggcagcgcctgcctgggcgcctatgtactggacaatacgactggcaaggtgctcacgattggtgcgcagcataccgtattagccaccggcggaacaggaaaggtctacctctataccaccaacccggatgtcgcttctggcgacggcgttgccatggcttggcgcgcaggctgcagaatcgccaatatggaattcatccagttccatcctacctgcctttaccacccagaagcaaaatcgttcctgatttcagaggctatcaggggtgagggcggcatactgaagctgccggacggtacacgtttcatgccttggcatgatgagcgcgccgaattggcgccccgcgacatcgtggcgcgcgcaattgattttgaaatgaaaaaacgcggcctggagtgcgtctacctcgacatatcccacaagccagcagacttcatcctttcccacttccccacgatttaccgccgctgcttcgagctgggcatcgacatcacgcgcgaacccattcccgtcgtgcctgcagcacactatagctgcggcggcatcatgaccgaccatattggtcgcacagacattccgcgcttatatgccatcggggagacagcctgtaccggcctgcacggcgccaaccgccttgccagcaattcgctgctggagtgcctggtattcggccaggcagcagcgcaggacatcctcaggcagcctcagatgccggaaatcatcctgccctactgggatgagagccgcgtcaccgatgcggacgaggaaatcatcatcacccacaattggagcgagctacgtcgcaccatgtggaattatgtcggcatcgtccgcaccaacaagcgcctgacacgcgcattgcaccgcattcatttgctgcgcgacgaagtgcacgagttttatagcaatttccgcatcagcaacaatctgatcgaattgcgcaacctgttgcaggttgcggaacttatcgtgaagagcgccatggagcgcaaggaaagccgcggcttgcactacagcaaggattacccgttcctggcggaggaagccgtacctaccgtgctggagccctcaaactattacagcttgctggacagccagcatggacacgaacaccactga

SEQ ID NO: 33284 - protein, 538 aa, Methylobacillus flagellatus KT
MQQYDVLIIGSGLAGLTLALKVGASKKVCLISKRSINDGSSNWAQGGIAAVLADDDSTEAHIQDTLIAGAGLCDAAVTRLVAEHGRETVEWLIAEGVPFTREDDNSGFHLTREGGHSHRRIIHAADATGHAVQKTLAEKVRKHPNITVLEEHIAVDLITAGKVNMEGSACLGAYVLDNTTGKVLTIGAQHTVLATGGTGKVYLYTTNPDVASGDGVAMAWRAGCRIANMEFIQFHPTCLYHPEAKSFLISEAIRGEGGILKLPDGTRFMPWHDERAELAPRDIVARAIDFEMKKRGLECVYLDISHKPADFILSHFPTIYRRCFELGIDITREPIPVVPAAHYSCGGIMTDHIGRTDIPRLYAIGETACTGLHGANRLASNSLLECLVFGQAAAQDILRQPQMPEIILPYWDESRVTDADEEIIITHNWSELRRTMWNYVGIVRTNKRLTRALHRIHLLRDEVHEFYSNFRISNNLIELRNLLQVAELIVKSAMERKESRGLHYSKDYPFLAEEAVPTVLEPSNYYSLLDSQHGHEHH

SEQ ID NO: 33285 - DNA, 1599 bp, Burkholderia xenovorans LB400
  CDS (1)..(1599): transl_table=11
atggaattcgatgtggcgattgtcggtagcggtctggccggtttgagcgttgcgctcaatctggcggagacccggcgggttgcggtggtcgccaagcgatcgatgaccgaaggcgcgagcgactgggcacaaggcggcatcgccgcagtactggattcggcggacagcattgaaaatcacgtccgcgatacgctgattgccggcggtggcctgtgcgacgaagcggcgacgcgcttcatcgtcgaacatgggcgagccgcaatcgaatggttgatcgcgcaaggcgtgccgttcaccaaagacgacgccgccgaactcggcttccacctgacgcgcgaaggcggccatagccaccggcgcatcatccatgcggcagatgcaacaggccacgccgtggtggccacgctcagcgagcgggtgcgccgtcacccgaacatcacgctgctcgaagatcactacgcaatcgacctgatcacgtccgaccgcctcggcttgccaggacggcgttgtcacggcctgtatgcactcgacctgcaaagcggccgcaccgtcacgatcgaggcgccgcataccgtgctcgccaccggcggcgccggcaaggtttatctctacaccacgaatcccgacaccgcgaccggcgacggcattgcgatggcgtggcgggccggctgccgcgtatccaatatggaattcatccagttccatcccacctgcctgttccacccgtatgcaaagtcgtttctgatttcggaagcggtgcgcggcgaaggcggtattctcaaactgccggacggcacgcgtttcatgccgaaccacgacgaacgcgccgagctcgcgccgcgcgatatcgtcgcgcgtgcgatcgacttcgaaatcaagaagcgtggcatcgattgcgtgtatctggacatcagccatcaaccgcccgaattcctgcgtgagcacttcccgacgattctggcgcgctgtctggagttcggcatcgacatcaccaaggaagcgattccggtcgtgccggccgcgcactacacctgcggcggcgtcgtgaccgatctggcgggacgaacagacctggcaggcctctacgcggtcggtgagacgtcatgcacgggtctgcacggcgcgaaccggctcgccagcaactccctgctcgaatgcatcgttatcggacgctccgcggcgcaagcgatcgaagaagaaggttttagcgccgctgtccatgccccgctgccggattgggacgaaagccgcgtgtcggatccggacgaagaagtcgtggtcgcgcacaactgggacgaactgcgccggctgatgtggaattacgtcggtatcgtacgaacggacaagcggctcgcacgagcgaagcatcggcttgccctgctgcgcgatgaaattcacgagtattacgccaacttcaaggtgagccgcgacctgctcgaattgcgcaatctggtcgatgtggcgtcgttgatcgtcgaaggcgcgcggtcgcggcgtgagagccgtggcttgcacttcagccgtgactggccggccactttgcccaaggcgctgcccacagtgctctcaccggagcatgtgcgcaaccgcaacgtgtga

SEQ ID NO: 33286 - protein, 532 aa, Burkholderia xenovorans LB400
MEFDVAIVGSGLAGLSVALNLAETRRVAVVAKRSMTEGASDWAQGGIAAVLDSADSIENHVRDTLIAGGGLCDEAATRFIVEHGRAAIEWLIAQGVPFTKDDAAELGFHLTREGGHSHRRIIHAADATGHAVVATLSERVRRHPNITLLEDHYAIDLITSDRLGLPGRRCHGLYALDLQSGRTVTIEAPHTVLATGGAGKVYLYTTNPDTATGDGIAMAWRAGCRVSNMEFIQFHPTCLFHPYAKSFLISEAVRGEGGILKLPDGTRFMPNHDERAELAPRDIVARAIDFEIKKRGIDCVYLDISHQPPEFLREHFPTILARCLEFGIDITKEAIPVVPAAHYTCGGVVTDLAGRTDLAGLYAVGETSCTGLHGANRLASNSLLECIVIGRSAAQAIEEEGFSAAVHAPLPDWDESRVSDPDEEVVVAHNWDELRRLMWNYVGIVRTDKRLARAKHRLALLRDEIHEYYANFKVSRDLLELRNLVDVASLIVEGARSRRESRGLHFSRDWPATLPKALPTVLSPEHVRNRNV

SEQ ID NO: 33287 - DNA, 1569 bp, Acidobacteria bacterium Ellin345
  CDS (1)..(1569): transl_table=11
atgaagcagattccctcccaggcagatttcatcgtgatcggcgccggcgtcgccggtttacgcgcctcgatcgaactcgccgctcacggctccgtcctttgtctcgccaagcgcgaggtcgccgaatccaacacccaatatgcgcaaggcggcattgcagtagccctcagcgatgaagacgagatcggccttcacctgcaagacaccatcaacgcaggcgacggcctggtcaacgccgaagccgcacgcgtgctggtggaagaaggtcctccgcggatcgaagagttgatcgagtggggtacgcagttcgaccgccatggcactaagctttctttcacgcgtgaaggcgcacacagccgtaaccgcgtgctgcacgctcacggcgactccaccgggcaggagatcggccgcgcgctgtacgccaaggcctcgaccatcccgcaaatccagtttctcgagtttgaattcaccacggagttgatcgtcgaacacgggcgcgtatgcggaatccgagtgcttgatgccgagaaccgcgcgcgttccatccgcgcctctggcgtagttctcgcaaccggtggcctcgggcaggtttatagcgacaccacgaatcccaccgtcgcgaccggtgatggcgttgcgatggcgtatcgcgccggcgctgaaatcagcgacatggagttcgtgcagttccatcccacggcgctgtacatcaaaggcgcgccacgcttcctcctttcggaagccctacgcggcgagggtgcatacctgcgcaacatggcgctgcaccgcttcatgccgaaatatcacgaactggcagagcttgcgccgcgtgatgtcgtagcccgcgccatcgcgcatgaaatcgaattagctggttcagctgaggccgtcgtctatctcgatctcacgcatcttccggccgatcgcacgcgcagccgtttcccgcggatttacaagacctgcctcgagtacaacatcgacatcgccaccgacctgattccgattcgtccggcggcgcattacgcaatgggcggtgtaaagactgacctcgatggccgcaccactttgccggggctttatgcggcaggcgagtgcgcgtgcaccggggtccacggcgcaaatcgcctggcaagcaattccctgcttgaaggtttggtttacggcgcgcgggccgcacgaacgctggccatggcgtttgcaaagctggaaactggcgcagcggagacgtccgtccaggtcaacgacactcccggcgctaacgagcaagctgaggccgtgcttcgcaaagtacaggccgcgatgtggcgcgatgtcggcgtcgttcgcgagggccagcgacttcgcgctgtaatcgccgaattggaagcgctgcgcagcgaaattcccgcgtttgcttcacgtcgggcatgggaagccgcgaacgtgctcgataccggcttgctcatcgcccgctcagcgctggcgcgcgaagagagtcgtggcgcgcactaccgcaccgatttcccggatcatcgcgatgaatttctgaagcactccgtcgtgcgcggcgacgccatcgtcttcgagtag

SEQ ID NO: 33288 - protein, 522 aa, Acidobacteria bacterium Ellin345
MKQIPSQADFIVIGAGVAGLRASIELAAHGSVLCLAKREVAESNTQYAQGGIAVALSDEDEIGLHLQDTINAGDGLVNAEAARVLVEEGPPRIEELIEWGTQFDRHGTKLSFTREGAHSRNRVLHAHGDSTGQEIGRALYAKASTIPQIQFLEFEFTTELIVEHGRVCGIRVLDAENRARSIRASGVVLATGGLGQVYSDTTNPTVATGDGVAMAYRAGAEISDMEFVQFHPTALYIKGAPRFLLSEALRGEGAYLRNMALHRFMPKYHELAELAPRDVVARAIAHEIELAGSAEAVVYLDLTHLPADRTRSRFPRIYKTCLEYNIDIATDLIPIRPAAHYAMGGVKTDLDGRTTLPGLYAAGECACTGVHGANRLASNSLLEGLVYGARAARTLAMAFAKLETGAAETSVQVNDTPGANEQAEAVLRKVQAAMWRDVGVVREGQRLRAVIAELEALRSEIPAFASRRAWEAANVLDTGLLIARSALAREESRGAHYRTDFPDHRDEFLKHSVVRGDAIVFE

SEQ ID NO: 33289 - DNA, 1590 bp, Myxococcus xanthus DK 1622
  CDS (1)..(1590): transl_table=11
atgccccatcggttcgatttcctcgtcctgggaggcggcgtggcgggtctttcgttcgccctccaggcggcccgccatggcacggtggccatcctcaccaagcgcgaccgtttcgaaagcaacacggcctatgcccagggcggcatcgccagcgtgctcgcgccccctgacaccttcgagtcccacatcgaggacacgctggtggcgggtgcggggctgtgccaccgcgacgcggtggaagtcacggtgaaggaaggccccagccgcgtgcaggagctggcggacctgggcgcggagttcaaccgccgcatcaccggcgaattcgacctcacccgcgagggtggccactccgcgcgccgcatcatccattcgggcgacatcaccggccgcgaggtgcagcgcgcgctgctcgccgcgtgtgacgaagcccccaacatcaccttcttcccgcagacggccgccatcgacctcatccaggaccggcgcgtcccctcccctggggtcagccgctgtctgggggtctacgccctgctggaagacggcgtcatcgagcgcttcctggccaaggtgacggtgctggccaccggcggcgctggcaaggtgtacctctacacatccaacccggacgtggcgacgggtgacggcgtggccatggcgtaccgggcgggcgcgaaggtggcgaacatggagttctaccagttccaccccacgtgcctttaccacccggaggccaagagcttcctcatcagtgaggcgctgcgcggcgagggcggcaagctgaagctcaagagcggcgcgtccttcatggagcgctaccaccccatgggcgcgctcgcgccgcgtgacgtggtggcgcgtgccatcgacgcggagatgaagcgcacgggcgacgactgcgtctacctggacatgacgcacctgggacgcgccttcctcgccgagcgcttccccaacatctacgccacctgcaaggcgttcaacatcgacatggcggtgcagcccatccccgtcgtcccggcggcccactacatgtgcggcggcgtggtgacggacctggagggacgcaccaacgtgcccagcctgtacgccatcggagaagtcacctgtacgggcctgcacggcgccaaccggctcgcgtccaactcgctgctggaagggctcgtcttcggccaccgcgccgtgcaggtggccgccgaagaagtgcgcgcccagccctctccctccgaggacccgccgccctgggattcgggcagcgcggtggagtcggatgagagcgtcgtcgtcacccacaactgggacgagattcgcaggctcatgtggaactacgtcggcattgtccgcacggacaagcggctgatgcgcgcgcggcgccggctggaactgctgcgcgaggagattcgcgactactactggcgcttcaaggtgactcgcgacgtcatcgagctgcggaacatcgccgacgtcgcctacctcatcgtcgactgcgccagccgccgcaaggagagccgcggcctccactacacgctggactacccgcacccggacgaccaccgctggttgcgggacaccgtcgtgtccagggagccgtga

SEQ ID NO: 33290 - protein, 529 aa, Myxococcus xanthus DK 1622
MPHRFDFLVLGGGVAGLSFALQAARHGTVAILTKRDRFESNTAYAQGGIASVLAPPDTFESHIEDTLVAGAGLCHRDAVEVTVKEGPSRVQELADLGAEFNRRITGEFDLTREGGHSARRIIHSGDITGREVQRALLAACDEAPNITFFPQTAAIDLIQDRRVPSPGVSRCLGVYALLEDGVIERFLAKVTVLATGGAGKVYLYTSNPDVATGDGVAMAYRAGAKVANMEFYQFHPTCLYHPEAKSFLISEALRGEGGKLKLKSGASFMERYHPMGALAPRDVVARAIDAEMKRTGDDCVYLDMTHLGRAFLAERFPNIYATCKAFNIDMAVQPIPVVPAAHYMCGGVVTDLEGRTNVPSLYAIGEVTCTGLHGANRLASNSLLEGLVFGHRAVQVAAEEVRAQPSPSEDPPPWDSGSAVESDESVVVTHNWDEIRRLMWNYVGIVRTDKRLMRARRRLELLREEIRDYYWRFKVTRDVIELRNIADVAYLIVDCASRRKESRGLHYTLDYPHPDDHRWLRDTVVSREP

SEQ ID NO: 33291 - DNA, 1467 bp, Rubrobacter xylanophilus DSM 9941
  CDS (1)..(1467): transl_table=11
ttgctagccgcggacgtggtcgtggtgggcagcggcgtggcggggtgcgcggcggcgctcgccgcggcccgccggggggcggaggtggtgctgctctccaaggccccggaccccgcggagaccaacacccgccacgcgcagggcggcatcgtctacaccggccccggcgactccccggaggcgctggtgcgagacatcctcgcggccgggggcggggaccggggggccgccgagctcctcgcccgcgaggggccgccgctcgtcggccgcctgctggtggaggagctcggggtccccttcgaccggggggagggcggcgggctggacctcgccctcgagggggcccactcggtgccgcgcatcctccactgcgccgacgcgacgggagaggagctgcagcgcgcccttttgcgggcggtgcgggcggagccgggggtggccctgctccccgggcgcgaggcgctgcggctggcggtgtccggggggcggtgcgccggggtttgcgtcgccgcgggcgggcgggccggggtcctcgccggccggtgcgtcgtgctcgccgccggggggctcgccgggctctacgcgcgcaccaccaacccccccggggccaccggcgacgggtgcgcgctcgccctcgaggccggcgcgcgggtgcgggaactgcactacgtgcagttccaccccacggccttcgcgggcccgggaggggaggccttcctcatatccgaggccgcgcgcggggcgggcggcgtcctgcgcggccccggcggggaggagttcatccgccaccccgccggctcgctcgcgccgcgggatgtgatctcccacgagatctgcgagatgatggcccgcaccggctccccctgcgcctacctggacatgacccacctccctgaggggctgctgagggagcgcttccccggggcctacgggcgctgcctgcgcgccggggtggagatgtcccgcgagcccgtccccgtctcgcccgccgcccactactcctgcgggggggtggccaccgacctgcgcggcaggagcagcctccccgggctcttcgccgccggggaggcggcctcgaccgggctgcacggcgccaaccgcctcgcctccacctccctgctcgagggcctgctcttcggctggcgggcgggggaggccgccgcggaggaggcccgccgccttccgcccgcgaggccgccggaggccgccgcggacccgccggagagggcgcccgggtgggccggggaggagctcgggcggatcctgtgggagcacgccgggccggtgcggaccgtcccctcgctgcgggagggtttgaggcgcctccgggagctgcgcgaggaggtggggccgtcctccctcgacgggcccctgctcgtggcggagaccctcgtgcggcaggccctctccgagggccgcagccgggggtgccaccggttgtcggacctggaggaggtgaggtcgtga

SEQ ID NO: 33292 - protein, 488 aa, Rubrobacter xylanophilus DSM 9941
MLAADVVVVGSGVAGCAAALAAARRGAEVVLLSKAPDPAETNTRHAQGGIVYTGPGDSPEALVRDILAAGGGDRGAAELLAREGPPLVGRLLVEELGVPFDRGEGGGLDLALEGAHSVPRILHCADATGEELQRALLRAVRAEPGVALLPGREALRLAVSGGRCAGVCVAAGGRAGVLAGRCVVLAAGGLAGLYARTTNPPGATGDGCALALEAGARVRELHYVQFHPTAFAGPGGEAFLISEAARGAGGVLRGPGGEEFIRHPAGSLAPRDVISHEICEMMARTGSPCAYLDMTHLPEGLLRERFPGAYGRCLRAGVEMSREPVPVSPAAHYSCGGVATDLRGRSSLPGLFAAGEAASTGLHGANRLASTSLLEGLLFGWRAGEAAAEEARRLPPARPPEAAADPPERAPGWAGEELGRILWEHAGPVRTVPSLREGLRRLRELREEVGPSSLDGPLLVAETLVRQALSEGRSRGCHRLSDLEEVRS

SEQ ID NO: 33293 - DNA, 1569 bp, Rhodococcus sp. RHA1
  CDS (1)..(1569): transl_table=11
gtgagcagcccggcccgggggatttcctgggaagagcacgccgacctcgtggtggtgggcggtggtgtggccggactgacggccgcacgcaccgcctcgctgcgcggactgaccgtgctcaccgtcagcaagggcggggcgacggacaccgcgacgcagtacgcgcagggcggcatcgcggtggtgggtgacgccgtcaccgattcggtggagtcgcatgtcgccgacacgtgcgaggccggggtgggcctgtgcgacgacgacgcggtgcgatcgatcgtggcgggcggccgtgatgccgtggccgcgttgaccgatctgggcgcggtgttcgaccgtggccgcgacggcgccgtctcgcgcacccgcgagggcgggcacagcacccggcggatcattcacgccggaggggacgccacgggcgccgaggtgcagcgagcactgggtgccgccgggcttcccgtcctgttcgacagcgtcgccctacgggtactcaccgacgcgcgcggtgtcaccggcgtgctcgtggattcgccgcgcggactcggcgtcgtccacacaccggccgtcctcctggccaccggcgggctcgggcagctgtacgcctgcagcaccaacccgcccggagccaccgccgacggcgtcgctctcgcgctggacgcaggcgcggccgtcgccgatctcgagttcgtgcagttccacccgaccgtcctgttcacccccggcggtctcggacggcgtccgctgatcagcgaggccgtccgcggcgagggtgcgatcctcgtcgacgccaacggcgaatcggtgaccgcgggtgtgcacccgcgcggcgacctcgccccccgcgacgtcgtgtcgcgggcgatcgcgtcgaggcttcgggaactgggtcacgaccgtgtctacctcgacgcgcgtcacctgtccggcttcgtgcagcgcttcccgaccgtgacggcctcgtgcctggacgccgggatcgatccgcgtgaacagctgatcccggtcgcgcccgccgcgcactactcgtgcggcggagtggtcaccgacgtcgacggacgcaccgccgtccccggcctctacgccgcgggcgaggtggcccgcaccgggctgcacggagcgaaccggctggcctccaacagtcttctcgaaggcctggtggtcggcgagcgggtcggcgccgcggccgtcgaacgcgccggcctccgcgtcgaggcaaccgaacccgagcagcgtgccctgccgtccgcacctcgggaactggtgcagcagttgatgaccggcaacgcctccgtcgtccgggacggtgccggcctcgatgcggtggccgccgccctggccgccgcgccacacacggtgcccgaggggcagaccgcgctcgaagacgccgcgctgaccctgacggcgtccgcactggtgctcgccgccgtggcgcggaccgaaagtcgtggatgccacacccgcagcgactacccgcagacatccgacgagtggcgccgcagcacgcacgtgcgtctgcgcgacagcgaactcgagcttctcgaaccccaactgacaggagtgctgtga

SEQ ID NO: 33294 - protein, 522 aa, Rhodococcus sp. RHA1
MSSPARGISWEEHADLVVVGGGVAGLTAARTASLRGLTVLTVSKGGATDTATQYAQGGIAVVGDAVTDSVESHVADTCEAGVGLCDDDAVRSIVAGGRDAVAALTDLGAVFDRGRDGAVSRTREGGHSTRRIIHAGGDATGAEVQRALGAAGLPVLFDSVALRVLTDARGVTGVLVDSPRGLGVVHTPAVLLATGGLGQLYACSTNPPGATADGVALALDAGAAVADLEFVQFHPTVLFTPGGLGRRPLISEAVRGEGAILVDANGESVTAGVHPRGDLAPRDVVSRAIASRLRELGHDRVYLDARHLSGFVQRFPTVTASCLDAGIDPREQLIPVAPAAHYSCGGVVTDVDGRTAVPGLYAAGEVARTGLHGANRLASNSLLEGLVVGERVGAAAVERAGLRVEATEPEQRALPSAPRELVQQLMTGNASVVRDGAGLDAVAAALAAAPHTVPEGQTALEDAALTLTASALVLAAVARTESRGCHTRSDYPQTSDEWRRSTHVRLRDSELELLEPQLTGVL

SEQ ID NO: 33295 - DNA, 1716 bp, Trichodesmium erythraeum IMS101
  CDS (1)..(1716): transl_table=11
atgccaagattaaattctccaagtatttttcctcactttgacattatagtggtaggttcaggtgctgccggactttatgcggctctttgtttacctgttcatctccgagtcgccttggttactaaaaatactataaacatgggttcaagtaactatgctcagggaggtattgctgctgccattgatcctgcggataaccccatcttgcatctagaagatactctcaaagcaggtgtaggtttatgtgaccaggaagcagtaaggtttatggtggacaatgcggccagagcgatcgctcatttagtagaaatgggagttgccttcgaccgcaaaggaaaaaaactggcaatgactctcgaagctgctcactctcatccccgggtgcttcattcagcagataccacaggtagagctattattgatacactcgttattgaagctcaagaacgtccaaatattcagataatttcccaggcagtagcattaaatttgtggttagccacacaaaaggctcgggttcaaggtattagtcttcttcacgaaggtaaaatccagtggttaaaatcctctgtagtggttttagcaacaggtggaggcggtcaaatatttgcccaaactactaatcctgaggtgagtacgggggatggaattgctatagcgtggcgtgccggggcagttttgcgagatttggaatttttccaatttcatcctactgccttaattaaaccaggagcacctcgttttctcattagtgaagctgttcgtggagaaggagcgcacctaatagacaataagggaaaccgctttgcctttgagtatcatccggctggagagttagctcctagagatgttgtcagtagagctattttccatcatttgcacaaaactgctaccaagcctaccaatgctcatgtttatttggacttgcgagccattgactcagaccgcgttcgcgacagatttcccaatattatcaatgtctgtcaaaaatggggtattgatgtttttcaagaacctattccggttgctcctgctgctcattattggatgggtggagtggcttgcgatctaatgagtcagacttcaattcccggactatatgcaattggggaaacagcaagtacaggagttcacggagcaaatcgtttagctagcaattctttgttagaatgtttagtatttgcttctcaactatctcagattgaaattgagccaaatttggtggcacctgatgctgatatttttcaggtaagttctaattggaatatggaaatggaacagatagaggctatccgacaaatgttaccaagtttaatgtgggaaagtgcaggaatttctcgtaaaggagagtcattaagtcaggcactatatcaggtggcgcgctggcgagatagtttagcaagttttgagatagttaagtttttagctaatctcttgcctaaccagacgataaaattaaattcgactaatgctgaagagcagttgcggataacagcagaaacactcaatattttagacttgggttatttaattcttaaaagtgctgcatggcgaactgaaagcagaggtgggcattatcgcagtgattatccaaaaacttctaatgattggaaactacatactttggttcagggcgatcgcttattaactggttttccaaatgcctcgccccctggccaagagagagggtcttcagtcaacattgaaaaattttga

SEQ ID NO: 33296 - protein, 571 aa, Trichodesmium erythraeum IMS101
MPRLNSPSIFPHFDIIVVGSGAAGLYAALCLPVHLRVALVTKNTINMGSSNYAQGGIAAAIDPADNPILHLEDTLKAGVGLCDQEAVRFMVDNAARAIAHLVEMGVAFDRKGKKLAMTLEAAHSHPRVLHSADTTGRAIIDTLVIEAQERPNIQIISQAVALNLWLATQKARVQGISLLHEGKIQWLKSSVVVLATGGGGQIFAQTTNPEVSTGDGIAIAWRAGAVLRDLEFFQFHPTALIKPGAPRFLISEAVRGEGAHLIDNKGNRFAFEYHPAGELAPRDVVSRAIFHHLHKTATKPTNAHVYLDLRAIDSDRVRDRFPNIINVCQKWGIDVFQEPIPVAPAAHYWMGGVACDLMSQTSIPGLYAIGETASTGVHGANRLASNSLLECLVFASQLSQIEIEPNLVAPDADIFQVSSNWNMEMEQIEAIRQMLPSLMWESAGISRKGESLSQALYQVARWRDSLASFEIVKFLANLLPNQTIKLNSTNAEEQLRITAETLNILDLGYLILKSAAWRTESRGGHYRSDYPKTSNDWKLHTLVQGDRLLTGFPNASPPGQERGSSVNIEKF

SEQ ID NO: 33297 - DNA, 1728 bp, Trichodesmium erythraeum IMS101
  CDS (1)..(1728): transl_table=11
atgttagaacatgatataattatagttggtggcggtcttgctggctgtcgcgctgctgtagaaatagctcgaaaaaatcctagtttaaatgtggcagtagttgccaaaactcaccctattcgttcccactctgtggctgctcaaggggggatagcggcgtctctgagaaatgtagatactaaagatagctgggaagctcatgcttttgatactgttaagggttcggactatttagcagaccaagacgcagtagaaattttagcgaaggaggcaccagatgtaattattgacttggaacatctaggagtgttattctcccggttgccagatggtcgcatcgctcaacgtgctttcggcggtcactctcacaaccgtacctgttatgctgcggataaaactggtcatgctattcttcatgagttagttaataaccttcgccgttatggagtacatatttatgaggaatggtatgtaatgcgcctgatattggaagatactcaggcgaagggtgtagttatgtatcatatttgggatggggacatagttgtacttcgggctaaggtggtaatgtttgctactggtggttatggtcgggtatttaatactacttctaatgattatgcttcgactggggatggtttggcaatggcggctatggctgggttgcctcttcaagatatggagtttgtgcagtttcatcctactgggttatatccagcaggggttttaatttcggaggcagtgcggggtgagggtgcttatctgatcaatagcgagggcgatcgctttatggcaaattatgctcctagtcgtatggagttggcacctcgtgatattacttcccgtgctattactttggaaattcgcgctggtcggggaattaatatgaatggtagtgcgggcggtccgtttatttatcttgacctgcgacacatgggtcgggagaaaattatgagtcgggtacctttttgttgggaagagggtcatcgtcttttaggtattgatgcggtgaatgaaccgatgccagtacgcccgactgctcattattctatgggtggtattcctactaatactgatggtagagttttcgcgagtgcggatactttggtggatgggttatttgctgcgggagaatgtgcttgtgtttcggtacatggggctaaccgtttgggaagtaattctttgttggaatgtgtggtttatggacgacggactggagcggcgatcgctgagtttgttgagggtcggaagttgcctgatgttgaggaacagcgttatttaagggaggcgcgggcacaagttcaggggttgttagaccgctctggagaatatcggattaattttttacagcagcagtttcaggataccatgagtcaacattgtggtgtgtttcgttcccaggctataatggaggaggggtttaaaaaattggagcagttacaggaacaatatcagcaggtttatttggatgataagggtaagttgtggaatacggaaattgttgaggcgctggagttgcggagtattattgttgtgggggagacaattttaagttcggctttgagtcgccaggaaagtcggggggctcatagtcgggaagattttactaagcgaaatgatgaggagtttttacggcatactttggcttattattcgttggcgggtattgatatcagttatcgacctgtggcaataactatgtttgaaccaaaggaacggaagtattga

SEQ ID NO: 33298 - protein, 575 aa, Trichodesmium erythraeum IMS101
MLEHDIIIVGGGLAGCRAAVEIARKNPSLNVAVVAKTHPIRSHSVAAQGGIAASLRNVDTKDSWEAHAFDTVKGSDYLADQDAVEILAKEAPDVIIDLEHLGVLFSRLPDGRIAQRAFGGHSHNRTCYAADKTGHAILHELVNNLRRYGVHIYEEWYVMRLILEDTQAKGVVMYHIWDGDIVVLRAKVVMFATGGYGRVFNTTSNDYASTGDGLAMAAMAGLPLQDMEFVQFHPTGLYPAGVLISEAVRGEGAYLINSEGDRFMANYAPSRMELAPRDITSRAITLEIRAGRGINMNGSAGGPFIYLDLRHMGREKIMSRVPFCWEEGHRLLGIDAVNEPMPVRPTAHYSMGGIPTNTDGRVFASADTLVDGLFAAGECACVSVHGANRLGSNSLLECVVYGRRTGAAIAEFVEGRKLPDVEEQRYLREARAQVQGLLDRSGEYRINFLQQQFQDTMSQHCGVFRSQAIMEEGFKKLEQLQEQYQQVYLDDKGKLWNTEIVEALELRSIIVVGETILSSALSRQESRGAHSREDFTKRNDEEFLRHTLAYYSLAGIDISYRPVAITMFEPKERKY

SEQ ID NO: 33299 - DNA, 1635 bp, Alkalilimnicola ehrlichei MLHE-1
  CDS (1)..(1635): transl_table=11
atgcccaagtcgtacgacgtattgatcatcggcagcggcgtcgccggtctgactgcggcgttgcgcctgccccgccagctgcgtatcgcggtgctctccaaagacgaactccatgaaggcgccaccctgtatgcccagggcggcgtctcggcggtgctcgacgcggcggactcggtggagaaccacgtccgggacaccctggacgccggcgccggcctctctgaccccgaggcggcccgcttcgtggccacccgcgccgccgatgccatcgagtggctacttgagcaccaggtgcccttctccacccagccgggtgaggatggggccccggtgctgcatctgcaccgcgagggcgggcacagccaccgccgcatcgtgcacgccgccgacgccaccggccgggccatcgagacgaccctgatcgatgcggtgcgggccgcgcccaatatcaccctgctgccccaccgggtggcggtggacctgatcaccgggcgcaagctggccctggaccacgaccgctgcctgggcgcttacgtgctctccgaggccagcggccgggtcgaggtggtgccggcccgctgcgtggttctggccaccggcggcgcgagcaaggcctatcggtttaccaccaacccggacggctccaccggcgatggcatcgccatggcctggcgcgccggctgccgggtgaccaatatggagttcaatcagttccaccccacctgcctgtaccaccccaaggccaagtccttcctgatcagcgaagcggtgcgcggtgagggcggacggctccttttaccggacggcgagcccttcatgcagcgctttgacgagcgcggcgagctggcgccccgggatatcgtggcccgggcgatagaccacgaaatgaaacggctcggcgccccctgtgtctatctggacatcagccaccggccggcggatttcatccgtgagcacttccccaccatccacgcccgctgtctcgactacgggctcgacatcactcgcgagcccatcccggtggtgccggccgcccactacacctgcggcggtgtccacgtggaccaccgggcgcggacggacgtgcccggcctatatgcagtgggggagaccgcctacaccgggttgcacggcgccaaccgcctggccagcaactccctgctggagtgcctggtttacgcccgcgccgccgccgaggacattgccgcgcaactgcctgagctgccgtcgccgccgaccctgcccccctgggatgacagccaggtcaccgactccgacgaacaggtcgtggtcagccacaactgggccgagctgcggcgcttcatgtgggattacgtgggcatcgtgcgcagcgacaaaaggctggagcgtgccgcgcgccgggtggagctgctcagccatgagatacaggagtactacggcaacttccgcgtcaacgccgatctcttggagctgcgcaatctggtggtggtcgccgacctgatcgtgcgcagtgcccgcgcccgcaaggagagccgcggcctgcactacaccattgatcacccgcgccgggccatcgacccgccacccacaccgacggtgctgacgccccgccccccggccccctttggccacctcaaggccggcgccgtctga

SEQ ID NO: 33300 - protein, 544 aa, Alkalilimnicola ehrlichei MLHE-1
MPKSYDVLIIGSGVAGLTAALRLPRQLRIAVLSKDELHEGATLYAQGGVSAVLDAADSVENHVRDTLDAGAGLSDPEAARFVATRAADAIEWLLEHQVPFSTQPGEDGAPVLHLHREGGHSHRRIVHAADATGRAIETTLIDAVRAAPNITLLPHRVAVDLITGRKLALDHDRCLGAYVLSEASGRVEVVPARCVVLATGGASKAYRFTTNPDGSTGDGIAMAWRAGCRVTNMEFNQFHPTCLYHPKAKSFLISEAVRGEGGRLLLPDGEPFMQRFDERGELAPRDIVARAIDHEMKRLGAPCVYLDISHRPADFIREHFPTIHARCLDYGLDITREPIPVVPAAHYTCGGVHVDHRARTDVPGLYAVGETAYTGLHGANRLASNSLLECLVYARAAAEDIAAQLPELPSPPTLPPWDDSQVTDSDEQVVVSHNWAELRRFMWDYVGIVRSDKRLERAARRVELLSHEIQEYYGNFRVNADLLELRNLVVVADLIVRSARARKESRGLHYTIDHPRRAIDPPPTPTVLTPRPPAPFGHLKAGAV

SEQ ID NO: 33301 - DNA, 1569 bp, Hyphomonas neptunium ATCC 15444
  CDS (1)..(1569): transl_table=11
atgacggcatttcctgatcggataatcacgatgctttccggaacggatgaccgcctgcatgccggcgcgggcgccacgacagatgttctgatcgtcggggcgggccttgcgggcctgttccttgcgctgaagctggcgccgcggccctgcctggtgatctcaccggcgccgctcgggcaggcgtcttcctcggcctgggcgcaggggggattggccgctgcgctgcatccgctcgacagcccggcccagcatgccgacgataccgtggcagcaggcgccgggctggtggacccggtgattgcgcggctgatcgcggaagacggccccgcgcgcgtgcgcgacctggtggccctcggtgtaccgtttgaccggacgcccgatggccagctcgccctgtcgctggaggcggcacattcgcatccgcgtgtggcgcgggtttcaggcgacctggcgggcaaggcgatcatggacgcgctggtggcggcggtggcggcagccccgcatatcgagctgatcgagggcgcgcgggctgaggctctgttgcaggataccaatggccgcgtggcgggggtcgtgctgcgcgggaataccgggcgagcgtttgtgaagaccgcgcgggagacagtgctgtgcaccggtgggtccggtgggctttaccgcgtgacgaccaatccgaaggaagcccagggcgaggcgattgccatggcgcatgtggcgggcgcggtgctggccgacctcgaattcgtgcagtttcacccgaccggcatcgacattggccgtgaccctgccccgctggcgaccgaggcgctgcgcggcgaaggcgcgacgttgcacaataccgacgggcgcgccttcatggcagattatcatccgctggcggagcttgcgccgcgcgatgaagtggcccgcgcgatccatgcggagcgggccgccgggcgtggcgcttttctcaattgcatcacggccgtgggcgaagagtttccgcatcacttcccgacggtttttggcgcgtgcatgagcgccaacatcgatccgcgccgcgcgatgatcccggtagcgcccgccgcgcattatcatatgggcgggattatctctgacctctgggggcgctcgacgctggatgggctctccgtctgcggagaatgttcctcgaccggcgcgcatggggccaaccggctcgcctccaactctctgctggaggctgtcgtctttgccgagcggattgcgcggcgcctgcgcgacgcggacctcaacgaagcgggcgcgagcacggcatccgcaacgcggcccctgaccggcccggacatgctggaactgcgtgaggcgatgtcgcgccattgcggcgtggtgcgcgaggcgggcgggctgactgatcttctgagcctgatcgagcggctggaggcaggcatgcccggcgcgccgcagctgacggctgcgcgcctgatcgcaagcggagcgctggcccgcgccgaaagccgcggcggacatttccggtccgactatcccgacaccggcgcgcccgagcgccagttcctgttccacacaagccgcgaggcgcttgtcatatga

SEQ ID NO: 33302 - protein, 522 aa, Hyphomonas neptunium ATCC 15444
MTAFPDRIITMLSGTDDRLHAGAGATTDVLIVGAGLAGLFLALKLAPRPCLVISPAPLGQASSSAWAQGGLAAALHPLDSPAQHADDTVAAGAGLVDPVIARLIAEDGPARVRDLVALGVPFDRTPDGQLALSLEAAHSHPRVARVSGDLAGKAIMDALVAAVAAAPHIELIEGARAEALLQDTNGRVAGVVLRGNTGRAFVKTARETVLCTGGSGGLYRVTTNPKEAQGEAIAMAHVAGAVLADLEFVQFHPTGIDIGRDPAPLATEALRGEGATLHNTDGRAFMADYHPLAELAPRDEVARAIHAERAAGRGAFLNCITAVGEEFPHHFPTVFGACMSANIDPRRAMIPVAPAAHYHMGGIISDLWGRSTLDGLSVCGECSSTGAHGANRLASNSLLEAVVFAERIARRLRDADLNEAGASTASATRPLTGPDMLELREAMSRHCGVVREAGGLTDLLSLIERLEAGMPGAPQLTAARLIASGALARAESRGGHFRSDYPDTGAPERQFLFHTSREALVI

SEQ ID NO: 33303 - DNA, 1788 bp, Hyphomonas neptunium ATCC 15444
  CDS (1)..(1788): transl_table=11
atgagcagctataactggattgatcatacctacgacgtggtcgtggtcggcgccggcggctccggtctccgcgcagcccttggcgccgcgcaggcgggcctgcgcacggcctgtatcaccaaggtcttccccacccgctcccacaccgtggcagctcagggcggcatcgccgcctcgctcggcaacatgtccgacgacagctggcagtggcacatgtacgacaccgtcaagggctccgactggctcggcgaccaggacgcgatcgaatatctcgtgcgcaacgcgcctgacgcggtttacgaacttgagcattggggcatgcccttctcgcgcaccgaggaaggcaagatctaccagcgcgctttcggcggcatgacccgcaatttcggcgaaggccccgtccagcgcacctgcgcggcggcagaccggaccggccacgccatgctgcacaccctctatggccagtgcgtgcgcgaagagaccgaattcttcatcgagtatttcgcccttgatctgatcatggatgatgacggcgtctgccgcggtgtcaccgcctggaaactcgacgatggcacgcttcaccgcttccgcgcccagaaaaccatcttggcaaccggcggctatggccgcgcctatttctcctgcacctcggcccacacctgcaccggcgatggcaatgccatggtcctgcgcgccggtctgccgcttcaggacatggaattcgtccagttccaccccaccggcatctacggctcaggctgcctgatcaccgaaggcgcccgcggcgaaggcggctatctgacaaactccgaaggcgaacgcttcatggagcgctatgcgccatccgccaaagacctcgcctcgcgcgatgttgtcagccgcgcgatgaccatggaaatccgcgacggccgcggcgtcgggccggagaaagaccacatcttcctccacctgaaccacctcgcgcctgaaaccctgcatgagcgccttccgggcatctcggaaaccgccaagatctttgccggcgtcgacgtcaccaaggagccgatcccggttctgccgaccgtccactacaatatgggcggcatcccgacgaacttccacggcgaagtcctcaccaagaagaacggcgatcccgacgcggttgtccccggcctgatggctgtgggcgaagcggcctgtgtgtccgtacacggcgcaaaccgcctcggctccaactcgctgatcgacctggtcgtgttcggccgcgccgccggtctgcgctgcggcgccaccaccgaggcaggcgcccgccagcccggactcgccaagaccgcaaccgacagccacatcgcccgcctcgacaagatgcgcaacgccaccggcgaccagccggttgccaagctccgcctagaaatgcagcgcgcgatgcagtccaactgcgccgtgttccgcacaggctcggtgctgaaagagggcgtcgacgcaatcgaggacgtctacaagaaactgccgggcatcgatgtcaaagatcgcggcatggtctggaacacagatctcgttgaagcgctcgaatttgaaaacctgatctgccaggcggccgtgacggtgaattcggccgcaaaccgggaagaaagccgcggcgctcatgcccgcgaagatttcgccgaccgcaacgacgagacatggatgaaacacaccctcgcctggtgcgacgatgccggtaaggtctcgctcgattaccgcccggttcacgaatacacgctctccaacgagatcgagtacatcaagccaaaagcgcgggtatactga

SEQ ID NO: 33304 - protein, 595 aa, Hyphomonas neptunium ATCC 15444
MSSYNWIDHTYDVVVVGAGGSGLRAALGAAQAGLRTACITKVFPTRSHTVAAQGGIAASLGNMSDDSWQWHMYDTVKGSDWLGDQDAIEYLVRNAPDAVYELEHWGMPFSRTEEGKIYQRAFGGMTRNFGEGPVQRTCAAADRTGHAMLHTLYGQCVREETEFFIEYFALDLIMDDDGVCRGVTAWKLDDGTLHRFRAQKTILATGGYGRAYFSCTSAHTCTGDGNAMVLRAGLPLQDMEFVQFHPTGIYGSGCLITEGARGEGGYLTNSEGERFMERYAPSAKDLASRDVVSRAMTMEIRDGRGVGPEKDHIFLHLNHLAPETLHERLPGISETAKIFAGVDVTKEPIPVLPTVHYNMGGIPTNFHGEVLTKKNGDPDAVVPGLMAVGEAACVSVHGANRLGSNSLIDLVVFGRAAGLRCGATTEAGARQPGLAKTATDSHIARLDKMRNATGDQPVAKLRLEMQRAMQSNCAVFRTGSVLKEGVDAIEDVYKKLPGIDVKDRGMVWNTDLVEALEFENLICQAAVTVNSAANREESRGAHAREDFADRNDETWMKHTLAWCDDAGKVSLDYRPVHEYTLSNEIEYIKPKARVY

SEQ ID NO: 33305 - DNA, 1542 bp, Rhizobium leguminosarum bv. viciae 3841
  CDS (1)..(1542): transl_table=11
atgaccgagattctcgagcatctcactgggcgcacggtgatcgtcggcagcgggcttgcggggttgatgaccgcgctgacactggcgcctgaaccctccgtgatcgtcacccgcgcggcccttggcgcggagacatcgagcgcctgggcgcagggcggcatcgccgctagcatgggcgccgacgatagcgcggcgctgcatcttgccgatacgcttgcggccggcgacgggctttgcgatccgctggtcgccgccggcatcatcgccgaggccccggcggcgatcgcggcgctggagcaagccggcgtccgtttcgaccggaatgccgcgggcgaactctcgctcggactggaggcggcccataatcgccgccgtatcgtccatgccgaaggcgacggctcgggtgctgcgatcatcgccgcgctgatcaaagcagtgatggaaacgccagctatatcagtgctcgaaggtttcgaggcgcggcggattctgatggacggcgagcgggtcgccggcctgctctgcgcgaccgcgaatggcgcggccattctgccgacctcgaaggtggtgctcgccaccggcggcatcggcgggctttacgacgcgaccaccaatccgatgggcaatttcggccaggggatcgcgctcgcggcaagggcgggtgccgcgctcgccgatatggaattcgtccagttccatccgaccgcactcgattcacgccgccggccgctggcgctcatcagcgaggcggtgcgcggggagggggccttgctcgtcaacgagcgcggcgaacgcttcatggcccgcatattcggcgcagagcttgcgccgcgcgacgtggtggcgcgggcgatcagcgccgaaatcgcccgcggcggccgagtctttctcgacgcccgcgcggctctcggcagccgctttgccgctcgttttcctgtcatctccgccctttgcggcgaggccggcatcgatccggcgaaagacctcattcctgtgcgcccggccgttcactatcacatgggcggcgtcgccacggatgcaaatggccgcagctcggttcccggtctctgggtcgccggtgaggcggccgcgaccggtctgcacggcgcaaaccggcttgccagcaattcgctgctggaggcggctgtcatgggcatgcgggcggcgcgcgacatatcaggcgtgcccgtaggtgccatcagcgccatcttcgccgagagactgccggcggctgccgatgcatcgctcgtccggccgaacgtctcgcgtcctctcggcgtgctgcgcaatgccggcgccattcagggggcgatcgccgccctgctgccgcttgcagaaggcaacggcccggccgccgatccggccatcgtcgcgctgctgatcgccgtctttgccagcctgcggatggaatcgcgcggcgcccatgcccgcaccgattttccgctgaagctcgccaacgccaaccggcgccggatgtgcctttccgacgttctggagatcgcccgcgcgacaccgccctatgcccttgcaaggagtgcctga

SEQ ID NO: 33306 - protein, 513 aa, Rhizobium leguminosarum bv. viciae 3841
MTEILEHLTGRTVIVGSGLAGLMTALTLAPEPSVIVTRAALGAETSSAWAQGGIAASMGADDSAALHLADTLAAGDGLCDPLVAAGIIAEAPAAIAALEQAGVRFDRNAAGELSLGLEAAHNRRRIVHAEGDGSGAAIIAALIKAVMETPAISVLEGFEARRILMDGERVAGLLCATANGAAILPTSKVVLATGGIGGLYDATTNPMGNFGQGIALAARAGAALADMEFVQFHPTALDSRRRPLALISEAVRGEGALLVNERGERFMARIFGAELAPRDVVARAISAEIARGGRVFLDARAALGSRFAARFPVISALCGEAGIDPAKDLIPVRPAVHYHMGGVATDANGRSSVPGLWVAGEAAATGLHGANRLASNSLLEAAVMGMRAARDISGVPVGAISAIFAERLPAAADASLVRPNVSRPLGVLRNAGAIQGAIAALLPLAEGNGPAADPAIVALLIAVFASLRMESRGAHARTDFPLKLANANRRRMCLSDVLEIARATPPYALARSA

SEQ ID NO: 33307 - DNA, 1503 bp, Solibacter usitatus Ellin6076
  CDS (1)..(1503): transl_table=11
atgaatccggattttctggtaatcggagccggagtggccggaatgcgcgccgccatcgagctcgccgaagcgggcacggtgctggtagtcgccaaggacagtctccgcgaatcctcctcggaatacgcacagggcggcatcgccgtcgcattgagcgatgacgacgaggttgaattgcatgagcaggacacgctgtatgccggtgatggcctgtgcgaccgtgcggcggtgcggacactggtggaggaagggccggccgcaatccaggaattgatcgattggggcgcggagtttgatcgcgagggcaataagctcgccttcacccgtgaaggggcgcatagccgcgaccgcattctgcatgcccacggcgattccacggggcgcgagattgcgcgcgcgctttaccacaaggcctcctcattgcccaacgtcaccttccgcagctttgccgcgaccaccgagcttctggttgaggacggtgtctcgggcgcgatgatctacgatgcgaaagcgcaaagcgaattcccgattccggcgcgtgccgtactgttggccaccggcggactggggcgggtttttctgaacacgaccaaccccgatgtggccaccggcgacggtgtggcgatggcctaccgcgcgggcgcggagatcggcgatatcgagttcgtgcagtttcatcccacagcgctcgcggtggcgggcgctccgcgtttcctgctctcagaggcattacgcggcgaaggcgcgctgctgcgcaatacacgcggcgagcgcttcatggaacgctaccatccgctgctggaactggcgccgcgtgacgtggtggcgcgcgccatcgtcagcgagatgaccagcaccgggtcgccgcatgtgtttctcgaccttacacatcgcggcgaaacgttcatccgcgatcgcttcccacgaatctacgagacatgcctgcggtacggcgtcaatatcggcaccgaagcggcgccggtggctccggcggcacattacgcgatgggcggtgtgttcacggacctggatgggcgcacgaatgtgccgcggctgttcgcagccggtgaagcggcgtgcacgggcgttcacggcgccaatcgactcgccagcaactcgctgctcgaaggtgtggtcttcggaatccgtgccggacgggcaatgcgggagacggtgggcggtgggccggcgggcactcgagcgccaaagggcgtcaactacacgggtgggctggcgccggaaattcagcgaatcgcctgggaatattgcggcatcgtaaggtctgcggaaggactggcccaggcctgcgcgcagttggaagggctggacccagcatctccggaagagcggaatatgaagcaagtggcgttgttgatcgcacgctgcgcggcagcgaggaaagagagccgcggagcgcattttcgcagcgactatccgcacaaggatgcggcctttgaaaagcactcggtggtcagccgcgacatcggcgttgcatttcgatag

SEQ ID NO: 33308 - protein, 500 aa, Solibacter usitatus Ellin6076
MNPDFLVIGAGVAGMRAAIELAEAGTVLVVAKDSLRESSSEYAQGGIAVALSDDDEVELHEQDTLYAGDGLCDRAAVRTLVEEGPAAIQELIDWGAEFDREGNKLAFTREGAHSRDRILHAHGDSTGREIARALYHKASSLPNVTFRSFAATTELLVEDGVSGAMIYDAKAQSEFPIPARAVLLATGGLGRVFLNTTNPDVATGDGVAMAYRAGAEIGDIEFVQFHPTALAVAGAPRFLLSEALRGEGALLRNTRGERFMERYHPLLELAPRDVVARAIVSEMTSTGSPHVFLDLTHRGETFIRDRFPRIYETCLRYGVNIGTEAAPVAPAAHYAMGGVFTDLDGRTNVPRLFAAGEAACTGVHGANRLASNSLLEGVVFGIRAGRAMRETVGGGPAGTRAPKGVNYTGGLAPEIQRIAWEYCGIVRSAEGLAQACAQLEGLDPASPEERNMKQVALLIARCAAARKESRGAHFRSDYPHKDAAFEKHSVVSRDIGVAFR

SEQ ID NO: 33309 - DNA, 1620 bp, Magnetococcus sp. MC-1
  CDS (1)..(1620): transl_table=11
atggttagcgctcaacatcgccgttttgtcagcgattttctgattctaggcggtggttccactggtctggatctggctctcaggttggccgaacatggcaaggtgctggtgcttaccaaagcccccattggcgactgtaacagcatgatggcccaaggcggcatcgctgcggtgctggatgaggacgacagcaccatcctacactacgaagataccatgaccgccggtgcgggcctgtgcaacccccaatcggtgcgcttggtggtggaaaatggcgcccgtatgatccagcatcttattgatctgggcaccccctttgacaaaaccgataacaacagctaccacctaacccgcgagggtggccatagccggcgccgcgtgatccatgcggcagatgccaccggtcgtgcggtgatgcttagcctgattaaacaggcacaagcccaccccaacattgaagttttgcccaaccagatcgccattgatctcattaccgcccacaaactgggccattttctaccgggcaaaaaagatcgctgttatggctgttatgcgctggataccgaagccgatgtgatccgcacctaccaagcccgctttaccattttagccagtggcggggcgggcaaggtctatctttacacctccaaccccgacacagccactggggatggcattgccatggcctatcgtgctggctgccgggtctctaacatggagtttattcagttccaccccacctgcctttaccacccacaagccaaatctttcttggtttccgaagcggtacgtggcgaaggggggcatcttttgttggccgatggaacccgctttatggagcgccaccaccctctgctggagttggccccacgggatattgtggcccgcgccattgactacgaaatgaaacgcaccggcgagccctgcgtgcatctggatatcagccataagggtgctgattttattaaggcacacttccccaccatctatgaaaaatgccttgaatttggcatcgacatgacccaagagcccatccccgtggtaccggctgcccactatacctgcggcggggttgttaccggtttgcaaggtgcaacggatattgagtctctgtatgccattggtgaggtagccagcaccggcctgcacggagccaaccgcttagccagcaacagtttgctggagtgcttggtcttttcggaatctgcctataacgacattgtcagcaaaatgtttggggaagatcgccccgtgctctcccgccttcccttgtgggatagttatgaagcaggcagttgcgaagaagagatcttaatcgcccacgattggcaggagatccggcgttttatgtgggattatgtaggcattgtgcgcagcaaccagcgcctagcccgcgcccgccgacgcattgaaatggtgatgcaggagatcaatgagtattactggaactgcaaggtcagccaaaacctgattgaactgcgcaatctggccttggtggcccatttgattattcgtagctcccagcaccgcaaggagagccgtggcctccactacaccaccgactaccccgagcgggatgatgcccgctggctcaaagagaccgtgctgcccattgagtag

SEQ ID NO: 33310 - protein, 539 aa, Magnetococcus sp. MC-1
MVSAQHRRFVSDFLILGGGSTGLDLALRLAEHGKVLVLTKAPIGDCNSMMAQGGIAAVLDEDDSTILHYEDTMTAGAGLCNPQSVRLVVENGARMIQHLIDLGTPFDKTDNNSYHLTREGGHSRRRVIHAADATGRAVMLSLIKQAQAHPNIEVLPNQIAIDLITAHKLGHFLPGKKDRCYGCYALDTEADVIRTYQARFTILASGGAGKVYLYTSNPDTATGDGIAMAYRAGCRVSNMEFIQFHPTCLYHPQAKSFLVSEAVRGEGGHLLLADGTRFMERHHPLLELAPRDIVARAIDYEMKRTGEPCVHLDISHKGADFIKAHFPTIYEKCLEFGIDMTQEPIPVVPAAHYTCGGVVTGLQGATDIESLYAIGEVASTGLHGANRLASNSLLECLVFSESAYNDIVSKMFGEDRPVLSRLPLWDSYEAGSCEEEILIAHDWQEIRRFMWDYVGIVRSNQRLARARRRIEMVMQEINEYYWNCKVSQNLIELRNLALVAHLIIRSSQHRKESRGLHYTTDYPERDDARWLKETVLPIE

SEQ ID NO: 33311 - DNA, 1614 bp, Shewanella sp. ANA-3
  CDS (1)..(1614): transl_table=11
atgaaacaagtagttgaacaccaatctgacatattagtcataggtagcggtgccgcaggtctgacactagctttgcatcttgctgaaaaagcaaacgtaattctgctctcaaaaggcccactctcggaagggtcgacatactacgcccaaggcggtatcgcctccgtgttcgatgaaagtgataccatcgaatcccatgtggccgatacgttagtggctggcgccggcttgtgcgataaagaagtggtaacttttaccgctgaaaacgccaagagcgccatgcaatggttaattgaatgtggtgtggcattcgataaagaagaaaccactggcgataatgccaaagacgcgccttatcacttgacccgcgaaggcggccacagccatagacgcattctgcatgccgccgatgcgactggcaaagaagtgcaaaccacactgcaagaacgcgccctcgcccatcccaatattcaagttttagaacgttacaacgccatcgacctcatcaccacccgtaaattaaatcgccctggcaatcgcgtgttaggcgcttatgtgtggaaccgtaatgccgaacaggttgaaaccattaaggcaaaatttgtcgcattagccacgggcggtagctctaaggtctaccaatacacctcaaaccccgatgtggcgagtggtgatggtattgccatggcgtggcgtgcaggttgccgtgtggctaacatggagtttaatcaattccatccgacctgcctttaccatgccgatgcgcgtaacttcctgctgaccgaagccctgcgcggtgaaggggcttatttacgccgccccgatggcagccgctttatgccagactttgacgagcgagccgaactcgcgcctcgcgatatcgtagcccgcgccatcgactatgagatgaagcgtttaggtgccgattgcgtctacttagacattagccataaagacagcgactttatcatcaagcacttcccaacgatctatagtcgctgcttggaactgggtatcgatatcaccaaggatgccattccagtggtgcctgccgcccactatacctgtggtggcgtgatgacggatttgcacggtcaaaccgacctcaatggtctctatgccatcggcgaagtagcctataccggcttacatggtgcgaaccgcttggcgagtaactcgctactcgagtgtttggtatttgcccgcgctgcgtcgcaggatattgagagccaaatgcacaaaattccattaccggggcaaattccggcgtgggacgagagtaaagtttccaactcagatgaggaagtggtaattgcccacaactggcacgaactgcgcctctttatgtgggactatgtggggatcgtccgctcagataaacgtttggagcgcgcactgcgtcgctgcttgatgctgcaacaggaaatccaagagtattacagcaacttcagagtcagcaataacctactggaactgcgtaacttagtgcaagtggcggagctgattatccgctgcgctatggatcgtaaagagagccgtggtctgcactataatatcgaccatcccgagaaggtagactctccacaaccaacgattctgcaacctgaaaaataa

SEQ ID NO: 33312 - protein, 537 aa, Shewanella sp. ANA-3
MKQVVEHQSDILVIGSGAAGLTLALHLAEKANVILLSKGPLSEGSTYYAQGGIASVFDESDTIESHVADTLVAGAGLCDKEVVTFTAENAKSAMQWLIECGVAFDKEETTGDNAKDAPYHLTREGGHSHRRILHAADATGKEVQTTLQERALAHPNIQVLERYNAIDLITTRKLNRPGNRVLGAYVWNRNAEQVETIKAKFVALATGGSSKVYQYTSNPDVASGDGIAMAWRAGCRVANMEFNQFHPTCLYHADARNFLLTEALRGEGAYLRRPDGSRFMPDFDERAELAPRDIVARAIDYEMKRLGADCVYLDISHKDSDFIIKHFPTIYSRCLELGIDITKDAIPVVPAAHYTCGGVMTDLHGQTDLNGLYAIGEVAYTGLHGANRLASNSLLECLVFARAASQDIESQMHKIPLPGQIPAWDESKVSNSDEEVVIAHNWHELRLFMWDYVGIVRSDKRLERALRRCLMLQQEIQEYYSNFRVSNNLLELRNLVQVAELIIRCAMDRKESRGLHYNIDHPEKVDSPQPTILQPEK

SEQ ID NO: 33313 - DNA, 1596 bp, Mycobacterium smegmatis str. MC2 155
  CDS (1)..(1596): transl_table=11
atgaccggcgcgggcacgttcgcctgcggcacctcggcgtactggcagcaacgaaccgacgtcgtcgtgatcggcaccggcgtcgccggcctggtcgcggcgctggccgcgcatcgcgccggccggcgggtcacggtgctcagcaaggtgagcgagaccgcgacgttctacgcccagggcggcatcgccgtcgtcctgccggccggtgtcggctcggctgacgacaccatcgaggctcatgtcgccgacacgctcgccgcaggcggcgggctgtgcgacgccgaggccgtgcgctcgatcgtcgccgacggcgccaaggcgatcaccgacctggtggccgacggcgccctgttcgacgaatccgcgcccgggcgctgggcgctcacccgcgagggcgggcacacccggcgccggatcatccacgcgggcggcgacgccaccggcgccgaggtgcagcgcacgctgaaccacgcggccgcacacctcgacatccgccacaaccacgtggcgctgcgaatcctgcaggacgaggccggcgtcaccggtgtgctggtccacaacgacgacggtcccggcatcctgcacgccccgtcggtggtcctggctaccggcggactcggccacctctatgccgccaccaccaacccggtcgggtcgaccggtgacggcatcgcgctggcgctgtgggccggtgtcgcggtcagcgacatcgagttcgtgcagttccacccgaccatgctgttcggcgccgcggcgggcgggcgccgcccgctgatcaccgaggcgctgcgcggtgaaggtgcggttctgatcgacgcacagggacacccggtcaccgcgggcgtgcacccgatgggggacctggcgccgcgcgacgtggtcgccgcggcgatcaacgcgcgcctggccgccaccggggacccatgcgtctacctcgacgcgcgcggcgtcgccggcgtcgcggaccggttcccgaccgtcacggcggcctgcctcgcggcaggtatcgacccggcgcgtgagcccatcccggtggttcccggcgcgcactacagctgcggcggtgtggtcaccgatgtgtacgggcgtaccgctctgccgggactgttcgccgcgggcgaggtcgcgcgcaccgggatgcacggcgcgaaccggttggcctccaacagcctgctcgaaggcctggtggtcggttcgcgggccgggcgcgccgcggccgcccacgccgaacaagccgggtccgtgcgcgcggtggtcccgcagcaggtccggcgcgacgccgtggaccgccaggtgctgcaggccgcgatgtccacccacgcgtcggtggtacgtgacgcgcagggtctgcaccggctcgccgagacgctggacgccgcgcgtgccgtggtgcccagcgaccgcgcgtccttcgaggacgccgcgctgacctcggtggcccgcgccgtggtcagggcggccacggcccgtaccgagagccgcggctcccaccatcgcggcgacttcccggacaccgaccccacacaggaggtctcgatgacagtccgtatccacgacggcgacgtcgccgtcgacatcccgacggcggtgtgctga

SEQ ID NO: 33314 - protein, 531 aa, Mycobacterium smegmatis str. MC2 155
MTGAGTFACGTSAYWQQRTDVVVIGTGVAGLVAALAAHRAGRRVTVLSKVSETATFYAQGGIAVVLPAGVGSADDTIEAHVADTLAAGGGLCDAEAVRSIVADGAKAITDLVADGALFDESAPGRWALTREGGHTRRRIIHAGGDATGAEVQRTLNHAAAHLDIRHNHVALRILQDEAGVTGVLVHNDDGPGILHAPSVVLATGGLGHLYAATTNPVGSTGDGIALALWAGVAVSDIEFVQFHPTMLFGAAAGGRRPLITEALRGEGAVLIDAQGHPVTAGVHPMGDLAPRDVVAAAINARLAATGDPCVYLDARGVAGVADRFPTVTAACLAAGIDPAREPIPVVPGAHYSCGGVVTDVYGRTALPGLFAAGEVARTGMHGANRLASNSLLEGLVVGSRAGRAAAAHAEQAGSVRAVVPQQVRRDAVDRQVLQAAMSTHASVVRDAQGLHRLAETLDAARAVVPSDRASFEDAALTSVARAVVRAATARTESRGSHHRGDFPDTDPTQEVSMTVRIHDGDVAVDIPTAVC

SEQ ID NO: 33315 - DNA, 1728 bp, Nocardioides sp. JS614
  CDS (1)..(1728): transl_table=11
gtgcagcaccagggagtgcccgatcatgcagtgcccgacgagggagtcccggacgtgcccgcggagatcgacgcacccgtacgccgggtcccgggccgcctggtcgcacccgagcccgggtggaccaccaccaccgacgtggtcgtcgtcggctcgggcatcgcgggactgaccgccgcgctccggctgcgcgaggaggtcggcaccgttctagtggtcaccaaggacgtgctggcggccggctccacccaatgggcgcagggcggcatcgccgccgccctcggccccggtgacactcccgccgagcacgagctcgacaccctcgtcgcgggcgccggcgcctgcgaccgcgacgccgtgcacgcgctggtcaccgagggacccgaggcggtgcgcgagctgatcgcgctcggcacgaacttcgaccacgacccgaatggcgagctgtccctgacccgcgagggtggccatcaccgcgaccggatcgcgcacgccggcggcgacgccaccggagccgagatccagcgcgccctgatcgccgcgatcgagcaggcccccgagatcgaggtcatccagcacgcgctggccgtcgacctgctcctcgccgaggacggcggggtcgccggcctcaccctgcacgtgatgggcgagggccagcgcgacggcgtcggcgccgtgcactgccgggccgtggtgctcgccagcggcgggctcggccaggtgttctcccagaccaccaaccccgcggtgtcgaccggcgacggcatggccgtcgcgctgcgcgccggtgcggtgctccgcgacctggagttcgtgcagttccaccccacggtcatgtacctcggcccggactcgctgggccagcagccgctgatctcggaggccgtgcgcggcgagggcgcgttcctggtcgacttcgaaggcaaccggttcatgcagggcgtccacgagctcgccgacctggccccacgcgacgtcgtggccaaggcgatcacccgacggatgaacgagaccggtcgaccgcacatgtggctggacgcccgccacctcggcgccgacctgtgggagcggcggttcccgaccatcctcgcgacgacgcgtagccacggggtcgacccggtcaccgagctgatccccgtcgccccggcctgccactacgcgtcgggcggcgtgcgcaccgacctgtggggccgctcgtcggtgcccgggctctacgccacgggcgaggtcgcgtgctccggagtgcacggcgccaaccggctcgcgtccaactcgctgctcgagggcctggtgttctcgcgccggatcgcccaggtcctgcctggcgagctccggccgctcgtgtgcccggccgaggacacccggaccgccgggctggtcccggggggtgcccggcgcgagctccaggacgtgatgaccggccgggtcggtgtgctgcgcagcgccgaaggactggccgacgccaccggtctcctggacaagctggcgggggagcgcgccgacgtgatcgaccaggcttcgtgggagaccaccaacctgctcacgatcgccgtggcgctcgccgacgccgcggcgctgcgcgaggagacccgcggctcgcactggcgcgaggacttccccgaccgcgacgacgccgggtacgccgggcacttcgacgtggtgatggcggacggcgccagcaccctgcagctggtccccgcacctccgaccgaccgggacgaccggtga

SEQ ID NO: 33316 - protein, 575 aa, Nocardioides sp. JS614
MQHQGVPDHAVPDEGVPDVPAEIDAPVRRVPGRLVAPEPGWTTTTDVVVVGSGIAGLTAALRLREEVGTVLVVTKDVLAAGSTQWAQGGIAAALGPGDTPAEHELDTLVAGAGACDRDAVHALVTEGPEAVRELIALGTNFDHDPNGELSLTREGGHHRDRIAHAGGDATGAEIQRALIAAIEQAPEIEVIQHALAVDLLLAEDGGVAGLTLHVMGEGQRDGVGAVHCRAVVLASGGLGQVFSQTTNPAVSTGDGMAVALRAGAVLRDLEFVQFHPTVMYLGPDSLGQQPLISEAVRGEGAFLVDFEGNRFMQGVHELADLAPRDVVAKAITRRMNETGRPHMWLDARHLGADLWERRFPTILATTRSHGVDPVTELIPVAPACHYASGGVRTDLWGRSSVPGLYATGEVACSGVHGANRLASNSLLEGLVFSRRIAQVLPGELRPLVCPAEDTRTAGLVPGGARRELQDVMTGRVGVLRSAEGLADATGLLDKLAGERADVIDQASWETTNLLTIAVALADAAALREETRGSHWREDFPDRDDAGYAGHFDVVMADGASTLQLVPAPPTDRDDR

SEQ ID NO: 33317 - DNA, 1590 bp, Azoarcus sp. BH72
  CDS (1)..(1590): transl_table=11
ttgttaaatcaatacgatgttctcattctcggcagtggcaccgccgggcaatccctcgcactccgcctcgccgacaagctcaaggtcgcgctggtcacgaaacgggaactgagcgacagcgcaagtgcctgggcgcaaggcggaatcgccgcggtgctggacaccgccgacagcatcgaagcacacatccaggacaccttcaccgccggcgcctacctgtgcgacccggtcgccacccgtttcgtggtggaaaacggccgccgtgcgatcgagtggctgattggccgcggcgtgcctttcacacgcgaagaccagtccgagctcggctaccacctcacccgcgaaggcggccattcccaccgccgcatcatccatgccgccgacgcgaccggcgccgccgtgcaagccacgctcagcgaggaggtccggcgccatccgaacatccacatcttcgagcaccacatcgcggtcgacctgatcatcggcgacaaggtcgggcgtcccggagagggctgcctcggcgcctacgtgctggacatcaaggccgaccgagtagtcaccttcggcgcccccaacaccgtgctggccaccggcggaaccggcaaggtctatctgtacacgaccaatcccgacgtggcgaccggcgacggcatcgcgatggcctggcgcgcgggctgccgcgtcgccaacatggaattcatccagttccaccccacctgcctctatcacccacaggccaagtccttcctgatttcggaagcggttcgtggcgagggcggattgctcaagctgccggatggcacacgcttcatgccggaacacgacgagcgcgccgaactcgcgccgcgcgacgtcgttgcccgggcgatcgacttcgagatgaagaagcacggcgtggactgcgtctatctcgacatcagccacaagccggccgactggctgcgcggacacttccccaacatccacgcgcgctgcctggaactgggaatcgacatcacccgccagccgattccggtcgtccctgcggcgcactacacctgcggcggcatcgtgaccgacctgtccgcgcgaaccgatgttgcgggcctgtacgcggtcggcgaatccgcctgcagcggcctgcacggcgcgaaccggctggcgagcaactcactgctcgaatgcctggtgttcggcgaggccgcagcccaggacatcctggcgaaaacggccacggcaccgctcaccctcccggactgggatgaaagccgcgttacggacgccgacgaagaagtggtgatttcccacaactgggcggaattgcggcgcgcaatgtgggactacgtgggcatcgtgcgcaccaccaagcggctgcagcgtgcccagcaccggatccgcctgctgaccaacgaaatcaacgagttctactcgaacttccgcgtctcgaacaatctgatcgaactgcgcaatctcgtcgtcaccgccgacctgatcgttcgctgcgcgctgaagcgcaaggaaagccgcggccttcattactcgcgcgactatccggacaccgccgaccgcatccgcagcaccgtgctgcgccctccccgcttcaagggctga

SEQ ID NO: 33318 - protein, 529 aa, Azoarcus sp. BH72
MLNQYDVLILGSGTAGQSLALRLADKLKVALVTKRELSDSASAWAQGGIAAVLDTADSIEAHIQDTFTAGAYLCDPVATRFVVENGRRAIEWLIGRGVPFTREDQSELGYHLTREGGHSHRRIIHAADATGAAVQATLSEEVRRHPNIHIFEHHIAVDLIIGDKVGRPGEGCLGAYVLDIKADRVVTFGAPNTVLATGGTGKVYLYTTNPDVATGDGIAMAWRAGCRVANMEFIQFHPTCLYHPQAKSFLISEAVRGEGGLLKLPDGTRFMPEHDERAELAPRDVVARAIDFEMKKHGVDCVYLDISHKPADWLRGHFPNIHARCLELGIDITRQPIPVVPAAHYTCGGIVTDLSARTDVAGLYAVGESACSGLHGANRLASNSLLECLVFGEAAAQDILAKTATAPLTLPDWDESRVTDADEEVVISHNWAELRRAMWDYVGIVRTTKRLQRAQHRIRLLTNEINEFYSNFRVSNNLIELRNLVVTADLIVRCALKRKESRGLHYSRDYPDTADRIRSTVLRPPRFKG

SEQ ID NO: 33319 - DNA, 1509 bp, Neisseria meningitidis FAM18
  CDS (1)..(1509): transl_table=11
atgcaaaccgattgcgacgtattgattgccggaaacgggctggcggcactgacgctcgccctgtcgctgcctgaatcgttccgcatcgtcattttgtgcaaaaaccggctggacgacaccgccagccatcatgcgcaaggcgggattgcggcggcgtggtcgagagaggacgacatcgaaaaacacgttgccgatactttggaagcgggcgcaggtttgtgcaacgaagccgccgtccgcaccatcctgtcgcagggcaaaccggcaatcgaatggctgctggcgcagggcgtggcgttcgaccgaaattatgacggtctgcacctgacacgcgaaggcgggcacacctgccgccgaatcgcccacgtcgccgactacacgggcgaagccgtcatgcagagcctgattgcccaaatacgccgccgcccgaacatccgcgtttgcgagcggcagatggcgttggacattcaaaccgaatcaggcgcggcgtgcggactgaccgtcctcgactgccgaacgcaagaaacccaccgcatccgcgcccgccataccgtactcgcaggcggcggcttggggcagatttacgccgccaccaccacgccgcccgaatgcacgggcgacgccatcgctatggcgatacgcgcaggctgcgcagtcgaaaacctcgaatttatccaattccaccctacaggcttggcaaggccgtctgaaaacggccgcaccttcctgatttccgaagccgtgcgcggcgaaggcggcatcctgaccaaccaagcgggcgaacggtttatgccgcattacgaccgccgcgccgaactcgcaccgcgcgacatcgttgcccgcgccattgccgccgaaaccgccaaacaaacgcaagacttcgtctcgctcgacatcagccatcaacccgcagcgttcgtccgccagcattttccgtccatccatcgacactgtttatcccaatgcggcttggacatcacgcgccaagccatccccgtccgccccgtgcaacactacacctgcggcggcatccaaaccgaccccagcggcagaacttccctgccgcagctctacgccttaggcgaaaccgcctgcacagggttgcacggagccaaccgcctcgccagcaactccctactcgaatgcgtcgttaccgccaggcttgccgcccaaaccatcgcggatggacaagcgttccaaaccgtaccgtccaaaaggtcgtctgaaaacacctccgccgaagcagacatcttttcagacggcatccaaaacacattcagccgccccgccctgcaagcgttcaaccaacgccatctcggcatcctccgcaacgataccggcctgcgccgcgccatcgcccaactgcggctttggaagcaaaaccaaaccgaaccgcacaccgtgtccgaatacgaaaaccgcaacctgctcgaatgcagcctcgccgtcgcccaagccgcatacaggcggagacagaacatcggcgcgcattttaatagtgattgttaa

SEQ ID NO: 33320 - protein, 502 aa, Neisseria meningitidis FAM18
MQTDCDVLIAGNGLAALTLALSLPESFRIVILCKNRLDDTASHHAQGGIAAAWSREDDIEKHVADTLEAGAGLCNEAAVRTILSQGKPAIEWLLAQGVAFDRNYDGLHLTREGGHTCRRIAHVADYTGEAVMQSLIAQIRRRPNIRVCERQMALDIQTESGAACGLTVLDCRTQETHRIRARHTVLAGGGLGQIYAATTTPPECTGDAIAMAIRAGCAVENLEFIQFHPTGLARPSENGRTFLISEAVRGEGGILTNQAGERFMPHYDRRAELAPRDIVARAIAAETAKQTQDFVSLDISHQPAAFVRQHFPSIHRHCLSQCGLDITRQAIPVRPVQHYTCGGIQTDPSGRTSLPQLYALGETACTGLHGANRLASNSLLECVVTARLAAQTIADGQAFQTVPSKRSSENTSAEADIFSDGIQNTFSRPALQAFNQRHLGILRNDTGLRRAIAQLRLWKQNQTEPHTVSEYENRNLLECSLAVAQAAYRRRQNIGAHFNSDC

SEQ ID NO: 33321 - DNA, 1590 bp, Acidovorax sp. JS42
  CDS (1)..(1590): transl_table=11
atgacctcacacgacttcgacgtactcatcgtaggcagcggcctcgcagggctgaccgccgcgctgcagctggcgcccacacaccgcgtggccgtcctcaccaagcgccagctggccgacggcgccagcggctgggcccagggcggcatcgccgcggtgctggcggagggcgacagcttcgagtcgcacgtgcaggacacgctggtggccggcgcaggcctgtgcgacctggcggccacgcgcttcgtggtggagaacgcgccgcaggccatccgctggctgcagggcctgggcgtgccgttctcgcaggaagacggcgccctgcacctcacgcgcgaaggcggccacagcgcgcggcgcatcgtgcacgccaccgacgccacgggcgcggccgtgcagcgcacgctgatcgacgtggtgcgcgccacgcccggcatcacgctgctcgaacaccacaccctggtggacctgatcaccagcgccaagctgggactggctggcgcgcagcgctgcctgggcctgtacgcgctggacgaggccaccgacgaggtgctcacctttcgcgcaccgcacaccatcctggccacgggcggcgcgggcaaggtgtacctgtacaccaccaaccccgacacggccacgggcgacggcattgccgcggcctggcgcgcgggctgccgcgtgtccaacctggagttcatccagttccaccccacgtgcctgtaccacccgcacgtcaagagcttcctcatcaccgaggccgtgcgtggcgagggcgggcaactcaagctgccgccgcaggccggcggcacgcgcttcatgccccagcacgacgcgcgcgccgagctggcgccgcgcgacatcgtggcgcgcgccatcgacttcgagatgaaaaagcacggcctggactgcgtgcacctggacatctcgcaccaaagccccgcgttcctgcaggagcactttcccaccatcctcgcgcgctgcgcggagctgggcatcgacatcacgcgcgagcccatccccgtggtgcccgccgcgcactacacctgcggcggcgtgctcaccgacctggcgggccgcaccgacctgcacggcctcttcgccattggcgagaccgcctgcaccggcctgcacggcgccaaccgcctggccagcaactcgctgctggaatgcatggtgttcgcgcgcgcggcagccgcgcacatccagcgggcgcagcgcgcggacctgcccgcgctgcccgcgtgggacgacagccgcgtgaccgacgccgacgagtgcgtggttatctcccacaactgggacgagctgcgccgcttcatgtgggattacgtgggcatcgtgcgtaccaccaagcggctggagcgcgcggcgcaccgcatcgcgctgctgcagggcgagatccaggagttctatgccaacttccacgtcacgcgcgacctgctggaactgcgcaacctggtgcaggtggccgacctgatcgtgaaaagcgcgcagatgcgccatgaaagccgcggcctgcacttcagccgcgactggcccgacgtggccgcccccgccgcgcccaccatcctggtgccgcccgcacgctga

SEQ ID NO: 33322 - protein, 529 aa, Acidovorax sp. JS42
MTSHDFDVLIVGSGLAGLTAALQLAPTHRVAVLTKRQLADGASGWAQGGIAAVLAEGDSFESHVQDTLVAGAGLCDLAATRFVVENAPQAIRWLQGLGVPFSQEDGALHLTREGGHSARRIVHATDATGAAVQRTLIDVVRATPGITLLEHHTLVDLITSAKLGLAGAQRCLGLYALDEATDEVLTFRAPHTILATGGAGKVYLYTTNPDTATGDGIAAAWRAGCRVSNLEFIQFHPTCLYHPHVKSFLITEAVRGEGGQLKLPPQAGGTRFMPQHDARAELAPRDIVARAIDFEMKKHGLDCVHLDISHQSPAFLQEHFPTILARCAELGIDITREPIPVVPAAHYTCGGVLTDLAGRTDLHGLFAIGETACTGLHGANRLASNSLLECMVFARAAAAHIQRAQRADLPALPAWDDSRVTDADECVVISHNWDELRRFMWDYVGIVRTTKRLERAAHRIALLQGEIQEFYANFHVTRDLLELRNLVQVADLIVKSAQMRHESRGLHFSRDWPDVAAPAAPTILVPPAR

SEQ ID NO: 33323 - DNA, 1677 bp, Nostoc punctiforme PCC 73102
  CDS (1)..(1677): transl_table=11
ttgcctcagatagatattcctagccaatttgatgttttagtagtcggcgctggtgctgctggactatacacagcgctgtgtctaccagagtccttgcgagtcggcttgattaccaaagaaactgttgctttgtccgctagtgattgggcacaaggtggtatagccgcagccgtttccccggaagattctcctacgctgcacattgaagataccatccgggcaggtgcaggtttgtgcgatcgcactgctgtagaatttctcgcacaacttgcccctaaatgcattcaatccctagttgacttgggggttgcttttgaccgtcatggtcaagccttggctttaactttagaagctgcccattctcgcaaccgtgttctccacgctgcggacaccacaggcaaggaagttacaaccactctcaccgcccaagtattacgtcgcccgaatattcaagtcattcagcaagctttggctttgagtttgtggattgaacctgaaagcaatcgctgtcagggaataagcttgttttatcaaggtaaaatcacatggattaaagctggtgctgtgatcttggcaacaggtggcggcggtcaggtatttgcccaaactactaacccggctgtgagtactggtgatggggtagcgatcgcatatcgggctggggctatcctccgcgatttggaatttgtgcaatttcaccccactgccctgactaaacctggtgccgatcgctttctgattagcgaagctgtacgcggcgagggggcacaccttgttgataatgaagggcgacgttttgcctttgactaccaccctgcgggtgaactcgcacccagagatgtggtcagtagagcaattttcagccatttacaacgtactgccgttgatttagcgactgcccatgtgtggttggatatgcgccccatccctgccgacaagattcgtcaccgctttcccaacatcatcaaagtttgccagcattggggagttgatgttttccatgaaccaattcctgtagcgcctgctgcccattattggatgggtgggattgtcgcggatctgatgaatcgcacgaatattaagagtttgtacgcggtgggtgaaactgctagtaccggggtgcatggggcaaatcgccttgccagtaattccctgttggaatgtattgtctttggggcccagatgagccaaatagagttggaaaatattgggttgccgtcacaaataccagtgttgccatcacggaaatttagtgttgatgcaaatgagtggcacatccagcaagcacaactagaaacactcagagagaagttaccacgtctagtttgggaaagtgctggtatttgtcgggagcaatcaaagttggaaactgcgatcgccactgttgaatcttggcaacaagatttcgctgctttgcctttaagtcaattcttgcttgctttacacccaacagaatcagctagttttgagttcccagatgttgaacgacaattgcgactttgggcagaaacccgcaatttattagatgtggctgatttaattctcaaaagtgctgcttttagaaccgagagccgaggcggacactaccgtttagactatcctcaaccagaccccaattggcaagttcacacacttgtccaaagaaatcattggtggaaatctccaatattatcttga

SEQ ID NO: 33324 - protein, 558 aa, Nostoc punctiforme PCC 73102
MPQIDIPSQFDVLVVGAGAAGLYTALCLPESLRVGLITKETVALSASDWAQGGIAAAVSPEDSPTLHIEDTIRAGAGLCDRTAVEFLAQLAPKCIQSLVDLGVAFDRHGQALALTLEAAHSRNRVLHAADTTGKEVTTTLTAQVLRRPNIQVIQQALALSLWIEPESNRCQGISLFYQGKITWIKAGAVILATGGGGQVFAQTTNPAVSTGDGVAIAYRAGAILRDLEFVQFHPTALTKPGADRFLISEAVRGEGAHLVDNEGRRFAFDYHPAGELAPRDVVSRAIFSHLQRTAVDLATAHVWLDMRPIPADKIRHRFPNIIKVCQHWGVDVFHEPIPVAPAAHYWMGGIVADLMNRTNIKSLYAVGETASTGVHGANRLASNSLLECIVFGAQMSQIELENIGLPSQIPVLPSRKFSVDANEWHIQQAQLETLREKLPRLVWESAGICREQSKLETAIATVESWQQDFAALPLSQFLLALHPTESASFEFPDVERQLRLWAETRNLLDVADLILKSAAFRTESRGGHYRLDYPQPDPNWQVHTLVQRNHWWKSPILS

SEQ ID NO: 33325 - DNA, 1791 bp, Rickettsia rickettsii
  CDS (1)..(1791): transl_table=11
atgaccaaagcgtataatatcgttcatcataaatttgacgtagtagttgtaggtgcaggcggagcaggtcttcgttctgcattcggtatggctaaagcagggctaaatactgcttgtataactaagctgttcccaacccgtagtcatactgtggctgctcagggcggaattagtgcggctcttgggaatatgggtgaagatgattggcgttggcatatgtacgatacggtaaaaggttctgattggttaggcgatcaggatgccattgagtatatgtgcaaaaacgctcccgatgcgattttagagctagagcattacggcgtacctttctcaagaactgaagagggaaaaatttatcagcgtccttttggagggatgacaacagagtacggcaaaggaaaagcagctcagcgtacatgtgctgcggcagatcgtacggggcatgccatactgcatactttatatcaacagtcactaaaacataaagtacagtttttcgttgagtattttgctattgatttattgatggaagatggtgaatgtagaggcgtagttgcgtggaatttagatgacggtagtctgcattgttttagagcgcataatgtagtgcttgcaacgggcggatacgggcgtgcttatttttcagcgacgtctgctcatacttgtactggtgatgggggcggtatggcgattagagccgctcttccactgcaagatatggaatttgtacagttccatccgacaggtatatattcggccggctgtcttattaccgagggggcaagaggtgaagggggatatctcgttaatgcaaacggtgagcgttttatggagcgttatgctcctgctgcaaaggatttagcttcaagagatgtagtttcaagagcaatgactatagaaataagagaggggcgaggagtcggcgagcataaagatcatgtatttttacatttaaatcatttatcgtctgagattttacatagtcgtttgcccggtatctctgagacggctaaaatttttgccggtgttgacgtgactaaagagccgataccggtacttcctacggtacattataatatgggcgggataccgacgaattatcacggtcaagtcataatcaaagacggtaaaaatcataatagcgtagtaaaagggcttatggcaatcggtgaagcggcttgcgtatcggtacacggtgctaaccgattaggatcaaattctttgcttgatttggtagtatttggtagaagttctgcattaaaagcagccgagcttattaagcctgcgagtccccacaagtctataaaagaagaaagccttgaaaaaattataaatagatttgataaagtccgtcacgctaacggtaatattttagttgcagagttaaggcttaaaatgcaaagaactatgcaaagccatgcttcggtatttagaactcaagagctactagatgaaggggcaggaatgattagcgaaataagaagcggctataaagatataaaaattaacgataaatctttaatttggaatagcgatttggtggaagccttagagctagataatctacttgatcaagctttagtaacggtatattcggcagctgcaagaaaagaaagcagaggagctcatgcacgtgaagattatcctgatcgtaatgatgaggattggatgaagcatactcttagctctatcgatgaagcaggtaaagtagttcttgattataaacctgtgactttaactactttaaccgatgaagtaacagcagtcccgccggtgaagagagtgtactga

SEQ ID NO: 33326 - protein, 596 aa, Rickettsia rickettsii
MTKAYNIVHHKFDVVVVGAGGAGLRSAFGMAKAGLNTACITKLFPTRSHTVAAQGGISAALGNMGEDDWRWHMYDTVKGSDWLGDQDAIEYMCKNAPDAILELEHYGVPFSRTEEGKIYQRPFGGMTTEYGKGKAAQRTCAAADRTGHAILHTLYQQSLKHKVQFFVEYFAIDLLMEDGECRGVVAWNLDDGSLHCFRAHNVVLATGGYGRAYFSATSAHTCTGDGGGMAIRAALPLQDMEFVQFHPTGIYSAGCLITEGARGEGGYLVNANGERFMERYAPAAKDLASRDVVSRAMTIEIREGRGVGEHKDHVFLHLNHLSSEILHSRLPGISETAKIFAGVDVTKEPIPVLPTVHYNMGGIPTNYHGQVIIKDGKNHNSVVKGLMAIGEAACVSVHGANRLGSNSLLDLVVFGRSSALKAAELIKPASPHKSIKEESLEKIINRFDKVRHANGNILVAELRLKMQRTMQSHASVFRTQELLDEGAGMISEIRSGYKDIKINDKSLIWNSDLVEALELDNLLDQALVTVYSAAARKESRGAHAREDYPDRNDEDWMKHTLSSIDEAGKVVLDYKPVTLTTLTDEVTAVPPVKRVY

SEQ ID NO: 33327 - DNA, 1680 bp, Crocosphaera watsonii WH 8501
  CDS (1)..(1680): transl_table=11
ttgaccttgatatcttcagttaattatctaaaaacaaataatttaaccacccaatttgacgttattgtggtaggttcgggggcagcaggtttatatgcggctctgtgtttacctactaaatatcgtgtgggactgatcaccaaagagactttaaaaacaggggccagtgactgggcccaaggaggaattgcggcagccatttctcaagaagactctcccaagtttcatcaagaagataccctcaaagcaggggctggtttatgcgatcgccgtgcggtgcagtttttggtggatcatgccggcaccactatccaatctctggtggagatgggagttgccttcgatcgcaaagggggtgaactagccatgactctagaagcagcccattgccatccccgtgtgctacacgctgctgataccacaggaagagctattgtcagtaccctaacggaaaaagccctagaacgagtcaatatagagattattccccaagcgatcgccctccaattatggatcgaaccagaaaaaaaacgctgccaaggcttaagtgttctctatcaaaaccaaattgagtggattcaagcaggagcggttattttagccactgggggtgggggacaggtttatgctcaaactaccaatccttccgtcagtacaggggatggggtggcactagcctggcgtgcaggggcgatcgtcagggacttggagtttttccaatttcatcccacagccttaaccaaaccagaagccccccattttttgatcagtgaagcggttagaggagaaggggcgcatctggtagatgagcaggggaggcgttttgcttttgattatcatccctctggagagttagccccaagagatgtggtgagtcgggggattttcaactatctacaaggtcaaaagaatcaaaccaatgtttatcttgatctaggttccattgaaacggagcagattcgttacaggtttcccaatattattagtgtttgtcaacaatggggtatagatgtgtttaaagagcctattcctgtggctccggctgcccattattggatgggaggggttaaagtagatttgaacaatgccacttctattgatggactttatgccattggcgaaactgccagtacaggggttcatggagccaatcgccttgctagtaattctttgttagagtgtttagtgtttgcggctcaactatcaaaacttaatgtaacttcctcattccctctaaccaagaggacaaagatggtaatggaaaaacaaaaaaaatggcagcaagaaatgcctcaaattctagaagttcgtcagagcttgcctcaattaatctggcaaagtgctggtatttcccgtagtcaaaccgtactggaagaagcgatcacacaagttagcctctggcaaaaacaactgaagtctctctccctcagtcaagctattttcaacctattaccaggtcaatcggttaaattggaggtaggggcgaaccaaagtgatttacggacttgttatgaaacaattaatcttttggatattgcttatttaatgctcaaaagttccttatttcgtaccgaaagcagagggggtcattatcgccaagactatcctcaatcttctcaagaatgggaaaaacatactctagtctgtgagcatcggtggtggaagggtgagattgactaa

SEQ ID NO: 33328 - protein, 559 aa, Crocosphaera watsonii WH 8501
MTLISSVNYLKTNNLTTQFDVIVVGSGAAGLYAALCLPTKYRVGLITKETLKTGASDWAQGGIAAAISQEDSPKFHQEDTLKAGAGLCDRRAVQFLVDHAGTTIQSLVEMGVAFDRKGGELAMTLEAAHCHPRVLHAADTTGRAIVSTLTEKALERVNIEIIPQAIALQLWIEPEKKRCQGLSVLYQNQIEWIQAGAVILATGGGGQVYAQTTNPSVSTGDGVALAWRAGAIVRDLEFFQFHPTALTKPEAPHFLISEAVRGEGAHLVDEQGRRFAFDYHPSGELAPRDVVSRGIFNYLQGQKNQTNVYLDLGSIETEQIRYRFPNIISVCQQWGIDVFKEPIPVAPAAHYWMGGVKVDLNNATSIDGLYAIGETASTGVHGANRLASNSLLECLVFAAQLSKLNVTSSFPLTKRTKMVMEKQKKWQQEMPQILEVRQSLPQLIWQSAGISRSQTVLEEAITQVSLWQKQLKSLSLSQAIFNLLPGQSVKLEVGANQSDLRTCYETINLLDIAYLMLKSSLFRTESRGGHYRQDYPQSSQEWEKHTLVCEHRWWKGEID

SEQ ID NO: 33329 - DNA, 1596 bp, Prosthecochloris aestuarii DSM 271
  CDS (1)..(1596): transl_table=11
atgactgaagacatacaaaccgatgtcctggttatcggcagcggcatcgggggactctactttgcgctgaacatagccgaccatgccagggtaaccatcatcacaaaaaaagagagctgcgaatccaacaccaactgggctcaaggaggcatagcagcaaccattgatcagaatgacagcgctgaactccatatcaatgataccctcgatgccggagcaggtctctgcaacaaaccgatggttgaagtaatggttaacgaggggcctcagcatatccggaaacttatagaactgggcgtacagtttacgacaaccgataacgaccatctcgaccttgggcgtgaaggtggacactcgcgaaaaagaatcgtccatgccagtgatctcaccggtcaggaggttgaacacgcactgctcgaacgggtcaaccagcaccccaacatcaccctcctcgaacaccatttcgccattgaactgctcactgagcatcatgtgcatatcaaaaccaacgagatcagctgctatggggccttcgtgctcgatacccaaaaccggaagctcaaaaaagttctttcgaaagtcaccatgcttgcctcgggcgggctcggccatgtctatcttcacaccaccaatcctgatatcgccaccggcgacggaatcgccatggcctatcgcgcaggtgcgttgatcgcaaacatggagttcatccagtttcacccgacatcactctttcaccccaaagcaaaatcattccttatctctgaagcggtaagggggttcgggggcattctgcggcttaaaaacggccaggcattcatgaaaaaatatgaccccagagaaaatctcgcgccccgcgatatcgtcgcccgggctatagactctgaaatgaaaaagacaggggatgaatgcgtctttctcgatgtaacccatcttgagccagaaaaaaccatccagcatttcccgaatatttatgagacctgtctggaattcggtattgacatgacaaaagagatgatccccgttgtcccggcagcgcattactcatgcggcggcataaaaaccgacgatgtaggacgcagctcaatcaatcgcctgtacgcctgtggagaaacaagctgcaccggcgtccacggagccaacaggcttgccagcaattcactgcttgaagcgctggtgttcgcctacaggtcctataaggatatcaagcagacgctgcacaccattcacaataacctcccattcccggactgggacgacagcgggacgaccaaccctgaagagtggattcttgtttctcacaataaaaaagaagctcagcaggttatgaacgactacgtcggcattgtccgcagcgacctgagacttcagagagcaaaacggagaatcgaattcctgaaagaggaaacagaagcctactataaacgaacacggatcacgacagagattcttgaactgcgaaacattatcaaagtcgcaagccttatcattgaaagtgccataaaaagaagagaatcgcgcgggttgcactatacgaccgactacccgtcgaaagacgacaaacactttctcatcgataccgaactgcggtcgttctga

SEQ ID NO: 33330 - protein, 531 aa, Prosthecochloris aestuarii DSM 271
MTEDIQTDVLVIGSGIGGLYFALNIADHARVTIITKKESCESNTNWAQGGIAATIDQNDSAELHINDTLDAGAGLCNKPMVEVMVNEGPQHIRKLIELGVQFTTTDNDHLDLGREGGHSRKRIVHASDLTGQEVEHALLERVNQHPNITLLEHHFAIELLTEHHVHIKTNEISCYGAFVLDTQNRKLKKVLSKVTMLASGGLGHVYLHTTNPDIATGDGIAMAYRAGALIANMEFIQFHPTSLFHPKAKSFLISEAVRGFGGILRLKNGQAFMKKYDPRENLAPRDIVARAIDSEMKKTGDECVFLDVTHLEPEKTIQHFPNIYETCLEFGIDMTKEMIPVVPAAHYSCGGIKTDDVGRSSINRLYACGETSCTGVHGANRLASNSLLEALVFAYRSYKDIKQTLHTIHNNLPFPDWDDSGTTNPEEWILVSHNKKEAQQVMNDYVGIVRSDLRLQRAKRRIEFLKEETEAYYKRTRITTEILELRNIIKVASLIIESAIKRRESRGLHYTTDYPSKDDKHFLIDTELRSF

SEQ ID NO: 33331 - DNA, 1791 bp, Xylella fastidiosa Ann-1
  CDS (1)..(1791): transl_table=11
atgtccgcttatacaattaccgaacacaaatatgacatggttgtcgttggtgctggcggtgctggtctacgtgccacgttcggtttggctcagaaaggcttacagactgtctgtctgacaaaagtattcccgacgcgttcgcataccgtcgctgcgcaaggtggtatctccgctgcgcttggtaacatgggagaggatgattggcgttaccatttttatgacaccatcaaagggtcagactggctgggtgaccaggatgcgattgagtacatgtgccgtgaggcaatcccggctgtgatcgaactagaacactatggtgttccgttctcgcgtactgcacaaggcaagatttaccagcggccatttggtgggatgacgacacgttacggtgaggggccgcgggcagagcgtacctgcgctgcagctgatcgaaccggccatgcgatgttacataccttgtaccagcaagcattggcgcacgacgcgcgtttcatgattgagtactttgcacttgatctgatcttcgacaacgagggtttgtgtcgtggcgtgttggcgttggacatggccgagggatccttgcacctgtttcgtgcccatggagtcgtgttggcgaccggtggctacggtcgcacgtacttcagtgcaacttctgctcatacctgtactggtgacggtggtggcttggtgatgcgtgccggtttaccgatgcaggatatggagtttgtgcagttccatcccacaggaatctatggggctggctgcctcatcaccgaaggagtgcgtggtgagggaggaatcttgcgtaactctaacggggagcgctttatggagcgctatgcacctcactacaaggatctggcctctcgtgatgtggtgagtcgctcaatgattattgagatcagggaggggcgcggcgttggtgaacacaaagaccatatattgcttgatttgactcacttgggtccgagcatgatccaagaaaaattgcctggtattgccgagagtgcgcgtatcttcgctggcgtggatgtgaccaagcagccgattccggtgttgccaacagtgcattacaacatgggtggtattccaaccaattaccatggcgaagtggtgcgtaaagttggtaatgatcctgatgcagtggtgccggggctatatgcggttggtgaagcggcctgtgtatcggtgcacggtgccaatcgtttgggatcgaattcgttgcttgatttggtggtattcggtcgtgcggttgccaatcgttgtgccgaaacaatcaaaccaaatcagccgcataaggtattgccctcggatagttgcgacaaggcactgggcttgcttgataaacttcgtcatgctgatggttccacgccgacagcggtgattcgtgacaggatgcaacgtaccatgcaatctgatgcttcggtgtttcgtacgagtaagaccttgcaagaagggtgcgaaaagatgaatgaaatctttgccttgtttgatgacgtcaaggtttctgatcgttcacttgtttggaattcggatttgatagaaacctacgagctccacaatttgctgttaaacgcactggctacgattaactcggctgaacagcgcaaagagagccgtggtgctcatgcccatgaagattatccagatcgcgatgacgagaattggttgaaacacacattggtcagtgtcgacgaaaagggcacatgcagttttgactaccgccctgtgcacatgtacacgctcagcaaagacgtggatgtgatacctcctaagccgcgcgtctattga

SEQ ID NO: 33332 - protein, 596 aa, Xylella fastidiosa Ann-1
MSAYTITEHKYDMVVVGAGGAGLRATFGLAQKGLQTVCLTKVFPTRSHTVAAQGGISAALGNMGEDDWRYHFYDTIKGSDWLGDQDAIEYMCREAIPAVIELEHYGVPFSRTAQGKIYQRPFGGMTTRYGEGPRAERTCAAADRTGHAMLHTLYQQALAHDARFMIEYFALDLIFDNEGLCRGVLALDMAEGSLHLFRAHGVVLATGGYGRTYFSATSAHTCTGDGGGLVMRAGLPMQDMEFVQFHPTGIYGAGCLITEGVRGEGGILRNSNGERFMERYAPHYKDLASRDVVSRSMIIEIREGRGVGEHKDHILLDLTHLGPSMIQEKLPGIAESARIFAGVDVTKQPIPVLPTVHYNMGGIPTNYHGEVVRKVGNDPDAVVPGLYAVGEAACVSVHGANRLGSNSLLDLVVFGRAVANRCAETIKPNQPHKVLPSDSCDKALGLLDKLRHADGSTPTAVIRDRMQRTMQSDASVFRTSKTLQEGCEKMNEIFALFDDVKVSDRSLVWNSDLIETYELHNLLLNALATINSAEQRKESRGAHAHEDYPDRDDENWLKHTLVSVDEKGTCSFDYRPVHMYTLSKDVDVIPPKPRVY

SEQ ID NO: 33333 - DNA, 1572 bp, Oceanicola batsensis HTCC2597
  CDS (1)..(1572): transl_table=11
atgaccccaatcgacacgtcccgtgtcatcatcgtgggcgcggggctggccgcgcaatatgccgcgctgcgcctggcgccgcgtccggttctgatgatctcgcccgaggctctgggcaccggcgcgtcatcggcctgggcgcagggcggcgtggcggcggcgatggaccccgccgacagcgccgcggcacatgcccgggacacgatcagtgccggtgcgggcaccgtcgatccacaggtggcccgtaccgtcaccgccgaggcccgggcgcatatccttgacctcaccgggctgggcacgcccttcgaccggaccgcggtcggcggctatgtcctgtcgcgcgaagccgcacacagttttgcccgcgtcgtgcgggtccggggcgaccaggccggggccgagatcatgcgtgccctgaccacgcaggtgcgcgacgccgaccacatccaggttctggaaggcgtgatggccaccgcgctggtcatggaaaacggcgtggcccgcggggtcgaggtcacatgctgcaccgacggcatcacccgcccgattgcgatccgcggcgcggccgtcctgctggcgggtggcgggtccggcgggctttttgccctgacgaccaacccgccgcgcatccgcgggcaggtgatcggcatggccgcccgcgcaggggcgcagatcgccgatgcggaattcgtccagttccaccccacggccattgccgtcggacaggaccctgcccccctggcgaccgaggccctgcgcggcgaaggtgccgtcctggtcaaccgccacggcgaacgcttcatgctggcggcgcatcccgacgcagagcttgcgccgcgcgacatcgtggcccgtgccgtctatgcccagacgcaggcgggccttgccccggcattggacacgcgcgcagcacttggcgcgcgcatcctgaccgatttccctgccgtggccgccgcctgccggcaggccggggtcgatccggtgaacaccccgatccccgtcgccgccgccgcgcattaccacatgggcggcattgcgacggatgcatcgggacaaagcagcctgcccggcctctgggcctgtggcgaggccgcctcgaccggattgcacggggcgaaccggctggcgtcgaacgggctgctggaggcgctggtctatggccgccgctgtgcgctggcaatcgacgcggaactgccgcccgcgaccaccgaagccgcggacgtcaccctgcccgaattgcctgccgcccccgcccccgacccggcgctggtcgcccggctgcggcaagcgatgacagatggcgccggcgtgatccgtgatgccaaggggctgcgggacaccctgtccgccatcgccgaaatcgaggccgcgcaacccgattgcgacgcccttctcaacatgacggcaacggccacgctgatcgccgccgccgccctgtcgcgccgcgaaagccgcggggcgcatttccggtcggattttcccgcccccgcgggtgaggccggtgtgcgctccttcctgacccttgcgcaggccgcggacatccgcgcccaggcccgaaaggaaccagcatga

SEQ ID NO: 33334 - protein, 523 aa, Oceanicola batsensis HTCC2597
MTPIDTSRVIIVGAGLAAQYAALRLAPRPVLMISPEALGTGASSAWAQGGVAAAMDPADSAAAHARDTISAGAGTVDPQVARTVTAEARAHILDLTGLGTPFDRTAVGGYVLSREAAHSFARVVRVRGDQAGAEIMRALTTQVRDADHIQVLEGVMATALVMENGVARGVEVTCCTDGITRPIAIRGAAVLLAGGGSGGLFALTTNPPRIRGQVIGMAARAGAQIADAEFVQFHPTAIAVGQDPAPLATEALRGEGAVLVNRHGERFMLAAHPDAELAPRDIVARAVYAQTQAGLAPALDTRAALGARILTDFPAVAAACRQAGVDPVNTPIPVAAAAHYHMGGIATDASGQSSLPGLWACGEAASTGLHGANRLASNGLLEALVYGRRCALAIDAELPPATTEAADVTLPELPAAPAPDPALVARLRQAMTDGAGVIRDAKGLRDTLSAIAEIEAAQPDCDALLNMTATATLIAAAALSRRESRGAHFRSDFPAPAGEAGVRSFLTLAQAADIRAQARKEPA

SEQ ID NO: 33335 - DNA, 1689 bp, Prochlorococcus marinus str. MIT 9211
  CDS (1)..(1689): transl_table=11
atgaggcttagtaatacttctaattcccttattcctacttattgggatgtagttgtcataggtgctggcgcggctggtctaatgacttgtcttgagatgccttctaatttgaaaatattgcttttaaatagaaataccagcaaaaggtcatctagtcgatgggctcaaggagggatagcggcagtcactcgatttgaagatagttttgcaagtcatgcagaagatacttttaaggcaggagcagggttatgcgattctgatgcagtaaaaatgcttgtcgaagaagcccctaaatgtgttcagcgtctacagaatttgggaatggaatttgatagagataacaatggccttgctacaaccttagaggctgctcattctcatagaagggttttgcatgttcaggatcgcacaggaagagcattagtagaggtgcttagggatcaagttgaacagcgttctaatattcttcatagacgaggcgttcgagttactcaacttttagttgacaataatcattgttttggagtgcagctactagatggaccttatttgcactctgttttgtcaagagcagtggttttggcttcagggggcggtggtcatttgtttaaaaacactactaatcctgctcaagcatgtggagaaggcttggccttggcttggaacgcaggcgcagctatagaggatcttgaatttgttcaatttcaccctactgctttaaagctgaaaggagcttcatgctttttaatctctgaagctgtccgaggtgaaggtgctgttttagttgatcattttggcaatagtcctgtgtctcatctagcaaggaaagatctcgcttcaagagatcaagttagtagggctttgtttcaagctatgcaaagccagaaagtaaatcatttaggcctggatttaacgcggattcctccaaagaaaattgaaactcggtttccttccattcttcaaagatgtagagaatttggtgtagaccctatgaaaactgtaattccagttgcaccggcagcacattattggatgggtggtgttgccacggatttgaatgctgcaacatccttatcaggtctttatgcagttggcgaggttgcttgtactggtgttcatggagcaaatagattagcaagtaattcattgatggaatgtcttgtattcgctaggaaaatgtcagcaattgagttaatagatagttgtaagttgccacgcattaccaaagagctaattacagttgattcatcaatcccactacagggaaaattaagtactgattatttaacaaatgctattgaagatttaaggcaattatgttggaagcaagcaggtgtagatagaacagaaaaaggaatgatgtatgcaatcagatctattaaaaaggatcttgattgtttaaataaggagccattattagaatttcttagaaatcaaaatattgatatatgtaattatttcaatgaaagtaaccgtaagtctttaaatcttcttttggatttaagtcatagacaacttagtagtttattaatgttgcaagcttgcttattcagaaaggaaagtagaggaggacattttagacgcgattcacctcaccaattacctttttggaagtgccactcgaggcaaattttaggcaaagaaattgctacaaggccaattgaaaattcactttctagaaatccctag

SEQ ID NO: 33336 - protein, 562 aa, Prochlorococcus marinus str. MIT 9211
MRLSNTSNSLIPTYWDVVVIGAGAAGLMTCLEMPSNLKILLLNRNTSKRSSSRWAQGGIAAVTRFEDSFASHAEDTFKAGAGLCDSDAVKMLVEEAPKCVQRLQNLGMEFDRDNNGLATTLEAAHSHRRVLHVQDRTGRALVEVLRDQVEQRSNILHRRGVRVTQLLVDNNHCFGVQLLDGPYLHSVLSRAVVLASGGGGHLFKNTTNPAQACGEGLALAWNAGAAIEDLEFVQFHPTALKLKGASCFLISEAVRGEGAVLVDHFGNSPVSHLARKDLASRDQVSRALFQAMQSQKVNHLGLDLTRIPPKKIETRFPSILQRCREFGVDPMKTVIPVAPAAHYWMGGVATDLNAATSLSGLYAVGEVACTGVHGANRLASNSLMECLVFARKMSAIELIDSCKLPRITKELITVDSSIPLQGKLSTDYLTNAIEDLRQLCWKQAGVDRTEKGMMYAIRSIKKDLDCLNKEPLLEFLRNQNIDICNYFNESNRKSLNLLLDLSHRQLSSLLMLQACLFRKESRGGHFRRDSPHQLPFWKCHSRQILGKEIATRPIENSLSRNP

SEQ ID NO: 33337 - DNA, 1695 bp, Erythrobacter sp. NAP1
  CDS (1)..(1695): transl_table=11
ttgggccacggttcaccgagaggcgcgctcgaacgggtcgaactcttgccagccgaagccatgcgcgccatggcagggcgcatggaaaatcacggccaatccgacgcgtcgccaaacgagaaattcgacgtcatcgttatagggtccggggctgccggtcttaccgcagcgcttgagcttgcgacccggctgaaggtgcttgtgctggccaagggcacgctcaccggaggctcgaccgcgtgggcgcagggcggcattgctgcggtgctcgatgcgggcgacacgttcgaaaaccacgtgcgcgacacgatggtggctggtgcggggctcaatgatctcgaagcggtcgaattcgtgatcgaacgcgcaccggaaagcatcgagcggctggtcgaactgggcgtaccgttcaacaaggataccgattccctccacctcacccgcgagggcgggcactcgcaccgccgcatcgttcatgtcgacgatgcgaccgggtgggcggtgcaggaggcgctgctcaaggccgccgaagcaagccccaacatcaccatgctgggcgggcgcacctgtatcgacttcatcaccgaccgccaccgcgagaactactcgggcgcgggccatgtctggggcgtttatgcgctcaacgaggagaccggcgcggtcgaacgccacgttgcacgcgcgaccatcctggcagccggaggcgcaggccgcgtctaccagttctcgaccgccccgcgcggcgcgaccggagacggcatcgcgatggcatggcgggcaggcgcgcgcgtctcaaacatggagatgatgcagttccaccccacctgcctctacaatctggaggtcaagaacttcctcatcaccgaggcggttcgcggcgagggcgggcggctctatcaccccgaaaccggccaccgtttcatgaccgattacgacgcagagcgcatggagcttgccccgcgcgatgtcgtggcgcgcgcgatcgacgaccagatcaagcgctttggcctcgactatgtccacctcgacatcagccaccagccagccgacttcgtgaagggacatttcccgacgatctacgacaagctgatgggccttggcatcgacatgacgaaggagccgatccccgtcgtgcccgcgcagcactacacctgcggcggcgtggtggtggacctctatgcccgaaccgatctgcccggtttgtgggcggcaggcgaatgcaccgaaagcgggcttcacggcgcgaaccggcttgcttccaattcgctgctcgaatgcttcgttttcggagaagcagcggcatccgacattctcaccatgtgggacgagcttcccgaaccgcccgcgatcctgccatgggacgaaagccgcgtgtcggattcagacgaacaggtcgtcatcaagcagaactggaccgaaatccgccgcttcatgtggaactatgtcggcatcgttcgcaccaccaagcggctcgaacgcgcgcagcaccggatcgagatgctcaagcgcgaggtcgaggaatattacggcagcttcgtcgttaccaccgacctcatcgaactgcgcaacctgttacagtccgcagagctgatcgtgcgctcagcactggcacgcaaggaaagccgcgggctgcactttacgatggattacccggagacgagcgacgtggtgaaggacacggtgctggttccgtga

SEQ ID NO: 33338 - protein, 564 aa, Erythrobacter sp. NAP1
MGHGSPRGALERVELLPAEAMRAMAGRMENHGQSDASPNEKFDVIVIGSGAAGLTAALELATRLKVLVLAKGTLTGGSTAWAQGGIAAVLDAGDTFENHVRDTMVAGAGLNDLEAVEFVIERAPESIERLVELGVPFNKDTDSLHLTREGGHSHRRIVHVDDATGWAVQEALLKAAEASPNITMLGGRTCIDFITDRHRENYSGAGHVWGVYALNEETGAVERHVARATILAAGGAGRVYQFSTAPRGATGDGIAMAWRAGARVSNMEMMQFHPTCLYNLEVKNFLITEAVRGEGGRLYHPETGHRFMTDYDAERMELAPRDVVARAIDDQIKRFGLDYVHLDISHQPADFVKGHFPTIYDKLMGLGIDMTKEPIPVVPAQHYTCGGVVVDLYARTDLPGLWAAGECTESGLHGANRLASNSLLECFVFGEAAASDILTMWDELPEPPAILPWDESRVSDSDEQVVIKQNWTEIRRFMWNYVGIVRTTKRLERAQHRIEMLKREVEEYYGSFVVTTDLIELRNLLQSAELIVRSALARKESRGLHFTMDYPETSDVVKDTVLVP

SEQ ID NO: 33339 - DNA, 1695 bp, Synechococcus sp. WH 5701
  CDS (1)..(1695): transl_table=11
atgccctcgacgccccgccttcgaccacccctggccccgagctgggatgtggtggtggtggggggcggtgccgccgggctgatggcctgcctggagttgcccgccgacctgagggtgctcctgctcagcaaggagcgcggaccccggaccgccagtcgttgggcccagggcggcatcgcggcggtcacccgggctgaggacagtcttgagagccaccgcgacgacaccctgcgagcaggggcaggactgtgcgatcccggtgccgtcgatctgctggtgcagcaggctccagcctgcgttgaacggttgttggggctgggcatggcctttgaccgcgacggcagtggtctgagcaccaccctcgaggccgcccacagccaccggcgggtgctccacgcccaggaccgcacaggaggcgccctggtggatgccctggagagggaggtgctgcgccgccctgggctggtgcagcgcaaggggctgatggcgcttcagatctgggtcgagcagggccgctgcctcggactgcaggtgctggagaacgatcaggtgcgttggctgggggccagtgcggtggtgctggccagcggcggcggcggccacctgttcgagaagaccaccaatccctcccagtccaccggtgatggagtggcgatggcctggcgggccggggccgccatccgcgatctggagttcgtccagttccatcccaccgccctgatgctgccaggggctccccacttcctgatctccgaggccgtgcggggtgaaggggcccgcctgatcgacagccacggccacagtccagtgaccgacctcgccagcggcgatctggctccccgcgatcaggtgagccgtgccctggtgcgaaccatgcaggcccagggcgtcgaccacctctggctcgacctgcggccggtgggacaggagcggttgaaccgtcaattcccaacaatcctgcgccgctgccgggagctgggcctggagcccacggcggcgccgatccccgtggctccggccgcccactactggatgggtggtgtgagcacagacctgagcgccgccaccaatcttcctggcctctacgccgtgggtgaagtggcctgcagcggcgtgcatggcgccaatcgcctggccagcaattcactgatggaatgcctggtttttgccgggcagctgcggcaattgtctctgccggagcagcagcccttgccccgcacatggggatcagcatcacctgctgctgggagcggctgccccccgcagctcgcccaggccctgcccctcgagagcgagttgctcgcccagagcgaacggctgcgccgcctctgctggcgggtggcgggggtcgagcgccaggagcgggagctgcgggaggccctggggctgatccgcctccagcggctggagctggacaatcatccctggattcaggccctggcacggctcgagcccggcgatcagctcgccctcggcccgggcggcggcggcatgctgcgcccgctcaacgatctgcgccagctgctcaccctggcggatctgctggtggaggctgccctgttccgccgcgagagccgtggcggccactaccgcaccgactgcccggcgccacagcccttctggcaacgccactcccggcaacaacgcggtgaggcgatccacacgactccgttgctggaagggaactcgggctga

SEQ ID NO: 33340 - protein, 564 aa, Synechococcus sp. WH 5701
MPSTPRLRPPLAPSWDVVVVGGGAAGLMACLELPADLRVLLLSKERGPRTASRWAQGGIAAVTRAEDSLESHRDDTLRAGAGLCDPGAVDLLVQQAPACVERLLGLGMAFDRDGSGLSTTLEAAHSHRRVLHAQDRTGGALVDALEREVLRRPGLVQRKGLMALQIWVEQGRCLGLQVLENDQVRWLGASAVVLASGGGGHLFEKTTNPSQSTGDGVAMAWRAGAAIRDLEFVQFHPTALMLPGAPHFLISEAVRGEGARLIDSHGHSPVTDLASGDLAPRDQVSRALVRTMQAQGVDHLWLDLRPVGQERLNRQFPTILRRCRELGLEPTAAPIPVAPAAHYWMGGVSTDLSAATNLPGLYAVGEVACSGVHGANRLASNSLMECLVFAGQLRQLSLPEQQPLPRTWGSASPAAGSGCPPQLAQALPLESELLAQSERLRRLCWRVAGVERQERELREALGLIRLQRLELDNHPWIQALARLEPGDQLALGPGGGGMLRPLNDLRQLLTLADLLVEAALFRRESRGGHYRTDCPAPQPFWQRHSRQQRGEAIHTTPLLEGNSG

SEQ ID NO: 33341 - DNA, 1683 bp, Synechococcus sp. WH 7805
  CDS (1)..(1683): transl_table=11
atgagcaaagcgcgtctaacaccccaggatccgatccacaacggcccctgggatgtcgtggttgttggagcaggcgcagctggcctgatgacctgcctggagctccctgctgagctgaacgttctccttctcaaccggaatgccggtcgacgatcttcaagtcgctgggcgcaggggggaatcgcctccgtcaccggtcctgatgactccgccttctgccatggggaagacaccctgaaggcaggtgcaggactctgcgatggccatgccgttcgactcctcgtggaccaggcaccccgctgcgttgaccggttgctctccctcggcatggcgtttgaccgcaatcccgatgggtctctggcgaccacactggaagcagcccacagccagcatcgggtcctgcacgtgcaggaccgcaccggaagggctttggtggatgtcctacgagagcgcgtcgaggcgagaccaggcttggtccatcgacgcggcgtccgggtcacccaactctgggttgaagatcaacgctgctgcggggttcaggttcttgatggcccttggctgcattgggttgcagcccgagcggttgtcctggcgacaggaggcggaggccatctctacaccaacaccacgaatccaccccaagcctgtggtgaaggcgttgttctctcatggcaagccggtgcggcagtcgacgatctcgaatttgttcagttccatcccacggcgttgaaacgcgatgatgcgccctgttttctgatctccgaagccgtccgtggcgaaggcgccgtcttggtggatcccttcggacgaagtcctgtggaagcgcttccccagcgcgatcttgctccacgcgatcaggtgagccgagccctgctgcgatgcatgcgcgaccaaggattgagcagtcttgggttggatctctcaccgattccaacagacaaggccgaacggcgttttccgacgattctcgagcgctgccgggaatacggactcgaccctttgcagaatccgatcccagtggcaccagccgcgcactactggatgggaggggtcgccacggatctgcaggcggccacaacgattcccggcctttttgccgttggggaggtggccagcacaggggtgcatggtgccaacaggttggccagcaactcattgatggaatgccttgtgttcgccgggaggctcaggaacatcaccctgaatgaccgcagcgcaccaacaatttcaagcaaaggtctggagcctttcgggatggagatcccaatgccatggccagggcctgctgctgaatccctgagccgatcgatcaactcactccgatcagcttgctgggatgtagctggagtcgatcgacacgtgatcgggatgcgacagaccttgcgggagcttctcaaggccaacgcggcgctgcaatcaagcccgcttcttgaggcgatgcgtcgtcaggacaaagatcgatgcttcctgctggaagagagctgtcgcagcaacatcaatcttctcctggaccttcatcaccgccagcaggcaagccgactgctgctggaggcttgcctgtttcgcaccgaaagcaggggaggccacttccgcggtgatgccccgacaccacttccgcagtggcgatgccacagccgccaggtcaaaggcaagaccatccacacccgaccggtcatcgattga

SEQ ID NO: 33342 - protein, 560 aa, Synechococcus sp. WH 7805
MSKARLTPQDPIHNGPWDVVVVGAGAAGLMTCLELPAELNVLLLNRNAGRRSSSRWAQGGIASVTGPDDSAFCHGEDTLKAGAGLCDGHAVRLLVDQAPRCVDRLLSLGMAFDRNPDGSLATTLEAAHSQHRVLHVQDRTGRALVDVLRERVEARPGLVHRRGVRVTQLWVEDQRCCGVQVLDGPWLHWVAARAVVLATGGGGHLYTNTTNPPQACGEGVVLSWQAGAAVDDLEFVQFHPTALKRDDAPCFLISEAVRGEGAVLVDPFGRSPVEALPQRDLAPRDQVSRALLRCMRDQGLSSLGLDLSPIPTDKAERRFPTILERCREYGLDPLQNPIPVAPAAHYWMGGVATDLQAATTIPGLFAVGEVASTGVHGANRLASNSLMECLVFAGRLRNITLNDRSAPTISSKGLEPFGMEIPMPWPGPAAESLSRSINSLRSACWDVAGVDRHVIGMRQTLRELLKANAALQSSPLLEAMRRQDKDRCFLLEESCRSNINLLLDLHHRQQASRLLLEACLFRTESRGGHFRGDAPTPLPQWRCHSRQVKGKTIHTRPVID

SEQ ID NO: 33343 - DNA, 1614 bp, Pseudoalteromonas tunicata D2
  CDS (1)..(1614): transl_table=11
atgaaccaaaaaaaacaccacaatactgacgttgccattattggtagcggcgctgccggtttaacacttgctttaaccttagctaatcattgcaatgttgtagtgataagcaaaggtccgctaaaagaaggctcaactttgtatgcacaaggtggcatcgctgctgtatttgataaagatgacagcattgaatcccatgtagaagatactttagatgctggtgccggtttatgcgatcgcgcagccgttcattatacagccagtaatgcaaaacaatgtatgcaatggctgattgagcaaggcgtgccatttgatatggaacgcgatcaacaaggtaaagaacgctatcatttaacccgagaaggcggtcatagccatcgtcgaattttgcacgccgctgacgcaacaggcaaggcagtacaaacaacgttaattgaccgggttaaagaacataaaaacatcactttattagagcgttataatgctattgatttaatcaccgccaataaattaggtttaacgggtaaacattgtcacggcatttatgtttggaatcgcgagttagaacaagttgaaatcataagtgctaaatttgtcgcattggctactggtggtgcaagtaaggtctatttatacacatcaaatccagatgttgcctcaggagatggtattgcaatggcttggcgtgcaggctgtagcgttgcgaacatggaatttaaccaatttcatcctaccagcttatatcaccctgaattacaaaactttttaattaccgaagcgatgcgcggcgaaggtgcttatctattacgccctgatggcagccgctttatgcctgactttgatgaaagagcagagctagctcctcgtgatattgtggcacgtgcaattgattatgaaatgaagcgtttaggggctaattgcgtttacctcgacatttctcacaaagatgatgattttatcatcgatcacttccctaccatttatgcaaaatgcttaagcgtaggtttagatatcacaaaagaacctattcctgttgtacctgctgcacattatacctgtggtggcgtaatgactgactttaatggcaaaaccgatttagataacctctatgctattggtgaagtggcttatacaggattacatggtgcaaatcgcatggcgagcaattcgttactcgaatgtattgtatttgctcaagctgctgcaaaagacattatggcgaagttgtctcttgtcaatgaaccagtcaccattcctgattgggatgaaagtcgagttagcaattcagatgaagaagttgttattactcacaattggcatgagctcagattatttatgtgggactatgttggcatagtgcgcaccacaaaacgtttggagcgcgcattaaggcgcattgaattactgcaacaagaaattcaggagtattatgccaactttagagtgaccaataatttattagagttacgcaatttagcacaagttgccgaactgattattcgctgcgcgttagagcgcaaagaaagccgaggcttacattacactttagattatcctaacttggctgagcaatctggtcctacaattttaaaacctaatacgaaaaaaccttag

SEQ ID NO: 33344 - protein, 537 aa, Pseudoalteromonas tunicata D2
MNQKKHHNTDVAIIGSGAAGLTLALTLANHCNVVVISKGPLKEGSTLYAQGGIAAVFDKDDSIESHVEDTLDAGAGLCDRAAVHYTASNAKQCMQWLIEQGVPFDMERDQQGKERYHLTREGGHSHRRILHAADATGKAVQTTLIDRVKEHKNITLLERYNAIDLITANKLGLTGKHCHGIYVWNRELEQVEIISAKFVALATGGASKVYLYTSNPDVASGDGIAMAWRAGCSVANMEFNQFHPTSLYHPELQNFLITEAMRGEGAYLLRPDGSRFMPDFDERAELAPRDIVARAIDYEMKRLGANCVYLDISHKDDDFIIDHFPTIYAKCLSVGLDITKEPIPVVPAAHYTCGGVMTDFNGKTDLDNLYAIGEVAYTGLHGANRMASNSLLECIVFAQAAAKDIMAKLSLVNEPVTIPDWDESRVSNSDEEVVITHNWHELRLFMWDYVGIVRTTKRLERALRRIELLQQEIQEYYANFRVTNNLLELRNLAQVAELIIRCALERKESRGLHYTLDYPNLAEQSGPTILKPNTKKP

SEQ ID NO: 33345 - DNA, 1611 bp, Photobacterium sp. SKA34
  CDS (1)..(1611): transl_table=11
atgaatcaggttcatcaacataattgcgatgtattagttattggcagtggcgcagctggtctttcattagccttacacctttcatcatctgccaatgttacagtgttatgtaaagggccactgagtgaaggctcaacctattacgcacagggcggaattgcagcagtatttgatgagtcagacagtatcgattcacatgttgaagatacccttattgccggcgctcacttatgcgataaagacgtcgttcgttttattgccgaaaatgctaaagaatgtgttcaatggcttatcgatggcggcgtaccgtttgatcgtgaagagtctgatagtgatgataaccctcgctttcatttaacccgagaaggcggccacagccatcgtcgtattctccatgccgctgatgcaacaggcatggcaatgcagacctcacttcaagaacaagcccgtaatcatcctaatattacgattttagaacgtcataatgcgctcgatttaatcaccgaaaaaaaacttaacccagataccgaatcaaaccgcgtattaggcgcttatatgtggaaccgtgataaagaaatggtagaaactctgggggctaagttcgttattctagccacaggtggcgcttcaaaagtctatcaatatacctctaacccggacgtttcttccggtgatggtatcgcaatggcctggcgtgcaggttgtcgtgtagcaaatcttgaattcaatcagtttcacccaacctgtttgttccaccctgaagcccagaccttcttgctaacagaagcactgcgcggagaaggggcgtatttacgtcgccctgatggctctcgttttatgcctgaatttgatgaacgcgcagagctcgcacctcgtgatattgtagcccgtgccatcgactatgaaatgaaacgtttaggcgctgactgcatgtaccttgatatcagccataagcctgcagactttgttaaaaaacacttcccaatgattgatgaaaagctgcaaagctacggcattgatatcacgaaagagccgattcctattgttccggccgctcactatacctgtggtggcgttatggttgataaaaaaggtaaaacggatattgatggcttatatgctattggtgaagtgagctacacaggcttgcatggtgccaaccgtatggcatcaaattcactgttagaatgtgtagtttatgcttggtcagcggcaaaagatattcaagctaaaatggatatagttaccgttccaccagctttaccaatatgggatgaaagtaaagtcagcaactcggatgaagaagtcgttatccaacataactggcacgaattacgtttatttatgtgggattatgtcggtattgttcgttcaacaaaacgacttgaacgtgcaatgcaccgaatagagttactgaaaaatgaaattaccgagtattacagtaatttccgtgtttcaaacaatttaattgaactccgtaacctcgtattagttgcagagctcatcattcgttgtgctattgagcgaaaagaaagtcgaggtcttcactatacattggattacccagaattagacgataacgcacaaccaacggtcttaaccccgaaataa

SEQ ID NO: 33346 - protein, 536 aa, Photobacterium sp. SKA34
MNQVHQHNCDVLVIGSGAAGLSLALHLSSSANVTVLCKGPLSEGSTYYAQGGIAAVFDESDSIDSHVEDTLIAGAHLCDKDVVRFIAENAKECVQWLIDGGVPFDREESDSDDNPRFHLTREGGHSHRRILHAADATGMAMQTSLQEQARNHPNITILERHNALDLITEKKLNPDTESNRVLGAYMWNRDKEMVETLGAKFVILATGGASKVYQYTSNPDVSSGDGIAMAWRAGCRVANLEFNQFHPTCLFHPEAQTFLLTEALRGEGAYLRRPDGSRFMPEFDERAELAPRDIVARAIDYEMKRLGADCMYLDISHKPADFVKKHFPMIDEKLQSYGIDITKEPIPIVPAAHYTCGGVMVDKKGKTDIDGLYAIGEVSYTGLHGANRMASNSLLECVVYAWSAAKDIQAKMDIVTVPPALPIWDESKVSNSDEEVVIQHNWHELRLFMWDYVGIVRSTKRLERAMHRIELLKNEITEYYSNFRVSNNLIELRNLVLVAELIIRCAIERKESRGLHYTLDYPELDDNAQPTVLTPK

SEQ ID NO: 33347 - DNA, 1842 bp, Xanthobacter autotrophicus Py2
  CDS (1)..(1842): transl_table=11
atgcccgccggacgtggtggcggaggccgatttcgccggctccaccgccgccatgagcgattatgtggggcaaaagcgcccgccccgcgtggtgctgctcaccgaatgctccatgagcgacaacgtcgccgtgaactatccggacatcgacttcgtgcggccctgcaatctctgcccgcacatgaagaagatcacccttgccaacatccgcaaggcgctggaaggcaacgtgcacgaagtgaccatcgcggcggacgtggcggatcgcgcccgcgcctcggtggagcggatgctggcgctgtgaccggcttcgagcggctggagggccgccccgtcatcgttggcggcggcatcgccgggcttgccgccgccctgttcctctcgcccgagccggtggtgctggtcacccgcgcccccctcggcgcggacggctccagcccgctggcccagggcggcatggccgccagcgtcggcacagacgacgatgccgacctccacctcgccgacacgctcatggccggcgacggcctgtgcgaccccgaggtcgcccgccgcatcctcgccgatggccctgccgccgtggcggagctggaacgtctcggcgtcgccttcgaccgggccgccgacggcagcctcgcactcggccttgaggccgcccacagccggcgccgcatcgtccatgcggacggcgacgccaccggccgcgcgctggtgcaggccctcaccatcgccgcccgcgcctgcccgtccatcaccgtggtggaggccgaagcccggcgcatcctgatggaggatggcgcagtagccgggctgctggtgtcggggcgagacggcggcgccgtgctgcgcacccgccgcctcatcctggcgacggggggcgtgggcgccctgttcgagcacaccaccaatcccgcctcctccttcggcatgggcctcgcgctggccgccgaggccggggcggagctggcggacctcgaattcgtgcagttccaccccaccgcgctcgccacctcggcccgcccgctctccctcatcagcgaggcggtgcgcggcgaaggcgccctcatcgtggatcgcgccggccgccgcgtgctggaagccgtgccgggcgccgagctcgccccgcgcgacgtggtcgcccgcgccgtgtggcaggagctggttgcggggcgcgaggtgttcctcgatgcccgtgccagcctcggcgcgcgctttgccacacgctttccctcggtcgccgccggctgccgggcggcgggcatcgatccggctaccgacctcgtgccgatccgcccggcggcgcactaccacatgggcggcatcggcgtggatgcggacggccgcagctccgttcccggcctgtgggccgcgggcgaggtggcggccaccggcctccacggcgccaaccggctcgccagcaattcgcttctggaggcggtggtctgcggacgcgcggcggccctgagcgtggccggaacgccggcccgcgcccccgcccgccgaatggccgttcatttgccggcggcgccggacgcgacctcagtccgccccatcgtctcgcgccatctcggcgtcacccgcgatgccgccggccttgccaccgccatcgcccgcctgctgccgctggcagagggcgcggggccggcctgcgcccccgcccgggtggggctcatgatggcggtgtcggcgctggcccgcgaagaaagccggggcgcccatgcgcgcacggatttccccgcgcccgccgccgtggcccggcgctcccgcaccacccttgagcgcaccctggccgaggcccgccgccatgccgcgccggccttcgccctcgcctcatccagctga

SEQ ID NO: 33348 - protein, 613 aa, Xanthobacter autotrophicus Py2
MPAGRGGGGRFRRLHRRHERLCGAKAPAPRGAAHRMLHERQRRRELSGHRLRAALQSLPAHEEDHPCQHPQGAGRQRARSDHRGGRGGSRPRLGGADAGAVTGFERLEGRPVIVGGGIAGLAAALFLSPEPVVLVTRAPLGADGSSPLAQGGMAASVGTDDDADLHLADTLMAGDGLCDPEVARRILADGPAAVAELERLGVAFDRAADGSLALGLEAAHSRRRIVHADGDATGRALVQALTIAARACPSITVVEAEARRILMEDGAVAGLLVSGRDGGAVLRTRRLILATGGVGALFEHTTNPASSFGMGLALAAEAGAELADLEFVQFHPTALATSARPLSLISEAVRGEGALIVDRAGRRVLEAVPGAELAPRDVVARAVWQELVAGREVFLDARASLGARFATRFPSVAAGCRAAGIDPATDLVPIRPAAHYHMGGIGVDADGRSSVPGLWAAGEVAATGLHGANRLASNSLLEAVVCGRAAALSVAGTPARAPARRMAVHLPAAPDATSVRPIVSRHLGVTRDAAGLATAIARLLPLAEGAGPACAPARVGLMMAVSALAREESRGAHARTDFPAPAAVARRSRTTLERTLAEARRHAAPAFALASSS

SEQ ID NO: 33349 - DNA, 1611 bp, delta proteobacterium MLMS-1
  CDS (1)..(1611): transl_table=11
ttgaaccaccagaccgatttcctgatcatcggcagtggcatctccggactttccttcgccctgaaggcggccgagttgggccgggttgctttggtcaccaaaaagcagacaattgacagcgccaccaacctggcccagggggggatcgccgccgtgcttgatcccgccgattcctttgcggcccatatcgccgacaccctggaagccggagccgggctttgccacgaagaggtggtcaaactggtggtggaaaacggcccggcccggatccgcgaattgctgaccctgggggtcgaattccagaaagccccggccggcgaagccgccggcctggatctggcccgggaaggggggcactcggcccgccgcatcgcccacgccatggactgcaccggtagccggatcgaagaaagcctgttgcgccaggccgccgccaacccggccatcaccatcctggaaaaccacctggccgttgatctgctgatcgcctcccgggccggggcggcaatcagcccgccataccgtgaccgctgctgcggggcttacgtgcttaatcgggccagcggccaggtggagatttacagtgccggggttaccctgatctgcaccggcggcaccggcaaggtctacctctacaccaccaatcccgatatcgccaccggggatggagtcgccatggcgtaccgggccggagcccgggtggccaacctggagtttgtccagtttcatcccacctgcctgtaccatcaccaaaccaagaattttttgatctccgaggcggtgcggggggagggcggccggctgatcgaccgccacgggcgagcctttatggcccaatacgactctcgcggcgacctggccacccgggatgccgtggcccaggccatcgacctggagatgaaagccagtggcgatgattgtgtctacctggatatcacccaccagccggcggatttcctccgtcgccgctttcccaccatttaccggacctgccggcgattgggaattgacatcaccaaagagccgattccggtggtgccggcggcccattatatgtgtggcggagtggtctgcaacgaccgcgggcaaagtgatctggagaatctttacgtcctgggcgaatcggcctgcagcggcctgcacggcgccaaccggctggccagcaactccctgctggaggcggtggtgtttgcccaccgggccgccgaacagtgccaccgggattggccccagcttcgccggatgccccgaccggcagtcagcccctggcaagccggccgggccgaacccatcgccgaagcggtgttgatcagccataactgggaccagatccgccggctgatgtggaattacgtcggcatcgtgcgcagtgacaagcgtctcaaactggcccgggagcaactggtgccgatcatcgccgaggtggaccgccactaccgcgactacctgccgaccccggatcttatcgaactgcgcaatatcgccctggtggccggcttaatcgtccgctgcgcgatcagccgcaaagaatcccggggcctgcattacaatatcgaccacccccgccgtgatgaccaaaactggcggcaagacactattatagagccttga

SEQ ID NO: 33350 - protein, 536 aa, delta proteobacterium MLMS-1
MNHQTDFLIIGSGISGLSFALKAAELGRVALVTKKQTIDSATNLAQGGIAAVLDPADSFAAHIADTLEAGAGLCHEEVVKLVVENGPARIRELLTLGVEFQKAPAGEAAGLDLAREGGHSARRIAHAMDCTGSRIEESLLRQAAANPAITILENHLAVDLLIASRAGAAISPPYRDRCCGAYVLNRASGQVEIYSAGVTLICTGGTGKVYLYTTNPDIATGDGVAMAYRAGARVANLEFVQFHPTCLYHHQTKNFLISEAVRGEGGRLIDRHGRAFMAQYDSRGDLATRDAVAQAIDLEMKASGDDCVYLDITHQPADFLRRRFPTIYRTCRRLGIDITKEPIPVVPAAHYMCGGVVCNDRGQSDLENLYVLGESACSGLHGANRLASNSLLEAVVFAHRAAEQCHRDWPQLRRMPRPAVSPWQAGRAEPIAEAVLISHNWDQIRRLMWNYVGIVRSDKRLKLAREQLVPIIAEVDRHYRDYLPTPDLIELRNIALVAGLIVRCAISRKESRGLHYNIDHPRRDDQNWRQDTIIEP

SEQ ID NO: 33351 - DNA, 1578 bp, Oceanobacter sp. RED65
  CDS (1)..(1578): transl_table=11
atggatcaacgacaagtattcgatgttttggtcattggcagcggcgctgccggcctatctgtggcactgaatgtggccgagcacgcaaaagttgccgtcttgagcaaagacacgttacaaagtggaagcacacgctgggcgcaaggcggtattgccgctgtgttagatgacgaagacacaagccaagcacatatcgaagatacgcttaatgccggcgctgggctttgcaattacaatgcagtgaaacatacggttgaaaacggtcgtgacgccattaaatggttgattgaccaacaggtacaattcagcaaagaaaatggtgaataccatctgactaaagaaggcgggcatagtcacaggcgcatcattcatgctgctgatgccacaggggtcgcagtaagcgaagcgttaattggtcaagctaaaagccatagcaatatcacgctttttgaacatcgcgtagctattgatctcattacttgtgagaaattcaacttgccaggcaaaggcgtcattggcgcatatgttctcaatgaagactcaggtcatgtggaaacctatcgcgctcgtaccgtcgtcattgcctcaggaggagcgagtaaatcctatttatataccagcaaccccgatgggacttccggagatggtattgccatggcttggcgcgcaggctgtcgcgtagccaatatggaattcaaccagttccatcccacttgtttatatcacccacaggcaaaaagctttttaataaccgaagcggtacgcggtgaaggcggctacctgctacttcctgacggctcacgcttcatgcataactttgatgagcgagctgagctagcgccacgggatattgtggctcgcgccatagaccatgaaatgaaacgcctgggggctgattgcctgtaccttgatatcagccataaacccaaagaattcatcatcgaacatttccctacaatttatgaacgctgcctcgaatttgggattgatatgagtaaacagcccattcccgttgtacctgccgctcactacacctgcggaggcattgttacggatgaaatgggccgcacagacattcccaatctatacgcagtgggagaatgcgcccataccggattacacggtgccaatcgcttggcgagcaactccttgcttgagtgtgtggtttatggccgcagtgcagcacagcacatagagaacattattaaacaaaaattagacgtaccttttgcgcctgactgggatgaaagccaagtgactgacagtgatgaagacgtggttattagtcacaactgggaggaactgcgccgcttcatgtgggactatgtgggcatcgtgcgcacagacaagcgcctattgcgagcgcaacaccgtgtcgatctattaaaaaatgaaatcaaagagttttacactaatcacaaggtaactagcgacttattggagctgcgtaacttggttgaggtgtccggcttaatcattcaatgtgccatgctacgcaaagaaagccgtggcttacatttttcattgagccatccagacttactgcccgtggcctatgatactgtgctaacaccttag

SEQ ID NO: 33352 - protein, 525 aa, Oceanobacter sp. RED65
MDQRQVFDVLVIGSGAAGLSVALNVAEHAKVAVLSKDTLQSGSTRWAQGGIAAVLDDEDTSQAHIEDTLNAGAGLCNYNAVKHTVENGRDAIKWLIDQQVQFSKENGEYHLTKEGGHSHRRIIHAADATGVAVSEALIGQAKSHSNITLFEHRVAIDLITCEKFNLPGKGVIGAYVLNEDSGHVETYRARTVVIASGGASKSYLYTSNPDGTSGDGIAMAWRAGCRVANMEFNQFHPTCLYHPQAKSFLITEAVRGEGGYLLLPDGSRFMHNFDERAELAPRDIVARAIDHEMKRLGADCLYLDISHKPKEFIIEHFPTIYERCLEFGIDMSKQPIPVVPAAHYTCGGIVTDEMGRTDIPNLYAVGECAHTGLHGANRLASNSLLECVVYGRSAAQHIENIIKQKLDVPFAPDWDESQVTDSDEDVVISHNWEELRRFMWDYVGIVRTDKRLLRAQHRVDLLKNEIKEFYTNHKVTSDLLELRNLVEVSGLIIQCAMLRKESRGLHFSLSHPDLLPVAYDTVLTP

SEQ ID NO: 33353 - DNA, 1626 bp, Desulfitobacterium hafniense DCB-2
  CDS (1)..(1626): transl_table=11
gtgagaagatatttggtgccttggcgctttgaggaatgtcgtatttattcgacaggcgtgttggttctggggagcggaatagcaggtttgtacacggctcttaaggccagcgagtattttgaggtcactgtactgaccaagaaaggaattccggagagcaacacgaaacatgctcaagggggtatcgctgtagccttggatcaagaggattctccctctttgcattacgaggatactctctatgcaggtgcaggtttatgtgaatccgattctgtccgggctttagttgaagatggtcccctgcgggtcgaggagctgattcggatgggagcccattttgatcggaagaacgggaaactggcttttactcaggaggccgcccacagccgcagaagagttctccacgccaatggagatgccacaggggaggaaatagaacggaccctgatcgctcaagcccttggggaagagcgaatccttgtcaaagaagagcaattcctgctggatctcttaaaaaactcaaagggagaggtcatcggggcgctcagcctcaatgagctgactcatgagctggagatttatctggcccaagccgtcgttttggctacaggaggattaggtcagctctactgttatacgactaaccctgaagtggccacaggggatggtatagcggcggcatatcgggcaggagcccaattgatggatatggagtttgtccaatttcaccccaccgctctgtttattccgggagcaccgcggtttttaatctcagaagctgtccggggggagggagctcagcttctcaatgctcagggagaacggtttatgcaggatgttcccggcaaagagctggcaccccgggatgtggtagcacgggggatttggcgggagcaggctaagggtgaggtaaccttggatttccggcccatcggtgtagcaaaagtgccccggcgtttcccgatgatttatcagacctgcctggactatgggatcaatgtcctggaggagcggcttcctgtagctcccgctgctcattatatgatgggcggagtccgcacggatgaaaggggaaggacaagcctccccaatctttacgccaatggggaatgcgcctgcaatggtgttcatggagcgaaccgattggccagcaactctctgctggatgggctcgtctttggggggcgtatcgtggaagatattgtgaacacggcccgcgctaaaggctcttctaatcctcagccccgtgatatttatgccgaaaaggatgaaaagcttccggaggccggtcaggagcagatcccccttaaacgtgaggagctgcaggaattaatgtgggagtatgtgggaatcatccgggaagaagaaggcctgaagaaggccattaagcttataaggagctgggatagtgcttttatacccgaaaaggaaatcccacagttagaattgaaaaaccttctgaccgccggctattgcgtagcccgggcggccttggcccgtgaagagagccgcggagggcattaccgttcggactatcctgaaatcaataccagggatttgaaacattccattcaagcaagggggaccggtgatgtttgcaccattccagtatcaagagttgattga

SEQ ID NO: 33354 - protein, 541 aa, Desulfitobacterium hafniense DCB-2
MRRYLVPWRFEECRIYSTGVLVLGSGIAGLYTALKASEYFEVTVLTKKGIPESNTKHAQGGIAVALDQEDSPSLHYEDTLYAGAGLCESDSVRALVEDGPLRVEELIRMGAHFDRKNGKLAFTQEAAHSRRRVLHANGDATGEEIERTLIAQALGEERILVKEEQFLLDLLKNSKGEVIGALSLNELTHELEIYLAQAVVLATGGLGQLYCYTTNPEVATGDGIAAAYRAGAQLMDMEFVQFHPTALFIPGAPRFLISEAVRGEGAQLLNAQGERFMQDVPGKELAPRDVVARGIWREQAKGEVTLDFRPIGVAKVPRRFPMIYQTCLDYGINVLEERLPVAPAAHYMMGGVRTDERGRTSLPNLYANGECACNGVHGANRLASNSLLDGLVFGGRIVEDIVNTARAKGSSNPQPRDIYAEKDEKLPEAGQEQIPLKREELQELMWEYVGIIREEEGLKKAIKLIRSWDSAFIPEKEIPQLELKNLLTAGYCVARAALAREESRGGHYRSDYPEINTRDLKHSIQARGTGDVCTIPVSRVD

SEQ ID NO: 33355 - DNA, 1611 bp, Alteromonadales bacterium TW-7
  CDS (1)..(1611): transl_table=11
atgaaccaaaataaacatcacatcgcagatgtcgctattatcggaagcggcgcggctggcttatctcttgccttatcattagctaactattgtaacgttaccgttattagtaaaggcgcgcttacagaaggctctacactttatgcacaaggtggaatagccgcagtatttgataaaaaaaatgacagtattgaatcgcatgttgaagatactctggatgctggcggcggcctatgtgaccgtgaagctgttcactatacagcaagtaatgcacacgattgccttcaatggctaattgaccaaggtgtgccttttgacatggagtttgatagcaaaggcaaagagcgttttcacttaacgcgagaaggcggtcatagccatcgtcgaattttgcatgccgccgatgcgactggtaaagccgttcaaacaacattaataagccaagtaaaattacataaaaacatcactctacttgagcaatacaatgctattgatttaattactgataaaaatactggcaaagcaggaacacacgttgagggtatgtatgtgtggaacaaaaaagctaaaaaagtcgaaactatatcagctaaatttgtagctcttgcgaccggtggagcaagcaaggtgtacttatatacatctaatcctgatgtatcaagcggtgacggtattgctatggcttggcgagctggctgtaaagtggctaatatggaatttaatcaattccatcccaccagcttataccaccctgaattacaaaactttctaattaccgaggcaatgcgcggtgagggcgcgtatttaaaacgccccgatggcactcgctttatgaaagattttgatgaacgtgaagagctagcccctcgtgatatagtcgctcgcgcaatcgattttgaaatgaagcgcttaggtgctaattgcgtttacttagatattagccataaagataaagaatttattattgagcacttccctaccatttatgcaaaatgcttgagtgttgggttagatattacaaaagaagcgattccggttgtccctgccgcacactacacttgcggtggtgtaatgactgactttaacggtaaaacagatttagataatctatatgcagttggtgaagtagcttacaccggcctgcacggtgcaaacagaatggcaagtaactcattattagagtgcattgtgtttgcccatgctgcagcgaaagatattttaagcaaaattgaacatgcaccagaacccatgaccttgccgcaatgggatgaaagccgtgtaactaactcggacgaagaaatagtcattacgcataattggcatgagttacgcctatttatgtgggattatgtcggtattgttcgttcaactaagcgtttagagcgcgcactacatcgggttgagttgctgcaacaagaaatacacgactattatgctaactttagagtaagtaacaacttactcgagctacgtaatttagtgcaagtagcagagttaataattagaagtgcaatgcaaagaaaagaaagtagagggcttcattacacaattgattaccctgagcaaaacgaaaacccaacccccactattttgacccctgagcgccattaa

SEQ ID NO: 33356 - protein, 536 aa, Alteromonadales bacterium TW-7
MNQNKHHIADVAIIGSGAAGLSLALSLANYCNVTVISKGALTEGSTLYAQGGIAAVFDKKNDSIESHVEDTLDAGGGLCDREAVHYTASNAHDCLQWLIDQGVPFDMEFDSKGKERFHLTREGGHSHRRILHAADATGKAVQTTLISQVKLHKNITLLEQYNAIDLITDKNTGKAGTHVEGMYVWNKKAKKVETISAKFVALATGGASKVYLYTSNPDVSSGDGIAMAWRAGCKVANMEFNQFHPTSLYHPELQNFLITEAMRGEGAYLKRPDGTRFMKDFDEREELAPRDIVARAIDFEMKRLGANCVYLDISHKDKEFIIEHFPTIYAKCLSVGLDITKEAIPVVPAAHYTCGGVMTDFNGKTDLDNLYAVGEVAYTGLHGANRMASNSLLECIVFAHAAAKDILSKIEHAPEPMTLPQWDESRVTNSDEEIVITHNWHELRLFMWDYVGIVRSTKRLERALHRVELLQQEIHDYYANFRVSNNLLELRNLVQVAELIIRSAMQRKESRGLHYTIDYPEQNENPTPTILTPERH

SEQ ID NO: 33357 - DNA, 1581 bp, marine gamma proteobacterium HTCC2143
  CDS (1)..(1581): transl_table=11
atgagtaaacattttcaacacgatgtgctgataatcggcagcggtgcggcaggtttgtcactcgcactagagctgccgtctactaccaaaattgccatgatttgcaaaggcgacctgatagaagggtcaacttactgggctcagggtggcattgcggcggtattagacaaagatgatagtgttgagtctcaccttgaagatacgctgaattcgggcggcaatctctgtcatgccgatgcggttaggttcacggttgagaacagtcgtgacaccattgactggttggtcgaccaaggtgtcgaattcagtcgtaataccgatgaacagcagtccttgcacctaactaaagagggcggtcatagtcaacggcgaattgttcatgcggcagatgctaccggtcgcgctgtatcagaaaccttaactcagcgagccctcgaagcagataacattcatattttttcgcaacgactggctatcaacttgattaccgaagagggtcgttgtcagggtgcttacgtgctcaatggagatagcgaccatgtcgatgtttttcaggcaaagttcattgcacttgccacaggcggtgctagcaaagcatatctatatacaagcaatccagacggggccagtggagacggtatagccatggcctggagagccggctgtagggtggccaatatggagttcaaccaatttcatccaacttgcctttaccacccccaagcaaaatcattcctgatcaccgaagccattcgaggggaaggtggtaagttactgctccccaatggcgaacgctttatggatcgatacgataaacgtggagaattggcgccccgggatatagtagcccgagccatagatcatgagatgaaacgactgggcagtgactgtgtctacttagacatcagtcataaatcgcctgactttttacttcatcactttcccaccgtaaaggcacgctgtctggagctgggtattgatatcactcgggatcctattcccgtagtccccgcagcccactatacctgcggaggtgttatggttgacacgaacggctgcactgacattccaaacctttatgccattggtgaaacctcttttactggcctccacggtgcgaaccgtatggccagtaattccctactagagtgcatggtgtatggccactctgccgctcgagatattactacgaagcttacctcggcagcggctcctctggcggctgctgactgggatgaatcacaagtaaccgactccgatgaagatgtggtgatctcgcataactgggacgaattacgtcgattcatgtgggactatgtcggtattgtccgtaccgataagcgtctgcaacgggcgctgcgacgtgccgaattactgcaacaagaaatcaatgattattacagcaattataaagtatctaacgatttaatagaacttagaaacctggccacggtggcggaattgatcatacggtcggcaataacccgaaaagaaagtcgaggcctgcactatacgctggactatccaaatgcgctgccggaggccttggacacgatactcacgccaaacgcccgcaactag

SEQ ID NO: 33358 - protein, 526 aa, marine gamma proteobacterium HTCC2143
MSKHFQHDVLIIGSGAAGLSLALELPSTTKIAMICKGDLIEGSTYWAQGGIAAVLDKDDSVESHLEDTLNSGGNLCHADAVRFTVENSRDTIDWLVDQGVEFSRNTDEQQSLHLTKEGGHSQRRIVHAADATGRAVSETLTQRALEADNIHIFSQRLAINLITEEGRCQGAYVLNGDSDHVDVFQAKFIALATGGASKAYLYTSNPDGASGDGIAMAWRAGCRVANMEFNQFHPTCLYHPQAKSFLITEAIRGEGGKLLLPNGERFMDRYDKRGELAPRDIVARAIDHEMKRLGSDCVYLDISHKSPDFLLHHFPTVKARCLELGIDITRDPIPVVPAAHYTCGGVMVDTNGCTDIPNLYAIGETSFTGLHGANRMASNSLLECMVYGHSAARDITTKLTSAAAPLAAADWDESQVTDSDEDVVISHNWDELRRFMWDYVGIVRTDKRLQRALRRAELLQQEINDYYSNYKVSNDLIELRNLATVAELIIRSAITRKESRGLHYTLDYPNALPEALDTILTPNARN

SEQ ID NO: 33359 - DNA, 1659 bp, marine gamma proteobacterium HTCC2080
  CDS (1)..(1659): transl_table=11
atgacagacaatgaaaactacgatgtattaatcataggtagcggcgcagcggggttgtccctggccctgcaattacccccgcattatcgctgtggcgtcctgtccaaggcacacatggcagcgggatcaacgttttgggctcaggggggcatggcggcggttctgcatgatcgagactcctttgacgcccacgaagccgacaccatagatgcgggtgcgggactgtgtcatgaacctgccgtgcagttttgtgtcagccaaagccgctctgttgtcgactggctcgtcgaccaaggagtcgccttcgactatcgctcagatcaacctgatgcagagtttcgagaatttcatctgactatggaaggtgggcatagccaccgtcgaattattcatgctgcggacaggaccggccgcgcgatttcagacgtgctcacccagaatgcggccgctgcagacaatatttcattactccccgactgctacgcggtagatttaattcgggtcgatggccgctgcgtcggcgcccatgtattggacacccgcagcaacagcgtcaaaaccatagccgcgcgggctgtggtccttgcaacaggcggtgccagcaaggcttatcaatatacttcgaatcctgatggcgcgagcggtgacggtattgctatagcttggcgcgccggctgtagggtggctaatatggaattcaatcaattccaccctacttgcttgtaccatccgaaagccaagtcgtttttaatcactgaagcgctgcgcggcgagggagcacgcctgttgcttcccaacggcgaggcctttatggctcgctttgattctcgtggtgaacttgcccctcgagacattgttgcccgagcaatcgaccatgaaatgaagcgtcttgggcttgactgcgtttatttggatatctcgcaccgccccccagaatttctacgcagtcactttccgacagtatacgaacgctgcctcgcactgggcatcgacatttgcaaagatcgaattcctgtggtcccggccgctcactatacctgcgggggggttgtcgtagatcaattcggtgcgagtgacttacccgggctgtatgtcatcggtgaaactgcttgcagtggtttacatggagccaaccgaatggctagcaactcacttctcgagtgtttcgtttacgcggcatctgccgccaaacatatctccgacgcggatctacccgctcccacagcactgccgggatgggatgacagtcgcgttcgcgtatcagatgagggtgtgatcatcccttaccattggcaggctcttagacgccttatgtgggattacgtcggcatcgtaaggagcgatcgcagactggcgtttgctgcagatgcgattgagctcatgcaagttgagattgccaattattacagccagtttctcatcactagacccttactggagctcagaaatctcgctgaagttgccgcgctgacggtgcgatgcgctgccgcgaggcaggagtccagagggctacacttcaatcgcgattatcccgaagctagcgccaacacccatgactcgatattaattcccccagaacatccagcctacggcaatccgcaggacagagacttgcaattaccccgttatacgacggcgttgtcagggcacggaatttaa

SEQ ID NO: 33360 - protein, 552 aa, marine gamma proteobacterium HTCC2080
MTDNENYDVLIIGSGAAGLSLALQLPPHYRCGVLSKAHMAAGSTFWAQGGMAAVLHDRDSFDAHEADTIDAGAGLCHEPAVQFCVSQSRSVVDWLVDQGVAFDYRSDQPDAEFREFHLTMEGGHSHRRIIHAADRTGRAISDVLTQNAAAADNISLLPDCYAVDLIRVDGRCVGAHVLDTRSNSVKTIAARAVVLATGGASKAYQYTSNPDGASGDGIAIAWRAGCRVANMEFNQFHPTCLYHPKAKSFLITEALRGEGARLLLPNGEAFMARFDSRGELAPRDIVARAIDHEMKRLGLDCVYLDISHRPPEFLRSHFPTVYERCLALGIDICKDRIPVVPAAHYTCGGVVVDQFGASDLPGLYVIGETACSGLHGANRMASNSLLECFVYAASAAKHISDADLPAPTALPGWDDSRVRVSDEGVIIPYHWQALRRLMWDYVGIVRSDRRLAFAADAIELMQVEIANYYSQFLITRPLLELRNLAEVAALTVRCAAARQESRGLHFNRDYPEASANTHDSILIPPEHPAYGNPQDRDLQLPRYTTALSGHGI

SEQ ID NO: 33361 - DNA, 1626 bp, Candidatus Desulfococcus oleovorans Hxd3
  CDS (1)..(1626): transl_table=11
atggaacatcaaaccgattttctggtaatcggcagcggcatcgccggcctgaagttcgccttaaaggcggccgaagccggcagtgtcaccattgtcaccaaaaaggcggtggcggacagcaacaccaaccgtgcccagggcggcattgccgctgttaccgacggcatcgattcgtttgacgcccatattcaggacaccctctcttccggggatgggctctgcaagcgggaggtggtggaacatgtggtgaaaaacgggccggccgctattcaggagctggtggacctgggcatcaatttcaccatggccgataacggccaacatctcgatctgggaagggaagggggtcactcccacaaccggatcgtccatgcccacgacctgaccggcagggagattgagcaggccttggtggccctggtgcgcgagcatcccaacattaccgtgttagaagaccatatcgccgtcgacctgattacccatgccacccgggtcagatggggcccggtggtcaaaacacagagcacttactgctgcggcgcctacgtgttggacagggtcaatgattacgttaagacctttcatgcccgtatcacgttgctggccaccggcggcgccggaaaggtctatgcgtataccagcaacccggacattgccaccggcgacggcattgccatggcctaccgggccggctgcaccgtggccaaccttgagttcatgcagtttcaccccacctgcctgtatcacccggcggccaagaactatcttatttcagaagcggtgcgcggagaaggcggcgttctggtggattccgcgggccatgcgttcatggaaaagtatgatccggccagagacctggcctgccgggacgtggtggcccgggccattgacacggagatgaaacagagcggcgatgactgcgtgtttctggacatctcgcacaagaacgccgattttattcggacccggtttcccaatctttacgccaactgcctgaagttcggcatcgacatgaccaaagagccggtgccggtggtgccggcggcccactacatgtgcggcggcgtggtcaccgacatggcggggaaaaccgatatcgaccggctttacgcggttggagagaccgcctgcaccggactgcacggcgccaaccggctggccagcaactccctgctggaagcggtggtgtttgccgacagcgcggcaaaagacgccatcaatcggctggcggctttccccgccacaaaagagggagaactgcccctgtgggacgaggccggcaccaccgacagcaccgaggtcatcaccgtgtcgcacaactgggacgagattcgcctgttcatgtggaactacgtgggcattgtgcgttccgacaagcggctcaagcgggccagaaaccgtatcgacctgatccaggcggagattcgggagtattactgggatttccgcgtgacctccaacctgattgagcttcgtaatatcgccaccgtgggggagctgatcatccagtgcgccatgcttcgcaaggagagccggggcctgcactacaaccttgattacgacttcaaggacgatgcccgctggaacatggataccgtgatcaagcgtccctattcagaccagtag

SEQ ID NO: 33362 - protein, 541 aa, Candidatus Desulfococcus oleovorans Hxd3
MEHQTDFLVIGSGIAGLKFALKAAEAGSVTIVTKKAVADSNTNRAQGGIAAVTDGIDSFDAHIQDTLSSGDGLCKREVVEHVVKNGPAAIQELVDLGINFTMADNGQHLDLGREGGHSHNRIVHAHDLTGREIEQALVALVREHPNITVLEDHIAVDLITHATRVRWGPVVKTQSTYCCGAYVLDRVNDYVKTFHARITLLATGGAGKVYAYTSNPDIATGDGIAMAYRAGCTVANLEFMQFHPTCLYHPAAKNYLISEAVRGEGGVLVDSAGHAFMEKYDPARDLACRDVVARAIDTEMKQSGDDCVFLDISHKNADFIRTRFPNLYANCLKFGIDMTKEPVPVVPAAHYMCGGVVTDMAGKTDIDRLYAVGETACTGLHGANRLASNSLLEAVVFADSAAKDAINRLAAFPATKEGELPLWDEAGTTDSTEVITVSHNWDEIRLFMWNYVGIVRSDKRLKRARNRIDLIQAEIREYYWDFRVTSNLIELRNIATVGELIIQCAMLRKESRGLHYNLDYDFKDDARWNMDTVIKRPYSDQ

SEQ ID NO: 33363 - DNA, 1773 bp, Pseudomonas putida GB-1
  CDS (1)..(1773): transl_table=11
atggctagcattccaaccatttccttcgacgccatcatcatcggtggcggcggcgccggcatgcgcgcagcgctgcaactggctcaaggcggccacaagactgccgtagtcaccaaggtcttcccgacccgttcgcacactgtatccgcccagggcggcatcacctgcgccatcgcttcggccgacccgaacgacgactggcgctggcacatgtacgataccgtcaagggttccgactacatcggtgaccaggacgctatcgaatacatgtgtcaagaaggcccggccgcggtcttcgagctggaccacatgggcttgccgttctcgcgtaccgaaaccggccgtatctaccagcgtccgttcggtggccagtccaaggattacggtaagggtggccaggctgctcgtacctgtgccgcttccgaccgtaccggtcacgcgctgctgcacaccctgtaccagggcaacctgaaagccggtaccacgttcctcaatgagtactatgccgttgacctggtgaaaaaccaggaaggcgccttcgtcggtgtgatcgcgatctgcatcgaaaccggcgaaaccatgtacatcaagtccaaggccaccgttctggccactggcggtgcgggccgtatctacgcctccaccaccaacgccctgatcaacaccggtgacggtatcggcatggccctgcgtgcaggcgtaccggtgcaggacatcgaaatgtggcagttccacccaaccggcatcgccggcgccggtgttctggtcaccgagggttgccgcggtgaaggtggctacctgatcaacgcccacggcgagcgcttcatggagcgttacgcgccgaacgcgaaagacctggccggccgcgacgtggttgcccgttccatggtcaaggaaatcatcgccggcaacggcgtgggcccgaacaaggaccacgtactgctgaagctggaccacctgggcgaggaagtgctgcacagccgcctgccaggtatctgcgaactgtccaaaaccttcgctcacgtcgaccctgtcgtcgcgccggttccggtcgttccaacctgccactacatgatgggcggcgttgccaccaacattcatggccaggccatcaccatggacgaagaaggcaaggatcacatcatccctggcctgttcgctgttggtgaagtggcgtgcgtatcggttcacggtgccaaccgtctgggcggcaactcgctgctcgacctggtggtgttcggccgtgctgccggcctgcacctggagaaggcgctgagcgacggcatcgagcatctggacgccagcgacaccgacatcgatgttgccctcaaccgcctgaacaagctcaacgagcgcaccactggcgaagacgttgccagcctgaagcgcgagctgcaaagctgcatgcagaactacttcggtgtattccgtactggcgaatacatgcagaagggtatcgagcagctggcgggtctgcgtgaccgtatcgccaacgtcaagatcaatgacaagtcccaggccttcaacaccgcgcgtatcgaagcgctggagctgcagaacctgctggaagttgccgaagctaccgccatcgcggccgaagcccgtaaagagtcccgcggcgctcacgcccgtgaagacttcgaagaccgtgacgacgaaaactggctgtgccacaccctgtactacccgggtgagaagcgcgttgccaagcgcggcgtcaactttgcgccgaagactgttccagccttcgaaccaaaagtccggacttactaa

SEQ ID NO: 33364 - protein, 590 aa, Pseudomonas putida GB-1
MASIPTISFDAIIIGGGGAGMRAALQLAQGGHKTAVVTKVFPTRSHTVSAQGGITCAIASADPNDDWRWHMYDTVKGSDYIGDQDAIEYMCQEGPAAVFELDHMGLPFSRTETGRIYQRPFGGQSKDYGKGGQAARTCAASDRTGHALLHTLYQGNLKAGTTFLNEYYAVDLVKNQEGAFVGVIAICIETGETMYIKSKATVLATGGAGRIYASTTNALINTGDGIGMALRAGVPVQDIEMWQFHPTGIAGAGVLVTEGCRGEGGYLINAHGERFMERYAPNAKDLAGRDVVARSMVKEIIAGNGVGPNKDHVLLKLDHLGEEVLHSRLPGICELSKTFAHVDPVVAPVPVVPTCHYMMGGVATNIHGQAITMDEEGKDHIIPGLFAVGEVACVSVHGANRLGGNSLLDLVVFGRAAGLHLEKALSDGIEHLDASDTDIDVALNRLNKLNERTTGEDVASLKRELQSCMQNYFGVFRTGEYMQKGIEQLAGLRDRIANVKINDKSQAFNTARIEALELQNLLEVAEATAIAAEARKESRGAHAREDFEDRDDENWLCHTLYYPGEKRVAKRGVNFAPKTVPAFEPKVRTY

SEQ ID NO: 33365 - DNA, 1608 bp, Pseudomonas putida GB-1
  CDS (1)..(1608): transl_table=11
atgagccaacaattccaacatgatgtcctggtgatcggcagcggtgccgccggtctcagcctggcacttaacctccccagccacctacgcgttgccgtgctcagcaagggcgacctggccaacggctcgaccttctgggcccaaggcggcgtcgcggcggtgctggacaacactgacaccgtccagtcgcatgtcgaagacaccctcaatgctggcggcggcctttgccatgaagaagcggtgcgttttaccgtcgagcacagccgtgaagccatccagtggttgatcgagcaaggcgtgcccttcacccgcgacgagcactacagcgtcgatgatggcggcttcgagttccacctcacccgtgaaggcggccatagccaccggcgcatcatccatgccgccgacgccactggcgcggccattttcaccacgctgctggagcaggctcgccagcgcccgaatatccagctgctggagcagcgcgtggcggtcgacctgattaccgaacgtcgcctgggcctgcccggcgaacgctgccttggcgcctacgtgctcgaccgcaacaccggtgaggtagacacctttggtgcgcgcttcaccgtgctggccactggcggtgcggccaaggtctatctctataccagcaaccccgacggcgcctgtggcgacggcatcgccatggcctggcgagccggttgtcgggtggcgaacctggaattcaaccagttccacccgacctgcctgtaccacccacaggccaagagcttcctggtcaccgaagccctgcgcggcgagggcgccctgttgcgcctgcccaacggcgaacgcttcatgccacgcttcgacccacgcgaagagctggccccccgcgacatcgtggcccgcgccatcgaccacgaaatgaagcgcctgggcgtggactgcgtctacctggacatcactcacaagccagccgatttcatcaagagccacttccctaccgtatacgagcgctgcctggcctttggcatcgacatcactcgtcagcccatcccggtggtacctgctgcgcactacacctgcggcggggtgatggtcgacgaccgcggccataccgacgtgccaggtttgtatgccatcggtgaaaccagcttcaccggccttcacggcgccaaccgcatggcgagcaactcgctgctggaatgcttcgtctatggccgcgctgccgccgctgacatccaggcaaatctggagcaagtgcccatgcccaaagcgctgcccggttgggatgccagccaggtcaccgactcggacgaagacgtgatcattgcgcacaactgggacgaattgcggcggttcatgtgggactacgtgggcattgtgcgcaccagcaagcgcctgcagcgggcccagcaccgcattcggctgctgctggatgaaatcgacgagttctacagcaactatcgcgtaagcagagacctgattgaattgaggaaccttgctcaagtagcggaactgatgatcaggtctgccatgaaacgtaaggaatctcggggtctgcactacacgttggactatccagagctgctgccagaggcgaaggatacgatccttacacccgacaaatga

SEQ ID NO: 33366 - protein, 535 aa, Pseudomonas putida GB-1
MSQQFQHDVLVIGSGAAGLSLALNLPSHLRVAVLSKGDLANGSTFWAQGGVAAVLDNTDTVQSHVEDTLNAGGGLCHEEAVRFTVEHSREAIQWLIEQGVPFTRDEHYSVDDGGFEFHLTREGGHSHRRIIHAADATGAAIFTTLLEQARQRPNIQLLEQRVAVDLITERRLGLPGERCLGAYVLDRNTGEVDTFGARFTVLATGGAAKVYLYTSNPDGACGDGIAMAWRAGCRVANLEFNQFHPTCLYHPQAKSFLVTEALRGEGALLRLPNGERFMPRFDPREELAPRDIVARAIDHEMKRLGVDCVYLDITHKPADFIKSHFPTVYERCLAFGIDITRQPIPVVPAAHYTCGGVMVDDRGHTDVPGLYAIGETSFTGLHGANRMASNSLLECFVYGRAAAADIQANLEQVPMPKALPGWDASQVTDSDEDVIIAHNWDELRRFMWDYVGIVRTSKRLQRAQHRIRLLLDEIDEFYSNYRVSRDLIELRNLAQVAELMIRSAMKRKESRGLHYTLDYPELLPEAKDTILTPDK

SEQ ID NO: 33367 - DNA, 1626 bp, Marinobacter sp. ELB17
  CDS (1)..(1626): transl_table=11
atggcctgtgataccaacccaatgccacaatccttcgagttcgatgtactggtgatcggcagtggcgctgccggtttgacggtggctctgaatctgccaccccatttgcaagtctgcgtcctcagcaaggcggccatcagcagtggcgccacgctttgggcccaaggcggaattgcggcggttcttgacggggaagactccgttgaaaaccacattcaggacaccctggacgccggagcgggcctctgccacaaagacgcggtacgctttaccgtagagcacagcaaagccagcgttgactggctggttgattccggcgtggacttcacccgcgataacaacgccgctttccacctgacgcgcgaaggcggccacagccatcgccgcattatccacgctgcagatgccaccgggcaggcggtatctaccactctggtggcccaggccgaagcacgggccaatatcacgctgatgtccggccgggtggcggtagacctgatcaccaatcgcaaactgtcgctgccaggcaatcgttgcgtgggcgcctacgtgctaaaactggatgacaatcacgttgaactggtccgtgcccgctttacggtaatcgccaccggcggggcctctaaagcctaccgctacaccaccaacccagacggtgcttctggtgacggcattgctatggcatggcgtgcgggctgccgcgtcgccaatatggaattcaaccagtttcacccgacctgcctttaccacccccacgccaaatcgtttttaatcagcgaagctctgcgcggcgaaggtgggcatttgaagttaccggacggcagccgctttatggaccgtttcgacagtcgtgcggaactggcacccagagacattgttgcccgcgcgatcgatcacgagatgaaacgcctgggcgcagaccacttgtatctggacatcagccacaagccggcagattttataaaacatcacttcccgaccatttacgaaacctgcctgacctatggcattgatattacctgcgagccaattccagtggtgccagcggcccattacacctgtggtggcatcattagcgaccaacgcgccagaaccgatatcaaccagctttacgtggtcggcgaagccgcttttaccggcctgcatggtgccaaccgcatggccagcaactctctgctggaatgcctggtgtatggccgcgctgccgcggaagacattacccgccgggaggccgacataccggccgtgccagatgttccggagtgggatgaaagccaggttcgcgattctgatgaagacgtagtgatttctcacaactgggacgaactacgccactttatgtgggactatgtcggcatagttcgcaccacgaagcgcttgcagcgggccaagcaccgggtcgatttgctgtctcgggaaatcggtgatttttacagcaattatcgagtatccaacgatttgctagaattgcgcaatctggttaccgtggcagaccttattatctgttccgcgctgcaaaggcacgaaagccgtggccttcactacaccctggattatccggggctgcaggcagaagcccgtgacaccctattggtacccaccacgtaccgtacctctgaaccctga

SEQ ID NO: 33368 - protein, 541 aa, Marinobacter sp. ELB17
MACDTNPMPQSFEFDVLVIGSGAAGLTVALNLPPHLQVCVLSKAAISSGATLWAQGGIAAVLDGEDSVENHIQDTLDAGAGLCHKDAVRFTVEHSKASVDWLVDSGVDFTRDNNAAFHLTREGGHSHRRIIHAADATGQAVSTTLVAQAEARANITLMSGRVAVDLITNRKLSLPGNRCVGAYVLKLDDNHVELVRARFTVIATGGASKAYRYTTNPDGASGDGIAMAWRAGCRVANMEFNQFHPTCLYHPHAKSFLISEALRGEGGHLKLPDGSRFMDRFDSRAELAPRDIVARAIDHEMKRLGADHLYLDISHKPADFIKHHFPTIYETCLTYGIDITCEPIPVVPAAHYTCGGIISDQRARTDINQLYVVGEAAFTGLHGANRMASNSLLECLVYGRAAAEDITRREADIPAVPDVPEWDESQVRDSDEDVVISHNWDELRHFMWDYVGIVRTTKRLQRAKHRVDLLSREIGDFYSNYRVSNDLLELRNLVTVADLIICSALQRHESRGLHYTLDYPGLQAEARDTLLVPTTYRTSEP

SEQ ID NO: 33369 - DNA, 1605 bp, Moritella sp. PE36
  CDS (1)..(1605): transl_table=11
atgagaacaaatgcggaataccaaagcgatgtactgattatcggcagtggtgcagctggactctcattggccctaaaactcgctgaccaagctaaagtgatggtgctcagtaagagcagcttaacagaaggttcaaccctttatgcacaaggtggtatcgctgccgtttttgatgaagcggacagtgtagaaggccatgttgccgatacgcttatcgccggtgccggtttatgtgatgaagataccgttagctttacggccagcagcgcagccgccagcttaaactggttaatcgacaaaggcgcaccgtttgatcaggtcgctgacgataatggtgaacagcactatcacctaactaaagaaggcggtcacagtcaccgccgaattctgcatgccgccgatgccacaggtaaagtagtacaaaccacgctaatcgacaatgtctctcaacatcctaatatcaccctaatggaacgctttaacgcggtggatctgatttcaactaagcagcttaatcaagcgaccaaccgtattgtcggtgcttatgtgtggaatcgtgacgccgaaaaagtcgaagtgattaaagcgcgctttgttattttagccacaggtggcgcaagtaaagtttatcaatataccactaaccctgatgtctcgagtggtgacggtattgcgatggcatggcgcgcaggttgccgtgtggccaatatggaattcaatcaattccaccctacctgtttgtttcaccccgatgcgaaaaacttcttattaacagaagcattacgtggtgaaggcgcttatttacgtcatgccgatggcacccgctttatgcccagtttcgatgaacgggcagaattagcaccgcgtgatattgttgcccgtgctatcgactttgaaatgaaacgtttaggtactgattgtgtgtatttagatatcagtcataaacccgcggagttcgtgattagtcatttcccgactatttatgagcgttgcttgaagttaggtatcgatatcaccacagatcctatcccagcagtacccgcggcacattatacctgcggcggtgtaatgactgacttaaccggtcaaacggatatgcgtggcttatacgcgattggcgaagtggcttataccggtttacacggtgctaaccgtttagccagcaactcattattagaatgtattgtgtttgcccacgccgcggcagaagatatcttgtcgaagttacataaaaaacgtaaagattaccgtattccagcatgggatgagagcaaagtaacagactcagatgaagaagtgataattcaacataactggcatgaactgcggttattcatgtgggattacgtcggtattgtcagaacgaccaagcgtctagagcgtgcccaacgccgggttaatctgttgcaacaagaaattgatgagtactacagtaacttccgcgtcagtaataacttattggaattaagaaacctggtgacggtggctgatttaattatccgttgcgcactcgaacggaaagaaagtcgcggtttacactatacgcttgactacccagagcagtttgacgagccacaaccgactatcttacaacctaaggtatag

SEQ ID NO: 33370 - protein, 534 aa, Moritella sp. PE36
MRTNAEYQSDVLIIGSGAAGLSLALKLADQAKVMVLSKSSLTEGSTLYAQGGIAAVFDEADSVEGHVADTLIAGAGLCDEDTVSFTASSAAASLNWLIDKGAPFDQVADDNGEQHYHLTKEGGHSHRRILHAADATGKVVQTTLIDNVSQHPNITLMERFNAVDLISTKQLNQATNRIVGAYVWNRDAEKVEVIKARFVILATGGASKVYQYTTNPDVSSGDGIAMAWRAGCRVANMEFNQFHPTCLFHPDAKNFLLTEALRGEGAYLRHADGTRFMPSFDERAELAPRDIVARAIDFEMKRLGTDCVYLDISHKPAEFVISHFPTIYERCLKLGIDITTDPIPAVPAAHYTCGGVMTDLTGQTDMRGLYAIGEVAYTGLHGANRLASNSLLECIVFAHAAAEDILSKLHKKRKDYRIPAWDESKVTDSDEEVIIQHNWHELRLFMWDYVGIVRTTKRLERAQRRVNLLQQEIDEYYSNFRVSNNLLELRNLVTVADLIIRCALERKESRGLHYTLDYPEQFDEPQPTILQPKV

SEQ ID NO: 33371 - DNA, 1605 bp, Magnetospirillum gryphiswaldense
  CDS (1)..(1605): transl_table=11
atgtcctatgacctgctcgtcatcggttccggcgccgccggcctgtctctggccctgcgcgtgctggaagccaagccccaggcccggattgccatcctggccaagggaccgctgtcggaaggcagcaccatgtatgcccagggcggcatcgccgccgtgctggacgccgccgacaccaccgacgcccatttggccgacaccctgaccgccggcggcggcttgtgcaatgccgagactgtacgtttcgtcgtcgacaacgccaagccggcgattcagtggttgatcgataacggcgttctgttcgaccgcgagggcggcgattatcacctgacgcgggaaggcgggcactcgcaccgccgcgtcatccactccgccgacgccaccggcaaagcggtgcagaccgccttgatggaacgcatcctcgaatcgggggccgaggttttcgagcaccacatcgccgtcgacctgatccgcgaacgcctgggtggcggacggctgggccgctgcgtcggcgcctatgcgctcgaccgctcgtccggtcgggtcatcaccttgccggcccgcgccgtggtgctggccaccggcggcgcctcgcgcgtttacctctattcgtccaatcccgacggctccaccggtgacggcatcgccatggcctggcgtgccggttgccgggtgtccaacatggaattctcgcaattccaccccacctgcctttatcaccccaaggccaagacctttctggtcaccgaggcggtgcgcggcgaaggcggccacctgctgcgccccgacggcacccgcttcatggatgattacgacccgcgcggcgagttggcgccccgcgacgtggtggcccgggccatcgacgacgtgatgaagcggctgggctgccccaacgtctatctggacatcagccacaagcccgccgacttcatcaaaagccacttccccaccgtctatgccgaatgcctgaaattcggcatagacatgacgcgcgagcccattccggtggtgcccgccgcccattacacctgcggcggcgtgttgacagatctgtcgggccgcaccgacgtgcccaacctgtatgccatcggcgaggtgtcatgcaccggcctgcacggggccaaccgcatggcgtcgaactcgttgctggaatgcctggtgttcggcgccgccgccgccaccgacatcgccgccaccatggagtccatcgccccgccgccggtggtggccgcctgggatgaaagctgggtcaccgattcggatgaagaagtggtggtcgcccacaattgggacgaattgcgccgcttcatgtgggattatgtcggcatcgtgcgctcgaccaagcgactggagcgggccaagcaccgcatcaagctgctgctgtcggaaatcgccgaatattacggcaccttccgcgtcaccaacgacctgttggaactgcgcaacctggccatggtcgccgatctgatcgtacgctcggccctgtctcggcgggaaagccgggggctgcattacaccatcgactatcccgaccgcgacgccatcgccccggcgcaaaacaccgtgctggtgcccaagaatttcaccgcccggcgtcagaattag

SEQ ID NO: 33372 - protein, 534 aa, Magnetospirillum gryphiswaldense
MSYDLLVIGSGAAGLSLALRVLEAKPQARIAILAKGPLSEGSTMYAQGGIAAVLDAADTTDAHLADTLTAGGGLCNAETVRFVVDNAKPAIQWLIDNGVLFDREGGDYHLTREGGHSHRRVIHSADATGKAVQTALMERILESGAEVFEHHIAVDLIRERLGGGRLGRCVGAYALDRSSGRVITLPARAVVLATGGASRVYLYSSNPDGSTGDGIAMAWRAGCRVSNMEFSQFHPTCLYHPKAKTFLVTEAVRGEGGHLLRPDGTRFMDDYDPRGELAPRDVVARAIDDVMKRLGCPNVYLDISHKPADFIKSHFPTVYAECLKFGIDMTREPIPVVPAAHYTCGGVLTDLSGRTDVPNLYAIGEVSCTGLHGANRMASNSLLECLVFGAAAATDIAATMESIAPPPVVAAWDESWVTDSDEEVVVAHNWDELRRFMWDYVGIVRSTKRLERAKHRIKLLLSEIAEYYGTFRVTNDLLELRNLAMVADLIVRSALSRRESRGLHYTIDYPDRDAIAPAQNTVLVPKNFTARRQN

SEQ ID NO: 33373 - DNA, 1623 bp, Shigella dysenteriae
  CDS (1)..(1623): transl_table=11
atgaatactctccctgaacattcatgtgacgtgttgattattggtagcggcgcagccggactttcactggcgctacgcctggctgaccagcatcaggtcatcgttctaagtaaaggcccggtaacggaagtttcaacattttatgcccagggcggtattgccgccgtgtttgatgaaactgacagcattgactcgcatgtggaagacacattgattgccggggctggtatttgcgatcgccatgcagttgaatttgtcgccagcaatgcacgatcctgtgtgcaatggctaattgaccagggggttttgtttgatacccacgttcaaccgaatggcgaagaaagctaccatctgacccgtgaaggtggacatagtcaccgtcgtattcttcatgccgccgacgccaccggtagagaagtacaaaccacgctggtgagcaaggcgcagaaccatccgaatattcgtgtgctggagcgcagcaacgcggttgatctgattgtctctgacaaaattggcctgccgggcacgcgacgggttattggcgcgtgggtatggaaccgaaataaagaaacggtggaaacctgccacgcaaaagcagtggtactggcaaccggcggtgcgtcgaaggtttatcagtacaccaccaatccggatatttcttctggcgatggcattgctatggcgtggcgcgcgggctgtcgggttgccaatctcgaatttaatcagttccaccctaccgcgctgtatcacccacaggcacgcaatttcctgttaacggaagcactgcgcggcgaaggcgcttatctcaagcgcccggatggcacgcgttttatgcccgattttgatgagcgcggcgaactggccccgcgcgatattgtcgcccgcgccattgaccatgaaatgaaacgcctcggcgcagattgtatgttcctcgacatcagccataagcccgccgattttattcgccagcatttcccgatgatttatgaaaaattgctcgggctggggattgatctcacacaagaaccggtaccgattgtgcctgctgcacattatacctgcggtggtgtaatggttgatgatcatgggcgtacggacgtcgagggcttgtatgccattggcgaggtgagttataccggcttacacggcgctaaccgcatggcctcgaattcattgctggagtgtctggtctatggctggtcggcggcagaagatatcaccagacgtatgcctgatgcccacggcgtcagtacgttaccgccgtgggatgaaagccgcgttgagaaccctgacgaacgggtagtaattcagcataactggcacgagctacggctgtttatgtgggattacgttggcattgtgcgcacaacgaagcgcctggaacgcgccctgcggcggataaccatgctccaacaagaaatagacgaatattacgcccatttccgcgtctcaaataatttgctggagctgcgtaatctggtacaggttgccgagttgattgttcgctgcgcgatgatgcgcaaagaaagccgggggctgcattttacgctggattacccggaactgctcacgcattccggtccatcgatcctttcccccggcaatcattacataaacagataa

SEQ ID NO: 33374 - protein, 540 aa, Shigella dysenteriae
MNTLPEHSCDVLIIGSGAAGLSLALRLADQHQVIVLSKGPVTEVSTFYAQGGIAAVFDETDSIDSHVEDTLIAGAGICDRHAVEFVASNARSCVQWLIDQGVLFDTHVQPNGEESYHLTREGGHSHRRILHAADATGREVQTTLVSKAQNHPNIRVLERSNAVDLIVSDKIGLPGTRRVIGAWVWNRNKETVETCHAKAVVLATGGASKVYQYTTNPDISSGDGIAMAWRAGCRVANLEFNQFHPTALYHPQARNFLLTEALRGEGAYLKRPDGTRFMPDFDERGELAPRDIVARAIDHEMKRLGADCMFLDISHKPADFIRQHFPMIYEKLLGLGIDLTQEPVPIVPAAHYTCGGVMVDDHGRTDVEGLYAIGEVSYTGLHGANRMASNSLLECLVYGWSAAEDITRRMPDAHGVSTLPPWDESRVENPDERVVIQHNWHELRLFMWDYVGIVRTTKRLERALRRITMLQQEIDEYYAHFRVSNNLLELRNLVQVAELIVRCAMMRKESRGLHFTLDYPELLTHSGPSILSPGNHYINR

SEQ ID NO: 33375 - DNA, 1806 bp, Rhodoferax fermentans
  CDS (1)..(1806): transl_table=11
atgactgctacctccaaactcaccacgcgcaaatttgatgttgtcatcgtcggagccggtggctccggcatgagcgcctctttgcgcctgtccaatgcgggcctgaacgtggccgtgttgaccaaagtcttccccacccggtcacacaccgtggctgcccagggcggcatcggcgccagcctgggcaacatggcagaagacaactggcactaccatttttacgacaccatcaagggctccgactggctcggtgaccaggatgccatcgagttcatgtgtcgcgaacgcactcaggtggtctacgaactggaacacttcggcatgcctttcgaccgcaatgccgacggcaccatttaccagcgcccttttggtggccacacagccaactacggcgaaaagccggtgcaacgtgcttgcgccgcagctgaccgtaccggccatgccatgctgcataccctgtaccagcaaaacgtcaaggcccgcaccaacttctttgttgaatggatggcgctggatctgatccgtgacgccgaaggtgacgtggtgggggtgaccgcactggagatggaaaccggtgaaatccacgtgctgcgcgccaagtccgtgttgctggcaaccggtggtgcgggccgtatttttgccgcatccaccaatgccttcatcaacaccggcgacggtttgggcatcgccgcgcgtgccggcatcccgttgcaagacatggagttctggcaattccacccgaccggcgtggctggcgccggtgtgttgttgaccgaaggctgccgcggtgaaggcgccattttgcgcaacagtgcgggcgaacgttttatggagcgttacgcacctaccttgaaggacctggcgccgcgtgactttgtgtcgcgttgtatggaccaggagatcaaggaaggccgcggctgtggcccgaacaaaaactacatcaacctggacatgacccacctgggcgcagaaaccattgccaagcgtctgcccagcgtgtttgaaattggccacaacttcgccaacgtggacatcaccaaggagtccattcccgtggtgccgaccatccattaccagatgggtggtatcccgaccaacatctacggccaggttgtcactcccgatggcagtggttcacagaaggtggtcaagggtctctatgccgtgggtgaatgcgcctgcgtcagcgtgcacggcgccaaccgcctgggcaccaactccttgctcgacatcgtggtgtttggccgggccgctggcaagcacatcgtccagttcaacaacgagagcgacacgcacaaacccgtgccagagaatggcgcagacatttccctggaccgcctgaatcgcctggacaactccacctctggtgaatatgcccaagtcgtgcgggatgacatccgcaacaccatgcagacccacgccagtgtgttccgcacccaagccagcatggacgagggggtgatcaagattgcagcgatgcgcgaacgtgtcaagaacatcaccttggccgacaagtccaagatcttcaacaccgcgcgtattgaggcgctggaagtggacaacatgatcgaagccgcccaggccaccatggtgtctgccgctgcccgccgcgaatgccgtggcgcccacaccgtgctcgactacgaccgccctgccgatgacgccacctgcccgctgggacgtgatgacgtcaattggatgaaacacaccttgtgggaccgggacaccaacagcctgagctacaagccagtgaacctcaagccgttgacagtggcctctgtgccacccaaggtccgcacgttctga

SEQ ID NO: 33376 - protein, 601 aa, Rhodoferax fermentans
MTATSKLTTRKFDVVIVGAGGSGMSASLRLSNAGLNVAVLTKVFPTRSHTVAAQGGIGASLGNMAEDNWHYHFYDTIKGSDWLGDQDAIEFMCRERTQVVYELEHFGMPFDRNADGTIYQRPFGGHTANYGEKPVQRACAAADRTGHAMLHTLYQQNVKARTNFFVEWMALDLIRDAEGDVVGVTALEMETGEIHVLRAKSVLLATGGAGRIFAASTNAFINTGDGLGIAARAGIPLQDMEFWQFHPTGVAGAGVLLTEGCRGEGAILRNSAGERFMERYAPTLKDLAPRDFVSRCMDQEIKEGRGCGPNKNYINLDMTHLGAETIAKRLPSVFEIGHNFANVDITKESIPVVPTIHYQMGGIPTNIYGQVVTPDGSGSQKVVKGLYAVGECACVSVHGANRLGTNSLLDIVVFGRAAGKHIVQFNNESDTHKPVPENGADISLDRLNRLDNSTSGEYAQVVRDDIRNTMQTHASVFRTQASMDEGVIKIAAMRERVKNITLADKSKIFNTARIEALEVDNMIEAAQATMVSAAARRECRGAHTVLDYDRPADDATCPLGRDDVNWMKHTLWDRDTNSLSYKPVNLKPLTVASVPPKVRTF

SEQ ID NO: 33377 - DNA, 2046 bp, Ostreococcus tauri
  CDS (1)..(2046)
atgttcgcctcgacgtccagacgcgcgctgcgacgggggtgcgtcggacccgtcgccgcgctcgcgacgggcgcgtcggcggcgtcgacggcggcggtgtccacggcgtcgatggcgtcggcgtcgtcgatggcatcggcgtcggcgcgcgcgtcggtggacgcgcgcggtggacgctcgtggacgaacggtgcgcgcggggggggtcgatcgcgacgatcgcgcgatgggttcgcgcgcgcgtactcggggacgtcggcgtcgtcggcgtacgagatcatcgatcacgagtacgacgccctcgtcgtcggcgcgggcggcgccggtttgcgggcggcgatcggtctgggtgagcacgggttcaagacggcgtgcgtcacgaagttgtttccgacgcgatcgcacacggtggcggcgcagggtgggatcaacgccgcgctcgggaacatgacggaggacgattggagatggcacgcctacgacacggtgaagggagcggattggctcggcgatcaagacgcgattcagtacatgtgtcgagaggcgccgaaggctgtgatcgagctcgaaaagtacgggatgcccttctcgagaacggacgacgggaggatttatcagcgcgcgtttggtgggcaatcgctcgatttcggcaagggtgggcaggcgtatcgatgcgcggcggcggcggaccgcaccgggcacgccatgttgcacacgctgtacggcgccgcgttgaagcacgacgtgcaattcttcgtggaatacttcgcgttggatctcatcatggacaagggtgagtgcgtgggtgtcatggcgctttgcctggaggacggaacgttacacagattccgctcgcatcagacaattttagccacgggcgggtacggtcgagcgtactttagcgcgacgtcggcgcacacgtgcacgggagatggtaacgccatggtcgctcgtgccggtctacccctgcaggaccaagagttcgtgcagttccacccaactggcatttacggcgccggctgtctcatcaccgagggttcgcgcggtgagggcggcatcctgcgtaactctgagggagaacgcttcatggagcgttatgctccgagcgccaaggatctcgcgagtcgagacgtcgtgtctcgcgcaatgacgatggagattcgtgagggacgaggcgtgggtaaggagaaagatcacatctacttgcacttgaaccacctgcctccggagcttctggctgaacgtttgccgggcatctccgagacggcggcgattttcgccggtgtcgacgtcaccaaggagccgatcccggtgattccgacggtgcactacaacatgggtggtattccgacgaattacaagggcgaggtcgtcgcgccgaagaatggtgacatggacgccatcgtccccggtctcatggctgccggcgaagctgcgtgcgcgagcgtgcacggcgccaaccgcctcggcgccaactcgttactcgacatcgtcgtcttcggtcgcgcgtgcgcgaacacggtctccgagaaactcaagccgggaacgccgcaccgccagattgccgccgacgctgggtcgaacgcggtcgaacgtttggacaaaattcgcaactccaagggctcggcgccgacggcgatgctgcgcagaaccatgcaaaaggtgatgcaagatgatgccgccgtgtttaggactcaggaaagcctcgcgaacgggtgcaagcgcatcgatgacgtcgccgcgcagttggacaacctcaagctcaccgatcgatcgcttgtttggaacaccgatctcgtcgaggcgctcgagttgcacaacctcatgccaaacgcgcagacgacgatgcactccgccgagcagcgcaaggagagtcgaggcgcgcacgctcgcgaagattttcctgaccgtctcgacgatacgtggatgaagcacaccctcgcttacgtcgaaaacggcaaggtgaagatcgactaccgacccaaccaccactacacgctcgacgacgagatggaagtcattccgccaaaggcgcgcgtgtattaa

SEQ ID NO: 33378 - protein, 681 aa, Ostreococcus tauri
MFASTSRRALRRGCVGPVAALATGASAASTAAVSTASMASASSMASASARASVDARGGRSWTNGARGGGRSRRSRDGFARAYSGTSASSAYEIIDHEYDALVVGAGGAGLRAAIGLGEHGFKTACVTKLFPTRSHTVAAQGGINAALGNMTEDDWRWHAYDTVKGADWLGDQDAIQYMCREAPKAVIELEKYGMPFSRTDDGRIYQRAFGGQSLDFGKGGQAYRCAAAADRTGHAMLHTLYGAALKHDVQFFVEYFALDLIMDKGECVGVMALCLEDGTLHRFRSHQTILATGGYGRAYFSATSAHTCTGDGNAMVARAGLPLQDQEFVQFHPTGIYGAGCLITEGSRGEGGILRNSEGERFMERYAPSAKDLASRDVVSRAMTMEIREGRGVGKEKDHIYLHLNHLPPELLAERLPGISETAAIFAGVDVTKEPIPVIPTVHYNMGGIPTNYKGEVVAPKNGDMDAIVPGLMAAGEAACASVHGANRLGANSLLDIVVFGRACANTVSEKLKPGTPHRQIAADAGSNAVERLDKIRNSKGSAPTAMLRRTMQKVMQDDAAVFRTQESLANGCKRIDDVAAQLDNLKLTDRSLVWNTDLVEALELHNLMPNAQTTMHSAEQRKESRGAHAREDFPDRLDDTWMKHTLAYVENGKVKIDYRPNHHYTLDDEMEVIPPKARVY

SEQ ID NO: 33379 - DNA, 1803 bp, Pasteurella haemolytica
  CDS (1)..(1803): transl_table=11
atgcaaagtgttaattttgatgtcgcgattataggtgccggtggtggtggcttgcgtgctgctattgcggcggctgaagcaaatccaaatctaaaaattgctttaatttcaaaagtttacccaatgcgtagccatacggttgcagcagaaggtggttcagcggcggtaattaaagataccgactctttcgacaatcactttaatgataccgtcggtggtggtgactggttatgtgagcaagatattgtggagtattttgtagagcattcgccgattgaaatgacacaattagaacgctggggttgcccttggagtcgtcgtgaagacggtgaagtgaatgttcgccgttttggaggaatgaaaattgagcgtacttggtttgcggcggataaaaccggtttccacattttgcatactttgttccaaacttcgattaaatatccgaatattgtgcgttttgatgagcattttgtgctggatattctcaccgacaacggcgaagctcgtggttgtgtggcaatgaatatgatggaaggcacacttgttcaaatcaatgcaaatgcagttgtgattgcaaccggtggcggctgccgtacttatcgctttaacactaacggcggtattgtaaccggcgacggtttatcaatggcgtatcgtcacggtgtggctttgcgtgatatggagttcgtacaatatcacccaacaggtttgccaaataccggtattttgatgacagaaggttgtcgtggtgaaggtggtattttagttaataaagatggctaccgttacctgcaagattatggtttaggaccggaaacacctatcggcaaaccggaaaacaaatatatggaattaggccctcgtgataaggtttcacaagcattctggcaagaatggcgtaaagggaacaccttaaaaaccgcaaaaggcgtggacgtagttcacttagatttacgccatttaggtgaaaaatatttacttgagcgtttaccgtttatttgtgaattagcgaaagcctatgaaggggtcgatccggctaaagcgccgattcctgttcgcccggtggttcactacacgatgggtggtattgaagtggatatgaatgcggaaacctcaattaaaggcttattcgcagtaggtgaatgtgcttcatcaggcttgcacggtgcgaaccgtttgggttctaactcattagcagagcttgtggtgttcggcaaagttgccggtgaaaatgcggctcgccgtgcgttagaagtgactgctcgcaaccagccacaaattgatgcacaagcaaaagatgtggtggctcgcttgcacgcattagcgaaccaagagggtaatgaatcttggtcggatatccgtaaccaaatgggtgatgcgatggaagaaggttgtggtatttaccgtacccaagaaagtatggaagcgactgtaaacaaaatccaagagctaaaagagcgttataaaaacatcagcgtaaaagataaatcaagtgtgtttaacactgatttactctacaaaattgaattaggcttcattttagatgtggctcaatccattgcttgctctgcggtagagcgtaaagaatctcgtggggctcaccaacgtttagactatgttgagcgtgatgatgtgaactacttaaaacacacacaagcgtactacaatgcagagggtacaccgacgattaaatacagcgatgtgaaaatcactaaatcacaaccggctaaacgtgtgtatggtgcagaggctgaagcccaagaaaaagtcaaaaaagcagcagaagctcaagcacaacaatag

SEQ ID NO: 33380 - protein, 600 aa, Pasteurella haemolytica
MQSVNFDVAIIGAGGGGLRAAIAAAEANPNLKIALISKVYPMRSHTVAAEGGSAAVIKDTDSFDNHFNDTVGGGDWLCEQDIVEYFVEHSPIEMTQLERWGCPWSRREDGEVNVRRFGGMKIERTWFAADKTGFHILHTLFQTSIKYPNIVRFDEHFVLDILTDNGEARGCVAMNMMEGTLVQINANAVVIATGGGCRTYRFNTNGGIVTGDGLSMAYRHGVALRDMEFVQYHPTGLPNTGILMTEGCRGEGGILVNKDGYRYLQDYGLGPETPIGKPENKYMELGPRDKVSQAFWQEWRKGNTLKTAKGVDVVHLDLRHLGEKYLLERLPFICELAKAYEGVDPAKAPIPVRPVVHYTMGGIEVDMNAETSIKGLFAVGECASSGLHGANRLGSNSLAELVVFGKVAGENAARRALEVTARNQPQIDAQAKDVVARLHALANQEGNESWSDIRNQMGDAMEEGCGIYRTQESMEATVNKIQELKERYKNISVKDKSSVFNTDLLYKIELGFILDVAQSIACSAVERKESRGAHQRLDYVERDDVNYLKHTQAYYNAEGTPTIKYSDVKITKSQPAKRVYGAEAEAQEKVKKAAEAQAQQ

SEQ ID NO: 33381 - DNA, 1944 bp, Aspergillus oryzae
  CDS (1)..(1944)
atgagctccctgagcttgcggagcctagctcccgcatccaagatttcccgtgccttgagggatcagagacgtcttttttcctcaacccggcccgcagcccggatttttggcagcaacccattgcgcgctagggaagccactggcgctatcgccgagaagtacccgatcattgaccacgagtacgatgctgtcgtcgtcggtgctggaggtgctggtcttcgtgccgccttcggtctggcggaagccggttttaacactgcctgtgtctcgaagctcttccctacaagaagtcacactgttgctgcccagggtggtatcaacgctgctcttggaaacatgcacgaggatgactggagatggcacatgtacgataccgtgaagggttctgactggctcggagaccaggatgccattcactacatgaccagagaagcccccgctagtgttcgtgagcttgagggctacggatgccccttctctcgtaccgaggacggccgtatctaccagcgtgccttcggtggtcagtccaaggaattcggaaagggcggccaggcctaccgttgctgtgctgccgctgatcgtactggtcacgctcttcttcacactctctatggacagtccctgcgtcacaacactaactacttcatcgaatacttcgcccttgacctgctgatggaggatggtgagtgccgcggtatcattgcctacaaccaggaggatggtactctgcaccgtttcaaggcccaccacaccgtcctggccactggtggatacggacgtgcctacttcagctgcacttctgcccacacttgcactggtgatggtatggccatggttgcccgtgctggtcttcccaaccaggatctcgaattcgttcagttccatcccacaggtatctacggtgctggatgtctgatcaccgagggttctcgtggtgagggtggttacctgctcaactccgagggtgagcgtttcatggagcgttacgctcctaccgccaaggatttggcttctcgtgatgtcgtttctcgctctatgaccctggaaatccgcgagggccgtggtgttggtcctgagaaggatcacatctaccttcagctgagccacttgcccgctgagctcttgcacgagcgtctgcccggtatctcggaaaccgcttccatcttcgctggtgtcgacgtgaccaagcaacccatccccgtcttgcccaccgtccactacaacatgggtggtatccctaccaagtacactggtgaagtcctgactcaggatgagaacggtgccgacaaggttgttcctggtctgtacgcttgcggtgaagccgcctgcgtgtccgtccacggtgccaaccgtcttggtgccaactctcttctggatttggtcgttttcggtcgcgctgtttctcaccgtgtccgtgacattgccacccctggcaagcctcaccgtgagctgagctccgacgctggtgctcagtccatcaaggatctcgacttcgctcgtactgcggacggccccaagtccactttcgaaatccgtaacgctatgcagaaggccatgcagactgacgtcagcgtcttccgtactcaggagagtttggatgagggtgtcgccaaggtcactgagattgaccagttgtacgaccaggtcggtaccaaggaccgcagcatgatctggaactctgacctcgtggaaactcttgaactccgcaaccttttgacctgcgccacccaaaccgctgttgccgccgctaaccgtaaggagtctcgtggtgctcacgcccgtgaggactaccccgaccgtgatgacgagaactggatgaagcacactctcacgtggcagaagaagccccacggcaagatcgacctgggctaccgtgccgtcgagcacaacaccctggatgagaaggagtgcaagccggtgccacccttcaagcgtgtctactaa

SEQ ID NO: 33382 - protein, 647 aa, Aspergillus oryzae
MSSLSLRSLAPASKISRALRDQRRLFSSTRPAARIFGSNPLRAREATGAIAEKYPIIDHEYDAVVVGAGGAGLRAAFGLAEAGFNTACVSKLFPTRSHTVAAQGGINAALGNMHEDDWRWHMYDTVKGSDWLGDQDAIHYMTREAPASVRELEGYGCPFSRTEDGRIYQRAFGGQSKEFGKGGQAYRCCAAADRTGHALLHTLYGQSLRHNTNYFIEYFALDLLMEDGECRGIIAYNQEDGTLHRFKAHHTVLATGGYGRAYFSCTSAHTCTGDGMAMVARAGLPNQDLEFVQFHPTGIYGAGCLITEGSRGEGGYLLNSEGERFMERYAPTAKDLASRDVVSRSMTLEIREGRGVGPEKDHIYLQLSHLPAELLHERLPGISETASIFAGVDVTKQPIPVLPTVHYNMGGIPTKYTGEVLTQDENGADKVVPGLYACGEAACVSVHGANRLGANSLLDLVVFGRAVSHRVRDIATPGKPHRELSSDAGAQSIKDLDFARTADGPKSTFEIRNAMQKAMQTDVSVFRTQESLDEGVAKVTEIDQLYDQVGTKDRSMIWNSDLVETLELRNLLTCATQTAVAAANRKESRGAHAREDYPDRDDENWMKHTLTWQKKPHGKIDLGYRAVEHNTLDEKECKPVPPFKRVY

SEQ ID NO: 33383 - DNA, 1929 bp, Arabidopsis thaliana
  CDS (1)..(1929)
atggcggctcatgtttctactggaaacattcataatttctatcttgcggggcaggtttacaggggacaagctttttcatggagttctgcttctactttcatggcaaatccattcaaagagccctcttggtcaagtggggtatttaaggctctaaaagctgagagatgtggttgttactctcgtggtatttcccccatcagtgagacctcaaaacctatcagggctgtttcggtatcttcttcaacaaagtattatgatttcactgtgattggtagtggagtagcgggtctgcgttatgctttagaagttgcaaagcaaggaacagtcgcagtgattaccaaagatgagcctcatgagagtaacacaaactatgctcaaggtggtgttagtgctgtgttatgccctttggattctgttgaaagtcatatgcgggacactatggtcgctggtgctcatctttgtgatgaagaaaccgttgtgtgtactgaagggcctgaaaggattcgtgaactgattgcaatgggagcatcatttgatcacggcgaggatggaaatttgcatttggccagagagggtggtcactcgcattgtaggatcgttcacgctgctgatatgacaggaagagagattgagagagctttacttgaagctgtacttaatgatcccaacatatctgtcttcaaacaccattttgcaatcgatctgctcacttctcaggatggcttgaacacagtttgtcatggtgtggacactttgaatatcaaaactaatgaggtgacattgcttgcttcaggtggagctgggcatatctatccatcaaccacaaatcctctggtggctactggagatgggatggcgatggctcatcgagctcaagctgtgatctcaaatatggaatttgtgcagtttcatcctactgccctagccgacgaaggtcttcccatcaaactacaaactgctagggaaaacgcgttcctcatcaccgaggcggtgagaggtgatggtggcatcctctataatctaggaatggagcgattcatgcctgtttacgatgaacgagctgagcttgctccaagagacgtggttgcaagaagtattgatgaccagcttaagaaacgaaacgaaaagtatgtgttacttgacataagccataagccaagagaaaagattcttgcccatttcccgaacatagcttctgaatgtcttaaacacggtctggatatcacccgtcagcctattccggttgtccctgcagcccattacatgtgtggaggagttcgtgctggtttacaaggcgaaaccaatgtccttggattgtttgtagcaggtgaagtagcatgtacaggcctccacggggcaaatcgtcttgctagtaactcgcttttagaagctctggttttcgcgagacgggctgttcagccttcgactgagctcatgaaacgcacaagacttgatgtatgcgcatcagagaaatggacaaggcctgttgttgcgacagctagattgctaggagatgaagtaatagcaaagattatagctttgactaaagaagtgagaagagagcttcaggaggtaatgtggaagtatgttggtattgtcagatcgacaattcggctcaccactgctgagaggaaaatcgcagagctagaagcaaaatgggaaacatttttgtttgaacatggatgggaacaaacagtggtagctcttgaagcttgtgagatgagaaacttgttctgttgcgctaagcttgtggtgagcagcgcgttagctagacatgaaagcagaggtcttcattacatgacagactttccttttgtggaagaaagcaagcggattccgacgattattctaccgtcttctcctacaacagctagttggagctcaaggcggttacagaatataagtagcagctcacttattgattgctaa

SEQ ID NO: 33384 - protein, 642 aa, Arabidopsis thaliana
MAAHVSTGNIHNFYLAGQVYRGQAFSWSSASTFMANPFKEPSWSSGVFKALKAERCGCYSRGISPISETSKPIRAVSVSSSTKYYDFTVIGSGVAGLRYALEVAKQGTVAVITKDEPHESNTNYAQGGVSAVLCPLDSVESHMRDTMVAGAHLCDEETVVCTEGPERIRELIAMGASFDHGEDGNLHLAREGGHSHCRIVHAADMTGREIERALLEAVLNDPNISVFKHHFAIDLLTSQDGLNTVCHGVDTLNIKTNEVTLLASGGAGHIYPSTTNPLVATGDGMAMAHRAQAVISNMEFVQFHPTALADEGLPIKLQTARENAFLITEAVRGDGGILYNLGMERFMPVYDERAELAPRDVVARSIDDQLKKRNEKYVLLDISHKPREKILAHFPNIASECLKHGLDITRQPIPVVPAAHYMCGGVRAGLQGETNVLGLFVAGEVACTGLHGANRLASNSLLEALVFARRAVQPSTELMKRTRLDVCASEKWTRPVVATARLLGDEVIAKIIALTKEVRRELQEVMWKYVGIVRSTIRLTTAERKIAELEAKWETFLFEHGWEQTVVALEACEMRNLFCCAKLVVSSALARHESRGLHYMTDFPFVEESKRIPTIILPSSPTTASWSSRRLQNISSSSLIDC

SEQ ID NO: 33385 - DNA, 1791 bp, papaya bunchy top disease rickettsia
  CDS (1)..(1791): transl_table=11
atgaccaaatcgtataatataattcatcataaatttgacgtaatagtcgtaggtgctggtggtgcaggtttgcgtgctgcgttcggtatggctaaagagggtcttaatacggcttgtatatcaaagctattcccaactcgtagccatactgttgcagcacaaggcggcattagtgcggctcttggtaatatgggggcggatgattggcgttggcatatgtatgatacggttaaaggttctgattggttaggtgatcaggatgctattgaatatatgtgcaagaatgctccggatgcgattttagagcttgagcattatggcgtacctttttcaagaaccgaggagggaaaaatttatcagcgtccttttggcggcatgactaccgagtacggcaaaggcaaggcagcacaacgtacatgtgcggcagctgatcgtactgggcacgctatacttcatactttatatcaacagtcattaaagcataaagtacagttttttatcgaatattttgctattgatttattgatggaagatggtgaatgtagaggggtggttgcatggaatttagatgatggtagcctgcattgtttcagagctcataatgtagtgcttgcaacgggcggatatgggcgtgcttatttttcggcaacttcggctcacacttgtacaggtgatgggggtggtatggcgattagagcaggcttgccgctgcaagatatggagtttgtccagttccatccgaccggaatatattcagctggttgtcttataacagagggagcaagaggtgagggtggttatcttgttaacgctaatggtgagcgtttcatggagcgttatgcaccggctgcaaaggatttagcctcaagggatgtagtttcaagagcaatgactatcgaaatccgtgaggggcgaggagttggagagcataaagatcatgtattcttacatttaaatcatttatcacctgaaattttacatagtcgtttgcctggtatttctgaaacagctaaaatttttgctggtgttgatgtaactaaagagccgataccagtgcttcctacagtgcattataatatgggcgggattcctactaattatcatggtcaggtaataattaaagatggtaaaaatcataatagtgtagtaaaaggtcttatgtcaatcggagaagctgcttgtgtatcggtgcatggtgctaatcgtttaggttcaaattctttgcttgatttggtggtattcggcagaagtgcagcactaaaagcagctgagcttattaaacctgcaagtccgcataagcctgtatcagaagaagcacttgaaaaaattgttagtagatttgataaaattcgtcatagtagcggtaatatttcggttgcagatttaaggcttaaaatgcaaagaactatgcaaagccatgcttcggtatttagaactcaagaagttctaaatgaaggggcaaaaatgattagcgagataagaagtagctataaggacataaaaattaatgatagatctttaatttggaatagtgatttggttgaagccttagagctggataatttactcgatcaagctttagtaactgtatattcagcagctgcaagaaaagaaagcagaggagcacacgcaagagaagattatcctgatcgtaatgataaagaatggatgcagcacactcttagcggggttgatgaagccggcaaggtggtgcttgattacaaacctgttactttaactactttgagtgatgaagtaaaagcagttccaccggcgaaaagagtatattaa

SEQ ID NO: 33386 - protein, 596 aa, papaya bunchy top disease rickettsia
MTKSYNIIHHKFDVIVVGAGGAGLRAAFGMAKEGLNTACISKLFPTRSHTVAAQGGISAALGNMGADDWRWHMYDTVKGSDWLGDQDAIEYMCKNAPDAILELEHYGVPFSRTEEGKIYQRPFGGMTTEYGKGKAAQRTCAAADRTGHAILHTLYQQSLKHKVQFFIEYFAIDLLMEDGECRGVVAWNLDDGSLHCFRAHNVVLATGGYGRAYFSATSAHTCTGDGGGMAIRAGLPLQDMEFVQFHPTGIYSAGCLITEGARGEGGYLVNANGERFMERYAPAAKDLASRDVVSRAMTIEIREGRGVGEHKDHVFLHLNHLSPEILHSRLPGISETAKIFAGVDVTKEPIPVLPTVHYNMGGIPTNYHGQVIIKDGKNHNSVVKGLMSIGEAACVSVHGANRLGSNSLLDLVVFGRSAALKAAELIKPASPHKPVSEEALEKIVSRFDKIRHSSGNISVADLRLKMQRTMQSHASVFRTQEVLNEGAKMISEIRSSYKDIKINDRSLIWNSDLVEALELDNLLDQALVTVYSAAARKESRGAHAREDYPDRNDKEWMQHTLSGVDEAGKVVLDYKPVTLTTLSDEVKAVPPAKRVY

SEQ ID NO: 33387 - DNA, 1905 bp, Arabidopsis thaliana
  CDS (1)..(1905)
atgtggcgctgcgtctctcgtggctttcgagctcctgcttcaaagacctcttcactctttgatggcgtctctggatctcgcttttccagattcttctccactggttctaccgatacgagatcctcttatacgatagtggatcacacttatgatgcggttgtggtgggagctggtggtgctggtcttagggcggcgattgggttatcggagcatggctttaacaccgcttgcattactaagcttttccccacaaggtcacatactgttgctgctcagggtggtattaatgctgcactgggaaatatgtccgaagatgactggagatggcacatgtatgacactgtcaaaggaagtgactggctaggtgatcaagatgctatccagtacatgtgtagagaggcaccaaaagcagtcattgaacttgagaattatgggctgcctttctctcgtactgaagaagggaaaatttaccagcgtgcatttggtggtcagagtcttgactttggaaaaggtggtcaggcctatcgttgtgcttgtgctgcggataggactggtcatgctctgttgcatactctctatggacaagctatgaagcataacacacagttctttgttgaatacttcgccttggatctgctcatggctagtgatggcagttgccagggtgtaattgcactaaacatggaagatggaacgttgcatcgtttccgttcttctcaaacaattttggcaactggggggtacggcagagcatacttctctgcaacctcagcacatacatgcacaggggatggaaatgcaatggttgcacgggccggtcttccactgcaggacttggagtttgttcaattccatccaactggtatatatggggccggatgtctcatcaccgaaggatctcgaggtgaaggtggtatccttagaaacagtgaaggtgaacgttttatggaacgatatgctcctacagccaaggatcttgcatcaagagatgttgtctccagatccatgactatggaaatcagggaaggtcgtggtgtaggaccgcataaggatcatatctatctccatctgaatcatcttcctccagaagttctaaaagaaaggcttcctggaatctctgagaccgctgccatctttgctggtgttgatgttaccaaagagccaattcctgtcttacccacggttcattataacatgggtggtatcccaacaaactaccatggcgaggtagttaccatcaaaggcgatgatccagatgcagtgattcctgggctaatggctgctggggaggcagcttgtgcatctgttcatggtgccaacaggcttggtgcaaattcactgctcgacattgtcgtgtttggtcgtgcttgtgcaaatagggttgcagagataagcaaaccaggggagaaacagaaacctcttgagaaggatgcgggtgagaagactattgcatggctggacaggttgagaaactcaaacgggtctctacctacttcaactatcagattgaacatgcagaggattatgcagaacaacgcagctgtgttccgcacgcaagaaacattggaagaaggttgtcagttgattgacaaggcctgggaaagttttggggacgtccaggtgaaagatcggagtatgatatggaactcggatttgatagagacattggaactggagaaccttttgataaacgcatccataacaatgcattcagcagaagcacgaaaggaaagcagaggagcacatgctcgggaagacttcacgaaaagagaggatggagaatggatgaagcatacattgggatattgggaagatgagaaagtgagattggattataggcctgttcacatggacactctcgacgatgagatcgacactttccctcccaaagctcgtgtctattga

SEQ ID NO: 33388 - protein, 634 aa, Arabidopsis thaliana
MWRCVSRGFRAPASKTSSLFDGVSGSRFSRFFSTGSTDTRSSYTIVDHTYDAVVVGAGGAGLRAAIGLSEHGFNTACITKLFPTRSHTVAAQGGINAALGNMSEDDWRWHMYDTVKGSDWLGDQDAIQYMCREAPKAVIELENYGLPFSRTEEGKIYQRAFGGQSLDFGKGGQAYRCACAADRTGHALLHTLYGQAMKHNTQFFVEYFALDLLMASDGSCQGVIALNMEDGTLHRFRSSQTILATGGYGRAYFSATSAHTCTGDGNAMVARAGLPLQDLEFVQFHPTGIYGAGCLITEGSRGEGGILRNSEGERFMERYAPTAKDLASRDVVSRSMTMEIREGRGVGPHKDHIYLHLNHLPPEVLKERLPGISETAAIFAGVDVTKEPIPVLPTVHYNMGGIPTNYHGEVVTIKGDDPDAVIPGLMAAGEAACASVHGANRLGANSLLDIVVFGRACANRVAEISKPGEKQKPLEKDAGEKTIAWLDRLRNSNGSLPTSTIRLNMQRIMQNNAAVFRTQETLEEGCQLIDKAWESFGDVQVKDRSMIWNSDLIETLELENLLINASITMHSAEARKESRGAHAREDFTKREDGEWMKHTLGYWEDEKVRLDYRPVHMDTLDDEIDTFPPKARVY

SEQ ID NO: 33389 - DNA, 1899 bp, Arabidopsis thaliana
  CDS (1)..(1899)
atgtggcggtgccttcgagttgcgtcgtcgtcgaggagatcggaatctaatggcgctttcatcacttctcaactctccagattcttctcagctcctccttcggcaggggataaatcatcgtatacgatcgtagatcatacatatgatgcggttgttgtaggagctggtggtgctgggctaagagcagcaataggattatcagagcatggttttaacacggcttgtatcactaagctttttccaactcgttcccatactgttgcagctcagggaggtataaatgctgcgttgggtaatatgagtgtagatgactggagatggcatatgtatgatactgtcaaaggaagtgattggttaggtgatcaagatgcaattcagtatatgtgcagggaagcaccaaaagctgtgatagagcttgagaattacggattgccattttctagaacagaagatggaaaaatatatcaacgagctttcggtggccagagtctcgagtttggaataggtggtcaagcatatcgttgcgcatgtgctgctgaccgcactgggcatgctctgttacatactctgtatggccaagcaatgaaacacaacactcaattctttgttgaatactttgccttggatttgataatgaacagtgatggaacctgtcaaggagtcattgcactgaacatggaagatggaactttacatcgtttccatgcgggttccacgatattggctaccgggggctatggaagagcttatttctctgcaacttcagcacatacatgcacaggagatggaaatgctatggttgcacgagccgggctaccgcttcaagatttggagtttgttcagtttcatcctactggtatatatggagctggatgtctcatcactgaaggagctagaggtgaaggaggaattctcagaaacagtgaaggtgagaaattcatggatcgatatgctcccacggctagagatctggcttcaagagatgttgtttcaagatcaatgactatggaaatccgacaaggacgtggtgcaggaccaatgaaggattatctatacctttacttaaaccatctaccaccagaagtgcttaaagagaggctacccggtatatctgagaccgcagctatattcgctggtgtcgatgttacaagagagccaattcctgtattgcctactgtgcattataatatgggtggtattcccacaaactaccatggagaggtgattactcttagaggtgatgatccagatgctgtagttcctggactaatggctgcaggagaagcagcttgcgcatcggttcatggcgctaatagacttggtgcaaattcacttcttgacattgttgtttttggaagagcttgtgcaaacagagttgcagagattcaaaaacctggtgagaaactgaaacctctagagaaggatgcgggtgagaagagtatcgaatggttggaccgaataagaaactcaaacgggtcacttccaacttctaaaatccgcttaaacatgcaaagagtaatgcaaaacaatgctgctgttttccgtacacaagaaacactagaggaaggttgtgatttgattgataagacgtgggacagttttggtgatgtcaaagtgactgatcggagtatgatatggaactcggatttgatagaaactatggagctagagaatcttttggttaatgcatgcataacaatgcattctgctgaggctaggaaggagagtcgaggagcacatgctcgtgaggatttcacgaaacgggacgatgcaaattggatgaagcacacattggggtattgggaagaagggaatgtgaaattggagtatagaccagtccacatgaagaccttggatgatgaggttgacacttttcctcctaaacctcgtgtttattga

SEQ ID NO: 33390 - protein, 632 aa, Arabidopsis thaliana
MWRCLRVASSSRRSESNGAFITSQLSRFFSAPPSAGDKSSYTIVDHTYDAVVVGAGGAGLRAAIGLSEHGFNTACITKLFPTRSHTVAAQGGINAALGNMSVDDWRWHMYDTVKGSDWLGDQDAIQYMCREAPKAVIELENYGLPFSRTEDGKIYQRAFGGQSLEFGIGGQAYRCACAADRTGHALLHTLYGQAMKHNTQFFVEYFALDLIMNSDGTCQGVIALNMEDGTLHRFHAGSTILATGGYGRAYFSATSAHTCTGDGNAMVARAGLPLQDLEFVQFHPTGIYGAGCLITEGARGEGGILRNSEGEKFMDRYAPTARDLASRDVVSRSMTMEIRQGRGAGPMKDYLYLYLNHLPPEVLKERLPGISETAAIFAGVDVTREPIPVLPTVHYNMGGIPTNYHGEVITLRGDDPDAVVPGLMAAGEAACASVHGANRLGANSLLDIVVFGRACANRVAEIQKPGEKLKPLEKDAGEKSIEWLDRIRNSNGSLPTSKIRLNMQRVMQNNAAVFRTQETLEEGCDLIDKTWDSFGDVKVTDRSMIWNSDLIETMELENLLVNACITMHSAEARKESRGAHAREDFTKRDDANWMKHTLGYWEEGNVKLEYRPVHMKTLDDEVDTFPPKPRVY

SEQ ID NO: 33391 - DNA, 1986 bp, Drosophila melanogaster
  CDS (1)..(1986)
atgtccggaatcatgcgtgtgccatcgattttggccaaaaatgcagtcgcctccatgcaacgtgccgcagccgttggagtgcagcgcagttaccacatcacacacggccgccagcaggcctcggcggcgaatccggacaagatatcgaagcagtacccggtggtggatcacgcctacgatgcgatcgtcgtgggagcaggaggagccggcttgcgggcggcttttggcctggtggctgagggatttcgcacggcggtgatcaccaagcttttccccacccgctcgcacacgatcgccgcccagggcggtatcaatgccgctctcggcaacatggaggaggacgactggaagtggcacatgtacgacacggtcaagggctccgattggctgggcgaccaggatgccatccactacatgacccgcgaggcgcccaaggctgtcattgagctggagaactacggcatgcccttctcgcgtacccaggacggtaagatctaccagcgcgccttcggtggacagagtctgaagttcggcaagggcggacaggcccatcgctgctgtgctgtggctgatcgtactggtcactcgctgctgcacacgctatacggtcaatcgctgagctacgactgcaactactttgtggagtactttgccctggatctgatcttcgaggacggcgagtgccgtggtgtgctggccctgaacctggaggatggcacactgcaccgattccgcgctaagaacacggtcattgccaccggtggatatggacgagcattcttctcctgcacctcggcgcacacatgtaccggtgacggtactgctatggttgcacgccagggactgccctctcaggatctggagttcgtgcagttccatcctactggcatctacggcgccggatgtctcatcaccgagggctgccgcggtgagggtggttacctgatcaacggtaatggtgagcgcttcatggagcgctatgctcctgtggccaaggatctggcctctcgcgacgtcgtctcgcggtcgatgaccatcgagatcatggagggtcgtggcgctggacccgagaaggatcacgtgtacctgcaactgcaccacttgccgcccaagcagctcgcggagcgtctgcctggcatctccgagaccgccatgatcttcgccggtgttgatgtgacccgtgagcccatccccgtgttgcccaccgtgcattacaacatgggcggtgtgccgactaactatcgcggccaggtaatcaccattgacaaggatggcaaggatgtgattgtgccgggactgtatgccgctggtgaggctgcttccagctcggtgcatggtgccaaccgtctgggtgccaactctctgctggatctggtggtcttcggacgtgcatgcgccaagaccatcgccgagctgaataagcctggtgcaccggctcccaccctcaaggaaaacgctggcgaggcctctgttgctaacctcgataagctgcgccatgccaacggccagatcaccaccgccgatctgcgtctgaagatgcagaagaccatgcagcatcatgctgctgtgttccgcgatggccccatcctgcaggacggtgtgaacaagatgaaggagatctacaagcagttcaaggacatcaaggttgtcgataggtcgcttatctggaactccgatctggtggagacgctggagctgcagaatctgttggccaatgcccagatgactattgtgagcgctgaggcgcgcaaggaatcgcgaggtgcccacgcccgcgaggacttcaaggttcgcgaggatgaatacgatttcagcaagcccctggatggtcagcagaagaagcccatggatcagcactggcgcaagcacacgctctcgtgggtgtgcaatgacaacggagacattacgctggactacagaaacgtgatcgataccacgctggacaacgaagtctctactgttccaccagcgattcgctcctattaa

SEQ ID NO: 33392 - protein, 661 aa, Drosophila melanogaster
MSGIMRVPSILAKNAVASMQRAAAVGVQRSYHITHGRQQASAANPDKISKQYPVVDHAYDAIVVGAGGAGLRAAFGLVAEGFRTAVITKLFPTRSHTIAAQGGINAALGNMEEDDWKWHMYDTVKGSDWLGDQDAIHYMTREAPKAVIELENYGMPFSRTQDGKIYQRAFGGQSLKFGKGGQAHRCCAVADRTGHSLLHTLYGQSLSYDCNYFVEYFALDLIFEDGECRGVLALNLEDGTLHRFRAKNTVIATGGYGRAFFSCTSAHTCTGDGTAMVARQGLPSQDLEFVQFHPTGIYGAGCLITEGCRGEGGYLINGNGERFMERYAPVAKDLASRDVVSRSMTIEIMEGRGAGPEKDHVYLQLHHLPPKQLAERLPGISETAMIFAGVDVTREPIPVLPTVHYNMGGVPTNYRGQVITIDKDGKDVIVPGLYAAGEAASSSVHGANRLGANSLLDLVVFGRACAKTIAELNKPGAPAPTLKENAGEASVANLDKLRHANGQITTADLRLKMQKTMQHHAAVFRDGPILQDGVNKMKEIYKQFKDIKVVDRSLIWNSDLVETLELQNLLANAQMTIVSAEARKESRGAHAREDFKVREDEYDFSKPLDGQQKKPMDQHWRKHTLSWVCNDNGDITLDYRNVIDTTLDNEVSTVPPAIRSY

SEQ ID NO: 33393 - DNA, 1803 bp, Paracoccus denitrificans
  CDS (1)..(1803): transl_table=11
atggctgcttacaaatacgaaacgcacgaatatgacgtcgtggtcgtcggtgccggtggcgcgggcctgcgcgcgacgctgggcatggccgaacaggggttgcgcaccgcctgcgtgaccaaggttttcccgacccgttcgcacacggtcgcggcgcagggcggcatcgccgcctcgctgtcgaacatgggcccggacaactggcagtggcacatgtatgacaccgtcaagggctcggactggctgggcgacaccgacgccatggaatacctggcgcgcgaggcccccaaggcggtctatgagctggagcattacggcgtgcccttctcgcgcaccgaggaaggcaagatctatcagcgccccttcggcggccacaccaccgagttcggcgaaggcccgccggtgcagcgcacctgcgccgccgccgaccgcaccggccacgcgatcctgcacacgctctatggccagtcgctgaaggaaaaggccgagttcttcatcgaatatttcgcgctggacctgatcatcaccgatggcgcctgcaccggcgtggtgtgctggaagctggacgacggcacaatccacgtcttcaacgccaagatggtggtgctggcgaccggcggctatggccgcgcctatttctcggcgacctcggcccatacctgcaccggcgacggcggaggcatggtggcacgcgccggcttgcccctgcaggacatggagttcgtgcagttccacccgaccggcatctacggttcgggctgcctcatcaccgaaggcgcgcgcggcgagggcggctacctgaccaacagcgagggtgagcgcttcatggagcgttacgcgccgacctacaaggatctcgccagccgcgacgtggtcagccgctgcatcaccatcgagatccgcgagggccgcggcgtcggcccgcacaaggatcacatgcacctgaacctgatgcacctgccgccggaaagcctggccgagcggctgccgggcatctcggaatcggccaagatctttgccggcgtggacgtgacgcgcgagccgatcccgatcctgccgaccgtgcattacaacatgggcggcatccccaccaactattggggcgaggtgctgaatccgacgcaggacaatcccgaccaggtcttccctggcctgatggcggtgggcgaggccggctgcgcctcggtccatggcgcgaaccggctgggctcgaactcgctgatcgacctcgtggtctttggccgtgccgccgcgatccgcgccggccaggtgatcgaccgcgaggcgcagatccccacgaccaacaaggagcaggtggacaaggcgctggaccgtttcgaccgcatccgcaatgccgacggctcggtgtcgactgccgatctgcggcttgagatgcagcgcaccatgcaggccgacgccgccgtgttccgcaccgacaagacgctggccgaaggcgtcgacaagatgcgggtgatcgcgggcaagctcagcgacctcaaggtcacggatcgcagcctgatctggaacagcgacctgatggagacgctggaactgaccaacctgatgcccaacgccctggcgaccatcgtcgcggccgaggcgcgcaaggaaagccgcggcgcccatgcccatgaagactaccccgagcgggatgatgccaactggcgcaagcactcgcttgcctggatcgaaggcaacgatgttaaactggcctatcggcccgtgcatctcgaacctctgaccaggcaagacgaaggcgggatcgacctgaaaaagatcgcacccaaagcgagggtttattga

SEQ ID NO: 33394 - protein, 600 aa, Paracoccus denitrificans
MAAYKYETHEYDVVVVGAGGAGLRATLGMAEQGLRTACVTKVFPTRSHTVAAQGGIAASLSNMGPDNWQWHMYDTVKGSDWLGDTDAMEYLAREAPKAVYELEHYGVPFSRTEEGKIYQRPFGGHTTEFGEGPPVQRTCAAADRTGHAILHTLYGQSLKEKAEFFIEYFALDLIITDGACTGVVCWKLDDGTIHVFNAKMVVLATGGYGRAYFSATSAHTCTGDGGGMVARAGLPLQDMEFVQFHPTGIYGSGCLITEGARGEGGYLTNSEGERFMERYAPTYKDLASRDVVSRCITIEIREGRGVGPHKDHMHLNLMHLPPESLAERLPGISESAKIFAGVDVTREPIPILPTVHYNMGGIPTNYWGEVLNPTQDNPDQVFPGLMAVGEAGCASVHGANRLGSNSLIDLVVFGRAAAIRAGQVIDREAQIPTTNKEQVDKALDRFDRIRNADGSVSTADLRLEMQRTMQADAAVFRTDKTLAEGVDKMRVIAGKLSDLKVTDRSLIWNSDLMETLELTNLMPNALATIVAAEARKESRGAHAHEDYPERDDANWRKHSLAWIEGNDVKLAYRPVHLEPLTRQDEGGIDLKKIAPKARVY

SEQ ID NO: 33395 - DNA, 1767 bp, Salmonella typhimurium
  CDS (1)..(1767): transl_table=11
atgaaactgccagtcagagaatttgatgctgttgtgattggtgccggtggcgcaggtatgcgcgcggcgctgcaaatttcccagagcggccaaacctgtgcgctgctctcgaaagtcttcccgacccgttcccataccgtttccgcgcagggcggtatcaccgtggcgctcggcaatacccatgaagataactgggaatggcacatgtacgacaccgttaaggggtcggactacattggtgaccaggatgccatcgaatatatgtgtaagaccggaccggaagcgattctggaactggagcacatggggctaccgttctcccgtcttgatgatggacgtatctatcagcgcccgttcggcggccagtcgaaaaactttggcggcgagcaggcggcacgtaccgcggcggcggctgaccgtaccggtcacgccttgctacacacgctgtatcaacagaatttgaaaaaccacaccacgattttctccgaatggtatgcgctggatctggtgaaaaaccaggatggcgcggtggtggggtgtaccgcactgtgcatcgaaaccggtgaagtggtgtacttcaaagcccgcgcgacggtgctggcgaccggcggcgcaggccgtatctaccagtccaccaccaacgctcacatcaacaccggtgacggtgtcggtatggcgctgcgtgccggtgtcccggtgcaggacatggaaatgtggcagttccacccgaccggcatcgccggggcgggcgtgctggtgacagaaggctgccgcggcgaaggcggttacctgctgaacaaacacggcgagcgctttatggagcgttatgcgccgaacgccaaagacctggcgggtcgtgacgtggtggcgcgttccatcatgatcgaaatccgtgaaggccgcggctgtgatggtccgtgggggccgcacgctaaactgaaactggatcacctgggtaaagaggtgctggaatctcgcctgccgggtatcctggagctgtcccgtactttcgcccacgttgacccggtgaaagagccgattccggttatcccgacctgccactacatgatgggcggtattccgactaaagtgaccggtcaggcgctgaccgtgaacgagcagggcgaagacgtggtcattccggggctgtttgcggtaggcgaaatcgcctgtgtatcggttcacggcgccaaccgtctgggcggtaactcactgctggatctggtggtctttggccgcgcggcggggctgcatttacaggaatccatcgccgagcagggcgtgctgcgcgacgccagcgagtctgacgttgaaggttctctggagcgcctgaatcgctggaacaataaccgcaatggcgaagatccggtggctatccgcaaagcgttgcaggagtgtatgcagcataacttctccgtattccgtgaaggcgacgcgatggcgaaagggcttgagcagttgaaagtgatccgcgagcgtctgaaaaacgcccgtctggatgacacgtccagcgagtttaatacccagcgtgttgagtgtctggagctggataacctgatggaaaccgcctacgccactgccgtatcagccaacttccgaacggaaagccgcggcgcgcatagccgcttcgatttcccggagcgtgatgatgccaactggttgtgtcataccctgtatcagccgcaaacggaatccatgacgcgccgaagcgtcaatatggagccgaaactgcgtccggcgttcccgccgaagattcgtacttattaa

SEQ ID NO: 33396 - protein, 588 aa, Salmonella typhimurium
MKLPVREFDAVVIGAGGAGMRAALQISQSGQTCALLSKVFPTRSHTVSAQGGITVALGNTHEDNWEWHMYDTVKGSDYIGDQDAIEYMCKTGPEAILELEHMGLPFSRLDDGRIYQRPFGGQSKNFGGEQAARTAAAADRTGHALLHTLYQQNLKNHTTIFSEWYALDLVKNQDGAVVGCTALCIETGEVVYFKARATVLATGGAGRIYQSTTNAHINTGDGVGMALRAGVPVQDMEMWQFHPTGIAGAGVLVTEGCRGEGGYLLNKHGERFMERYAPNAKDLAGRDVVARSIMIEIREGRGCDGPWGPHAKLKLDHLGKEVLESRLPGILELSRTFAHVDPVKEPIPVIPTCHYMMGGIPTKVTGQALTVNEQGEDVVIPGLFAVGEIACVSVHGANRLGGNSLLDLVVFGRAAGLHLQESIAEQGVLRDASESDVEGSLERLNRWNNNRNGEDPVAIRKALQECMQHNFSVFREGDAMAKGLEQLKVIRERLKNARLDDTSSEFNTQRVECLELDNLMETAYATAVSANFRTESRGAHSRFDFPERDDANWLCHTLYQPQTESMTRRSVNMEPKLRPAFPPKIRTY

SEQ ID NO: 33397 - DNA, 1926 bp, Schizosaccharomyces pombe
  CDS (1)..(1926)
atgctcagatttcgaaaagtcgctccaagtctaaaaaatggagggaatctgaagctattttctacttcttcaactttaaaaaaaatagcttcaagccagcctttaagagcaaagcaagtttcaacatcagaatccgttaaatatccagtcattgaccatacatacgatgctatcgttgtaggtgccggaggtgccggtcttcgtgctacttttggtttggcagaagccggctttaatactgcatgtattactaagctctttcctacgaggtcccatactgtcgctgcccaaggtggtatcaacgctgcactcggtaatatgacaaaagatgactggcgctggcatttctatgacactgtcaaaggatcagattggttgggtgatcaagatgctattcattacatgactaaagaagcacccaaagcagttttggagttggaacattttggtgtacctttttcaagaacgaaggagggaaagatttatcaacgtgcttttggcggtcaatcccttgaatatggtaaaggtggacaggcatatcgctgtgctgctgttgccgatcgtactggacattctatcttgcacactctttacgggcaatctcttaaacataacacaaacttttttattgagtattttgcaatggatttaatcatggaaggtggtgaatgtcgtggtgtcattgctatgaatttggaagacggtagtattcacagattccgtgctcacaagactattttggctactggtggttatggacgtgcctatttctcttgcacctcagctcatacctgtactggtgatggtaatgccatggtttctcgtgctggacttcctctacaagatctcgagtttgttcaatttcaccctactggtatctatggtgctggttgtttaattactgaaggttgccgtggtgaaggtggttatcttttgaacagcaagggtgagcgttttatggaacgctatgctcctaccgctaaggatttggcttctcgtgatgtcgtttctcgtgctatgactgttgaaattcgtgaaggccgtggtgttggccctgaaaaggatcattgttatttgcagctttctcacctccccgctgaaattttgaaagagcgtcttcctggcatttccgaaactgctgctatctttgctggtgtagatgttactaaagagcctatccccgttttacctacagttcactacaatatgggtggtattcctacccgtttcaccggtgaagtcctcactattgacgaaaatgggaaggataagattgttcctggattgtatgctgctggtgaagctgcttgtgtatctgtccatggaggtaaccgtcttggtgccaactctcttctggacattgttgtttttggacgtgcctgtgctttacatattaaggatacgcttgaacccaatacccctcataaaccgcttgcagctgatgccggattggattctctaaaatttttggaccaaattcgcacttcgcaaggccctaaacataccagtgaaattcgtttggatatgcaaaagacgatgcaacgtgatgtctcagttttccgtatggaagaaactcttcaagaaggtgttaagaacattgctcgtgttgacggcacttacaaggatattggaatcagggaccgtggtttaatctggaacaccgatcttgttgaagcccttgaattacgtaaccttttaacttgtgctgtgcaaactgctaatgcagctctcaaccgcaaagaatctcgcggtgcccatgctcgtgaagactatcctgagcgtgatgacaagaattggatcaagcatacattgacttggcaacacaaaacaggcgaccctgtcaccttgaagtatcgcgctgtcaccagaaccactatggatgagaatgaagttaaaccagtgcctcctttcaaacgtgtttattag

SEQ ID NO: 33398 - protein, 641 aa, Schizosaccharomyces pombe
MLRFRKVAPSLKNGGNLKLFSTSSTLKKIASSQPLRAKQVSTSESVKYPVIDHTYDAIVVGAGGAGLRATFGLAEAGFNTACITKLFPTRSHTVAAQGGINAALGNMTKDDWRWHFYDTVKGSDWLGDQDAIHYMTKEAPKAVLELEHFGVPFSRTKEGKIYQRAFGGQSLEYGKGGQAYRCAAVADRTGHSILHTLYGQSLKHNTNFFIEYFAMDLIMEGGECRGVIAMNLEDGSIHRFRAHKTILATGGYGRAYFSCTSAHTCTGDGNAMVSRAGLPLQDLEFVQFHPTGIYGAGCLITEGCRGEGGYLLNSKGERFMERYAPTAKDLASRDVVSRAMTVEIREGRGVGPEKDHCYLQLSHLPAEILKERLPGISETAAIFAGVDVTKEPIPVLPTVHYNMGGIPTRFTGEVLTIDENGKDKIVPGLYAAGEAACVSVHGGNRLGANSLLDIVVFGRACALHIKDTLEPNTPHKPLAADAGLDSLKFLDQIRTSQGPKHTSEIRLDMQKTMQRDVSVFRMEETLQEGVKNIARVDGTYKDIGIRDRGLIWNTDLVEALELRNLLTCAVQTANAALNRKESRGAHAREDYPERDDKNWIKHTLTWQHKTGDPVTLKYRAVTRTTMDENEVKPVPPFKRVY

SEQ ID NO: 33399 - DNA, 1923 bp, Saccharomyces cerevisiae
  CDS (1)..(1923)
atgctatcgctaaaaaaatcagcgctctccaagttgactttgctcagaaacacaagaacatttacatcgtcagctttggtgcgccaaacgcagggctctgtaaacggttccgcgtccagatctgcagacgggaagtaccacataatagatcacgagtatgactgtgtggtaatcggtgccggtggtgccggccttagagcggcctttggtcttgccgaggcgggctacaagactgcttgtatatccaagcttttccccaccagatcccacactgttgctgctcagggtggtatcaatgccgctctgggaaatatgcacaaggataactggaaatggcatatgtacgatactgtgaaaggatctgattggctaggtgaccaggactccatccattacatgaccagggaagcgcccaaatcgatcattgaactggaacactatggtgttcctttttcaagaactgaaaacggtaagatctaccaaagagcctttggtggtcagaccaaggagtacggtaagggtgctcaggcctatagaacatgcgctgtcgcagacaggacaggacatgctcttttacacacgctttatggccaagctttaagacatgacacacatttctttattgagtactttgccctcgatctgttgacccataatggcgaggtcgttggtgtcatcgcttataatcaggaagacggtaccatccacagattcagagcacacaagaccattattgccactggtggctatggtagagcatacttctcttgtacctctgctcacacatgtacgggtgacggtaatgccatggtttcgcgtgctggtttccccttgcaagatttagagtttgttcaattccatccttcaggtatatatgggtctggttgcttaatcactgaaggtgctcgtggtgaaggtggttttttggttaattctgaaggtgaaagattcatggaacgttacgctcctacggccaaggatctagcttgtagagatgtcgtttccagagcaatcaccatggagatcagagaaggcagaggtgttggtaagaaaaaggaccacatgtacttacaattgagccatctacctccggaagttctaaaggaaagattgccaggtatctctgaaacagcagccatttttgctggtgtagacgtcaccaaggaacctattcccattattcctaccgtccactataacatgggtggtattcccacgaagtggaatggtgaggcattaaccattgatgaagaaactggcgaagacaaggttattcccggtttaatggcttgtggtgaagccgcttgtgtttctgtccatggtgccaatagattaggtgccaattccttgttggatcttgttgtctttggtcgtgctgttgcccatacggttgctgacactttacagcctgggttgccacacaaaccactaccttctgatttgggtaaagaatccatcgcaaacttggataaactaagaaatgctaatggttcaagatctacggcagaaattagaatgaatatgaaacaaactatgcaaaaggatgtttccgtctttagaacacaatcatctttagatgaaggtgttcggaacattactgcagtagagaagacctttgatgatgtgaagacgaccgatagatcaatgatctggaattctgacttggttgaaactctggagctacagaacttattaacctgtgcctcccaaacagctgtttccgctgctaatagaaaggaatcccgtggtgctcatgcaagagaggattatccaaatagagatgacgaacattggatgaagcatacattatcctggcaaaaggacgtcgctgccccagtgactttgaaatacagaagggttatcgatcacactttggacgaaaaggaatgtccttccgtacctccaactgtaagagcctactaa

SEQ ID NO: 33400 - protein, 640 aa, Saccharomyces cerevisiae
MLSLKKSALSKLTLLRNTRTFTSSALVRQTQGSVNGSASRSADGKYHIIDHEYDCVVIGAGGAGLRAAFGLAEAGYKTACISKLFPTRSHTVAAQGGINAALGNMHKDNWKWHMYDTVKGSDWLGDQDSIHYMTREAPKSIIELEHYGVPFSRTENGKIYQRAFGGQTKEYGKGAQAYRTCAVADRTGHALLHTLYGQALRHDTHFFIEYFALDLLTHNGEVVGVIAYNQEDGTIHRFRAHKTIIATGGYGRAYFSCTSAHTCTGDGNAMVSRAGFPLQDLEFVQFHPSGIYGSGCLITEGARGEGGFLVNSEGERFMERYAPTAKDLACRDVVSRAITMEIREGRGVGKKKDHMYLQLSHLPPEVLKERLPGISETAAIFAGVDVTKEPIPIIPTVHYNMGGIPTKWNGEALTIDEETGEDKVIPGLMACGEAACVSVHGANRLGANSLLDLVVFGRAVAHTVADTLQPGLPHKPLPSDLGKESIANLDKLRNANGSRSTAEIRMNMKQTMQKDVSVFRTQSSLDEGVRNITAVEKTFDDVKTTDRSMIWNSDLVETLELQNLLTCASQTAVSAANRKESRGAHAREDYPNRDDEHWMKHTLSWQKDVAAPVTLKYRRVIDHTLDEKECPSVPPTVRAY

SEQ ID NO: 33401 - DNA, 1905 bp, Saccharomyces cerevisiae
  CDS (1)..(1905)
atgttatctttgaaaaaaggaataacaaaatcatacatcttgcaaagaactttcacttcttcctctgttgttcgtcaaattggggaagtgaaatctgaatcgaaaccgccggccaaatatcatattatcgaccatgaatatgattgtgtggtggtaggcgctggcggtgcaggtttaagagcagctttcggtttggctgaagctggatacaagactgcttgtttatccaagttgtttccaacaaggtcacatactgtggctgctcagggtggaattaatgctgcgctgggaaatatgcatccagatgattggaaatcgcacatgtacgacactgtcaagggttctgactggctcggagaccaagatgcaatccattacatgacaagagaagcacctaagtctgtcattgaactagaacattacggtatgcccttttcgaggactgaagatggaaggatttaccagagagcatttgggggacaatccaaagattttggtaaaggtggacaggcctataggacttgtgcggtggcagatagaacaggtcacgcaatgcttcatacattgtatggacaagcgctgaaaaataatacacacttctttattgaatactttgcaatggatttgttgacccataatggcgaggttgtgggtgtcattgcctataatcaggaggacggtacaattcacagattcagagcacataagaccgtcatcgcgacaggcggatacggtagagcttacttctcttgcacttctgctcacacttgtacaggtgacggtaatgctatggtttctcgcgctggatttccactagaggatttagaatttgttcaatttcatccgtcaggaatttatgggtctggctgcctaatcactgaaggtgcccgtggtgagggtggatttttattgaattctgaaggagaaaggtttatggaacgctatgctcctactgccaaggacttggcaagcagggatgttgtttccagagcaatcaccatggaaatcagggctggcagaggtgtcgggaaaaacaaggatcatatccttttacaattaagccatctaccacctgaggtactaaaggaaaggctaccgggaatatctgaaacagctgctgtctttgcgggtgtcgatgtcacccaggagccaattcctgtcttgccaactgtccattataatatgggaggcattcccacaaaatggactggtgaagcattgaccattgacgaggaaactggagaggataaggtcatcccaggattgatggcgtgtggtgaagctgcttgcgtatcggttcatggagcgaacagattaggcgctaactcactactggatttagtcgttttcggtcgcgccgttgcaaataccattgctgacacattacagcctggcttgcctcataagccattggcttcaaacatcgggcacgagtcaattgctaatttggataaagtaagaaatgctcgcggctcactgaaaacctctcaaatcaggttgaacatgcaaaggacaatgcaaaaagatgtttctgttttcaggacgcaagacactctagatgaaggtgttagaaatattactgaagtggacaagacatttgaggatgtgcacgtttctgataagtcaatgatctggaattctgatctcgtagaaactctggaattgcaaaatttacttacttgtgccacacaaacggctgtttctgcttccaaaagaaaggagtctcgtggtgctcatgcgagagaggactatgcaaaaagagatgatgtgaattggagaaagcacacattatcatggcaaaaggggacatcaacacctgtaaaaatcaagtacaggaatgtaatcgcacatactttagatgagaatgaatgcgccccagtccctccagctgtcagatcctattaa

SEQ ID NO: 33402 - protein, 634 aa, Saccharomyces cerevisiae
MLSLKKGITKSYILQRTFTSSSVVRQIGEVKSESKPPAKYHIIDHEYDCVVVGAGGAGLRAAFGLAEAGYKTACLSKLFPTRSHTVAAQGGINAALGNMHPDDWKSHMYDTVKGSDWLGDQDAIHYMTREAPKSVIELEHYGMPFSRTEDGRIYQRAFGGQSKDFGKGGQAYRTCAVADRTGHAMLHTLYGQALKNNTHFFIEYFAMDLLTHNGEVVGVIAYNQEDGTIHRFRAHKTVIATGGYGRAYFSCTSAHTCTGDGNAMVSRAGFPLEDLEFVQFHPSGIYGSGCLITEGARGEGGFLLNSEGERFMERYAPTAKDLASRDVVSRAITMEIRAGRGVGKNKDHILLQLSHLPPEVLKERLPGISETAAVFAGVDVTQEPIPVLPTVHYNMGGIPTKWTGEALTIDEETGEDKVIPGLMACGEAACVSVHGANRLGANSLLDLVVFGRAVANTIADTLQPGLPHKPLASNIGHESIANLDKVRNARGSLKTSQIRLNMQRTMQKDVSVFRTQDTLDEGVRNITEVDKTFEDVHVSDKSMIWNSDLVETLELQNLLTCATQTAVSASKRKESRGAHAREDYAKRDDVNWRKHTLSWQKGTSTPVKIKYRNVIAHTLDENECAPVPPAVRSY

SEQ ID NO: 33403 - DNA, 1797 bp, Proteus vulgaris
  CDS (1)..(1797): transl_table=11
  misc_feature (810)..(810): n is a, g, c or t
gtgcaaacctttaatgccgatatagcgataatcggagccgggggcgcaggcttacgagcagcaattgctgcagcggaagcaaatcctcaactgaaaattgctctgatctcaaaagtttaccctatgcgtagccacactgtggcagcagaaggcggatcagcagcagtgactcaggctcacgactcctacgactttcacttcaatgataccgtttctggcggtgactggttgtgtgagcaggatgtcgttgattacttcgttgagcattgtccaacagagatgactcaactagaactctggggctgtccttggagccgtaaagaagacgggtcagtcaacgtccgacgttttggtgggatgaaaatcgaacggacttggttcgccgccgataaaaccggcttccacatgttacacaccctgttccaaacctctttaaaatacccacaaattcaacgtttcgatgaacatttcgttctcgatatccttgttgatgaaggccacgctcgtggtgtcgttgctattaatatgatggaagggacgaaagttcaaattcgtgctaatgctgtcattatggcaacaggtggcgcaggtcgcgtttatcgctttaatactaatggcggtatcgttacaggtgatggtatggggatagccttacgtcatggcgtgccactgcgtgatatggaatttgtgcaatatcacccaactggtttaccgggctcaggtattctgatgaccgaaggttgccgtggtgaagggggtattctggtcaataaagatggttaccgttatctacaagattatggcctaggnccagaaacaccattaggtaaacccgaaaataaatatatggaattaggtcctcgcgataaagtttctcaagcattctggcatgagtggcgcgcgggtcgtaccattaaaactcaccgtggtgatgttgtgcatcttgatttacgtcatctgggtgcgaaaaaacttcatgaacgtttaccattcatttgtgaactggcaaaagcgtatgtgggtgttgatccagttaatgaacctattccagttcgtccaactgcacactacaccatgggtggtatcgagactaatcagcgcacagaaacacgtattaaaggtctgtttgcggtgggtgagtgttcatctgtcggcttacatggcgctaaccgtttaggttctaactcactggctgaacttgtagtatttggtcgtcttgctggggaagaagccgttcgtcgtgcccaagaagcaacccctgctaacgcatcagcattagatgcacaaactcgtgacatcgaagacaatctgaaaaaactgatgaaccaaaaaggttctgaaaattgggctcagatccgcgatgaaatgggtgaagccatggaagaaggttgcggtatctatcgtacacctgaattaatgcaaaaaaccattgataaactgactgaactaaaagaacgttttaaacacgtagaaattaaagataccagtagcgtctttaatactgatttactgtataaaattgagcttggctttggtttagatgtcgctgaatgtatggcgcattctgcattcaatcgtaaagagtctcgtggtgcacaccaacgtcttgacgaaggttgtactgagcgtgatgacgtgaacttccttaaacacactctggcattctataacccagaaggtgcaccgcgtttagaatatagcgatgtgaagatcaccaaatctgctcctgctaaacgtgtctatggtggtgaagcgactgcacaagacaagcagaataaggagaaagcgaatggctga

SEQ ID NO: 33404 - protein, 598 aa, Proteus vulgaris
MQTFNADIAIIGAGGAGLRAAIAAAEANPQLKIALISKVYPMRSHTVAAEGGSAAVTQAHDSYDFHFNDTVSGGDWLCEQDVVDYFVEHCPTEMTQLELWGCPWSRKEDGSVNVRRFGGMKIERTWFAADKTGFHMLHTLFQTSLKYPQIQRFDEHFVLDILVDEGHARGVVAINMMEGTKVQIRANAVIMATGGAGRVYRFNTNGGIVTGDGMGIALRHGVPLRDMEFVQYHPTGLPGSGILMTEGCRGEGGILVNKDGYRYLQDYGLGPETPLGKPENKYMELGPRDKVSQAFWHEWRAGRTIKTHRGDVVHLDLRHLGAKKLHERLPFICELAKAYVGVDPVNEPIPVRPTAHYTMGGIETNQRTETRIKGLFAVGECSSVGLHGANRLGSNSLAELVVFGRLAGEEAVRRAQEATPANASALDAQTRDIEDNLKKLMNQKGSENWAQIRDEMGEAMEEGCGIYRTPELMQKTIDKLTELKERFKHVEIKDTSSVFNTDLLYKIELGFGLDVAECMAHSAFNRKESRGAHQRLDEGCTERDDVNFLKHTLAFYNPEGAPRLEYSDVKITKSAPAKRVYGGEATAQDKQNKEKANG

SEQ ID NO: 33405 - DNA, 1602 bp, Ralstonia solanacearum
  CDS (1)..(1602): transl_table=11
atgaatttcgatgttgccgttgtcggcagtggcctggcgggcctgaccgtcgccctgcacctcgccgatcaccgccgcgtggtcgtcatcagcaaacgcacactgcccgaaggcgcgagcgactgggcccaaggcggcatcgccgcggtgctcgactcgaacgacagccatgacgagcacgtcgacgacaccctgatcgcgggcgccggcctctgcgacgaagcggccacccgctacatcgtcgaaaacggccgcgccgccatcgaatggctgatcggccatggcgtccccttcacgcgcgacgcacgggccgaactcggcttccacctgacgcgcgagggcggccaccggcaccgccgcatcatccacgccgccgatgccaccgggcatgccgtggtgaccacgctggtcgacaaggtgcgcgcgcatccgaacatcacgctgctggaagaccatttcgccatcgacctggtcaccgacgccaagctggggctgccgggcatgcgctgccacggcctgtacgtgctcgattgcaagcgcggcgacgtcaagacgatcatcgccagccagaccgtgctggcgaccggcggtgccggcaaggtctacctgtacacgaccaaccccgacaccgccaccggcgacggcatcgcgatggcgtggcgcgcgggctgccgcgtggcgaacatggagttcatccagttccacccgacctgcctgtaccacccgttcgccaaatccttcctgatcagcgaggcggtgcgcggcgaaggcggcaagctggtcctgcccgacggcacgcgcttcatgcccgcccacgacgagcgggccgaactggccccgcgcgacatcgtggcccgcgccatcgacttcgagatgaaaaagcgcggcctggactgcgtctacctcgacatcagccaccagagccccgccttcattcaggaacacttcccgaccatcctcgcccgatgcctggaactgggcatcgacatcacgcgccagccgatcccggtggtgccggccgcgcactacacctgcggcggcgtggtgaccgaccagctcggccgcaccgacatcgcgggcctgtacgcggtaggcgaaacggcctacaccggcctgcacggcgccaaccggctggccagcaattcgctgctggaatgcatggtgatcgggcgcggcgcggcgcaggacatcctgggccagcctgccacggcgccgaccccgaccccgatcccggcctgggacgaaagccgcgtgacggacgccgacgaggaagtcgtcgtctcgcacaactgggacgaactgcgccgcatgatgtggaattacgtcggcatcgtgcgcaccaacaagcgactggaacgcgcacagcaccgcatcgccctgctgcgcgaagagatcgcagagtactacgccaacttccgcgtcagccacgacctgctggagctgcgcaatctggtggaggcggcctcgttgatcgtcgacagcgcgctgtcacgccacgaaagccgcggcctgcatttctcgcgcgactacccgcagaccctgcccaaggcgctgccgacggtgatgcaacccgcgcatcggcgcacctcgcgcaagcactga

SEQ ID NO: 33406 - protein, 533 aa, Ralstonia solanacearum
MNFDVAVVGSGLAGLTVALHLADHRRVVVISKRTLPEGASDWAQGGIAAVLDSNDSHDEHVDDTLIAGAGLCDEAATRYIVENGRAAIEWLIGHGVPFTRDARAELGFHLTREGGHRHRRIIHAADATGHAVVTTLVDKVRAHPNITLLEDHFAIDLVTDAKLGLPGMRCHGLYVLDCKRGDVKTIIASQTVLATGGAGKVYLYTTNPDTATGDGIAMAWRAGCRVANMEFIQFHPTCLYHPFAKSFLISEAVRGEGGKLVLPDGTRFMPAHDERAELAPRDIVARAIDFEMKKRGLDCVYLDISHQSPAFIQEHFPTILARCLELGIDITRQPIPVVPAAHYTCGGVVTDQLGRTDIAGLYAVGETAYTGLHGANRLASNSLLECMVIGRGAAQDILGQPATAPTPTPIPAWDESRVTDADEEVVVSHNWDELRRMMWNYVGIVRTNKRLERAQHRIALLREEIAEYYANFRVSHDLLELRNLVEAASLIVDSALSRHESRGLHFSRDYPQTLPKALPTVMQPAHRRTSRKH

SEQ ID NO: 33407 - DNA, 1569 bp, Agrobacterium tumefaciens
  CDS (1)..(1569): transl_table=11
atgagcgagtttttgccgcagcgggactggacggtcatcgtcggcagcggcatggccgggctgatggcggcgatgacgctggcgccgcagcccgtgctgcttgtgacgcgcggcgcgctcggcggcgaaacctcaagcgcctgggcgcagggcggcatcgcggccagcctcgggccggatgatcgcgcagccctgcatgtcgccgatacgctcgctgcgggcgatggcctttgtgatgaagatatggtggttggcatcgtttcctcggcccccgccgtcatagatgcgctggagcgggcaggcgttcgcttcgaccgggacgccggcggcaactatgtcttcgggctggaagccgcccatagtcggcggcgcattctgcatgccgaaggcgacgggtcgggtgcggcgatcgtcagggctcttacagatgccgttcgccgtacaccttcgatcacggttctggaaggcacggaagtgcgccgcctgttgacggaagacagcgtcatcgccggtctcgcctgcgccggcccgaacggcagcttccttctgccagcaagccaggtcattctcgccaccggcggtctcggcggactttatgacgccacgaccaatccctccggcaatttcgggcagggcatcatgctcgccgcccgcgccggcgccatccttgccgacatggaattcgtgcagtttcacccgacagcactttcctccccccggcgaccgctggcgctggtgagcgaagcggtgcggggtgaaggcgccctgcttctcaatgaaaacggcgaaaggttcatggcggcagtgccgggcgcggaactggcgtcgcgcgatattgtcgcccgcgccatcgaccgtgaaatcctgcgcggcggccaggtctttctcgatgcccgccaggcgctcggctccggttttgccagccgtttcccgtcaatcgacctgctttgccgcgaggcgggcatagaccccgcccgcgaactcgtgccggtccgcccggccgtgcattaccacatgggcggtgtcgccacggataataaaggcagaagttcggtgcgcgggctctgggttgcgggggaaaccgcctgcaccggccttcacggcgcaaaccggcttgccagcaactcgctgctggaggccgccgcgatgggcatgcgtgcggcgcaggatattgccggccggcccgcacccgcggcaagatcggcggctgccgtttcgcccaacgcgacagctgatttttcgcccgccgatctcgccgctgtcaggcccatcgtttcccgtcatctcggcatcgtcagacatgccgcgggactggccgaagccatcagggacttactgccgcttgccgagcgaaacggcccggcctccgacccggcggtggtcgctctctccatcgccgttttcgcagccctgcggagggaatcgcgcggcgcgcatttccgtgacgatttttcgcagaaggatgccaaggccatgagacgccgactgagcctgaacgacgtcgtcaccgtcgcccatgaattttcctcttccagccttgcaacagccggtttcgcgcggagcgcctga

SEQ ID NO: 33408 - protein, 522 aa, Agrobacterium tumefaciens
MSEFLPQRDWTVIVGSGMAGLMAAMTLAPQPVLLVTRGALGGETSSAWAQGGIAASLGPDDRAALHVADTLAAGDGLCDEDMVVGIVSSAPAVIDALERAGVRFDRDAGGNYVFGLEAAHSRRRILHAEGDGSGAAIVRALTDAVRRTPSITVLEGTEVRRLLTEDSVIAGLACAGPNGSFLLPASQVILATGGLGGLYDATTNPSGNFGQGIMLAARAGAILADMEFVQFHPTALSSPRRPLALVSEAVRGEGALLLNENGERFMAAVPGAELASRDIVARAIDREILRGGQVFLDARQALGSGFASRFPSIDLLCREAGIDPARELVPVRPAVHYHMGGVATDNKGRSSVRGLWVAGETACTGLHGANRLASNSLLEAAAMGMRAAQDIAGRPAPAARSAAAVSPNATADFSPADLAAVRPIVSRHLGIVRHAAGLAEAIRDLLPLAERNGPASDPAVVALSIAVFAALRRESRGAHFRDDFSQKDAKAMRRRLSLNDVVTVAHEFSSSSLATAGFARSA

SEQ ID NO: 33409 - DNA, 1737 bp, Anabaena sp
  CDS (1)..(1737): transl_table=11
gtgattacccattattcattacccattacccgttacccattacccagatttctaaccttgtcacaaatagagtttcctagccaatttgatgttttagtggtcggtgctggtgcggctggactgtatacggcattgtgtctgccagaatccttacgagtcggcttgattaccaaagaaactgttgctttatctgctagtgattgggcgcagggtggtatagctgctgcgatcgcccctaatgattctccttctctacatattgaagatacaattcaagcaggagcaggcttgtgtgatgttgcagccgtagaatttctggctcaacaagcccccaaatgtatcgaatctttggttaacttgggagttgcttttgaccgacacggacaagctttagcattaactttagaagctgcccattctcgtaaccgtgttcttcacgccgccgacactacaggtagggaagtcacaactactctcacggatcaagtattacgtcgtcccaatatccaagtaattcagcaagctttggctttgagtctttggctggaaccagaaactggtcattgtcaaggaatcagcctgttttatcaaggtgcaattacatgggtcagggctggggctgtagtcctggcgactggtggcggtggtcaagtatttgcccaaaccacaaacccggcggtcagtactggcgatggagttgcaattgcatggcgggctggggctattctccgggacttagaatttgtccaatttcaccccacagccttaactaaaccaggtgcagaccgtttcctgattagtgaagcagtccgtggtgaaggcgcacacctagtagataatgaagggcggcgatttgcttttgactatcacccggctggagaattagcacccagagacgttgtgagtcgggctatatttagtcatttacaacgcactgctgtcgatcctgccacagcccatgtgtggttggatatgcgccccatccccgaagacaagattcgtctccggtttcctaatattgttaaggtttgtcagcgttggggtatagatgttttccgcgaaccaattcctgtagccccagccgcccattattggatgggtggtattgccaccaatttaaagaatcaaactaatatacctggattgtatgcagtgggagaaaccgctagtacaggtgtacatggtgctaatcgtttagcaagtaattcattgctggagtgtattgtctttggcgcgcaactagcaaatctcacgccagcagatttgatacagcatacagaaacaccagccttacccacaagagaatttaagattgatgccagcgagtggcaacaccagcaatcacaattagccatactgcgagaaaagttaccgcgtctagtttggcaaagcgctggtatttgtcgagaacagtctactttatctgtggcgatcgctactgtaaaatcttggcaacaggattttgcagcgctgcctttaagccaatttttgttatctctacaaccaaacgagccagttagctgtaatttttcagataccgaccaacaactacgactctgggcagaaacaggcaatttactcgatgttgcctatttaatactcaaaagcgctgcttttagaattgaaagccgtggcggacacttccgtttagactatccccactcaaatcctgattggcaagtccactctctagtacaaaagcaccaatggtggcaatctccgattatgaaatcttaa

SEQ ID NO: 33410 - protein, 578 aa, Anabaena sp
MITHYSLPITRYPLPRFLTLSQIEFPSQFDVLVVGAGAAGLYTALCLPESLRVGLITKETVALSASDWAQGGIAAAIAPNDSPSLHIEDTIQAGAGLCDVAAVEFLAQQAPKCIESLVNLGVAFDRHGQALALTLEAAHSRNRVLHAADTTGREVTTTLTDQVLRRPNIQVIQQALALSLWLEPETGHCQGISLFYQGAITWVRAGAVVLATGGGGQVFAQTTNPAVSTGDGVAIAWRAGAILRDLEFVQFHPTALTKPGADRFLISEAVRGEGAHLVDNEGRRFAFDYHPAGELAPRDVVSRAIFSHLQRTAVDPATAHVWLDMRPIPEDKIRLRFPNIVKVCQRWGIDVFREPIPVAPAAHYWMGGIATNLKNQTNIPGLYAVGETASTGVHGANRLASNSLLECIVFGAQLANLTPADLIQHTETPALPTREFKIDASEWQHQQSQLAILREKLPRLVWQSAGICREQSTLSVAIATVKSWQQDFAALPLSQFLLSLQPNEPVSCNFSDTDQQLRLWAETGNLLDVAYLILKSAAFRIESRGGHFRLDYPHSNPDWQVHSLVQKHQWWQSPIMKS

SEQ ID NO: 33411 - DNA, 1533 bp, Aquifex aeolicus
  CDS (1)..(1533): transl_table=11
atgaactactttctaaggtttgatacttctcttttacctgaagaagaagcgaaagttctaatatgcgggagcggtatcggaggtcttgctaccgcaatttctctaaaagaactcgggattgaacctctaatcttaacgcgaggtatcgggaacacttactattcccagggtgggatagccgctgcagtgctccccgatgacagcccttaccttcactactgtgataccctgagggccggaaggtacttaaaccacgaactccatacaaaactcctaacctacgaaggcatcttcaggatacttgatttagaaagatggggtgtagattttgataagaaaaacggattttacgagactactctggagggagggcactcaaaacccagagtgttgaaagtaaaagactacacgggaagggagatatatacgaaactcttgaaaaagacggaagaactaggaataaaaatccttcacggagaacttcaggaaataataattgaggagaatggggttcagggggtaatttactccgaagaaggtagtctaaagttcatacgcacacccctcctaattctggcaacgggcggtgccgcgtctatgtactactacacttctaaccctaagaaagtcaggggagatgcgataggaatcgctttcagaatgggggctaccgttaagaaccccgaatttgtccagttccaccccacggtcctgaagggaacgaacttactgatatccgaggcggttaggggagagggtgcaattctcgtgaacgacaggggagagaggtttgtaaacgagctcctcccgagagatgaagttgcaagagctatatataaccagataaaacggggaagggaggtttacttagacctgagacccgttgcacaaaagggtattaagatagaggagcgtttcccgactatatacagctttttaagggaaagagggtacgacccctacagagagcccgtgcctattatcccagcagcccactactatataggcggtatagaggtagacgacagaggaagaacctcaatacaaggtttgtacgcggtgggtgagtgcagttgtacgggaattcatggggcaaacagactcgcttccaactctctcctggaaggtgtggttttcggtcacaggacagcctatcaggtttacttagatttaaaaattttaaaaccctcaaaagtgaactttcgctctgagagagcaggaagtgataagccgaacttgggtatagaagagctaaaaaaactcatgtggaattacgtaggtcttgaaagggacgaagaggggttaacttacgtaaaaaaacgaattcttagtgtgctttcacaggcaaaacactgggaacctacaccgcaaaacaggcaactttacgacatactcctcgtggctctttgcaccgttgaaggagcactcatgagaaaggaaagcaggggagtacactacaggaaggactaccctacagaaagggaagtttacagaagggacacaataataacgagggacctttttgagctttag

SEQ ID NO: 33412 - protein, 510 aa, Aquifex aeolicus
MNYFLRFDTSLLPEEEAKVLICGSGIGGLATAISLKELGIEPLILTRGIGNTYYSQGGIAAAVLPDDSPYLHYCDTLRAGRYLNHELHTKLLTYEGIFRILDLERWGVDFDKKNGFYETTLEGGHSKPRVLKVKDYTGREIYTKLLKKTEELGIKILHGELQEIIIEENGVQGVIYSEEGSLKFIRTPLLILATGGAASMYYYTSNPKKVRGDAIGIAFRMGATVKNPEFVQFHPTVLKGTNLLISEAVRGEGAILVNDRGERFVNELLPRDEVARAIYNQIKRGREVYLDLRPVAQKGIKIEERFPTIYSFLRERGYDPYREPVPIIPAAHYYIGGIEVDDRGRTSIQGLYAVGECSCTGIHGANRLASNSLLEGVVFGHRTAYQVYLDLKILKPSKVNFRSERAGSDKPNLGIEELKKLMWNYVGLERDEEGLTYVKKRILSVLSQAKHWEPTPQNRQLYDILLVALCTVEGALMRKESRGVHYRKDYPTEREVYRRDTIITRDLFEL

SEQ ID NO: 33413 - DNA, 1596 bp, Bacillus subtilis
  CDS (1)..(1596): transl_table=11
atgtctaaaaagacgattgcagtcatcggttcaggggcggcggcactttccttagctgcagctttcccgccctcatacgaagtgactgttatcacaaaaaaaagcgtcaaaaacagcaattctgtctatgcacaaggcgggattgctgcggcctatgcaaaagatgactcgattgaagcccatctggaggatacgttatacgcagggtgcggccataataatctagctattgtagcagacgtattacatgatggaaaaatgatggttcaaagcctattggagcgtggatttccattcgaccgcaatgaacgaggcggtgtttgtcttggaagagaaggggcccactcatacaaccgcatatttcatgcaggcggagacgcaacaggcaggctgcttatcgattatttgctcaaacggatcaacagcaaaatcaagttaatcgagaatgaaacggcagcagatttgcttatagaggacggacgatgtatcggcgtcatgacaaaagacagcaaagggcggctcaaggtaaggcacgcagacgaagttgtgctggctgccggcggctgtggaaacctgtttcttcaccatacgaatgatctcactgtcacaggtgacggtctttctctggcttaccgggccggggcggaattaacggatttggagtttactcagtttcacccgacactgcttgtgaaaaatggtgtttcctacgggcttgtttcagaagctgtcagaggggaaggcggatgtttagtagacgaaaacggccgcaggattatggctgaacggcatcctttaggtgacctggctccaagagatattgtctcacgggttattcacgaagaaatggcaaaaggaaatcgcgtttatatagacttcagtgcgatttctgattttgaaacgcgtttccctaccatcaccgctatttgtgaaaaagcagggattgatatccacagcggaaaaattcctgttgctccgggaatgcatttcttaatgggaggtgtttcagttaatcgctggggagaaacgacagtgccggggctttatgcgattggcgagacagcatgctccggtttacatggagcaaaccggcttgcaagcaattctttattggaagcgctggtatttggaaaaagggcagcagagcatattatccaaaaaccggtttataacaggcaatatcaatcagggctagaaaccagtgtcttctacgaggtgccggatatagaggggcatgaactgcaaagcaaaatgacaagccacatgtctattctgcgggaacaaagcagtttgattgagcttagcatctggcttcatacgctgccttttcaggaagtaaatgtgaaggatatcacaattcggcagatggaactttctcatctatggcaaactgcaaagctgatgacgttttctgcgcttttgcgggaggaaagcagaggggctcacttccgcaccgattttcctcatgctgaggtgagctggcaaggaagacaaattgtccatacaaaaaaaggaacgaagatcagaaaaaacgaggggatttggaacaatgaatcatttacagctgaaaaaattactgaatcacttttttcttga

SEQ ID NO: 33414 - protein, 531 aa, Bacillus subtilis
MSKKTIAVIGSGAAALSLAAAFPPSYEVTVITKKSVKNSNSVYAQGGIAAAYAKDDSIEAHLEDTLYAGCGHNNLAIVADVLHDGKMMVQSLLERGFPFDRNERGGVCLGREGAHSYNRIFHAGGDATGRLLIDYLLKRINSKIKLIENETAADLLIEDGRCIGVMTKDSKGRLKVRHADEVVLAAGGCGNLFLHHTNDLTVTGDGLSLAYRAGAELTDLEFTQFHPTLLVKNGVSYGLVSEAVRGEGGCLVDENGRRIMAERHPLGDLAPRDIVSRVIHEEMAKGNRVYIDFSAISDFETRFPTITAICEKAGIDIHSGKIPVAPGMHFLMGGVSVNRWGETTVPGLYAIGETACSGLHGANRLASNSLLEALVFGKRAAEHIIQKPVYNRQYQSGLETSVFYEVPDIEGHELQSKMTSHMSILREQSSLIELSIWLHTLPFQEVNVKDITIRQMELSHLWQTAKLMTFSALLREESRGAHFRTDFPHAEVSWQGRQIVHTKKGTKIRKNEGIWNNESFTAEKITESLFS

SEQ ID NO: 33415 - DNA, 1623 bp, Escherichia coli O157
  CDS (1)..(1623): transl_table=11
  misc_feature (624)..(624): s is g or c
atgaatactctccttgaacattcatgtgacgtgttgattatcggtagcggcgcagccgggctttcactggcgctacgcctggctgaccagcatcaggtcatcgttctaagtaaaggcccggtaacggaaggttcaacattttatgcccagggcggtattgccgccgtgtttgatgaaactgacagcattgactcgcatgtggaagacacattgattgccggggctggtatttgcgatcgccatgcagttgaatttgtcgccagcaatgcacgatcctgtgtgcaatggctaatcgaccagggggtgttatttgatacccacattcagccgaatggcgaagaaagctaccatctgacccgtgaaggtggacatagtcaccgtcgtattcttcatgccgccgacgcaactggtagagaagtagaaaccacgctggtgagcaaggcgctgaaccatccgaatattcgcgtgctggagcgcagcaacgcggttgatctgattatttctgacaaaattggcctgccgggcacgcgacgggttgttggcgcgtgggtatggaaccgaaataaagaaaaggtggaaacctgccacgcaaaagcggtggtgctggcaaccggcggtgcgtcsaaggtttatcagtacaccaccaatccggatatttcttctggcgatggcattgctatggcgtggcgcgcaggctgccgggttgccaatctcgaatttaatcagttccaccctaccgcgctgtatcacccacaggcacgcaatttcctgttaacggaagcactgcgcggcgaaggcgcttatctcaagcgcccggatggcacgcgttttatgcccgattttgatgtgcgcggcgaactggccccgcgcgatattgtcgcccgcgccattgaccatgaaatgaaacgcctcggcgcagattgtatgttccttgatatcagccataagcccgccgattttattcgccagcattttccgatgatttatgaaaagctgctcgggctggggattgatctcacacaagaaccggtaccgattgtgcctgctgcacattatacctgcggtggtgtaatggttgatgatcatgggcgtacggacgtcgagggcttgtatgccattggcgaggtgagttataccggcttacacggcgctaaccgcatggcctcgaattcattgctggagtgtctggtctatggctggtcggcggcggaagatatcaccagacgtatgccttatgcccacgacatcagtacgttaccgccgtgggatgaaagccgcgttgagaaccctgacgaacgggtaataattcagcataactggcacgagctacgtctgtttatgtgggattacgttggcattgtgcgcacaacgaagcgcctggaacgcgccctgcggcggataaccatgctccaacaagaaatagacgaatattacgcccatttccgcgtctcaaataatttgctggagctgcgtaatctggtacaggttgccgagttgattgttcgctgtgcaatgatgcgtaaagagagtcgggggttgcatttcacgctggattatccggaactgctcacccattccggtccgtcgatcctttctcccggcaatcattacataaacagataa

SEQ ID NO: 33416 - protein, 540 aa, Escherichia coli O157
MNTLLEHSCDVLIIGSGAAGLSLALRLADQHQVIVLSKGPVTEGSTFYAQGGIAAVFDETDSIDSHVEDTLIAGAGICDRHAVEFVASNARSCVQWLIDQGVLFDTHIQPNGEESYHLTREGGHSHRRILHAADATGREVETTLVSKALNHPNIRVLERSNAVDLIISDKIGLPGTRRVVGAWVWNRNKEKVETCHAKAVVLATGGASKVYQYTTNPDISSGDGIAMAWRAGCRVANLEFNQFHPTALYHPQARNFLLTEALRGEGAYLKRPDGTRFMPDFDVRGELAPRDIVARAIDHEMKRLGADCMFLDISHKPADFIRQHFPMIYEKLLGLGIDLTQEPVPIVPAAHYTCGGVMVDDHGRTDVEGLYAIGEVSYTGLHGANRMASNSLLECLVYGWSAAEDITRRMPYAHDISTLPPWDESRVENPDERVIIQHNWHELRLFMWDYVGIVRTTKRLERALRRITMLQQEIDEYYAHFRVSNNLLELRNLVQVAELIVRCAMMRKESRGLHFTLDYPELLTHSGPSILSPGNHYINR

SEQ ID NO: 33417 - DNA, 1623 bp, Escherichia coli
  CDS (1)..(1623): transl_table=11
atgaatactctccctgaacattcatgtgacgtgttgattatcggtagcggcgcagccggactttcactggcgctacgcctggctgaccagcatcaggtcatcgttctaagtaaaggcccggtaacggaaggttcaacattttatgcccagggcggtattgccgccgtgtttgatgaaactgacagcattgactcgcatgtggaagacacattgattgccggggctggtatttgcgatcgccatgcagttgaatttgtcgccagcaatgcacgatcctgtgtgcaatggctaatcgaccagggggtgttgtttgatacccacattcaaccgaatggcgaagaaagttaccatctgacccgtgaaggtggacatagtcaccgtcgtattcttcatgccgccgacgccaccggtagagaagtagaaaccacgctggtgagcaaggcgctgaaccatccgaatattcgcgtgctggagcgcagcaacgcggttgatctgattgtttctgacaaaattggcctgccgggcacgcgacgggttgttggcgcgtgggtatggaaccgtaataaagaaacggtggaaacctgccacgcaaaagcggtggtgctggcaaccggcggtgcgtcgaaggtttatcagtacaccaccaatccggatatttcttctggcgatggcattgctatggcgtggcgcgcaggctgccgggttgccaatctcgaatttaatcagttccaccctaccgcgctatatcacccacaggcacgcaatttcctgttaacagaagcactgcgcggcgaaggcgcttatctcaagcgcccggatggtacgcgttttatgcccgattttgatgagcgcggcgaactggccccgcgcgatattgtcgcccgcgccattgaccatgaaatgaaacgcctcggcgcagattgtatgttccttgatatcagccataagcccgccgattttattcgccagcatttcccgatgatttatgaaaagctgctcgggctggggattgatctcacacaagaaccggtaccgattgtgcctgctgcacattatacctgcggtggtgtaatggttgatgatcatgggcgtacggacgtcgagggcttgtatgccattggcgaggtgagttataccggcttacacggcgctaaccgcatggcctcgaattcattgctggagtgtctggtctatggctggtcggcggcggaagatatcaccagacgtatgccttatgcccacgacatcagtacgttaccgccgtgggatgaaagccgcgttgagaaccctgacgaacgggtagtaattcagcataactggcacgagctacgtctgtttatgtgggattacgttggcattgtgcgcacaacgaagcgcctggaacgcgccctgcggcggataaccatgctccaacaagaaatagacgaatattacgcccatttccgcgtctcaaataatttgctggagctgcgtaatctggtacaggttgccgagttgattgttcgctgtgcaatgatgcgtaaagagagtcgggggttgcatttcacgctggattatccggaactgctcacccattccggtccgtcgatcctttcccccggcaatcattacataaacagataa

SEQ ID NO: 33418 - protein, 540 aa, Escherichia coli
MNTLPEHSCDVLIIGSGAAGLSLALRLADQHQVIVLSKGPVTEGSTFYAQGGIAAVFDETDSIDSHVEDTLIAGAGICDRHAVEFVASNARSCVQWLIDQGVLFDTHIQPNGEESYHLTREGGHSHRRILHAADATGREVETTLVSKALNHPNIRVLERSNAVDLIVSDKIGLPGTRRVVGAWVWNRNKETVETCHAKAVVLATGGASKVYQYTTNPDISSGDGIAMAWRAGCRVANLEFNQFHPTALYHPQARNFLLTEALRGEGAYLKRPDGTRFMPDFDERGELAPRDIVARAIDHEMKRLGADCMFLDISHKPADFIRQHFPMIYEKLLGLGIDLTQEPVPIVPAAHYTCGGVMVDDHGRTDVEGLYAIGEVSYTGLHGANRMASNSLLECLVYGWSAAEDITRRMPYAHDISTLPPWDESRVENPDERVVIQHNWHELRLFMWDYVGIVRTTKRLERALRRITMLQQEIDEYYAHFRVSNNLLELRNLVQVAELIVRCAMMRKESRGLHFTLDYPELLTHSGPSILSPGNHYINR

SEQ ID NO: 33419 - DNA, 1530 bp, Halobacterium salinarium
  CDS (1)..(1530): transl_table=11
atgaccgacgccaccaccaccgacgtactcgtacttggatcgggcatcgcggggtgtggggccgcgctggccgccgcccgcgagggcgcgagcgtgctcgtcgcgacgaaggcccaacagcccgctgacgccagcaccgactgggcacagggcggcatcgccaccacccgtgacgaccccgagtcgctgaaacgggacatcctggcggccggcgacggggaggccgaccccgaggccgtggacgcactcgtgggcgacgccgccgcggccgtcgaggacgtgctcgtggacacgctgggcgtgcccttcgatggcgaggaggggttcgactacgctcgggaggccgcccactcggcggcgcgcatcctgcacgtggacgccgccacgggccaccacatcctggggccgttcctccgacacctcgacgcccacgagaacgtcgacatgctggaggacgccgccgccctcgatctgatcaccgacgagggggcggtgaccggcgcgctgctcgaccgcaacccccgaacgggcgaccgcgccgagactggggtgccggtgttcgccggatcgacggtgctcgcgacgggcggcatcggcgacctctatcggcgctcgacgaacccgcgcggatcgacgggcgacggcgtcgcgatggccgcgctggccggggccgacgtcaccgacgccgagtacgtccagttccatccgaccgcctacgacgacgccgacccgttcctggtctcggaggcggtgcggggcgagggcgcgctcctgcggaacgccgacggcgagcggttcatgccggactaccacgaggacgccgagctcgcgccccgcgacgtggtcgcgcgtgccgtggcagccgaacgggacgccacgggcgaggtcaggctggacgtctccccgctcgcgttcgccgaggagttccccgggctggcggaggcctgcgcggaccgcggcgtcgactgggagaccggcatcccggttgcgccctgcgagcacttcctttgtggcggcgtggccgtcgacacggtgggacggacgagcctcgaccggctgttcgcggtcggcgagtgcgcccgcacgggcgtccacggcgcgaaccggctggcgtccacgagcctgctcgaaggcctcgtttgggggttgcgcgccggcgagacggcggccggtgacgatcgcgcgccggcaccgagcgagccgcccgagctgcgggaccgcgaccccgaccttcccgacgggttcgccgccgagaagttccggcggctgcgccgcgtgatggacgaacacgtcggcctccggcgcaccggcgcggacctccagcgcgcgcagggcgtgctccgccggctcaaaggcgaggtcgattcgtacgcccgcacgcggacgagtcgtgacctctaccagctccggaacgccgccgtcgtcgggctgctgatcgcgcgggccgccggtgagaacccggagagcgccggctgccaccaccgcagcgacgaggctgccgccgaggaggcccccgatgccggtcactga

SEQ ID NO: 33420 - protein, 509 aa, Halobacterium salinarium
MTDATTTDVLVLGSGIAGCGAALAAAREGASVLVATKAQQPADASTDWAQGGIATTRDDPESLKRDILAAGDGEADPEAVDALVGDAAAAVEDVLVDTLGVPFDGEEGFDYAREAAHSAARILHVDAATGHHILGPFLRHLDAHENVDMLEDAAALDLITDEGAVTGALLDRNPRTGDRAETGVPVFAGSTVLATGGIGDLYRRSTNPRGSTGDGVAMAALAGADVTDAEYVQFHPTAYDDADPFLVSEAVRGEGALLRNADGERFMPDYHEDAELAPRDVVARAVAAERDATGEVRLDVSPLAFAEEFPGLAEACADRGVDWETGIPVAPCEHFLCGGVAVDTVGRTSLDRLFAVGECARTGVHGANRLASTSLLEGLVWGLRAGETAAGDDRAPAPSEPPELRDRDPDLPDGFAAEKFRRLRRVMDEHVGLRRTGADLQRAQGVLRRLKGEVDSYARTRTSRDLYQLRNAAVVGLLIARAAGENPESAGCHHRSDEAAAEEAPDAGH

SEQ ID NO: 33421 - DNA, 1584 bp, Mycobacterium leprae; identical to SEQ ID NO: 33107
  CDS (4)..(1584): transl_table=11

SEQ ID NO: 33422 - protein, 526 aa, Mycobacterium leprae
MAVPDWKHAADVVVIGTGVAGLAAALAAHRAGRNVVVLTKADQRRGETATHYAQGGIAVVLPGSDDSVDAHASDTLAAGAGMCNLDTVYSIVAEGYHAVTELVGYGARFDESIPGRWAVTCEGGHSRRRIVHAGGDATGAEVQRALDHAADVLDIRTSHLALRVLHDGTVVNGVSVLNPNGWGIVSAPSVILASGGLGHLYGATTNPEGSTGDGIALALWAGVAVSDLEFIQFHPTMLFAAGTGTGGRRPLVTEAIRGEGAILLDSKGNSVTSGVHPLGDLAPRDVVAAAIDARLKATGDSCVYLDARGIDGFASRFPTVTAACRTVGIDPAREPIPVVPGAHYSCGGIVTDAYGQTELAGLFAAGEVARTGMHGANRLASNSLLEGLVVGGRAGRAAAAHAAAAGRAYVSKLEPVTHHALKRRELQRVMSRDAAVMRNAAGLQRLSDTLAEAPIRHVTGRRDFEDVALTLTARAVAAAALARNESRGCHHCTEYPDTAPEHARSTVIRLADDQNLVRAEALATVG

SEQ ID NO: 33423 - DNA, 1617 bp, Pseudomonas aeruginosa
  CDS (1)..(1617): transl_table=11
atgagccaacattatcaacacgatgtactggtcatcggcagcggcgccgccggcctgagtctggccttgacccttccggaacacctgcgcatcgccgtcctcagcaagggcgaactgtcgcagggctcgacctactgggcccagggcggcgtggccgccgtgctggacgataccgacaccgtggaatcccacgtcgaggacaccctggtcgccggtggcggcctgtgccgcgaggatgcggtgcgcttcaccgtggagcatagccgcgaagcgatccagtggctgatcgaacagggggtgcccttcacccgcgacgagcagcacaaccacgaggaaggcagcttcgaataccacctgacccgcgaaggcgggcacagccaccggcgcatcatccatgccgccgacgccaccggcgccgcgatcttcaataccttgctggcccaggcccggcggcgaccgaacatcgagttgctgtcgcagcgggtggcggtcgacctgatcaccgagcgcaagctaggcctgccgagcaagcgctgcctgggcgcctacgtgctgaatcgggaaagcggcgaagtcgataccttccgtgcccgcttcagcgtgctggcctccggtggcgcgagcaaggtctacctttataccagcaatcccgacggcaactccggcgacggcatcgccatggcctggcgcgccggctgccgggtcggcaacctggagttcaaccagttccacccgacctgcctgtaccacccgcaggccaagagtttcctcatcaccgaggcattgcgcggcgaaggcgccctgctccgcctgcccaatggcgagcgtttcatgccgcgcttcgacccgcgtggcgagctggcgccccgagacatcgtggcccgcgccatcgaccatgaaatgaagcgtctggggatcgactgtgtctacctggacatcagccacaagccggccgagttcatcaaggcgcacttccccaccgtctacgagcgctgcctggacttcggcatcgacattacccagcaaccgatcccggtagtgccggccgctcactatacctgcggcggcgtgctcgtcgaccagcacgggcataccgacgtgccgggcctctacgccatcggcgaaaccaccttcaccggcctgcacggcgccaaccgcatggccagcaattcgctgctggaatgcttcgtctatgcccgttctgccgccgccgacatgctccagcgcctgcccggcacgcccgtgccggaaagcctgccgagctgggacgccagccaggtcaccgactccgacgaggacgtgatcatcgcgcacaactgggacgaactgcggcgtttcatgtgggactacgtcggtatcgtgcgcaccaacaagcgcctgcagcgcgcccagcaccgggtacgcctgctgctcagcgagatcgacgagttctacagcaactacaaggtcagccgcgacctgatcgagttgcgcaacctggcactggtcgccgaactgatcatccgctcggccatgcaacgccgcgaaagccggggcctgcactacacgctggattatccggacctgctgcccgaagcccgcgacactatcctggtgccgcccatctacggcgactga

SEQ ID NO: 33424 - protein, 538 aa, Pseudomonas aeruginosa
MSQHYQHDVLVIGSGAAGLSLALTLPEHLRIAVLSKGELSQGSTYWAQGGVAAVLDDTDTVESHVEDTLVAGGGLCREDAVRFTVEHSREAIQWLIEQGVPFTRDEQHNHEEGSFEYHLTREGGHSHRRIIHAADATGAAIFNTLLAQARRRPNIELLSQRVAVDLITERKLGLPSKRCLGAYVLNRESGEVDTFRARFSVLASGGASKVYLYTSNPDGNSGDGIAMAWRAGCRVGNLEFNQFHPTCLYHPQAKSFLITEALRGEGALLRLPNGERFMPRFDPRGELAPRDIVARAIDHEMKRLGIDCVYLDISHKPAEFIKAHFPTVYERCLDFGIDITQQPIPVVPAAHYTCGGVLVDQHGHTDVPGLYAIGETTFTGLHGANRMASNSLLECFVYARSAAADMLQRLPGTPVPESLPSWDASQVTDSDEDVIIAHNWDELRRFMWDYVGIVRTNKRLQRAQHRVRLLLSEIDEFYSNYKVSRDLIELRNLALVAELIIRSAMQRRESRGLHYTLDYPDLLPEARDTILVPPIYGD

SEQ ID NO: 33425 - DNA, 1542 bp, Rhizobium loti
  CDS (1)..(1542): transl_table=11
atgacggcggacatccatcacattggcggagcgccggtcattatcggcgctggtatcgccgggctcatgacggcgctacacttggcgccgcaaccagtcgtccttctgtcaaggacctcgctcggaaccgaagcctcgagcattctagcccagggcgggctcgcagcgagtctgggggaggacgacagccccgacctgcacctcgccgatacgcttgctgccggcgaagggctttgtgacgaacaaatggccaggcgggtggtagaggccgcacctcaagccgtcgagaatctcattcgtcttggtactcctttcgaccgctcgctagacgggaggctgcagctgggcctggaagctgcgcattcgcgtcgccgcatcgtgcacgccgccggcgacgcaaccggccgcgagttgtttcgggcgctactcggcgtggcgcggcgaacccgttcgatcacgatcatggaaggcatgacagcgcttcgcttggttgtcgcagagggcagcattgttggcttgctgactgtcctgcatggcgccgtgttcgcattgcccacacgccgcgtggtgctggcgaccggtggtataggcggcctgttttgcgatacaaccaatccgctctcctcattcgggcacggcctggcgcttgcagcctgtgctggagcggaactagccgatctcgaattcgtgcaattccacccgacggccctcgacattgcgcgccggccaatgccgcttgtcagcgaagcagtgcgtggcgaaggcgcggtgctgatcgatgagcacggccatcgcctcctggcagacacgcccggggcagaactcgcatcgcgcgatgtggtcgcgcgggcgatctccgatcagctcgcagccgggcatggcgtctatctcgatgcccgacattgtctcgggcagaaattcgcaagacgctttccggcaatcgacgctatttgcaagcatgccggcatcgatccggcggtggaacccattcccgtacggcccgctgctcactatcacatgggcggcgtggccgttgacgccgaggggcgaacttccgttagcggcctgtgggcctgtggcgaagtcgcatgcacaggactgcatggcgccaaccggcttgccagcaactcgctgaccgaagcggttgcaaccgccgcctgggtggctgaaagcgtcgcgggtacctctgcgggttggcagtggcctaggcttccggcaactgttcccatccggcccgacccttcacctattcgcacgattgtgtccaatgcgcttggcattgttcggaatgggaaatcattgtgcgacacggtcgcgacactgctgccgatctctgtttgcgagacggccgcggccgatccggccctggtggcattgttgatggcgatcgccgcccttcggcgcgaggagagccgcggctcccactttcgatccgatttccccgggcgcgatgccgccgccctcccctcacgattgacgctctgcacagcttttgagaatgccgtcacgctcagatggcaagcatccgaacggagccgttga

SEQ ID NO: 33426 - protein, 513 aa, Rhizobium loti
MTADIHHIGGAPVIIGAGIAGLMTALHLAPQPVVLLSRTSLGTEASSILAQGGLAASLGEDDSPDLHLADTLAAGEGLCDEQMARRVVEAAPQAVENLIRLGTPFDRSLDGRLQLGLEAAHSRRRIVHAAGDATGRELFRALLGVARRTRSITIMEGMTALRLVVAEGSIVGLLTVLHGAVFALPTRRVVLATGGIGGLFCDTTNPLSSFGHGLALAACAGAELADLEFVQFHPTALDIARRPMPLVSEAVRGEGAVLIDEHGHRLLADTPGAELASRDVVARAISDQLAAGHGVYLDARHCLGQKFARRFPAIDAICKHAGIDPAVEPIPVRPAAHYHMGGVAVDAEGRTSVSGLWACGEVACTGLHGANRLASNSLTEAVATAAWVAESVAGTSAGWQWPRLPATVPIRPDPSPIRTIVSNALGIVRNGKSLCDTVATLLPISVCETAAADPALVALLMAIAALRREESRGSHFRSDFPGRDAAALPSRLTLCTAFENAVTLRWQASERSR

SEQ ID NO: 33427 - DNA, 1599 bp, Rhizobium meliloti
  CDS (1)..(1599): transl_table=11
atgctgaccgaccatttccgcccgcagtccttcaacgggatcgatgacatcgtcatcgtcggcggcggccttgccgggcttttctgcgcgctgaaactggcgccgcgtcccgtcacgatccttgccgccgcgccgatcggctacggcgcctcctcggcctgggcgcaaggcgggatcgccgcggcgatgagcaagggcgatacattcgagaagcatgtcgcagacaccgtcgcggccggtgccggtatcgtcgacgagaagatgacgcgcatgatggtcgcagagggcccggcccgcatccacgacctgctcgaattcggggttcccttcgaccgcgaccttgagggaaagctcctgctttcgcgggaagccgcgcattccgagcggcgcatcgtccgcgtcaagggcgacatggccggcaagtcgatcatggaggcgctgattgccgcggtgcgcaataccccgtcgatccgggtgatcgagggctatgtggtcgaggaactggtgcgcgagggccggttcatctccggcgtgatcgcgcggccggatgccggccagtcgaagagccgcgtttccttcccggcccgcgccgtcgttctttgctcgggcggcgtcggccatctctatgccgtcaccaccaatccatgggaagcatgcggccagggcgtcggcatggcggcgcgggcgggcgccatcattgccgatcccgagttcgtccagtttcatccgaccgcgatagacatcggcaaggacccggcgccgcttgcgaccgaggcgttgcgcggcgatggcgccaccctgatcaactcggaaggccgccgtttcatgctcgacatccatcccgatggagagctcgcgccgcgcgatatcgtttcgcgtggcgtctttgcggaggttcaagccggacgcggcgccttcctcgattgcacaaaggccgtcggcaggcatttccctgagatgttcccgaccgtctacgcctcgtgcatggcagcgggcatcgatccggtgaggcagccgatccccgtcacgcctgccgtgcactaccacatgggcggcgtgctgacggacggggaagggcggacctccatcgacggcctatgggcggcgggcgaagtgacatcgaccggcgttcacggcgcgaaccgccttgcctcgaattcgctgctggaggcggtcgtcttcgcggcgcggatcgcggaaaatatcaagggcagcttgccggccccgaagctgaccgcatggggcgacaatgccggcgagaacgacgatcccgtgacggtcgaggacagcccgcctttcaaggtgctgcggcaattgatgagcgactgcgtcggggtcgtgcgtacgcgcgaaagcctgacccgcgcgatccgggggattgcggaactcgagcggacgaacaagcgcctgcgcttcgccaatatcgctaccacggccaagctcatcgcgatcgccgcgctccagcgcacggaaagccgcggcggtcattttcgggccgattgcccggacgagcggccggaatggcggcgccggacctacctgacgctcgcccaggcggagcgtctggccgcggaggtggccgagagcgagccggcatga

SEQ ID NO: 33428 - protein, 532 aa, Rhizobium meliloti
MLTDHFRPQSFNGIDDIVIVGGGLAGLFCALKLAPRPVTILAAAPIGYGASSAWAQGGIAAAMSKGDTFEKHVADTVAAGAGIVDEKMTRMMVAEGPARIHDLLEFGVPFDRDLEGKLLLSREAAHSERRIVRVKGDMAGKSIMEALIAAVRNTPSIRVIEGYVVEELVREGRFISGVIARPDAGQSKSRVSFPARAVVLCSGGVGHLYAVTTNPWEACGQGVGMAARAGAIIADPEFVQFHPTAIDIGKDPAPLATEALRGDGATLINSEGRRFMLDIHPDGELAPRDIVSRGVFAEVQAGRGAFLDCTKAVGRHFPEMFPTVYASCMAAGIDPVRQPIPVTPAVHYHMGGVLTDGEGRTSIDGLWAAGEVTSTGVHGANRLASNSLLEAVVFAARIAENIKGSLPAPKLTAWGDNAGENDDPVTVEDSPPFKVLRQLMSDCVGVVRTRESLTRAIRGIAELERTNKRLRFANIATTAKLIAIAALQRTESRGGHFRADCPDERPEWRRRTYLTLAQAERLAAEVAESEPA

SEQ ID NO: 33429 - DNA, 1623 bp, Salmonella typhi
  CDS (1)..(1623): transl_table=11
atgatgacaactcctgaactgtcctgtgatgtgttaattatcggcagcggcgcggccggactctcgctggcgctgcgtctggctgaaaagcataaggttatcgtcctgagtaaagggccggtgagcgagggctccacgttttatgcacagggcggtattgccgccgtgtttgatgaaaccgacagcattgcatcgcatgtcgaagatacgctgattgccggcgccggaatttgcgatcgccacgcggtggagtttgtcgccagcaacgctcgtacctgcgtgcagtggcttatcgatcagggcgtcctgtttgatacgcatgtccagccaaacggcaaggagagctatcatctcacgcgtgaaggcggccatagccatcgccgtatccttcatgccgccgacgctaccggaaaggaagtcgaaaccacgttggtcagtcgggcacaaaatcatcctaatattcaggtgctggaacgcagcaacgccgttgatttaattatctccgataaaataggtctgccggggcctcgccgggtcgtcggcgcctggatctggaatcgcaataaagagtgggttgaaacctgtcatgcgaagtcggtggtgctggcgaccggcggcgcctcaaaggtgtatcaatataccactaacccggatatttcctccggtgacggtatcgcgatggcctggcgcgcgggctgtcgggtcgctaatctggaatttaaccagtttcatcccactgccctttatcacccgcaggcgcgtaattttctccttaccgaagcgctgcgcggcgaaggcgcataccttaaacgtccggacggttcacggtttatgccggacgttgacgaacgcggcgaactggcgccgcgcgatattgtcgcccgcgctattgatcatgagatgaaacgactcggcgcagactgtatgtttctcgatatcagccacaagcctgacgattttgtccgccagcacttcccgatgatctatgcgaaactgctcgatttggggatggatttaaccaaagaaccgattcccattgttcctgccgcgcactatacctgcggcggcgtggtcgtcgatgattatggtcgtaccgatgtagacggcttatatgccattggcgaagtcagttacaccggtctgcacggcgctaaccgtatggcgtccaactcgttactggaatgcttagtgtacggctggtccgcggcaatggatatcgacaggcgaatgccttctgtccacagcgttgacgtccttcccgcctgggatgaaagccgcgtggagaacgccgatgagcgggtggtgattcagcataactggcacgaactgcgtctgctgatgtgggactatgtggggattgtgcgcacgacgaaacggctggagcgcgccctacggcgtattactatgttgcaacaagagattgacgaatattacgccaactttcgcgtctcgaataatttactggagctgcgcaatctggtgcaagtggccgaactgattgtgcgttgcgcgatgatgcgtaaagagagccgggggctgcactttacgctggattatccgcaacaactggctgaatcaggcccatcgatcctttcgccgttaacgcctcacataaacagataa

SEQ ID NO: 33430 - protein, 540 aa, Salmonella typhi
MMTTPELSCDVLIIGSGAAGLSLALRLAEKHKVIVLSKGPVSEGSTFYAQGGIAAVFDETDSIASHVEDTLIAGAGICDRHAVEFVASNARTCVQWLIDQGVLFDTHVQPNGKESYHLTREGGHSHRRILHAADATGKEVETTLVSRAQNHPNIQVLERSNAVDLIISDKIGLPGPRRVVGAWIWNRNKEWVETCHAKSVVLATGGASKVYQYTTNPDISSGDGIAMAWRAGCRVANLEFNQFHPTALYHPQARNFLLTEALRGEGAYLKRPDGSRFMPDVDERGELAPRDIVARAIDHEMKRLGADCMFLDISHKPDDFVRQHFPMIYAKLLDLGMDLTKEPIPIVPAAHYTCGGVVVDDYGRTDVDGLYAIGEVSYTGLHGANRMASNSLLECLVYGWSAAMDIDRRMPSVHSVDVLPAWDESRVENADERVVIQHNWHELRLLMWDYVGIVRTTKRLERALRRITMLQQEIDEYYANFRVSNNLLELRNLVQVAELIVRCAMMRKESRGLHFTLDYPQQLAESGPSILSPLTPHINR

SEQ ID NO: 33431 - DNA, 1623 bp, Salmonella typhimurium
  CDS (1)..(1623): transl_table=11
atgatgacaactcctgaactgtcctgtgatgtgttaattatcggcagcggcgcggccggactctcgctggcgctgcgtctggctgaaaagcataaggttatcgtcctgagtaaagggccggtgagcgagggctccacgttttatgcgcagggcggtattgccgccgtgtttgatgaaaccgacagtattgcgtcgcatgtcgaagatacgctgattgccggcgccggaatttgcgatcgccacgcggtggagtttgtcgccagcaacgcccgtacctgcgtgcagtggcttatcgatcagggcgtcctgtttgatacgcatgtccagccaaacggcaaggagagctatcatctcacgcgtgaaggcggccatagtcatcgccgtatccttcatgccgccgacgctaccggaaaggaagtcgaaaccacgttggtcagtcgggcgcaaaatcatcctaatattcaggtgctggaacgcagcaacgccgttgatttaattatctccgataaaatgggtctgccggggcctcgccgggtcgtcggcgcctggatctggaatcgcaataaagagtgggttgaaacctgtcatgcgaagtcggtggtgctggcgaccggcggcgcctcaaaggtttatcaatataccactaacccggatatttcctccggtgacggtatcgcgatggcctggcgcgcaggctgtcgggtcgctaatctggaatttaaccagtttcatcccaccgccctttatcacccgcaggcgcgtaattttctccttaccgaagcgctgcgtggcgaaggcgcataccttaaacgtccggacggttcacggtttatgccggacgttgacgaacgcggggaactggcgccgcgcgatattgtcgcccgcgctattgaccatgagatgaaacaactcggcgcagactgtatgtttctcgatatcagccacaagcctgacgattttgtccgccagcacttcccgatgatctatgcgaaactgcttgatttggggatggatttaaccaaagaaccgattcccgttgttcctgccgcacactatacctgcggcggcgtggtcgtcgatgattatggtcgtaccgatgtagacggcttatatgccattggcgaagtcagttacaccggcctgcacggcgctaaccgtatggcgtccaactcgttgctggaatgcttagtgtacggctggtccgcagcaatggatatcgacaggcgaatgccttctgtccacagcgttgacgcccttcccgcctgggatgaaagccgcgtggaaaacgccgatgagcgggtggtgattcagcataactggcatgaactgcgcctgctgatgtgggactatgtgggcattgtgcgcacgacgaaacggctggagcgcgccctacggcgtattaccatgttgcaacaagagattgacgaatattacgccaactttcgcgtctcgaataatttactggagctgcgcaatctggtgcaagtggccgaactgattgtgcgttgtgcgatgatgcgtaaagagagtcgggggctgcactttacgctggattatccgcaacaactggctgaatcaggcccatcgatcctttcgccgttaacgcctcacataaatagataa

SEQ ID NO: 33432 - protein, 540 aa, Salmonella typhimurium
MMTTPELSCDVLIIGSGAAGLSLALRLAEKHKVIVLSKGPVSEGSTFYAQGGIAAVFDETDSIASHVEDTLIAGAGICDRHAVEFVASNARTCVQWLIDQGVLFDTHVQPNGKESYHLTREGGHSHRRILHAADATGKEVETTLVSRAQNHPNIQVLERSNAVDLIISDKMGLPGPRRVVGAWIWNRNKEWVETCHAKSVVLATGGASKVYQYTTNPDISSGDGIAMAWRAGCRVANLEFNQFHPTALYHPQARNFLLTEALRGEGAYLKRPDGSRFMPDVDERGELAPRDIVARAIDHEMKQLGADCMFLDISHKPDDFVRQHFPMIYAKLLDLGMDLTKEPIPVVPAAHYTCGGVVVDDYGRTDVDGLYAIGEVSYTGLHGANRMASNSLLECLVYGWSAAMDIDRRMPSVHSVDALPAWDESRVENADERVVIQHNWHELRLLMWDYVGIVRTTKRLERALRRITMLQQEIDEYYANFRVSNNLLELRNLVQVAELIVRCAMMRKESRGLHFTLDYPQQLAESGPSILSPLTPHINR

SEQ ID NO: 33433 - DNA, 1743 bp, Streptomyces coelicolor
  CDS (1)..(1743): transl_table=11
gtgaccagcacaggcatacgactgcacgcccccgcgcccggctgggccatcgccgcggacgtggtggtcgtcggctccggcgtcgcgggcctcaccgcggccctgcgctgcgagtccgccggtctgcggaccgtcgtcgtcaccaaggcccgcctggacgacggctccacccgctgggcccagggcggcgtcgccgcggccctcggcgagggcgacacccccgagcagcacctggacgacaccctggtcgccggcgccggcctgtgcgaccaggatgcggtccgcatcctggtcaccgagggccccgacgccgtacgccggctcatcgcgaccggcgcgcacttcgacgagtccaccgagggcggcctggccctcacccgggagggcggccaccaccgccgccgcatcgcccacgcgggcggcgacgccacgggcgccgagatctcccgcgccctggtcgaggcggtacgcgcgcgagggctgcgcacggtggagaacgccctcgtcctggacctcctcacggacgccgagggccgtaccgcgggcgtcaccctgcacgtcatgggcgagggccagcacgacggtgtcggggcggtccacgcccccgcggtcgtcctcgccaccggcggcatgggccaggtcttctcggcgacgacgaacccctccgtctccacgggcgacggagtggccctcgccctgcgcgccggcgccgaggtgagcgatctcgagttcgtccagttccaccccaccgtcctcttcctgggctcggacgccgagggccagcagcccctggtctccgaggcggtacgcggcgagggcgcccacctggtcgacgcggacggcgtgcgcttcatgcagggccggcacgaactggcggaactggccccgcgggacatcgtcgcgaaggccatcacgcgccgcatgcaggagcacggcgccgaccacatgtacctggacgcccgccacttcggcaggacgatgtgggagcaccgcttccccacgatcctggccgcctgccgcgcccacggcatcgacccggtcaccgaaccggtcccggtcgccccggccgcccactacgcctcgggcggcgtccgcaccgacgcccacggccgtacgacggtccccggcctgtacgcctgcggagaggtcgcctgcacgggcgtgcacggcgccaaccgcctggcctccaactccctcctcgagggcctggtctacgccgaacgcatcgcggccgacatagcggccgcccacacggccggcaccctgcacgcgcgcgtaccggcccccctcccgcacccggaccactcgcaacacccgcgacaccccctcctccctcccgaggcgcgcctcaccatccagcggatcatgacggagggcgccggggtcctgcgctcggcggactccctcgcgcgcgcggccgaccggctgcacggcctccacgccgaggcccgcgaggccctgcacgagcacggcaagacctccgaacccggtgtcgacacctgggaggccaccaacctcctgtgcgtggcccgcgtcctggtcgccgcggcggcacggcgcgaggagacccgcggctgccactggcgcgaggaccacgcggaccgcgacgacaccacgtggcgccgccacgtcgtcgtacggctgaaccccgatcgcacgctcgccgtgcacaccacggacacgccagaattccccccgaccgtccacggcgcccagccgacgcaccgtccccaggagcagtga

SEQ ID NO: 33434 - protein, 580 aa, Streptomyces coelicolor
MTSTGIRLHAPAPGWAIAADVVVVGSGVAGLTAALRCESAGLRTVVVTKARLDDGSTRWAQGGVAAALGEGDTPEQHLDDTLVAGAGLCDQDAVRILVTEGPDAVRRLIATGAHFDESTEGGLALTREGGHHRRRIAHAGGDATGAEISRALVEAVRARGLRTVENALVLDLLTDAEGRTAGVTLHVMGEGQHDGVGAVHAPAVVLATGGMGQVFSATTNPSVSTGDGVALALRAGAEVSDLEFVQFHPTVLFLGSDAEGQQPLVSEAVRGEGAHLVDADGVRFMQGRHELAELAPRDIVAKAITRRMQEHGADHMYLDARHFGRTMWEHRFPTILAACRAHGIDPVTEPVPVAPAAHYASGGVRTDAHGRTTVPGLYACGEVACTGVHGANRLASNSLLEGLVYAERIAADIAAAHTAGTLHARVPAPLPHPDHSQHPRHPLLPPEARLTIQRIMTEGAGVLRSADSLARAADRLHGLHAEAREALHEHGKTSEPGVDTWEATNLLCVARVLVAAAARREETRGCHWREDHADRDDTTWRRHVVVRLNPDRTLAVHTTDTPEFPPTVHGAQPTHRPQEQ

SEQ ID NO: 33435 - DNA, 1638 bp, Yersinia pestis
  CDS (37)..(1638): transl_table=11
atgaaaccaactcttcttctgcacacatcatacgatatgcaatcatcatctgaacacattagcgatgtattgatcatcgggagtggcgctgctggcttgtctttagctctccgcctcgcgccacattgtaaagttaccgttctgagcaaagggcctcttaatgagggagccactttttatgctcagggaggtattgccgctgttttcgacgaaactgacagtatcagttcacatgtagatgacaccttaatcgccggtgccgggctttgtgacaaagaagccgttgaatttattgccagcaatgcccgctcttgtgtgcagtggctcattgatcaaggcgttctttttgatacagagaccagtgctaacggtgaagagcgctatcaccttacccgtgaaggtggtcatagccaccgccgtattctgcatacagcggatgctaccggtaaagaagtagaaactaccttagtgggtaaagcaagcaatcaccctaatatttcagtgaaagaacgctgcaatgctgtcgatcttatcacatcaaacaaaattggtttggcgggtaccaaacgcgtagtgggtgcttatgtctggaaccgtgagttagagaaagttgagactttccgcgccaaagccgtggttttggcgacaggcggcgcggctaaagtttatcaatacaccactaacccagatatttcgtctggtgatggtattgccatggcgtggcgtgccgggtgccgggtcgctaatttggaatttaaccaatttcatccaacctgtctcttccacccgcaagcacgtaattttttactgacagaagccttacgtggtgaaggtgcctaccttaaacgccctgatggcagccgtttcatgcttgattttgatccacgcggtgaacttgcgccacgtgatatcgttgcccgagccatcgaccatgaaatgaagcgcctcggtgctgattgcatgtatctggatatcagccataaacctactgatttcgtgatgcaacatttcccaatgatctatgaaaaactgctgtcattgggtatcgatctaactaaagaagctattccgattgtccccgcagctcattacacctgtggtggcgtaatggttgatcaacatgggcgtaccgatttagatgggttatatgcgattggtgaagtgagctacaccggcttacacggtgccaaccgcatggcctccaattccctgctcgaatgcctggtctatggctggtcagcagcagaagacattctgacacggctgccgacggccaaactggccaagcatctgccagattgggatgaaagccgcgttgataattctgacgaacgggttgtcattcagcataactggcatgagttgcgtttatttatgtgggattacgtcggcattgtccgtaccacaaaacgcttagagcgggctttacggcgcattaacacgttgcagcaagagattgatgaatattatgccaatttccgtatctccaataacctgctggagttacggaatctggtacaagtcgcggagttaatcgtgcgctgtgcgatggaacgtaaagagagccgtgggttgcactatacgcttgattaccctgatcaaatagaaaacccacagccaaccattctgcatccataa

SEQ ID NO: 33436 - protein, 533 aa, Yersinia pestis
MQSSSEHISDVLIIGSGAAGLSLALRLAPHCKVTVLSKGPLNEGATFYAQGGIAAVFDETDSISSHVDDTLIAGAGLCDKEAVEFIASNARSCVQWLIDQGVLFDTETSANGEERYHLTREGGHSHRRILHTADATGKEVETTLVGKASNHPNISVKERCNAVDLITSNKIGLAGTKRVVGAYVWNRELEKVETFRAKAVVLATGGAAKVYQYTTNPDISSGDGIAMAWRAGCRVANLEFNQFHPTCLFHPQARNFLLTEALRGEGAYLKRPDGSRFMLDFDPRGELAPRDIVARAIDHEMKRLGADCMYLDISHKPTDFVMQHFPMIYEKLLSLGIDLTKEAIPIVPAAHYTCGGVMVDQHGRTDLDGLYAIGEVSYTGLHGANRMASNSLLECLVYGWSAAEDILTRLPTAKLAKHLPDWDESRVDNSDERVVIQHNWHELRLFMWDYVGIVRTTKRLERALRRINTLQQEIDEYYANFRISNNLLELRNLVQVAELIVRCAMERKESRGLHYTLDYPDQIENPQPTILHP

SEQ ID NO: 33437 - DNA, 1938 bp, Oryza sativa
  CDS (1)..(1938)
atggcggctctgatgaacggctttgggagcctccaatgcaaggcgacggtgcatgtcgagaaagggcacatgcaagcatcggggatggccttcttctctcccgtcaacagatgcgcccaggttcatatctccagtattcctcatttcatcggcgcgaagtctgttagtgcttcccaacttcgaatgaggcacaaggtcgggtccatcagagcctctgcagcctcgtgcttgcaagatgaaacaacaaaatatttcgattttgtggtcattggcagcggtgttgctggcctaaggtatgctctggaagtgtctaagtacggctctgtcgccatcattaccaaagcagagcctcatgagagcaacacgaactacgcacaaggcggtgtcagcgcggttctatgcccctcagattctgtagagagccacatgcaagacaccattgtcgcgggggcttatctgtgtgatgaagagactgtcagggtagtatgcacagaaggaccggagcgtgtgaaggagctcattgccatgggagcttcatttgaccatggcgaggacggaaggctgcaccttgcaagggaaggtggacattctcacaacagaatagttcattctgctgatatgactggaagagagatcgagagagcactgcttcaagcagttgataatgatgataacatatctttgtttggccaccactttgccattgatttactcacctgtcagagtaatggtgaaatatattgctatggtgtggattcattggacgctgaaactcagaaggcaattcgtttcatctcgaaagtaacattgcttgcatctggaggagttggtcatatatacccctcaacgaccaatccaccggtagctactggggatggaattgcaatgtctcatcgtgcgcaggctgtaatatctaatatggagtttgtgcagttccacccaactgcactatcagatgagggtctcccaataaaaccagctacaagaagagagaatgcattcctcataacagaagcagtcagaggagatggaggaattctttataatcagtccatggagaggtttatgacttcgtatgatgaccgtgcagagttagcaccgagagatgtggtcgcaagaagcatagatgaccaactgaagaagaggggagaaaagtatgtcctcctggatatcagtcacaagccaagggaaaaggttcttgcccattttccaaacattgcagctgaatgcctgcgccacggtctcgacatcacacaacagccgatacctgttgttcctgcagctcattacatgtgtgggggtgtccgggctgggttgcagggggagacaaatgtgaaaggcctgtatgttgctggtgaggttgcatgcactggattgcacggtgctaatcggcttgcaagcaactcactgcttgaagcactggtgtttgctcggagagcagtgcagccttcaatagatcatatggtcgatgcagatgtcgatccttctttcgcgaagaaatgggctcgtcctgtgctgtctgtctcccttagggacagtatactatctgatatcattgagaagacaaagcaggccaggatggagcttcagtcaataatgtgggagtatgtcgggatagtgcggtcgacgaaccgcctgaagcacgcggaatggaagatcagtgatctggagtcagaatgggaggagttcttgttcaggagggggtggaagcctacaatggtgggggttgagacctgtgaaatgaggaacctcttctgctgcgcaaagctggttgtgaaaagtgctcttgcaaggcacgagagccgaggcttgcacttcaccgaagacttcccttacctggaggagagcaagaggaagcctacagtgatcttccctactcatatccaggagctgacatggagctcaaagccattgcagaagcagctgcagtgcaagtag

SEQ ID NO: 33438 - protein, 645 aa, Oryza sativa
MAALMNGFGSLQCKATVHVEKGHMQASGMAFFSPVNRCAQVHISSIPHFIGAKSVSASQLRMRHKVGSIRASAASCLQDETTKYFDFVVIGSGVAGLRYALEVSKYGSVAIITKAEPHESNTNYAQGGVSAVLCPSDSVESHMQDTIVAGAYLCDEETVRVVCTEGPERVKELIAMGASFDHGEDGRLHLAREGGHSHNRIVHSADMTGREIERALLQAVDNDDNISLFGHHFAIDLLTCQSNGEIYCYGVDSLDAETQKAIRFISKVTLLASGGVGHIYPSTTNPPVATGDGIAMSHRAQAVISNMEFVQFHPTALSDEGLPIKPATRRENAFLITEAVRGDGGILYNQSMERFMTSYDDRAELAPRDVVARSIDDQLKKRGEKYVLLDISHKPREKVLAHFPNIAAECLRHGLDITQQPIPVVPAAHYMCGGVRAGLQGETNVKGLYVAGEVACTGLHGANRLASNSLLEALVFARRAVQPSIDHMVDADVDPSFAKKWARPVLSVSLRDSILSDIIEKTKQARMELQSIMWEYVGIVRSTNRLKHAEWKISDLESEWEEFLFRRGWKPTMVGVETCEMRNLFCCAKLVVKSALARHESRGLHFTEDFPYLEESKRKPTVIFPTHIQELTWSSKPLQKQLQCK

SEQ ID NO: 33439 - DNA, 1893 bp, Oryza sativa
  CDS (1)..(1893)
atgtggcgcggctgcgtctcgcgtggcctcaggagcctctccaagggcaagggctcctcctcctccgcccccgtctccgccgccgctaggctcttctccaccgcctcgtcgtcgtacacggtggtggatcactcgtatgacgcggtcgtggtgggagccggcggcgcggggctccgtgcggcgatcgggctctccgagcacgggttcaacacggcttgcatcaccaagctcttccccacgcggtcgcacaccgtcgcggcgcagggtggcataaatgctgctcttggaaacatgacggaagatgactggagatggcatatgtatgacactgtcaagggtagtgattggcttggtgaccaggattctattcagtatatgtgcagagaagcaccaaaagcagttatagaacttgaaaactatgggttgccattttcaagaactgaagatggaaagatataccaacgggcctttggaggccagagcttagattttgggaaaggtgggcaggcctatcgatgtgcatgtgctgctgacagaacaggacatgctatgttacacactctgtatggtcaagcaatgaagcataatactcagttctttgtagaatattttgcgctagaccttatcatggacagtgaaggcacctgtcagggggttattgctttgaacatggaggatggcactcttcaccgtttccgtgctacaaatacaattctggccacaggaggttatggcagagcctacttctcagcaacctcagctcacacatgcactggagatggcaacgctatggttgcacgtgctggtttaccacttcaggaccttgagtttgtgcagttccatcctacaggcatttatggtgctggatgccttatcactgaaggttcccgtggtgaaggtggtatccttaggaacagtgaaggcgagcgtttcatggaacgatatgctcctactgcaaaagatcttgcttctcgagatgttgtttcaagatctatgacaatggaaatcagagaaggccgtggtgttgggccattgaaggaccacatctatctgcatcttaaccatctgcctccagaagttcttaaggagaggcttcctggtatttctgaaactgctgctatttttgctggtgttgatgtcaccaaggagcccattcctgtcttgcctactgtgcactataatatgggtgggatcccaacaaattaccatggagaggtagtgactatgaagggtgacaatcctgattctgttgttcctggtttgatggctgcgggagaagcagcatgtgcatctgttcatggtgcaaatcgtctgggtgcaaattcacttcttgacatagttgtttttggcagagcttgtgcaaacagggtagctgaaaccgctaagccaggtgagaagcagaaacctcttcaaaaaagtgctggagaaaagaccatagcctggttagacaagctgagaaatgcaaatggatcattgccaacttccaagatccgtctaaacatgcaacgtgttatgcaaaataatgctgctgtcttccgtacgcaagaaacactcgaggaaggttgcaaattgattaccaaggcatgggaaagttatcatgatgtgaagatcagtgaccggagtctcatatggaattcagatttgatagagaccattgagttggaaaatctcttgataaatgcatgcataaccatgcactcagcagaggctcggaaggaaagcagaggagctcatgctcgtgaagatttcacgaaaagagatgatgagcaatggatgaagcactcgctggggtactgggagaatgagaaggttcgcttggcatacaggccagtccacatgaacacattggacagtgaagttgagtcgttcccacccaaggcgcgtgtttattag

SEQ ID NO: 33440 - protein, 630 aa, Oryza sativa
MWRGCVSRGLRSLSKGKGSSSSAPVSAAARLFSTASSSYTVVDHSYDAVVVGAGGAGLRAAIGLSEHGFNTACITKLFPTRSHTVAAQGGINAALGNMTEDDWRWHMYDTVKGSDWLGDQDSIQYMCREAPKAVIELENYGLPFSRTEDGKIYQRAFGGQSLDFGKGGQAYRCACAADRTGHAMLHTLYGQAMKHNTQFFVEYFALDLIMDSEGTCQGVIALNMEDGTLHRFRATNTILATGGYGRAYFSATSAHTCTGDGNAMVARAGLPLQDLEFVQFHPTGIYGAGCLITEGSRGEGGILRNSEGERFMERYAPTAKDLASRDVVSRSMTMEIREGRGVGPLKDHIYLHLNHLPPEVLKERLPGISETAAIFAGVDVTKEPIPVLPTVHYNMGGIPTNYHGEVVTMKGDNPDSVVPGLMAAGEAACASVHGANRLGANSLLDIVVFGRACANRVAETAKPGEKQKPLQKSAGEKTIAWLDKLRNANGSLPTSKIRLNMQRVMQNNAAVFRTQETLEEGCKLITKAWESYHDVKISDRSLIWNSDLIETIELENLLINACITMHSAEARKESRGAHAREDFTKRDDEQWMKHSLGYWENEKVRLAYRPVHMNTLDSEVESFPPKARVY

SEQ ID NO: 33441 - DNA, 1905 bp, Glycine max
  CDS (1)..(1905)
atgtggcggtgcgtggctcgtgctattcgcgtaccagcttcggagagatccatacctaatcaccaaccacttagatctcacatttcaagatttttctctggtggtggtggtggtgggagctcctcgtacaacgtggtggatcacaagtacgatgcggtcgttgtgggcgctggcggcgcagggttgagagccgccattggactttcggagcatggcttcaacactgcttgcattacaaagctgttcccaactcgttcacacactgttgcagctcagggtggtataaatgctgcattgggaaatatgactgaagatgattggaggtggcacatgtatgacactgttaagggaagtgattggcttggggaccaagatgccatccaatatatgtgtagggaggcaccaaaagcagtcattgagcttgagaattatggattgccattttcacgaactgaagatggaagaatataccagcgtgcatttggtggtcagagcttgaacttcggaaaaggtggtcaggcatatcgttgtgcatgtgctgctgatcgaactgggcatgctttattgcacactctctatggccaagctatgaggcataatacccagttttttgtggaatattttgcattagatctattaatgaacagtgatggtacttgccaaggagtgattgccttgaatatggaggacggaacattacatcgtttccaagcttcttcaacaattttggccacagggggctatggcagagcatacttttctgcaacttcagcacatacatgcactggagatggcaatgccatggttgcacgtgctgggataccacttgaggatttagagtttgtacaatttcacccaactggcatatatggagctggctgccttatcacagaaggttctcgtggtgaaggtggaattcttaggaatagtgagggtgagagatttatggaacgatacgcacctactgcaaaggatcttgcatcaagagatgtagtttctaggtcaatgactatggaaatccgggaaggccgtggtgtaggacccctgaaagatcacatctatctccacttgaatcacttacccccagatgttcttaaggagaggctacctggtatctctgaaacagctgctatttttgctggtgtggatgttactaaggaacctattcctgttttgccaacagtgcattataacatgggtggtattcccacaaatcatcatggagaggtgattactattaaaggtgatgatcccgatgcagtagttcctggattaatggctgccggggaaacagcctgtgcttcagtccatggtgcaaataggcttggtgcaaattcacttcttgacattgttgtttttggtagagcttgtgcaaatagagtttcagaaatccaaaggccaggagagaaacaaaagcctttagagaaggatgctggtatgaaaacaattgcttggctggacaaattgagaaattcaaacgggtcgttgccaacttcaaaaattcggttaaatatgcaacgaataatgcaaaacaatgctgctgtgttccgtacacaagaaacgttagaagaaggttgtcaattaattgataaagcatgggagagctttcatgatgtcaagttgaaggatcgaagtttgatatggaactctgacttgattgagaccattgagttggaaaatcttctgataaatgcctgcatcaccatgcactctgctgaagcaagaaaagagagtagaggtgctcatgcccgtgaggacttcacaaaaagagatgatgagaaatggatgaaacatactttgggatattgggataatgagaaggtgcggttagattacaggccggtgcacatgaatacgttggatgatgaggtggaatcattccctcctaaagctcgtgtttattag

SEQ ID NO: 33442 - protein, 634 aa, Glycine max
MWRCVARAIRVPASERSIPNHQPLRSHISRFFSGGGGGGSSSYNVVDHKYDAVVVGAGGAGLRAAIGLSEHGFNTACITKLFPTRSHTVAAQGGINAALGNMTEDDWRWHMYDTVKGSDWLGDQDAIQYMCREAPKAVIELENYGLPFSRTEDGRIYQRAFGGQSLNFGKGGQAYRCACAADRTGHALLHTLYGQAMRHNTQFFVEYFALDLLMNSDGTCQGVIALNMEDGTLHRFQASSTILATGGYGRAYFSATSAHTCTGDGNAMVARAGIPLEDLEFVQFHPTGIYGAGCLITEGSRGEGGILRNSEGERFMERYAPTAKDLASRDVVSRSMTMEIREGRGVGPLKDHIYLHLNHLPPDVLKERLPGISETAAIFAGVDVTKEPIPVLPTVHYNMGGIPTNHHGEVITIKGDDPDAVVPGLMAAGETACASVHGANRLGANSLLDIVVFGRACANRVSEIQRPGEKQKPLEKDAGMKTIAWLDKLRNSNGSLPTSKIRLNMQRIMQNNAAVFRTQETLEEGCQLIDKAWESFHDVKLKDRSLIWNSDLIETIELENLLINACITMHSAEARKESRGAHAREDFTKRDDEKWMKHTLGYWDNEKVRLDYRPVHMNTLDDEVESFPPKARVY

SEQ ID NO: 33443 - DNA, 1884 bp, Brassica napus
  CDS (1)..(1884)
atgtggcgctgcgtctctcgtagccttcgtgctccttcctcaaggacctcactctctggatctcgcttttctagattcctctccaccgcttcccagacgggtgattacacgatagtggatcacacctatgacgcggtggttgtgggagctggtggtgctgggctaagggcggccattggattatctgagcatggatttaacaccgcttgcatcaccaagctcttccccacacgctcacacaccgtcgctgctcagggtggtattaatgctgcactgggaaacatgtctgaagatgactggagatggcacatgtatgatactgtcaaaggaagtgactggcttggtgatcaagatgccatccagtatatgtgtagagaggcaccaaaagcagtgattgaacttgagaactacggccttcccttttctcgtactgaagagggtaaaatctaccagcgtgcctttggtggtcagagtcttgactttggcaaaggtggtcaggcctatcgttgtgcttgtgctgcggatcggactgggcatgctctcttgcataccttatatggacaagctatgaagcataacacacagttctttgttgaatacttcgctctggattggctcatggcgagtgatggcacttgccagggtgtaattgcactaaacatggaagatggaacactccatcgtttccgctctgcacaaacaatcttggccactgggggttacggaagagcatacttctctgcaacctcagcacatacatgcacaggagatggcaatgccatggttgcacgtgctggtcttccactccaggacttggagtttgttcaattccatccaactggtatatacggagccggatgtctcatcactgaaggatcccgaggtgaaggtggtatccttagaaacagtgaaggagaacgttttatggaacgatatgctcctacagccaaggatcttgcatcaagagatgttgtctctagatctatgactatggaaatcagggaaggtcgtggtgtaggaccgcataaggatcatatctatctccatttgaaccatctcccaccagaagttctaaaagaaaggcttcctggaatatctgagacggctgcaatcttcgctggtgttgatgttaccaaagagccaattccagtcttgcctactgtgcactataacatgggtggtatcccaacaaattaccacggcgaggtagtgaccatcaaaggagatgatccagatgcagtggttccagggcttatggctgctggggaggcagcttgtgcatctgttcatggtgccaacaggcttggtgcaaattctctcctcgacattgttgtgtttggccgtgcttgtgcgaatagggtagcagagataagcaaaccaggggagaaacagagacctctggaggaaaatgcaggcaagaagacgatagaatggctgaacaagttaagacactcaagcgggtcgcttcctacatcaagtatcagattgaacatgcagaggattatgcagaacaatgcagctgtcttccgcacgcaagaaacattggaagaaggttgtcagttgatcgacaaggcatgggaaagtttcgaggatgtccaggttaaagatcggagtttgatatggaactctgatctgatagagacaatagaactggagaacctattgataaacgcttcaataacaatgcattcagcggaagctcgaaaggaaagcagaggagcacatgctcgggaagatttcacgaaaagagaggatggagaatggatgaagcatacattggggtattgggaagacgagaaagtgaggttggagtataggcctgttcacatggacactctcgacgatgagattgacactttccctcccaaagctcgcgtctactga

SEQ ID NO: 33444 - protein, 627 aa, Brassica napus
MWRCVSRSLRAPSSRTSLSGSRFSRFLSTASQTGDYTIVDHTYDAVVVGAGGAGLRAAIGLSEHGFNTACITKLFPTRSHTVAAQGGINAALGNMSEDDWRWHMYDTVKGSDWLGDQDAIQYMCREAPKAVIELENYGLPFSRTEEGKIYQRAFGGQSLDFGKGGQAYRCACAADRTGHALLHTLYGQAMKHNTQFFVEYFALDWLMASDGTCQGVIALNMEDGTLHRFRSAQTILATGGYGRAYFSATSAHTCTGDGNAMVARAGLPLQDLEFVQFHPTGIYGAGCLITEGSRGEGGILRNSEGERFMERYAPTAKDLASRDVVSRSMTMEIREGRGVGPHKDHIYLHLNHLPPEVLKERLPGISETAAIFAGVDVTKEPIPVLPTVHYNMGGIPTNYHGEVVTIKGDDPDAVVPGLMAAGEAACASVHGANRLGANSLLDIVVFGRACANRVAEISKPGEKQRPLEENAGKKTIEWLNKLRHSSGSLPTSSIRLNMQRIMQNNAAVFRTQETLEEGCQLIDKAWESFEDVQVKDRSLIWNSDLIETIELENLLINASITMHSAEARKESRGAHAREDFTKREDGEWMKHTLGYWEDEKVRLEYRPVHMDTLDDEIDTFPPKARVY

SEQ ID NO: 33445 - DNA, 1881 bp, Brassica napus
  CDS (1)..(1881)
atgtggcgctgcgtctctcgtagccttcgtgctccttcctcaaggacctcactctctggatctcgcttttctagattcctctccaccggttccacaggtgattacacgatagtggatcacacctatgacgcggtggttgtgggagctggtggtgctgggctaagggcggccattggattatctgagcatggatttaacacggcttgcatcaccaagctcttccccacacgctcacacaccgtcgctgctcagggtggtattaatgctgcactgggaaacatgtctgaagatgactggagatggcacatgtatgatactgtcaaaggaagtgactggcttggtgatcaagatgccattcagtatatgtgtagagaggcaccaaaagcagtgattgaacttgagaattacggccttcccttttctcgtactgaagagggtaaaatttaccagcgtgcctttggtggtcagagtcttgactttggcaaaggtggtcaggcctatcgttgtgcttgtgctgcggatcgaactggacatgctctcttgcataccttatatggacaagctatgaagcataacacacagttctttgttgaatacttcgctctggatttgctcatggcgagtgatggcacttgccagggtgtaattgcactaaacatggaagatggaacattgcatcgtttccgctctgcacaaacaatcttggccactgggggttacggcagagcatacttctctgcaacctcagcacatacatgcacaggagatggcaatgccatggttgcacgtgctggtcttccactccaggacttggagtttgttcagttccatccaactggtatttacggagccggatgtctcatcactgaaggatcccgaggtgaaggtggtatccttagaaacagtgaaggagaacgttttatggaacgatatgctcctacagccaaggatcttgcatcaagagatgttgtctctagatctatgactatggaaatcagggaaggtcgtggtgtaggaccgcataaggatcatatctatctccatttgaaccatctcccaccagaagttctaaaagaaaggcttcctggaatctctgagacggctgcaatcttcgctggtgttgatgttaccaaagagccaattccagtcttgcctactgtgcactataacatgggtggtatcccaacaaattaccacggcgaggtagtgaccatcaaaggagatgatccagatgcagtggttccagggcttatggctgctggggaggcagcttgtgcatctgttcacggtgccaacaggcttggtgcaaattctctcctcgacattgttgtgtttggccgtgcttgtgcgaatagggtagcagagataagcaaaccaggggagaaacagagacctctggaggaaaatgcaggtaagaagacgatcgaatggctgaacaagttaagacactcaagcgggtcgcttcctacatcaagtatcagattgaacatgcagaggattatgcagaacaatgcagctgtcttccgcacccaagaaacattggaagaaggttgtcagttgatcgacaaggcatgggaaagtttcgaggatgtccaggttaaagatcggagtttgatatggaactctgatctgatagagacaatagaactggagaacctattgataaacgcttcaataacaatgcattcagcggaagctcgaaaggaaagcagaggagcacatgctcgggaagatttcacgaaaagagaggatggagaatggatgaagcatacattggggtattgggaagacgagaaagtgaggttggagtataggcctgttcacatggacactctcgacgatgagattgacactttccctcccaaagctcgcgtctactga

SEQ ID NO: 33446 - protein, 626 aa, Brassica napus
MWRCVSRSLRAPSSRTSLSGSRFSRFLSTGSTGDYTIVDHTYDAVVVGAGGAGLRAAIGLSEHGFNTACITKLFPTRSHTVAAQGGINAALGNMSEDDWRWHMYDTVKGSDWLGDQDAIQYMCREAPKAVIELENYGLPFSRTEEGKIYQRAFGGQSLDFGKGGQAYRCACAADRTGHALLHTLYGQAMKHNTQFFVEYFALDLLMASDGTCQGVIALNMEDGTLHRFRSAQTILATGGYGRAYFSATSAHTCTGDGNAMVARAGLPLQDLEFVQFHPTGIYGAGCLITEGSRGEGGILRNSEGERFMERYAPTAKDLASRDVVSRSMTMEIREGRGVGPHKDHIYLHLNHLPPEVLKERLPGISETAAIFAGVDVTKEPIPVLPTVHYNMGGIPTNYHGEVVTIKGDDPDAVVPGLMAAGEAACASVHGANRLGANSLLDIVVFGRACANRVAEISKPGEKQRPLEENAGKKTIEWLNKLRHSSGSLPTSSIRLNMQRIMQNNAAVFRTQETLEEGCQLIDKAWESFEDVQVKDRSLIWNSDLIETIELENLLINASITMHSAEARKESRGAHAREDFTKREDGEWMKHTLGYWEDEKVRLEYRPVHMDTLDDEIDTFPPKARVY

SEQ ID NO: 33447 - DNA, 20 bp, Artificial sequence
  primer
atgccatcctgttgcagccg

SEQ ID NO: 33448 - DNA, 20 bp, Artificial sequence
  primer
tcagccggcgtaggtgggtg

SEQ ID NO: 33449 - protein, 699 aa, Artificial sequence
  consensus sequence
  Variant (2)..(5): Xaa in position 2 to 5 is any amino acid
  Variant (7)..(7): Xaa in position 7 is any amino acid
  Variant (9)..(9): Xaa in position 9 is any amino acid
  Variant (13)..(14): Xaa in position 13 to 14 is any amino acid
  Variant (16)..(27): Xaa in position 16 to 27 is any amino acid
  Variant (28)..(31): Xaa in position 28 to 31 is any or no amino acid
  Variant (33)..(38): Xaa in position 33 to 38 is any amino acid
  Variant (39)..(43): Xaa in position 39 to 43 is any or no amino acid
  Variant (48)..(49): Xaa in position 48 to 49 is any amino acid
  Variant (51)..(52): Xaa in position 51 to 52 is any amino acid
  Variant (53)..(60): Xaa in position 53 to 60 is any or no amino acid
  Variant (62)..(65): Xaa in position 62 to 65 is any amino acid
  Variant (67)..(68): Xaa in position 67 to 68 is any amino acid
  Variant (71)..(76): Xaa in position 71 to 76 is any amino acid
  Variant (78)..(94): Xaa in position 78 to 94 is any amino acid
  Variant (95)..(96): Xaa in position 95 to 96 is any or no amino acid
  Variant (98)..(100): Xaa in position 98 to 100 is any amino acid
  Variant (101)..(102): Xaa in position 101 to 102 is any or no amino acid
  Variant (104)..(105): Xaa in position 104 to 105 is any amino acid
  Variant (107)..(117): Xaa in position 107 to 117 is any amino acid
  Variant (118)..(136): Xaa in position 118 to 136 is any or no amino acid
  Variant (138)..(142): Xaa in position 138 to 142 is any amino acid
  Variant (143)..(150): Xaa in position 143 to 150 is any or no amino acid
  Variant (152)..(156): Xaa in position 152 to 156 is any amino acid
  Variant (157)..(157): Xaa in position 157 is any or no amino acid
  Variant (159)..(159): Xaa in position 159 is any amino acid
  Variant (162)..(167): Xaa in position 162 to 167 is any amino acid
  Variant (169)..(183): Xaa in position 169 to 183 is any amino acid
  Variant (184)..(200): Xaa in position 184 to 200 is any or no amino acid
  Variant (202)..(206): Xaa in position 202 to 206 is any amino acid
  Variant (207)..(222): Xaa in position 207 to 222 is any or no amino acid
  Variant (224)..(236): Xaa in position 224 to 236 is any amino acid
  Variant (237)..(248): Xaa in position 237 to 248 is any or no amino acid
  Variant (251)..(251): Xaa in position 251 is any amino acid
  Variant (254)..(257): Xaa in position 254 to 257 is any amino acid
  Variant (259)..(268): Xaa in position 259 to 268 is any amino acid
  Variant (269)..(269): Xaa in position 269 is any or no amino acid
  Variant (273)..(273): Xaa in position 273 is any amino acid
  Variant (275)..(277): Xaa in position 275 to 277 is any amino acid
  Variant (281)..(286): Xaa in position 281 to 286 is any amino acid
  Variant (289)..(289): Xaa in position 289 is any amino acid
  Variant (295)..(301): Xaa in position 295 to 301 is any amino acid
  Variant (302)..(315): Xaa in position 302 to 315 is any or no amino acid
  Variant (317)..(318): Xaa in position 317 to 318 is any amino acid
  Variant (320)..(321): Xaa in position 320 to 321 is any amino acid
  Variant (325)..(326): Xaa in position 325 to 326 is any amino acid
  Variant (328)..(329): Xaa in position 328 to 329 is any amino acid
  Variant (331)..(334): Xaa in position 331 to 334 is any amino acid
  Variant (335)..(340): Xaa in position 335 to 340 is any or no amino acid
  Variant (342)..(342): Xaa in position 342 is any amino acid
  Variant (346)..(347): Xaa in position 346 to 347 is any amino acid
  Variant (348)..(379): Xaa in position 348 to 379 is any or no amino acid
  Variant (382)..(382): Xaa in position 382 is any amino acid
  Variant (385)..(385): Xaa in position 385 is any amino acid
  Variant (387)..(387): Xaa in position 387 is any amino acid
  Variant (389)..(413): Xaa in position 389 to 413 is any amino acid
  Variant (414)..(427): Xaa in position 414 to 427 is any or no amino acid
  Variant (429)..(437): Xaa in position 429 to 437 is any amino acid
  Variant (438)..(438): Xaa in position 438 is any or no amino acid
  Variant (440)..(440): Xaa in position 440 is any amino acid
  Variant (442)..(445): Xaa in position 442 to 445 is any amino acid
  Variant (446)..(446): Xaa in position 446 is any or no amino acid
  Variant (450)..(450): Xaa in position 450 is any amino acid
  Variant (452)..(453): Xaa in position 452 to 453 is any amino acid
  Variant (456)..(457): Xaa in position 456 to 457 is any amino acid
  Variant (460)..(465): Xaa in position 460 to 465 is any amino acid
  Variant (467)..(471): Xaa in position 467 to 471 is any amino acid
  Variant (472)..(482): Xaa in position 472 to 482 is any or no amino acid
  Variant (485)..(485): Xaa in position 485 is any amino acid
  Variant (487)..(487): Xaa in position 487 is any amino acid
  Variant (490)..(494): Xaa in position 490 to 494 is any amino acid
  Variant (495)..(495): Xaa in position 495 is any or no amino acid
  Variant (502)..(503): Xaa in position 502 to 503 is any amino acid
  Variant (508)..(510): Xaa in position 508 to 510 is any amino acid
  Variant (512)..(548): Xaa in position 512 to 548 is any amino acid
  Variant (549)..(608): Xaa in position 549 to 608 is any or no amino acid
  Variant (610)..(616): Xaa in position 610 to 616 is any amino acid
  Variant (618)..(621): Xaa in position 618 to 621 is any amino acid
  Variant (623)..(637): Xaa in position 623 to 637 is any amino acid
  Variant (638)..(669): Xaa in position 638 to 669 is any or no amino acid
  Variant (671)..(672): Xaa in position 671 to 672 is any amino acid
  Variant (674)..(677): Xaa in position 674 to 677 is any amino acid
  Variant (679)..(684): Xaa in position 679 to 684 is any amino acid
  Variant (686)..(687): Xaa in position 686 to 687 is any amino acid
  Variant (689)..(689): Xaa in position 689 is any amino acid
  Variant (694)..(694): Xaa in position 694 is any amino acid
  Variant (696)..(698): Xaa in position 696 to 698 is any amino acid
DXXXXGXGXAGLXXAXXXXXXXXXXXXXXXXKXXXXXXXXXXXAQGGXXAXXXXXXXXXXDXXXXHXXDTXXXXXXLXXXXXXXXXXXXXXXXXXXLXXXXXGXXFXXXXXXXXXXXXXXXXXXXXXXXXXXXXXXGXXXXXXXXXXXXXRXXXXXXDXTGXXXXXXLXXXXXXXXXXXXXXXXXXXXXXXXXXXXXXXXLXXXXXXXXXXXXXXXXXXXXXGXXXXXXXXXXXXXXXXXXXXXXXXXLAXGGXXXXYXXXXXXXXXXXGDGXAXXXRAGXXXXXXEFXQFHPTXXXXXXXXXXXXXXXXXXXXXLXXEXXRGEXXGXXLXXXXXXXXXXGXRFMXXXXXXXXXXXXXXXXXXXXXXXXXXXXXXXXXXLAXRDXVXRXXXXXXXXXXXXXXXXXXXXXXXXXXXXXXXXXXXXXXXPXXXXXXXXXXGXDXXXXXIPVXPXXHYXXGGXXXXXXGXXXXXXXXXXXXXXXXGLXAXGEXXXXXXHGANRLXXNSLLXXXVXXXXXXXXXXXXXXXXXXXXXXXXXXXXXXXXXXXXXXXXXXXXXXXXXXXXXXXXXXXXXXXXXXXXXXXXXXXXXXXXXXXXXXXXXXXXXXXXXMXXXXXXXRXXXXLXXXXXXXXXXXXXXXXXXXXXXXXXXXXXXXXXXXXXXXXXXXXXXXEXXNXXXXAXXXXXXAXXRXESRGXHXXXD

SEQ ID NO: 33450 - protein, 25 aa, Artificial sequence
  protein pattern
  Variant (2)..(2): Xaa in position 2 is any amino acid
  Variant (3)..(3): Xaa in position 3 is Ala, Gly or Ser
  Variant (4)..(4): Xaa in position 4 is any amino acid
  Variant (5)..(5): Xaa in position 5 is Ala, Cys, Gly, Ser, Thr or Val
  Variant (6)..(8): Xaa in position 6 to 8 is any amino acid
  Variant (10)..(13): Xaa in position 10 to 13 is any amino acid
  Variant (14)..(14): Xaa in position 14 is Asp or Asn
  Variant (15)..(15): Xaa in position 15 is any amino acid
  Variant (18)..(18): Xaa in position 18 is any amino acid
  Variant (23)..(23): Xaa in position 23 is Ser or Thr
  Variant (24)..(24): Xaa in position 24 is any amino acid
  Variant (25)..(25): Xaa in position 25 is Ile, Leu, Met or Val
GXXXXXXXGXXXXXXEFXQFHPXXX

SEQ ID NO: 33451 - protein, 21 aa, Artificial sequence
  protein pattern
  Variant (3)..(3): Xaa in position 3 is Ala, Cys, Asn, Ser, Thr or Val
  Variant (4)..(4): Xaa in position 4 is Ala, Ser or Thr
  Variant (5)..(6): Xaa in position 5 to 6 is any amino acid
  Variant (7)..(7): Xaa in position 7 is Gly or Ser
  Variant (8)..(8): Xaa in position 8 is any amino acid
  Variant (14)..(14): Xaa in position 14 is Leu or Met
  Variant (15)..(15): Xaa in position 15 is Ala or Gly
  Variant (16)..(16): Xaa in position 16 is Ala, Gly, Ser or Thr
  Variant (21)..(21): Xaa in position 21 is Asp or Glu
GEXXXXXXHGANRXXXNSLLX

SEQ ID NO: 33452 - protein, 14 aa, Artificial sequence
  protein pattern
  Variant (3)..(3): Xaa in position 3 is Ile or Val
  Variant (4)..(4): Xaa in position 4 is any amino acid
  Variant (6)..(6): Xaa in position 6 is Ala, Gly, Thr or Val
  Variant (7)..(7): Xaa in position 7 is any amino acid
  Variant (10)..(11): Xaa in position 10 to 11 is any amino acid
  Variant (14)..(14): Xaa in position 14 is Ile or Val
IPXXPXXHYXXGGX

SEQ ID NO: 33453 - protein, 13 aa, Artificial sequence
  protein pattern
  Variant (2)..(2): Xaa in position 2 is any amino acid
  Variant (7)..(7): Xaa in position 7 is Ala, Gly or Leu
  Variant (9)..(11): Xaa in position 9 to 11 is any amino acid
  Variant (13)..(13): Xaa in position 13 is Phe, His, Trp or Tyr
RXESRGXHXXXDX

SEQ ID NO: 33454 - protein, 13 aa, Artificial sequence
  protein pattern
  Variant (2)..(2): Xaa in position 2 is Ile, Leu or Val
  Variant (3)..(3): Xaa in position 3 is Ser or Thr
  Variant (5)..(5): Xaa in position 5 is Ala or Gly
  Variant (6)..(6): Xaa in position 6 is any amino acid
  Variant (11)..(11): Xaa in position 11 is Ala or Gly
  Variant (12)..(12): Xaa in position 12 is any amino acid
LXXEXXRGEGXXL

SEQ ID NO: 33455 - protein, 10 aa, Artificial sequence
  protein pattern
  Variant (3)..(3): Xaa in position 3 is Pro, Ser or Thr
  Variant (6)..(6): Xaa in position 6 is any amino acid
  Variant (8)..(8): Xaa in position 8 is Ala or Ser
  Variant (10)..(10): Xaa in position 10 is Ala, Cys, Gly, Ser or Val
LAXRDXVXRX

SEQ ID NO: 33456 - protein, 16 aa, Artificial sequence
  protein pattern
  Variant (2)..(2): Xaa in position 2 is any amino acid
  Variant (3)..(3): Xaa in position 3 is Ala, Ile, Leu or Val
  Variant (4)..(4): Xaa in position 4 is Ile or Val
  Variant (5)..(5): Xaa in position 5 is Ile, Leu or Val
  Variant (7)..(7): Xaa in position 7 is Ala, Gly, Ser or Thr
  Variant (9)..(9): Xaa in position 9 is any amino acid
  Variant (12)..(15): Xaa in position 12 to 15 is any or no amino acid
DXXXXGXGXAGXXXXL

SEQ ID NO: 33457 - DNA, 1059 bp, Azotobacter vinelandii
  CDS (1)..(1059): transl_table=11
atgaccgagccgcttcgtgtcgccctgatcggcgccggcgccatgggccgccagcatcaccagcatctccgcgatctgcccgagggccggctctgtgccgtggccgaccccggcccgcaggccgaggccttcgccgccgaatgcgcggtcgcgcatttcgccgatcaccggcggatgctcgacgcgatccgcccgcaggcggtgatcgtcgccaaccccaataacctgcacgtcggcaccgcgctggattgcattgccgccggcgtgccggtgctgctggagaagccggtcggcgtgcacctggacgaggtacgcgaactggtcgccgcttcggcgaaggccggtgtgccggtgctggtcggccatcaccgccggcacaaccccctgatcgtccgtgcccgcgaactgatccgcagcggcggcctcggccggctgaccacggtcaccgcgctgtggcagttgcagaagccggacagctatttcgacgtcccctggcgccgcgagccgggcgccgggatgctgctgaccaacctgatccacgacctcgacctgctgcgccacctgtgcggcgaggtcgacgaggtccaggcgatcaccggcaacggtgtgcgcggcctggtcaacgaggacagcgcggcggtgctgctgcgcttcgccaacggcgccctcggcaccctgaccggttcggacgccgtggccgccccctggagctgggagctggattccggcgagaacccggtctatccgcgccaggccgagcagagctgctacctgctggccggcacccgtggtgcgctgagcattccgcagctcaagcgctggcactacgccgaacccggcgccggctggcaccaacccctgttgcagagcctggaatcctgccgggcgggcgaggccctgcgcctgcaactgcagcatttcgtcagggtggcccgcggcgaagaggcgccgctggtcgacgccgccgatgccggcaacaccctggcgctggtcgaggccatccgcgaggcggccggaagcggccgcgcctgctcgccccaggtcatttccaccttctga

SEQ ID NO: 33458 - protein, 352 aa, Azotobacter vinelandii
MTEPLRVALIGAGAMGRQHHQHLRDLPEGRLCAVADPGPQAEAFAAECAVAHFADHRRMLDAIRPQAVIVANPNNLHVGTALDCIAAGVPVLLEKPVGVHLDEVRELVAASAKAGVPVLVGHHRRHNPLIVRARELIRSGGLGRLTTVTALWQLQKPDSYFDVPWRREPGAGMLLTNLIHDLDLLRHLCGEVDEVQAITGNGVRGLVNEDSAAVLLRFANGALGTLTGSDAVAAPWSWELDSGENPVYPRQAEQSCYLLAGTRGALSIPQLKRWHYAEPGAGWHQPLLQSLESCRAGEALRLQLQHFVRVARGEEAPLVDAADAGNTLALVEAIREAAGSGRACSPQVISTF

SEQ ID NO: 33459 - DNA, 1017 bp, Kineococcus radiotolerans SRS30216
  CDS (1)..(1017): transl_table=11
atgtcccagcccgtgcgcttcgcgctcatcggcaccggccgcatcggccaggtccacgccgcgaacgtccacgccagtcccgacgccgtcctgcaggtcgtgtgcgacaccctcctcgccggtgcggagcggacgaccgccgcgttcgggggccgggcgacctcggacccgctggcggcgatccgcgccgacgacgtcgacgcggtggtcgtcgcctcccccacgcccacccacgtcgacctcgtcgccgcctgcctggacgcgggcgtccccgtgctgtgcgagaagccgatcgacctcgacctcgcccgcgtcgacgcgatccgcgaccgcgcgcgcgccgcgacgtcgcccgtcgtcctcggcttcaaccgccgcttcgacccgcacttcgccgagctgcggcgccgggtggcggccggggagatcggccgcctggagcacctggccatcaccagccgcgaccccgaacccccgcccgcggactacgtgcccctctcgggcggcatcttccgcgacatggccatccacgacctcgacaccgcccggtccttcgtccccgacgtcgtcgcggtgaccgccgtcgggttgcggcagttcgacgccgggatcgccgggcacggcgacttcgacgccgccgtcaccacgctcgtcggggcgggcggggagtcgatcgtcatcacgaactcccggcacagcgcctacggctacgaccagcgcctggaggcgttcgggcccggggggatgctggaggtcggcaacgtgaccccgacgctcgtgcgctcctccaccggttccgccagctccaccggggagccgtaccgccggttcttcctcgagcgctaccgcgaggcctacgagctggagctcgcggcgttcgtcgccaccgtccgcggcgaggacaccaccgcgagcccgtccccgggtttcgaggacgggcgcgcggcgctcgtgctggccgacgcctgcgagacgtcggcgcgggaggggcggacggtcgcggtcgacctctcctga

SEQ ID NO: 33460 - protein, 338 aa, Kineococcus radiotolerans SRS30216
MSQPVRFALIGTGRIGQVHAANVHASPDAVLQVVCDTLLAGAERTTAAFGGRATSDPLAAIRADDVDAVVVASPTPTHVDLVAACLDAGVPVLCEKPIDLDLARVDAIRDRARAATSPVVLGFNRRFDPHFAELRRRVAAGEIGRLEHLAITSRDPEPPPADYVPLSGGIFRDMAIHDLDTARSFVPDVVAVTAVGLRQFDAGIAGHGDFDAAVTTLVGAGGESIVITNSRHSAYGYDQRLEAFGPGGMLEVGNVTPTLVRSSTGSASSTGEPYRRFFLERYREAYELELAAFVATVRGEDTTASPSPGFEDGRAALVLADACETSAREGRTVAVDLS

SEQ ID NO: 33461 - DNA, 1035 bp, Mesorhizobium loti MAFF303099
  CDS (1)..(1035): transl_table=11
atggcgaatttgaacggagcgctaatcggctgcggcttcttcgccgtcaaccagatgcatgcctggcgcgacatagcgggcgcctcgatcgtcgccatctgcgaccgcgatccggagcggctcaggatcgtcggcgaccagttcggcgtggcgaagcgctacaccgacgcagcggcgctgttcgcgcccgagacactcgacttcgtcgacatcgccaccaccgtggccagccatcggccgctggtcgaaatggccgccgcccatcgtatcccggtgatctgccagaaacccttcgcgccgacgctcgccgacgcaaaggtgatggtcgcggcctgcgccaaagccggcgtgccgctgatggtgcatgagaactttcgctggcagtcgccgatccagggggtgcgcgcggtgctcgacagcggcgagatcggcacgcctttcttcgggcgtatctcctttcgctccgcctatgacgtgttttccggccagccctatctggcgacgggcaaacgcttcatcatcgaggatctcggcatccacatcctcgacatcgcgcgtttcctgctgggtgacgtatcgagcctcaccgcccgcaccgcgcgggtcaacccggccatcgccggcgaggatgtcgctaccatgctgatggatcacaagagcggcgccacttcggtggtcgattgcagctatgcgaccaggcttgccgtcgagccgtttcccgaaacgttgatcgagatcgacggcagcgacggcacactccggctggcgcagggataccagctgaccgtcaccggcaagagcggcacaacggtcagggatatctcaccgccgctactgccctgggcctcacggccatggcacaacatccaggaaagcgtgctggcgatccagcggcactgggtcgactgccttgcatcaggcaaggagccggcgacgtccggcgccgacaacctcaagacattcgcgctggtcgaggctgcctatatcggcgccgcaagccggcaaccggtgcagatcgacgacctgctgaaatga

SEQ ID NO: 33462 - protein, 344 aa, Mesorhizobium loti MAFF303099
MANLNGALIGCGFFAVNQMHAWRDIAGASIVAICDRDPERLRIVGDQFGVAKRYTDAAALFAPETLDFVDIATTVASHRPLVEMAAAHRIPVICQKPFAPTLADAKVMVAACAKAGVPLMVHENFRWQSPIQGVRAVLDSGEIGTPFFGRISFRSAYDVFSGQPYLATGKRFIIEDLGIHILDIARFLLGDVSSLTARTARVNPAIAGEDVATMLMDHKSGATSVVDCSYATRLAVEPFPETLIEIDGSDGTLRLAQGYQLTVTGKSGTTVRDISPPLLPWASRPWHNIQESVLAIQRHWVDCLASGKEPATSGADNLKTFALVEAAYIGAASRQPVQIDDLLK

SEQ ID NO: 33463 - DNA, 1023 bp, Bacillus halodurans C-125
  CDS (1)..(1023): transl_table=11
ttgaaaacattacgagttgctgtcattggttgcggcagtattgcccaacatcgacatttaccagagtatgaacaaaatcctcatacgaccattgtggccgtctgtgatcctgttgaggaacgggctaaaaaggtagcaaaattatatggagctatcgcttacactgaccacatgcaactgttggaaaaggaagagattgatctcgtgagtgtttgcacaccaaatgcataccacgctcctatatcaatcgacgccttgaaggcagggacacacgttttatgtgagaagccgatggccacgtcggcagaggagtgcgaggcgatgattaaggcggcagaagaggcgggtatgtgcttaatgattgggcacaaccaacggtttgtttcgtctcacgagaaagcgagacagctcattgcaacgggggacatcgggaaaatttacagcttccgcaccacttttggccatggcggtcccgaaggttggagtgtggatggtgaaaatagctggttcttcaaaaaagatcaggctttcatcggggcgatgggtgatctcggtgtacataaagccgatttgcttcgctaccttctcggggaagaagtagttgaagtgggagcgtttgtgacgactagcgcgaagcagggagatgtggatgataatgccgttgccattttaaaaacagaatcagggattgttggtacacttacggcaagctggtcttacgtagcaaaagaggataattcgacgattttgtatggagaaaacgccatccttcgattagaggacgatcctcactattcccttatcgttcactataaaaatggagaaaccgtgaaatacgaattagggcaaatacagtcaaatgatgaagggggtcagaccgattctcgggtgatcgctcattttgttaatagtgtactcgagggaaaagagccaccgatttctggaaaagaagggtatgcgtcgttaaacatcattttagcagcgatggaggcaagcagaacggggcgaacgattaagttataa

SEQ ID NO: 33464 - protein, 340 aa, Bacillus halodurans C-125
MKTLRVAVIGCGSIAQHRHLPEYEQNPHTTIVAVCDPVEERAKKVAKLYGAIAYTDHMQLLEKEEIDLVSVCTPNAYHAPISIDALKAGTHVLCEKPMATSAEECEAMIKAAEEAGMCLMIGHNQRFVSSHEKARQLIATGDIGKIYSFRTTFGHGGPEGWSVDGENSWFFKKDQAFIGAMGDLGVHKADLLRYLLGEEVVEVGAFVTTSAKQGDVDDNAVAILKTESGIVGTLTASWSYVAKEDNSTILYGENAILRLEDDPHYSLIVHYKNGETVKYELGQIQSNDEGGQTDSRVIAHFVNSVLEGKEPPISGKEGYASLNIILAAMEASRTGRTIKL

SEQ ID NO: 33465 - DNA, 1044 bp, Pseudomonas aeruginosa PAO1
  CDS (1)..(1044): transl_table=11
ttggacgcaccgcttcgcatcgccctcatcggcgccggcaatatgggccgccagcattaccaccgcttgcagcgaatcgccggcgcgcgcctgtgtgcggtggccgatccccagggccaggcgttcgccgcggacaccggcgtgccctggttcggcgatcatcggaggttgctggaagaagcccggccgcaagcggcgatcgtcgccaatccgaacaacctgcatgtcgccaccgccctcgactgcctcgccgccggggtgccgctgctgctggaaaaaccggtcggcgtgcagctcgacgaagtgagcgagctggtggccgtcgcccggcgatctggcgttccgctgctggtcggtcaccatcgtcggcacaatccgctggtcgtgcgggcgcgccaattgatcgccgagggcgcgctcggtcggttgctgtcggtcaccgcgctctggcagttgaagaagcccgacagttatttcgaggtggcctggcgtcgcgagcccggcgcgggaatgttgctgaccaacctgatccatgacctcgacctgctccgccacctgtgcggggaagtgcgggaggtgcaggcgctggccggcaacgctatccgtggcctgcccaacgaagacaacatcgcgctgctcctgcgcttcgccaatggcgccctgggcagcctgaccggttgcgacgctgcggcggcgccctggagctgggagctggcagccggggagaacccggtctatccgcgccaggccgagcaaccctgctacctgctggccggcaccgagggtgccctgagccttccccagctccgccgctggcgctacgccgaggcccggcagggctggcacgacccgctggcggccagcgaggaggccgtggcgacaggcgatcccctgcaacgccagctagagcacttcgtccgggtcgcgcggggcgaggaagcgccattgatggatgccaccgacgccgctcgcaccctggcgctggtcgaggcggttcgcgaggccgcgcgcagtggccgggcctgcgcgccggccagtttctga

SEQ ID NO: 33466 - protein, 347 aa, Pseudomonas aeruginosa PAO1
MDAPLRIALIGAGNMGRQHYHRLQRIAGARLCAVADPQGQAFAADTGVPWFGDHRRLLEEARPQAAIVANPNNLHVATALDCLAAGVPLLLEKPVGVQLDEVSELVAVARRSGVPLLVGHHRRHNPLVVRARQLIAEGALGRLLSVTALWQLKKPDSYFEVAWRREPGAGMLLTNLIHDLDLLRHLCGEVREVQALAGNAIRGLPNEDNIALLLRFANGALGSLTGCDAAAAPWSWELAAGENPVYPRQAEQPCYLLAGTEGALSLPQLRRWRYAEARQGWHDPLAASEEAVATGDPLQRQLEHFVRVARGEEAPLMDATDAARTLALVEAVREAARSGRACAPASF

SEQ ID NO: 33467 - DNA, 1059 bp, Agrobacterium tumefaciens str. C58
  CDS (1)..(1059): transl_table=11
ttgccaggagcccggggagatgagatgacatttaatgccgttttatgcggatgcggagccatggccaaaggctggttgcgcgccattcaatccacgccggagatttccggcgcgatcaggatcgccggtctggtggatctgaacgagaacacggcccgcgcgcttgccgaagaattcgccctcaccgacgcggtcatcggcacagatcttcgcgcggttcttgctgaaacgaaagccgacatcctttttgacatcgtcatcccgcaggcacgcttcgccgtggttgaagccggtctcgatgccgggtgccacgtgctgagcgaaaagccgctggccgcctcgatggaagaagccgccacgctggtggagctggcaaaaaaagccggcaaaattcatgccgtggtgcaaaaccggcggtttattgccggtatccggcggctgcgccgcgcactggaagacggcgtcattggcgacctgacggccatccactgcgatttcttcctcggcccgcatttcggcggctttcgtgaggagatgaagaacgtcctgcttctcgacatggcgatccacaccttcgatgccgcccgtttcgttgccaatgaaaagcccctttccgttttttgcgttgagaagaacccggccggctcctggtatgcccacggggcgagcgccaacgccattttcgagttctccaatgatgtcgtcttcacctatcgcggttcatggtgcgccgagggcgagcggaccagctgggaagcgcgctggcggctgatcggctcgaagggaatgatcctgtgggacggcgaagacaatttctccgcctccgtggccggtgacgacaagggacttttacgcggatttaagaccgtaaacgtttccgatgtcgtttccgaaaaggacacgcgcggccatgccagcgtcattctatcgttcctcgactccatccgcacgggtgagatgccggaaacggcctccttcgacaacatcaacagccttgccatggtgatcggcgcgatcgaaagcgcccgcctcggccagcgtgtttcaattgcagcataa

SEQ ID NO: 33468 - protein, 352 aa, Agrobacterium tumefaciens str. C58
MPGARGDEMTFNAVLCGCGAMAKGWLRAIQSTPEISGAIRIAGLVDLNENTARALAEEFALTDAVIGTDLRAVLAETKADILFDIVIPQARFAVVEAGLDAGCHVLSEKPLAASMEEAATLVELAKKAGKIHAVVQNRRFIAGIRRLRRALEDGVIGDLTAIHCDFFLGPHFGGFREEMKNVLLLDMAIHTFDAARFVANEKPLSVFCVEKNPAGSWYAHGASANAIFEFSNDVVFTYRGSWCAEGERTSWEARWRLIGSKGMILWDGEDNFSASVAGDDKGLLRGFKTVNVSDVVSEKDTRGHASVILSFLDSIRTGEMPETASFDNINSLAMVIGAIESARLGQRVSIAA

SEQ ID NO: 33469 - DNA, 1074 bp, Agrobacterium tumefaciens str. C58
  CDS (1)..(1074): transl_table=11
atgatcggtgtagccatcattggcgccggcatcggcgcccagcatctgaccggttatcgggccctgccgaagcgcttcgtcgtcaaggcgatctgcgatctcgacctggagcgcgcccgctccgttgccggcgatgatacctccatccgcctgaccaccgatctcgacgaggttctggcagatgagagcattcagctcattgacgtctgcctgccgccgcacctgcatttcccggtgacgctgaaggcgcatgcggcgggcaaggacgtggtttgcgaaaagccgctcgtccgctcgctggaagaggcaaatgcgctgatcgactccgtcaagaagaccgggcgcagtgtgtttccggtcttccagtaccgtttcggacaggccatgcggcagctgcgcgcgctgatcgacgccggccttgccggcaaggccttcgtcgcgagctcggaagtccactggaaccgtggcgccagctattacgacattccatggcgcggtacgtggaagggtgagtgcggcggcgcgatcctcggccacgccatccacgcccatgatcttctctgccacgttcttggtccggtcgatgaagtgttcgccatggccgacacgcgcgtcaatacgatcgaaaccgaagactgcgcagccctcagcttccgcatgaaaagcggtgccctggcgacgagttctgttacactcggcgcggccgaagacacgtcgcgcctgcgtttctgctttgaaggtttcaccgccgaaagcggcaccttgccctatcgcccggctgaagacacatggcgtttcatcgcccgtgcaccgacgacgcaggatcagatcgacgccgttctggcaacagtggctgatggcgaaaacggcttcgccggttttgtcgaagccattgccgacgcgatggaaggatgtggcggcaaggaagtgactgttaatgacggtttgcaatcgatcgaactcgtcaccgccatctatcgctcggtccgggaaggaaagccggttcgcctgtccgacgctgccgaaggcgagtggatcaagggctgggctccgcgcgcatccgccaacgcataa

SEQ ID NO: 33470 - protein, 357 aa, Agrobacterium tumefaciens str. C58
MIGVAIIGAGIGAQHLTGYRALPKRFVVKAICDLDLERARSVAGDDTSIRLTTDLDEVLADESIQLIDVCLPPHLHFPVTLKAHAAGKDVVCEKPLVRSLEEANALIDSVKKTGRSVFPVFQYRFGQAMRQLRALIDAGLAGKAFVASSEVHWNRGASYYDIPWRGTWKGECGGAILGHAIHAHDLLCHVLGPVDEVFAMADTRVNTIETEDCAALSFRMKSGALATSSVTLGAAEDTSRLRFCFEGFTAESGTLPYRPAEDTWRFIARAPTTQDQIDAVLATVADGENGFAGFVEAIADAMEGCGGKEVTVNDGLQSIELVTAIYRSVREGKPVRLSDAAEGEWIKGWAPRASANA

SEQ ID NO: 33471 - DNA, 987 bp, Caulobacter crescentus CB15
  CDS (1)..(987): transl_table=11
atgcacgacatcgccattttgggcgcgggccgcatcggccgcatccatgccaagaacgtcgccagccagccgggcctgcgcctgaaatacgtggtcgacccggtcgctgcggccgccgacggcctggccggcgaaaccggcgcgagcgtcgccgacctggagacggccttgaacgatccggcggtggccggcgtcattgtcgccagctcgaccgacacccacctcgactacagcctcaaggccatcgccgccggcaaggcggtgttctgcgaaaagcccatcgaccaggacctggcccgcgcgcgctcggcgtcaggcgaactggggggcaagggcgtgaagctgttcctgggcttcaatcgccgtttcgatccgaacttccagggcctcaaggcgcgcctgagcgccggcgtggtcggcgcgctggagaccgtgcacatcaccagccacgacccggccccgcccccggtcagctacgtcaaggtctctggcggccttttcaaggacatgacgatccacgacttcgacatggcccgctggcttctggacgaaccggtgagcgaggtgttcgccgccgccagctgtctggtcgatccggcgatcggcgaggcgggcgacgtggacacggccaagatcctgctgcgcaccgcatcgggcaagatctgcatgatcagcaacagccgccgcagcggctacggctatgaccaacggatcgaggcgttcgggtccaagggtctggttcgcgccgacaacgtcatggagagcacggtcagcatctggggcgagaacggcgccgccagcgacgccttccagaacttcttcctcgatcgctatgccgaagcctaccgtcgcgagatggcgcacttcgccgagatcattcggggagaagccctgccctccgtcggctatgtcgacggcgtcgaagccctggccttggcggaagccgccggcctgtccgccaagacgggccaagtggtgaagctctag

SEQ ID NO: 33472 - protein, 328 aa, Caulobacter crescentus CB15
MHDIAILGAGRIGRIHAKNVASQPGLRLKYVVDPVAAAADGLAGETGASVADLETALNDPAVAGVIVASSTDTHLDYSLKAIAAGKAVFCEKPIDQDLARARSASGELGGKGVKLFLGFNRRFDPNFQGLKARLSAGVVGALETVHITSHDPAPPPVSYVKVSGGLFKDMTIHDFDMARWLLDEPVSEVFAAASCLVDPAIGEAGDVDTAKILLRTASGKICMISNSRRSGYGYDQRIEAFGSKGLVRADNVMESTVSIWGENGAASDAFQNFFLDRYAEAYRREMAHFAEIIRGEALPSVGYVDGVEALALAEAAGLSAKTGQVVKL

SEQ ID NO: 33473 - DNA, 1020 bp, Sinorhizobium meliloti 1021
  CDS (1)..(1020): transl_table=11
atgaaaaagacgcgcatcggcgtgatcgggctcggcatggcggctgcgccgcatgccaaaagcctgctggacctcaaggagagagttgaggtcgctgccgccttcagtcccacggccgcgaggcggaatgccttttccgagtcctatggtttcacgacttgcgactccgccgagacgatcttccatgatccgtcgatcacggccgtcatgatattcacgccgccgagcacccatctcgatctggtgcggcaggctgccgaagcgggcaagcatgtgcttctcgaaaagccgctggagatcacgccggagcgatcggaagccctggtgacggtggcagagcgcgccgggataaaactcggcatcgtgcttcagcatcgctttcgcacggtcagccaggaacttgcgaggctcatcgatgaaggccgcctcggccaaatcgtcagtgcttcggcccggctgcacaactggcggccgcaaagctattacgatcaaccgggccggggtacacgggctcgcgacggcggcggcgtgcttctcacccaggccatacacacgctcgaccttctcgtttggctcgctggcctgccggaagaggccagggcctatgcggcgacgagcgggatccaccgcatggaaaccgaagacctcgcgatggcagcgatccgcttctccggcggcgcgatcgggaccgtgagcgcgaccacctgcgcttatcccggctatccggacgagatagacataatcggaacacgcggcatggcgcgtctgggcggccggcttcttgccgtttccttccacgacggaacggaactctcagtcgaggacgaggccgcgggtggtgccggcgccgatccgatggcattcccgcatcaccatcaccgtgcggtccttgccgactttctcgatgccgtcgaaagtaacggcgaaccgcgcgtcaacgggcgcgaggcactgaaggtccaccggctcattgatgcgattctcggcgcttcggaaagcgggcaggcgcaccgcgtctga

SEQ ID NO: 33474 - protein, 339 aa, Sinorhizobium meliloti 1021
MKKTRIGVIGLGMAAAPHAKSLLDLKERVEVAAAFSPTAARRNAFSESYGFTTCDSAETIFHDPSITAVMIFTPPSTHLDLVRQAAEAGKHVLLEKPLEITPERSEALVTVAERAGIKLGIVLQHRFRTVSQELARLIDEGRLGQIVSASARLHNWRPQSYYDQPGRGTRARDGGGVLLTQAIHTLDLLVWLAGLPEEARAYAATSGIHRMETEDLAMAAIRFSGGAIGTVSATTCAYPGYPDEIDIIGTRGMARLGGRLLAVSFHDGTELSVEDEAAGGAGADPMAFPHHHHRAVLADFLDAVESNGEPRVNGREALKVHRLIDAILGASESGQAHRV

SEQ ID NO: 33475 - DNA, 1098 bp, Nostoc sp. PCC 7120; identical to SEQ ID NO: 11994
  CDS (1)..(1098): transl_table=11

SEQ ID NO: 33476 - protein, 365 aa, Nostoc sp. PCC 7120; identical to SEQ ID NO: 11995

SEQ ID NO: 33477 - DNA, 990 bp, Brucella melitensis 16M
  CDS (1)..(990): transl_table=11
atgcttggcgtaggtatcatcggtgcgggccattttggtgctgcccatgcaaaagtactccagtcggttccgaatgcaaggctggttgccgcctgccgcaacgatacgcaaggcctcggcgccttcattgaagctttcggcggcgcgggctatctcgattatcgcgatttattgtccgatcccaatgtcgatgcggtggtgattgcgctgccgcaccacctgcacaccgatgtcgccattgcctgtgctgaggcgggcaagcatatcatgatagaaaagcccatggcgccgaccgttgcggagtgccgcgacattcttgctgccgcgcaaaaggcaggcgtcacgctcatgcctggccatacgatgcgcttcaccttgcctttcatggctgcaaagcggatcacggacgaaggagagcttggcaatatgcgctatgggtcaagccgcatgatcaagctgtggatggagggaaaccgccgtgactggcatcttgatccggcaactggcggcggaatgctgttcacagccggtattcatgcacttgaccggctggtcgctttttccggctgccgcgccacgcatgtcagcgccatcgcggccacgtcattccaccaccaaaaggctgatgacatggctttgctcctcctccgtttcggggatcaagccgccggtcaggtcgccagtatcggctatcgtgatggcgcttttatttccggtgatgaactggtcttcgacaatggcgtgctgacggtggatttcttcaatggcgttacattggggcgcggcctcaaatggcaacctgtcgagaactcgatcgaaccggcggtatccgaacaaggccttatccgccagtggaacgctttcgtccatgcggtcgaaacgggcaccacgcctcccgtgacgggtgaggacggccttcatgtggtggcttgtatcgaagccgctttcaaagcttcgcgtgaacgccgggaagtggcggtcgaggcataa

SEQ ID NO: 33478 - protein, 329 aa, Brucella melitensis 16M
MLGVGIIGAGHFGAAHAKVLQSVPNARLVAACRNDTQGLGAFIEAFGGAGYLDYRDLLSDPNVDAVVIALPHHLHTDVAIACAEAGKHIMIEKPMAPTVAECRDILAAAQKAGVTLMPGHTMRFTLPFMAAKRITDEGELGNMRYGSSRMIKLWMEGNRRDWHLDPATGGGMLFTAGIHALDRLVAFSGCRATHVSAIAATSFHHQKADDMALLLLRFGDQAAGQVASIGYRDGAFISGDELVFDNGVLTVDFFNGVTLGRGLKWQPVENSIEPAVSEQGLIRQWNAFVHAVETGTTPPVTGEDGLHVVACIEAAFKASRERREVAVEA

SEQ ID NO: 33479 - DNA, 1047 bp, Pyrococcus furiosus DSM 3638
  CDS (1)..(1047): transl_table=11
atggtagaaaggttaaaagtaggtgttgtgggttgtggaaatatctttaatctcgctcacaagccagcattgaaagcactaagacacctagctaaagtagtggctgtgatggatattaacgaagaggctgcaaaaaaagctggaaaagaattgaatgccaaagtatatacagacctagatgaatttctgaacgaagacatggatgtagtagaggttttaacaccaacatacacccacgctgagatagcaataaaagccctaaaggctggaaagcacgtaatcgttgagaagcctatagccttaacggtagaagaagcaaaagaaatgataaaagaagcagaacaacaaggccttaaactctttgtaggtcatgtgagaaggtttgacaagagatggatccaaataaaggaggtcataaagtccaggaacatactaccagtgcagataagaaaaactgaagttcaacatcttccattcccagccgactattggtactgggatgaatccaagagtggaggagttgcactagatttaggggttcacgtaactgactttcttagatggttctttgaaagcgaaccaatagaagtttttgccgtaggaaaggccataagaggcgaagcaagagttaacaaaacctttgatcacgtaataatgttcataaagtttgaaggagaaaaaactggaatcgtcgaagtgagttggagctatccactcccagccaaatatggagtcttctaccaccacctggacatcataggaaagaatggaagaattagatatacacccttagatgctccagtggtgggagttgtaaagagtagttttgagatgcctcgcttttccccaatgctctcaacgtttccagaagcctttgaagctgagctaaagcacttcttcgaatgcattaggtcagaatgtgacccgatcgttacagctaaagacgcattgatagccttatatatagctgaaaaggcaagagagagtataagaaagggcgaaccagttagattgaacgtggaggagctgacctcctcctcgccgtga

SEQ ID NO: 33480 - protein, 348 aa, Pyrococcus furiosus DSM 3638
MVERLKVGVVGCGNIFNLAHKPALKALRHLAKVVAVMDINEEAAKKAGKELNAKVYTDLDEFLNEDMDVVEVLTPTYTHAEIAIKALKAGKHVIVEKPIALTVEEAKEMIKEAEQQGLKLFVGHVRRFDKRWIQIKEVIKSRNILPVQIRKTEVQHLPFPADYWYWDESKSGGVALDLGVHVTDFLRWFFESEPIEVFAVGKAIRGEARVNKTFDHVIMFIKFEGEKTGIVEVSWSYPLPAKYGVFYHHLDIIGKNGRIRYTPLDAPVVGVVKSSFEMPRFSPMLSTFPEAFEAELKHFFECIRSECDPIVTAKDALIALYIAEKARESIRKGEPVRLNVEELTSSSP

SEQ ID NO: 33481 - DNA, 1056 bp, Streptomyces coelicolor A3(2)
  CDS (1)..(1056): transl_table=11
gtgtcagcggtgaccgggcagaaggtgcgctgggggattctcgcgaccggcgggatggcggcgcgattcacggcggatctcgtcgatctgccggacgcggaggtcgtggcggtcgcgtcgcggaccgaggcgtcggcgaagacgttcgcggagcggttcgggataccgcgggcgtacggcggctgggagacgctggcgcgggacgaggacgtcgacgtggtgtacgtcgcgacgccgcactcggcgcaccggaccgcggccggcctgtgcctggaggcgggccggaacgtgctgtgcgagaagccgttcacactgaacgcgcgcgaggcggcggaactggtcgcgctcgcccgcgagaacggcgtcttcctcatggaagccatgtggatgtactgcaacccgctggtgcggcgcttgaaggagctggtcgccgacggcgcgatcggcgaggtccgcagcctccaggcggacttcggcctcgcgggccccttcccggccgcgcaccggctccgcgaccccgcgcagggcggcggcgcgctgctcgacctgggggtgtacccggtgtcgttcgcgcagctcctgctcggtgagccgacggacgtcgcggcgcgggcggtgctctcggaggagggcgtcgatctgcagacgggcgcgctgctctcgtacgggaacgacgcgctcgcctcgatccactgctccatcaccggcggcacgcccaactccgcctcgatcaccggctccgagggccgcatcgacgtaccgaacggcttcttctttccggaccacttcgtgctgcaccgcaccggccgggacccgcaggagttccgggccgacccggccgacgggccccgcgagagcctccggcacgaggccgaggaggtgatgcgggccctgcgcgccggggagaccgagtcgccgctggtccccctggacggcacgctggccgtgatgcggacgctcgacgcgatccgggaccgcgtcggcgtccgctacccgggagaagcgggatcgacggcacagggagaagcggcggacccggtcgtcacaccggcttga

SEQ ID NO: 33482 - protein, 351 aa, Streptomyces coelicolor A3(2)
MSAVTGQKVRWGILATGGMAARFTADLVDLPDAEVVAVASRTEASAKTFAERFGIPRAYGGWETLARDEDVDVVYVATPHSAHRTAAGLCLEAGRNVLCEKPFTLNAREAAELVALARENGVFLMEAMWMYCNPLVRRLKELVADGAIGEVRSLQADFGLAGPFPAAHRLRDPAQGGGALLDLGVYPVSFAQLLLGEPTDVAARAVLSEEGVDLQTGALLSYGNDALASIHCSITGGTPNSASITGSEGRIDVPNGFFFPDHFVLHRTGRDPQEFRADPADGPRESLRHEAEEVMRALRAGETESPLVPLDGTLAVMRTLDAIRDRVGVRYPGEAGSTAQGEAADPVVTPA

SEQ ID NO: 33483 - DNA, 1083 bp, Streptomyces coelicolor A3(2)
  CDS (1)..(1083): transl_table=11
atgactgctacccctcccggcactcccccgctgcgcgtcggcctcgtcggctacgggctcgcgggctccgtcttccacgccccgctgatcgccgccaccgagggcctggccctggacacggtcgtcacctcgaacccggagcggcagcagcaggcccgcgccgagttcccggacgtgcgcaccgtcgccacgcccgacgagctgttcgaccgtgccgccgagctggacctggtcgtcgtggcgtccccgaacaagacgcacgtaccgctcgcgacccgggccctggaggccggtctgccggtggtggtggacaagccggtggcgggcacggcggccgaggcacgtgcgctggccgccctggccgaggagcgcggcctgctgctctccgtcttccagaaccgccgctgggacaacgacttcctcaccctgcgccagctgctcgccgaggacgcgctgggcgaggtgtggcgcttcgagtcccgcttcgagcgctggcggccgaagccgaagggcggctggcgcgagtccggcgacccgtcggagatcggcggtctgctgtacgacctcggcagccacgtcgtcgaccaggccctggtcctcttcggcccggtcacgcaggtgtacgccgagtccgtggtccggcgggcgggcgcggaggcggacgacgacacgttcctcgcgctcacgcacgcgaacggcgtccgctcccatctctacgtctcctccaccgccgcccagctcggcccccgtttccgggtgctcggctcgaaggcgggctacgtcaagcacggcctcgacccgcaggaggcggcgctgcgcgagggcaagcggccgggtcccggctggggcgaggaggacgagtcgcggtggggccgtgtcggcgccggggagtccccgctgaccggcggcgggcaggtggcggcgaccgtcgcgggcgactaccccgcgtactacgcggccgtggcgaaggccctgcgcgagggcggcccgaacccggtggacgcgctggcggcggccgccgccctggacgtactggaggcggcccgccggtccgcccgcgacggagtggtggtgtccctgtga

SEQ ID NO: 33484 - protein, 360 aa, Streptomyces coelicolor A3(2)
MTATPPGTPPLRVGLVGYGLAGSVFHAPLIAATEGLALDTVVTSNPERQQQARAEFPDVRTVATPDELFDRAAELDLVVVASPNKTHVPLATRALEAGLPVVVDKPVAGTAAEARALAALAEERGLLLSVFQNRRWDNDFLTLRQLLAEDALGEVWRFESRFERWRPKPKGGWRESGDPSEIGGLLYDLGSHVVDQALVLFGPVTQVYAESVVRRAGAEADDDTFLALTHANGVRSHLYVSSTAAQLGPRFRVLGSKAGYVKHGLDPQEAALREGKRPGPGWGEEDESRWGRVGAGESPLTGGGQVAATVAGDYPAYYAAVAKALREGGPNPVDALAAAAALDVLEAARRSARDGVVVSL

SEQ ID NO: 33485 - DNA, 1293 bp, Streptomyces coelicolor A3(2)
  CDS (1)..(1293): transl_table=11
atgggacagccgcagcagcccgagggggccggcgccgaggaggcagccgccgggaccgacagcgggaccgataccgggaccggtgccggggccggggcggcgacgggggcgtccgcgaccagaccgcccctgcgggtcggcatggtcggctacgccttcatgggcgccgcccactcccagggctggcgcaccgcgggccgggtcttcgacctgccgctgaacccggtactggccgcgatctgcgggcgggacgccgacgccgtccgcctggcggccgaccggcacggctgggcgagcaccgagaccgactggcggaccctggtcgaacgggacgacatcgacctcgtcgacatctgcacccccggcgacagccactccgagatcgcgctggccgcgctcgccgccggcaagcacgtgctgtgcgagaagccgctcgccaacaccgtcgaggaggcgcaggcgatgacccgcgccgccgaggaggccgcggcccggggccagttggcgatggtcggcttcaactaccgccgggttcccgccaccgcgctggctcggcggatggtcgccgagggccgcgtcggccggctgcggcacctgcgggtgacctacctccaggactggctggtcgacccgaaggccccgctcacctggcggctgcgcaaggagctggccgggtcgggggcgctcggcgacctgggcgcccacatcgtcgacctcgcccagtacctgtcgggcgagcggatcgcgggcgtgtccgccctcaccgagaccttcgtacgggaacgcccgctgcccgccggcgcgccccggggcctgtccgcgggctcggcggacggggtgacgggacaggtgaccgtcgacgacgccgccgtgttcaccggccgtctcacctccggggccctggtctccttcgaggccacccggtacgccaccggccgcaagaacgccctgcgcatcgaactcaacggcgagcgcggctcgctcgccttcgacctggaacggctcaacgagctgtcgtaccacgacggcaccgagcccggggagcacgccggtttccggcggatcctggtcaccgaacccgaacacccctacctggaggcctggtggccgccgggccacggactcggctacgagcacaccttcgtgcaccaggcgcgcgacctcgtgcacgcggtcgccgaaggccggggccccgaaccctccttcgcggacgggctgcaggtgcagcgcgtgctcgccgccgtggaggagagcgccgagaagaactccgtctacaccccgatcaccccctga

SEQ ID NO: 33486 - protein, 430 aa, Streptomyces coelicolor A3(2)
MGQPQQPEGAGAEEAAAGTDSGTDTGTGAGAGAATGASATRPPLRVGMVGYAFMGAAHSQGWRTAGRVFDLPLNPVLAAICGRDADAVRLAADRHGWASTETDWRTLVERDDIDLVDICTPGDSHSEIALAALAAGKHVLCEKPLANTVEEAQAMTRAAEEAAARGQLAMVGFNYRRVPATALARRMVAEGRVGRLRHLRVTYLQDWLVDPKAPLTWRLRKELAGSGALGDLGAHIVDLAQYLSGERIAGVSALTETFVRERPLPAGAPRGLSAGSADGVTGQVTVDDAAVFTGRLTSGALVSFEATRYATGRKNALRIELNGERGSLAFDLERLNELSYHDGTEPGEHAGFRRILVTEPEHPYLEAWWPPGHGLGYEHTFVHQARDLVHAVAEGRGPEPSFADGLQVQRVLAAVEESAEKNSVYTPITP

SEQ ID NO: 33487 - DNA, 1164 bp, Streptomyces coelicolor A3(2)
  CDS (1)..(1164): transl_table=11
atggtcgaggcactcggtgtcgccgtcgtcggtttcggctggatgggccgggtgcacacccaggcgtacgcccgggtccgccaccactatccgcacctggcgctgcgcccggagctggtgacggtcgccgaggaggtgccggggcgggccgaggaggccgccgcgcagttcgggttcgcctcgacgacccgggactggcgcgaggtggcggcggacccgcgggtgcacgcggtgagcatcacggcccccaacttcctgcaccgcgagatcgccgtcgcgatggccggggcgggcaagcacatctgggtggagaagccggtcggcctgtcgtccgacgatgcgcgggcggtggcggacgccgtgtccggggccggtgtgcagggcgcggtcggcttcaactaccgcaacgccccggccgtggagaccgcccgccgcctgatcgcggccggggagatcggcaccgtcacccatgcccgcctccgcttcttcagcgactacgcggcgcatccggagggtgcgctgacctggcgttacgagcgggagcgcggcggcagcggggtgctcggcgacctggcctcgcacggcgcggacctggctcggttcctgctcggcgacatcgcctcgctgaccgccgacacggcggtcttcgtgccggagcgggcccgccccgcctccgccaccgccggtcatgcccgggccacgggcggcgagccgggcccggtcgagaacgaggactacgtcagctgcctgctgcgtttcgcctccggcgcccgcggtgtcctggaggcctgccgggtctccgtcggcgagcagaacaactacggcttcgaggtgcacggcaccacgggcgcggtgttctgggacttccgccgcatgaacgagctgcgcgtcagccgcggcacggagtaccaggaccagcccgtgagcaccgtgtacgtcggccccggggacggcgagttcgccgcgttccagccgggggccgcgaacgccatggggtacgacgacctgaaggtggtggaggcccaccgcttcctgcgctcgatcgcggagggcaccccgtacggcgcgaccctgtcggacgccgtgcacagtgcggccgtactggaggccatgtcgcggtcggcggagcgcggcacctgggtcagtcccgggcagcccgggtga

SEQ ID NO: 33488 - protein, 387 aa, Streptomyces coelicolor A3(2)
MVEALGVAVVGFGWMGRVHTQAYARVRHHYPHLALRPELVTVAEEVPGRAEEAAAQFGFASTTRDWREVAADPRVHAVSITAPNFLHREIAVAMAGAGKHIWVEKPVGLSSDDARAVADAVSGAGVQGAVGFNYRNAPAVETARRLIAAGEIGTVTHARLRFFSDYAAHPEGALTWRYERERGGSGVLGDLASHGADLARFLLGDIASLTADTAVFVPERARPASATAGHARATGGEPGPVENEDYVSCLLRFASGARGVLEACRVSVGEQNNYGFEVHGTTGAVFWDFRRMNELRVSRGTEYQDQPVSTVYVGPGDGEFAAFQPGAANAMGYDDLKVVEAHRFLRSIAEGTPYGATLSDAVHSAAVLEAMSRSAERGTWVSPGQPG

SEQ ID NO: 33489 - DNA, 1050 bp, Oceanobacillus iheyensis HTE831
  CDS (1)..(1050): transl_table=11
atgagaattgcagtactggggattaatcatggttatgcatttgcaaagcacttttaccaaatgtcagatgtcgaattagtcgcagttgcgggaagaaatgacttatcaaaacaacgggctgctaacttgcatgttcctatttatgaggattacaagcagcttattctagagtgtgaattagatggagtagtaataacactccccaatgcgttgcataaagaagcagtagaagcgtgtgcagataagggtatgcatatattagtggaaaaaccaattgcttccacagtggaggaagcaaaagaaataattacgtattgtgcgaaacgaaaagtacatttaatggtcggccatcatcggcggttctcaagtaaaataaggaagttgaaagagattataacgtcgggggccataggagatttaatagcagtaaatatgttatgggcactcgctaaagataaagcatattacaatgaatcttggaaagtcgaaaaaggaggggggccattgctaattaatggcatccatgatatcgacaatttaaggtatgtgacaggcttggatttcctacgagtttacgcatctagtcaaagtaaaataagaaataatgcagtagaagattcagcctctgttatgttagaggcaagtaatggcattactgcgaactattttatatcagatggtgttccctctccatgggcttatgaattaacagtaggtgagaatagtgattataggcaaattgataaagactgttatcactttttcgggaccaaaggaagtttaagctttcctagttttcggatgtattcgtatacgggagacggttatggatggaaaaatgaattacaggaagagaaatttgaagttaaatcgaatgatccgttaaaggaagaagcaagtcactttatcgatatattaaaaggtgaaaccacacctctcgttcctggggaggagggattgaagacattagaagtacttgaggctattaaattatctataaataaacaagctgtggtgaaattaaatgaagggagttataaaacgcattga

SEQ ID NO: 33490 - protein, 349 aa, Oceanobacillus iheyensis HTE831
MRIAVLGINHGYAFAKHFYQMSDVELVAVAGRNDLSKQRAANLHVPIYEDYKQLILECELDGVVITLPNALHKEAVEACADKGMHILVEKPIASTVEEAKEIITYCAKRKVHLMVGHHRRFSSKIRKLKEIITSGAIGDLIAVNMLWALAKDKAYYNESWKVEKGGGPLLINGIHDIDNLRYVTGLDFLRVYASSQSKIRNNAVEDSASVMLEASNGITANYFISDGVPSPWAYELTVGENSDYRQIDKDCYHFFGTKGSLSFPSFRMYSYTGDGYGWKNELQEEKFEVKSNDPLKEEASHFIDILKGETTPLVPGEEGLKTLEVLEAIKLSINKQAVVKLNEGSYKTH

SEQ ID NO: 33491 - DNA, 1287 bp, Brucella suis 1330
  CDS (1)..(1287): transl_table=11
atgcttggcgtaggtatcatcggtgcgggccattttggtgctgcccatgcaaaagcactccagtcggttccgaatgcaaggctggttgccgcctgccgcaacgatacgcaaggcctcggcgccttcattgaagctttcggcggcgcgggctatctcgattatcgcgatttattgtccgatcccaatgtcgatgcggtggtgattgcgctgccgcaccacctgcacaccgatgtcgccattgcctgtgctgaggcgggcaagcatatcatgatagaaaagcccatggcgccgaccgttgcggagtgccgcgacattcttgctgccgcgcaaaaggcaggcgtcacgctcatgcctggccatacgatgcgcttcaccttgcctttcatggctgcaaagcggatcacggacgaaggagagcttggcaatatgcgctatgggtcaagccgcatgatcaagctgtggatggagggaaaccgccgtgactggcatcttgatccggcaactggcggcggaatgctgttcacagccggtattcatgcacttgaccggctggtcgctttttccggctgccgcgccacgcatgtcagcgccatcgcggccacgtcattccaccaccaaaaggctgatgacatggctttgctcctcctccgtttcggggatcaagccgccggtcaggtcgccagtatcggctatcgtgatggcgcttttatttccggtgatgaactggtcttcgacaatggcgtgctgacggtggatttcttcaatggcgttacattggggcgcggcctcaaatggcaacctgtcgagaactcgatcgaaccggcggtatccgaacaaggccttatccgccagtggaacgctttcgtccatgcggtcgaaacgggcaccacgcctcccgtgacgggtgaggacggccttcatgtggtggcttgtatcgaagccgctttcaaagcttcgcgtgaacgccgggaagtggcggtcgaggcatataatgttctcccagggcgaaagctgccctcctgggcccatccttcctcgtgttggatgggccattttttggcgccttatatattgtcgcgaatgcaggccttgaaatgtccgggcctgacttcgcgcaattgcggaacggttgtggcgcaggcgtcaatggccatggggcagcgggtgcggaaaacacagccgcttggcgggttggcggggcttggaatgtcgccgcgcaggatctgtcgttccgttctggcgtccgggtcgggggaggggatggcggaaagcagcgcccgtgtatag

SEQ ID NO: 33492 - protein, 428 aa, Brucella suis 1330
MLGVGIIGAGHFGAAHAKALQSVPNARLVAACRNDTQGLGAFIEAFGGAGYLDYRDLLSDPNVDAVVIALPHHLHTDVAIACAEAGKHIMIEKPMAPTVAECRDILAAAQKAGVTLMPGHTMRFTLPFMAAKRITDEGELGNMRYGSSRMIKLWMEGNRRDWHLDPATGGGMLFTAGIHALDRLVAFSGCRATHVSAIAATSFHHQKADDMALLLLRFGDQAAGQVASIGYRDGAFISGDELVFDNGVLTVDFFNGVTLGRGLKWQPVENSIEPAVSEQGLIRQWNAFVHAVETGTTPPVTGEDGLHVVACIEAAFKASRERREVAVEAYNVLPGRKLPSWAHPSSCWMGHFLAPYILSRMQALKCPGLTSRNCGTVVAQASMAMGQRVRKTQPLGGLAGLGMSPRRICRSVLASGSGEGMAESSARV

SEQ ID NO: 33493 - DNA, 1053 bp, Pseudomonas putida KT2440
  CDS (1)..(1053): transl_table=11
ttgaacgcaccccttcgtattgccttgattggcgccggcatcatgggccggcagcattaccagcacttgcgcaatgtgccgcaagcccaactgtgtgcggtagccgaccccggcccgcaggccgaggccttcgctgccgagtgcggtgtgccatgctttgccgaccaccggcaaatgctggagcaggtgcgccccgaggcagtgatcgtcgccaaccccaacaccctgcatgtcgccaccgccctggattgtgtcgaggccggggtgccagtgctggtggaaaaaccggtgggcgtgaacctggatgaagtgcgtgcactggtggaagcctcacgccgccgaggtgtaccggtgcttgtagggcaccatcgccgacacaatccgctgatcgccaaggcgcaccaggtgatcaacgaaggcaaactgggccgtctgatcaatgtcaccgcgctgtggcaactgcaaaagcccgacagctatttcgaaacgccctggcgccgcgagccaggggccggtttcttgctgaccaacctgatccacgaccttgacctgttgcgttacctgtgcggcgaagtggtgcaggtgcaggccttcacccgcaacgatgtccgcggttttgccaacgaagacagcgccgcggtgctgctgcagttcgccaacggtgccctgggcagcctgaccgggtctgacgcggtggctgcaccgtggagctgggagctggacgctggcgaaagccccgtgtacccgcgccaggatggccagccgtgctatctgctggccggtacccaaggtgcactgagcattccccagctcaagcgctggcattacgccgaggcaggctcgggctggcatacgcccctgttgcaaagttcggaaagcatccctgccggcgaggcattgaccctgcaattgcagcattttgtgcgtgttgcccggggtgaacaggcgccgctgatcgacgctgccgacggggggcgcacactggcgctgatcgaagcgatacgacaggcagcccaaagcggtcgggcttgcgcgcccgcgcacattggctga

SEQ ID NO: 33494 - protein, 350 aa, Pseudomonas putida KT2440
MNAPLRIALIGAGIMGRQHYQHLRNVPQAQLCAVADPGPQAEAFAAECGVPCFADHRQMLEQVRPEAVIVANPNTLHVATALDCVEAGVPVLVEKPVGVNLDEVRALVEASRRRGVPVLVGHHRRHNPLIAKAHQVINEGKLGRLINVTALWQLQKPDSYFETPWRREPGAGFLLTNLIHDLDLLRYLCGEVVQVQAFTRNDVRGFANEDSAAVLLQFANGALGSLTGSDAVAAPWSWELDAGESPVYPRQDGQPCYLLAGTQGALSIPQLKRWHYAEAGSGWHTPLLQSSESIPAGEALTLQLQHFVRVARGEQAPLIDAADGGRTLALIEAIRQAAQSGRACAPAHIG

SEQ ID NO: 33495 - DNA, 1134 bp, Bradyrhizobium japonicum USDA 110
  CDS (1)..(1134): transl_table=11
atggaatccaattccaattctgatcagctcgtgctagaagcctcgccgggcgcaacgcaaatcaaaagaggatgcggaatgagcagggtcgccgtggcggtgattggggccggcgcaatcggacgggcccattgcgagacgatccgccgatcggagagctgcaggctcgcggcgatcgccgaacctgccgcagcgggaaagacttacgcggagagcctcggcgtgccctggtatgcggatgcgcgcgatctgctgggtataatgaagccggatgcggcgatcatcgccacgccgaatgcgacccatcgcgagttcgcgatcgcctgcatcgagcgcggcattgtggcactggtcgaaaagccgatcgcgagcacgctcgctgatgcggcggcgatcgcggctgcctcggagcgcgcgggcgtggccgttctggtcgggcaccatcggcggcacaatccgatcacgcggcgagcccgttccttgatcgccgaaggcgcgctcggccgcctgaccagcgcgaccgtgcttgcgaccttctataagcccgccgattatttcgaggtggcatggcgacgagagcccggcggcgggccggtgctgatcaacctcattcacgagatcgatctggtgcgccacctctgcggcgagatcgcctccgtgcaggctgtcgtctccaacgcggtgcgaggcttcgacgtcgaggacagtgcggcgatcctgctccggctcgctggtggtgcgctggtgacgctgagcctcagcgacaccgcggcaagcccctggagctgggatctcgccagcggcgagagcctgaactatccgccgcagccggccgcggtgcagacgcatttcctcagcggcaccgaaggcgcgctggcgctgccgacgctcgactattggcactattcgtcggcgaagagctggtttgccccgatctcgcgcgactcggttggcgtcgaacgcggcgatccctaccttgcgcagatcgatcatctggcgcgggtggtccgtggcagcgaggcgccactgattaccgcccgcgacggcatgctgaccctgcgagccacgatggcagttcacaaagcggccaaaaccggtcagatagtgcggcctgatcaggagatggaattgtga

SEQ ID NO: 33496 - protein, 377 aa, Bradyrhizobium japonicum USDA 110
MESNSNSDQLVLEASPGATQIKRGCGMSRVAVAVIGAGAIGRAHCETIRRSESCRLAAIAEPAAAGKTYAESLGVPWYADARDLLGIMKPDAAIIATPNATHREFAIACIERGIVALVEKPIASTLADAAAIAAASERAGVAVLVGHHRRHNPITRRARSLIAEGALGRLTSATVLATFYKPADYFEVAWRREPGGGPVLINLIHEIDLVRHLCGEIASVQAVVSNAVRGFDVEDSAAILLRLAGGALVTLSLSDTAASPWSWDLASGESLNYPPQPAAVQTHFLSGTEGALALPTLDYWHYSSAKSWFAPISRDSVGVERGDPYLAQIDHLARVVRGSEAPLITARDGMLTLRATMAVHKAAKTGQIVRPDQEMEL

SEQ ID NO: 33497 - DNA, 1044 bp, Bradyrhizobium japonicum USDA 110
  CDS (1)..(1044): transl_table=11
atgagttcaccagtccgcctggcggtgatgggagcaggtctcatcggcaagcgacatatcgagcacattctcgcacggccggaggcgatgctgtcgtcgatcgtcgatccgacgcctgacgcgcgagagctggcggtttcgctgaaggtggactggtatccgtcctttcaggacatgctcgccgaaaatcggccggacggggtggttgtcgccacccccaatcagatgcatgtggccaacggcatggattgtgtcgcagctcgcatcccggcgctcatcgagaagccgatagcggatgatgttgccgcagcacaggccctggtcgaagctgccgagcgcgcgggcgttccgctgctcaccggccatcatcgccgccacaacccgatgatccagcgcgccaggttagagatcgacagcggtcggctgggccagatcgtgtcggtgcatggcatgttctggctgatcaagccggaccactatttcgatgtggcctggcgccgcgaaaaaggggcggggcctgttttcctgaatctcatccacgatgtcgacctgctgcggtatctgtgtggggatatcgtcgcggtgcaagccgcccaatccaatcgactgcgtggaaatgcggtcgaagagaccgcagtgatcatcctgcacttcgcttccggcgcactgggaactgtcaatgtctccgacgccatccagtcgccctggagctgggagttcacggccggtgagaacccggcttacagtcacacgcaggaggcctgttaccagatcggcggtaccagagcatcgctcgcaattccgcaactcgatctatggcgtcacccgagcaaggccagttggtgggcgccgattgagcgcgagcggctgaactacgagaaagcagacccgcttggcctgcagatcgcaaacttctgtggggtgatccgcggtaaggcggcgcccgtggtgagcgggcgcgaagggctgaagaccctcggagtgatcgacgcggtcaaacgcgctgcggaaaccaaagatttcgtatcggtccgaaattcgtaa

SEQ ID NO: 33498 - protein, 347 aa, Bradyrhizobium japonicum USDA 110
MSSPVRLAVMGAGLIGKRHIEHILARPEAMLSSIVDPTPDARELAVSLKVDWYPSFQDMLAENRPDGVVVATPNQMHVANGMDCVAARIPALIEKPIADDVAAAQALVEAAERAGVPLLTGHHRRHNPMIQRARLEIDSGRLGQIVSVHGMFWLIKPDHYFDVAWRREKGAGPVFLNLIHDVDLLRYLCGDIVAVQAAQSNRLRGNAVEETAVIILHFASGALGTVNVSDAIQSPWSWEFTAGENPAYSHTQEACYQIGGTRASLAIPQLDLWRHPSKASWWAPIERERLNYEKADPLGLQIANFCGVIRGKAAPVVSGREGLKTLGVIDAVKRAAETKDFVSVRNS

SEQ ID NO: 33499 - DNA, 1101 bp, Bradyrhizobium japonicum USDA 110
  CDS (1)..(1101): transl_table=11
atgaagaacatcaccataggcgtcatcggcgcggggctgatcgggcggaagcacctcgccaagctggccggacgtggggactatgacctcgtcggcatcgcggacgtgaactccgatcggatcgcagccgattatcccgggacccctgtcttcgccgactaccggaaactgctcgacgaggcgcggccggaggccgtgatcatcgcctcacccaaccagcttcatgccgagcagggcatcgcatgcgccaggcgcgggattcacatcctgatcgagaagccggtcacggacacggtggagaccgcggcaagcctgattgccgaggtgcgcaaggccggcatccagtcgctggtcgggcatcaccgccgccaccatcagcaggtcaggacgctgaaggcgactttgggagacaagcgcatcggcgatgtcgtcggggtgtcggcgatctgggccacccacaagccggcggcctatttcgagatcgcgccatggcgctcgcaggctggcggcggaccaatcctgatcaacctcatccacgaaatcgacttcctgcgcttcaccgtgggcgagatcgtcgccgtggaagcgattgcgtcgaaccgccagcgcagctttgcggtcgaggataccgccgcggcgctgatcgaattcgacagcggcgcgctcggcacgtttttcatcagcgacagcgccgtctcgccctggacctccgagcaggggctcggcgaggcccccgaattcccgttcagcggcgagagcagctatcgcttcctcggccgaaccgggtcgatcgaatttccggcgctcgtgcaatggtcgcaggccggcggcgcgcaggactggaacaagccgatccaggcccagcgcatccatgcctcctcggttgacccctacgtcgcccagctcgaccatttccgcgacatcattcgcggcaacgcgcggtcattgcagccggtcgaggacggcgcgcgcagcctgatcgcgaccctggcggtcgccgaggccgccgccggtggacgacgcgtcgacctgcgccatcgctacgaaacgctcgcaagtccggtcgtgccggcaacgtcagaccagcaaagggcttcctga

SEQ ID NO: 33500 - protein, 366 aa, Bradyrhizobium japonicum USDA 110
MKNITIGVIGAGLIGRKHLAKLAGRGDYDLVGIADVNSDRIAADYPGTPVFADYRKLLDEARPEAVIIASPNQLHAEQGIACARRGIHILIEKPVTDTVETAASLIAEVRKAGIQSLVGHHRRHHQQVRTLKATLGDKRIGDVVGVSAIWATHKPAAYFEIAPWRSQAGGGPILINLIHEIDFLRFTVGEIVAVEAIASNRQRSFAVEDTAAALIEFDSGALGTFFISDSAVSPWTSEQGLGEAPEFPFSGESSYRFLGRTGSIEFPALVQWSQAGGAQDWNKPIQAQRIHASSVDPYVAQLDHFRDIIRGNARSLQPVEDGARSLIATLAVAEAAAGGRRVDLRHRYETLASPVVPATSDQQRAS

SEQ ID NO: 33501 - DNA, 1149 bp, Pseudomonas syringae pv. tomato str. DC3000
  CDS (1)..(1149): transl_table=11
atgcagcaatccccttctacatcgcgaccgcaactgggcatcgggctgatcggtacaggctttatggggcgcgcccatgcgctggcattcggcagtgccaatgccgcccttgagctgccggcacgtattcatctggccgctctggcggatgccgacagcgcaagggccgagcagtgtgcccaggcctggggctttgatcgcagccacgccgactggcagcaactggtcgaggacccacgggtgcagatcgtcgcgatcaccacgcccaaccacctgcactttcccatggccatggcagccatcgcggctggcaaagcggtgtactgcgaaaagccgctggcagtcagcctggcccaggcggatgaaatgcagcgcagcgccaaggccgcaggcgtggtgacccaggtgggctacaactaccagcacaacccgatgatcggcctggccagagaaatgatcgaagctggtgaactgggcgatatcgtcagttttcagggcgaattcagcgaggacttcatgggcagcgccacgtcgccctggtcatggcgttgtgaagcggcccatgcgggcggcgcactggccgacctgggcagccacctgctggcaatggcccgttacctgctgggcgacatcgaagccgtctgcgccgacgccaacaccgtgcatagccagcggcctgccagcccgggcagcaacgagatgcgcgccattgccgtggatgaccagacccacgcgctgctgcgctttgccagcggcgcgcgcggaaccttcagcagcagttggctcaagcacggctataaaaatcacctgagctttgaaatcagcggcacccagggcacgctgacgtacgatcaggagcgtttgaacgagttgcgtatctatcgccccggcgcgccggggcgcgatggttttcagcgcctgttggcggggcctgcgcaacccggttacgcagcgttctgccccgctccggggcatcaattgggttataacgaactcaaggcactggaggtgcaggcgctgattctcgcggtctgcggccagggcagccgaggcccggattttgaagaggcctggcagatcgagcgtctggccaccgccattcgcctcgccgcgcacgaacagcgctgggtcgcgctcgacgatatctga

SEQ ID NO: 33502 - protein, 382 aa, Pseudomonas syringae pv. tomato str. DC3000
MQQSPSTSRPQLGIGLIGTGFMGRAHALAFGSANAALELPARIHLAALADADSARAEQCAQAWGFDRSHADWQQLVEDPRVQIVAITTPNHLHFPMAMAAIAAGKAVYCEKPLAVSLAQADEMQRSAKAAGVVTQVGYNYQHNPMIGLAREMIEAGELGDIVSFQGEFSEDFMGSATSPWSWRCEAAHAGGALADLGSHLLAMARYLLGDIEAVCADANTVHSQRPASPGSNEMRAIAVDDQTHALLRFASGARGTFSSSWLKHGYKNHLSFEISGTQGTLTYDQERLNELRIYRPGAPGRDGFQRLLAGPAQPGYAAFCPAPGHQLGYNELKALEVQALILAVCGQGSRGPDFEEAWQIERLATAIRLAAHEQRWVALDDI

SEQ ID NO: 33503 - DNA, 1023 bp, Pseudomonas syringae pv. tomato str. DC3000
  CDS (1)..(1023): transl_table=11
atgagtgcatccgagacccttcgccttggcctcatctgcgctggccgtatgggcagttttcacggccagactgccgccctgcgtatccctggtgcctgcctggcggccatcgcagacccgacacctggccaggccgctcgcctcgctaccgaacttggcgtagagcggttttacactgacccgcagcaattgctcgacgacccggatatcgacggcgtactgatcgccgccccggcccgcagccatgccgagttagtgatcagcgcggcccgggcaggcaaaggtgtgttttgtgagaaacccatggctatcacactggacgaagccgaccgcgctatcgcggccgcagccgatgcgcaagtgacgctgcaagtcggcttcaaccgtcgctttgcgaaaagcttccgcactgcccacctggacgtggttgccgggcggatcggcacgccgcaactgctgcgctctctgacgcgcgatccggccttgaacaatcccgccgcctcgccgcagtgggtgattttcctcgagaccttgatccatgacttcgatagcctgcgctacctcaaccccggtgccgaagccgtcgaagtgttcgtgatggccgatgccctcattgcaccggactacaagagtaaggggtttctcgacaccgcggtggtcacgatccgtttcgacaacggcgctatcgccacggccgaagcgaatttccaggcggtctatggctacgatgtccgaggcgaagtcttcggcagcgcgggcatgctgaccatgggcagcgtcaatgactctgacctggttcgctatctggccaacggcatccagagcgacacccagcgcctggacactgacctgctgcgtgatgcgtatgtggccgaactcaaccactttgcagactgcctgcgtaccggcgcaaaaccactcgccagcggcgaagatgcccgggcagcactggcaatcgcccgcgcgtgcatcgagtcgttccaactaggtaaagcggtgcgcgtcgagggagcccgctcatga

SEQ ID NO: 33504 - protein, 340 aa, Pseudomonas syringae pv. tomato str. DC3000
MSASETLRLGLICAGRMGSFHGQTAALRIPGACLAAIADPTPGQAARLATELGVERFYTDPQQLLDDPDIDGVLIAAPARSHAELVISAARAGKGVFCEKPMAITLDEADRAIAAAADAQVTLQVGFNRRFAKSFRTAHLDVVAGRIGTPQLLRSLTRDPALNNPAASPQWVIFLETLIHDFDSLRYLNPGAEAVEVFVMADALIAPDYKSKGFLDTAVVTIRFDNGAIATAEANFQAVYGYDVRGEVFGSAGMLTMGSVNDSDLVRYLANGIQSDTQRLDTDLLRDAYVAELNHFADCLRTGAKPLASGEDARAALAIARACIESFQLGKAVRVEGARS

SEQ ID NO: 33505 - DNA, 1011 bp, Streptomyces avermitilis MA-4680
  CDS (1)..(1011): transl_table=11
atgcgcatcggacttatcggagcgggtcgtatcggtacattccacgcgaccacgctcagccgccaccgcgacgtcggctcgctcatcatcacggacgtcgcccctgctcgggcccatgaactcgcggaccgcctgggcgaaaccgcggcgcccggcgtggacgagatcttcacctggggtgtcgacgccgtgatcatcacggccgcgaccgcggcccacgccgaactgatcggccgggcggcgcgctccgggctcccggtgttctgcgagaagcccatcgccgtcgatctgccgggcacgctgtccgcactgtccgaggtggacgccgccggaacgattctccagatgggtttccagcgccgcttcgacgtgggttacacgaacgcgcgggaggcggtgcgctccggccggctggggcggctgcacacggtccgtgcgatgacggccgaccagtcaccgcccccgcccgactacctcccgctctccggcggcatctaccgcgactgcctggtccacgacttcgacatcgtgcgctgggtgaccggccgcgagatcgtcgaggtgtacgcgaccggggccgatgccgggcccgcgatgttccgcgaggcccaggacgtcgacacggccgcggtggtcctcacgctcgacgacggcacgctcgccacggcgacggcgacccgcatcaacggggccggctacgacgtccgcatggaactggcaggtgagctggacacggtcgcggtcggtctggacgaccggacgccgatcgcctccacggaaccggccgggccgccgcccgcggacaagccgtggaccggcttcctcgagcgcttcgggcccgcgtacgaggcggagctggccgcgttcgtcgaggtggtgcgcggcgagcgcgccaacccctgcgacggccgcgaggcactccaggcgctgcgcgtcgcggaggcctgcgagctgtcccggcacgagcggcgcccggtgcagctcggggagatcgcgggcgggcgggactaa

SEQ ID NO: 33506 - protein, 336 aa, Streptomyces avermitilis MA-4680
MRIGLIGAGRIGTFHATTLSRHRDVGSLIITDVAPARAHELADRLGETAAPGVDEIFTWGVDAVIITAATAAHAELIGRAARSGLPVFCEKPIAVDLPGTLSALSEVDAAGTILQMGFQRRFDVGYTNAREAVRSGRLGRLHTVRAMTADQSPPPPDYLPLSGGIYRDCLVHDFDIVRWVTGREIVEVYATGADAGPAMFREAQDVDTAAVVLTLDDGTLATATATRINGAGYDVRMELAGELDTVAVGLDDRTPIASTEPAGPPPADKPWTGFLERFGPAYEAELAAFVEVVRGERANPCDGREALQALRVAEACELSRHERRPVQLGEIAGGRD

SEQ ID NO: 33507 - DNA, 1110 bp, Rhodopirellula baltica SH 1
  CDS (1)..(1110): transl_table=11
atgaaccgggaattgcgagtcgccgtcattggtgcaggtcacttgggccgaatccacgcgaaattgatttcacaagtcgatggtgctcgcctcgtcgcggtttgcgacccggtgcaagccgcgtgtcaggcggtcgccgacacgcacggcgttgcagctcactcggattaccgcgatgtcatcgaagacatcgatgccgccatcatcgcggctcccaccgactatcacgcggacatcgcgtcgacgctgatcaaagccggcaaacacttgatggttgaaaagccattggccgccgaatccgacgacgctcgccgattggcattgatggcatcgacacgcaatgtcgtgcttcaagtaggccacgtcgaacgattcaatccagccttcaccgcgttggaagagtttggcgttgatgtgaaatatgtcgaagcgactcgtgcatctcgcttccccggacgttgtttggatgtcggcgttgtcatggacctgatgatccatgatttggatttggttttatctctgacacaatccgccgtacgatccatttcggccagcggcatttccgtggtcagcgatcacgaagacatcgccgaagcacgcatcgaatttgaatgcggcatggtggccaacctgaaagcatcccgtgtcagcccactgcccgcccgcgacatgacgctgttcagccccgccggttttgcacaaatcgattttggcaaaccttcgctcgcgaccgtgcgtgccagtgaaacactgtcgactcgccagttcgatctgaacgaacaaacagacaatccactcgggtacgcggacacactgttcagcgaacacttgcagtgcgaagtcaacgaactgcaaccccggaacgcgattctcgacgagctgcatgatttcgtcatcagcgtcgaaagcggatcgtcaccgatcgtcgacgggtccgcgggggctcgagctgttcgtgttgccggttcgatcttggatgcgatcgacgaacgagcctggtactcgtatgcaggagccgatgaacgtggaccgctcgcgattccacgacgtcgtgttggtcagccaaccaaacgcgaaggcgatgcaacgccggcccgccgtgctgcctaa

SEQ ID NO: 33508 - protein, 369 aa, Rhodopirellula baltica SH 1
MNRELRVAVIGAGHLGRIHAKLISQVDGARLVAVCDPVQAACQAVADTHGVAAHSDYRDVIEDIDAAIIAAPTDYHADIASTLIKAGKHLMVEKPLAAESDDARRLALMASTRNVVLQVGHVERFNPAFTALEEFGVDVKYVEATRASRFPGRCLDVGVVMDLMIHDLDLVLSLTQSAVRSISASGISVVSDHEDIAEARIEFECGMVANLKASRVSPLPARDMTLFSPAGFAQIDFGKPSLATVRASETLSTRQFDLNEQTDNPLGYADTLFSEHLQCEVNELQPRNAILDELHDFVISVESGSSPIVDGSAGARAVRVAGSILDAIDERAWYSYAGADERGPLAIPRRRVGQPTKREGDATPARRAA

SEQ ID NO: 33509 - DNA, 1008 bp, Synechococcus sp. WH 8102; identical to SEQ ID NO: 12008
  CDS (1)..(1008): transl_table=11

SEQ ID NO: 33510 - protein, 335 aa, Synechococcus sp. WH 8102; identical to SEQ ID NO: 12009

SEQ ID NO: 33511 - DNA, 1050 bp, Photorhabdus luminescens subsp. laumondii TTO1
  CDS (1)..(1050): transl_table=11
atgctgagcactatcaacgacagaaagataaaatttgctttagtcggttgtggacggatcgctaaaaatcatttcaattctctggaagtacatcaagaagcagccgaattagtcgccgtctgtgataacgatcaagaagcattaaacgcagcagtagaaaaaaccggcgtcccgggtttcagcgacttcaatacaatgttggataacatcaccgcggatatcattatcctgaccactccctctggccttcatccagcacaggcgatgacctgctttgataaaggctttcacgtcgtcaccgaaaagccaatggcaacccggctggctgagggggaaaacatggtcaaagcggcagataaagccggaaaacacctgtttgtcgtcaaacaaaaccgcttaaatgccaccttacaattgctgaaacgggcggtcagtgaaaaacggtttggcaaaatccacctggtccacctgaatgttttctggacccgtccccaggcttattacgatcaagccgcctggcggggcacctgggaatttgatggcggtgccttcatgaatcaggcgagccactatgttgatttaattgaatggctaatcggcccggtcaaagatgttcaggccatgacatcaacccacttagatatcgaaacagaagataccggggtactcaatatccgctggcgggatggcacattaggctcaatggctgtcaccatgtgcacttatccgcaaaatctcgaaggttccatcaccatcttgggggaaaaaggcacggtcagagtggggggtttagccgtcaatgaaatccaggaatggcatttcgctgacgaaaaagagtatgaccaacaagtcaaaaccgccaattacgaaaccacttctgtttatggctttggccatccgctttattacaaaaatgtcattgaggtgatgaaaggcgaagcccaacccatcactgatggccgggaaggcttaaaatccttagagctgcttatcgccgcctacctgtcagccagagataacaaaaccatttctttgcctttaacctattaa

SEQ ID NO: 33512 - protein, 349 aa, Photorhabdus luminescens subsp. laumondii TTO1
MLSTINDRKIKFALVGCGRIAKNHFNSLEVHQEAAELVAVCDNDQEALNAAVEKTGVPGFSDFNTMLDNITADIIILTTPSGLHPAQAMTCFDKGFHVVTEKPMATRLAEGENMVKAADKAGKHLFVVKQNRLNATLQLLKRAVSEKRFGKIHLVHLNVFWTRPQAYYDQAAWRGTWEFDGGAFMNQASHYVDLIEWLIGPVKDVQAMTSTHLDIETEDTGVLNIRWRDGTLGSMAVTMCTYPQNLEGSITILGEKGTVRVGGLAVNEIQEWHFADEKEYDQQVKTANYETTSVYGFGHPLYYKNVIEVMKGEAQPITDGREGLKSLELLIAAYLSARDNKTISLPLTY

SEQ ID NO: 33513 - DNA, 1074 bp, Gibberella zeae PH-1
  CDS (1)..(1074)
atgtcgtcttcaaaggtcagaattgccgtcatcggtgctggtgcaatcggaccccgccacgcaagaaccgtggcaaacagcagcgtcgctatcctctctgccatcgtcgacccagcaccatctggcgcgcaactagctactgaactaaacgttccacattatctatctattccagatctccttcagtcacccgataagcctgatgctgcaatcatctctaccccaaatttcacccatgttgccttatctaaagagctgtcatctggtggcatacacatcctcatcgaaaaaccattcagtaccgatgtgactagcggcaaagagctcgtgcggcatctggaaggcaccggagtgaaggctcttgtgggacatcatcgaaggttcaatccgtatatggtggctacaaagaagatcctctcctcgggttcgctgggccaaataattgctgtgaatggtctgtggactttgtataaacccccggagtactttgatgctcccgcggaatggcggagggataacacaggcggcccggtccttattaacatgatccacgaggtagatctgttacactacctcttcggtccaatcgttcgagtccatgccgaaaagacaatctcacaaagagggttcgaagcagaggaaggggcagctctcacactgcgctttaaatcaggcattgtcggaagtttcataatttctgaccatactccatcaccgcacaacttcgaatcgggcacaggagagaatcccgaaattccaaagactggacaagatttttatcgcatctttggaatagatgggtctctgagtgttccagatatgacgcagtggtcttacaagggcagagataaaaagtcatggcactcagaacttgcacaggagcaggcagatgttccaccacgagtaccattcgatgatcaactggaacatttcgtgaaggtagtcaaaggggaagaggcgcctagctgtacggcaaaagcaggacttgccgctcttgttgtttgtgaggctatcaaggatgctctggctgcaaacaagacggttgacattgaagagtatgacttgtcggggtag

SEQ ID NO: 33514 - protein, 357 aa, Gibberella zeae PH-1
MSSSKVRIAVIGAGAIGPRHARTVANSSVAILSAIVDPAPSGAQLATELNVPHYLSIPDLLQSPDKPDAAIISTPNFTHVALSKELSSGGIHILIEKPFSTDVTSGKELVRHLEGTGVKALVGHHRRFNPYMVATKKILSSGSLGQIIAVNGLWTLYKPPEYFDAPAEWRRDNTGGPVLINMIHEVDLLHYLFGPIVRVHAEKTISQRGFEAEEGAALTLRFKSGIVGSFIISDHTPSPHNFESGTGENPEIPKTGQDFYRIFGIDGSLSVPDMTQWSYKGRDKKSWHSELAQEQADVPPRVPFDDQLEHFVKVVKGEEAPSCTAKAGLAALVVCEAIKDALAANKTVDIEEYDLSG

SEQ ID NO: 33515 - DNA, 1182 bp, Debaryomyces hansenii CBS767
  CDS (1)..(1182)
atggtagccagttcattacaaatagttgttattggcgcagggcttattggaccacgtcatgcccaacatgtttaccagaatccgcaaaccaagctcttcggattcgttgatccaactccagctggagatgctgcagctgaaaaattcaaagttcgttcctttaagtccattagtgagatgattcagaactgtaacgaaacaaacacaccatatcctgatggagcaatagtatgtactcctaattcgctacacattagtgttgcagcagaattagcatctcacggaatccacttgttggtagagaagccattatcttcaagcgcagaagaatcaaaggcattggaggaatatacgaagatgaagaatgttaagttattagttggtcatcatagaagatttaatccttttatcatagaaactaagaagaatttgagtaaggttggcaatattgtcgccgttcagggggtatggactacccgtaaagctgataaatacttcgatgtttcgccatggcggacagacatcacgactggtggtggtgcattattaattaacatggtacatgatattgatttattacagtacttgtttggacctgtagcaagagtttatgcagaacctttaacgaaggaaagaattcaatacccaaatgcagacgaaggagctgcgttaactttgagatttaaaaatggtgtctgtggtacatttatttgttctgacagtgttacttcccccttcaattttgaggctggcaccggtgaaaatccaaccattccattccatgaaggattagaaggattctaccgtattttcgggtcagaaggcacactctctgtaccagatcttaatttatatcatcagaaaaacataaaaataccagaagataagagctggttaagtccagtagtcaaagaagccttggtttcaaaccgtgaacaagcgttacattccacgttaccattcgattttcagttagatcacttcattgatgttattaataacaagcaggagccattctgtacggccgaggatggtatgtctgctttgctttgtattgatgcacttataaaatccttgaaatcaggcttacctgaattggtggaagatgtaaatcacatcttgccaaattatgattccttgggcttagatgaagcgaatccagtcctctttaaacataattaa

SEQ ID NO: 33516 - protein, 393 aa, Debaryomyces hansenii CBS767
MVASSLQIVVIGAGLIGPRHAQHVYQNPQTKLFGFVDPTPAGDAAAEKFKVRSFKSISEMIQNCNETNTPYPDGAIVCTPNSLHISVAAELASHGIHLLVEKPLSSSAEESKALEEYTKMKNVKLLVGHHRRFNPFIIETKKNLSKVGNIVAVQGVWTTRKADKYFDVSPWRTDITTGGGALLINMVHDIDLLQYLFGPVARVYAEPLTKERIQYPNADEGAALTLRFKNGVCGTFICSDSVTSPFNFEAGTGENPTIPFHEGLEGFYRIFGSEGTLSVPDLNLYHQKNIKIPEDKSWLSPVVKEALVSNREQALHSTLPFDFQLDHFIDVINNKQEPFCTAEDGMSALLCIDALIKSLKSGLPELVEDVNHILPNYDSLGLDEANPVLFKHN

SEQ ID NO: 33517 - DNA, 1143 bp, Candida albicans SC5314
  CDS (1)..(1143): transl_table=12
atgattgctccaaatctccttcaaataatagttgtgggggcaggtttaattggtcctagacatgcattacacgtttccaacaatcctcaaactgatttatttgcaataatagatcctaaccccgccactgccgatgttgcggaaactttcaacacgttatatttcccatcaattgaatcatgtatgaaatattgtgatgaaaactcgattccatacccagatggtgccatagtgtgtactcccaatcatacccatgtttccgtgggtgctgaattagcatcctatggaattcatttattagtcgaaaaaccaataggaagtacacctgaagatgccaaggcattaaaacattattgtgagataaaaaatgtaaaagttcttgtgggtcatcatagaagattcaatccttatatcttggccacaaagaaaaacttgtttaaagttggtcaaataattgccattcaaggaagttggatgttgagtaaaccacaagaatattttgatatatcaccatggaggaaaaatacaagcactggaggtggtgtgctattgatcaatttagtacacgatttggatttattacaatatatgtttggtaggattcagcgaatttatgcagaattactactgcaacaaagaactcatgaagccgatgaaggtgcagccttgacgattaaattcgaaagtggggtaactggtacattcatttgttccgataatgtcgtatcaccgtttaattttgaaagtggtaccggtgaaaatcctacaattcctcagaatcaaggggtgtcaggtatttatcgtatatttgggtctaaaggtaccttatcgatgcctgatatgaaattgtatcatcaagataaaggcgtcacatcttcatggactaatccaataaatgagactgttattgaactggatttggacaaattaccgtttgattctcagttggaacattttattgatttaattagaggtaatgtcaaagaaccttggtgttcaattgatgatggtatttctgcgttattgtgtattgatgcagttatgaggtcgattgaaagtgatatgccagtgaaagttcaggatattaaaagtgtgtcggccgattataaaaagttagggattgaccaaggtgtttttatgtag

SEQ ID NO: 33518 - protein, 380 aa, Candida albicans SC5314
MIAPNLLQIIVVGAGLIGPRHALHVSNNPQTDLFAIIDPNPATADVAETFNTLYFPSIESCMKYCDENSIPYPDGAIVCTPNHTHVSVGAELASYGIHLLVEKPIGSTPEDAKALKHYCEIKNVKVLVGHHRRFNPYILATKKNLFKVGQIIAIQGSWMLSKPQEYFDISPWRKNTSTGGGVLLINLVHDLDLLQYMFGRIQRIYAELLSQQRTHEADEGAALTIKFESGVTGTFICSDNVVSPFNFESGTGENPTIPQNQGVSGIYRIFGSKGTLSMPDMKLYHQDKGVTSSWTNPINETVIESDLDKLPFDSQLEHFIDLIRGNVKEPWCSIDDGISALLCIDAVMRSIESDMPVKVQDIKSVSADYKKLGIDQGVFM

SEQ ID NO: 33519 - DNA, 1023 bp, Prochlorococcus marinus str. MIT 9303; identical to SEQ ID NO: 12018
  CDS (1)..(1023): transl_table=11

SEQ ID NO: 33520 - protein, 340 aa, Prochlorococcus marinus str. MIT 9303; identical to SEQ ID NO: 12019

SEQ ID NO: 33521 - DNA, 975 bp, Mycobacterium sp. JLS
  CDS (1)..(975): transl_table=11
atgggtcactgcagagtcgcgttcgtcggagccggcggtgtcgccgtccgccatgcccgtcacctcgccgaactgcccgacgtgaccatcgcctcggtcaccgatcccgcgggccctgccgccgacgcgttcgcgcgggccaccggcgcggcggtggtccccgacctttccgcactcctggccgacccgccggatgccgtctacgtctgcgttccgccgcatgcgcacggtccgatcgaggagtcgctcgtcgaggcgggcgtcgcgttgttcgtcgagaaaccgttgggtaccgacccgggcaccgcccgacatatcgccggtctgatcggcgagcgtggtgtcaccagcgccgtcggccaccactggcggtattcggcggccgtcgggttggtacgggacatgttgggcgacagcgtcgttcggctcgccgtcgcatcgtggctggaccgggtgccgccggtggcgtggtggtgccgacgggacctgtcgggcgggcagatcgtcgagcaggcggtgcacgtgctcgacatgttgcggtatctcgtcggcgaggtcgccgaggtcagcgcctacgccaacgccgccccgccgagcgcgcccgacgccgacatcgacggggcgaccgcggcgaccctgcgcttcgcctcgggtgcggtcggtacggtcgccgccgcctgctgcctgacctggaagcacctcgccggtatcgacatccacgcggacgggctgagtgtcgcggtccgcgaagacgcgatcacggcacggacggccgacggaccgctgcagcgcgagttggaccccgacgacgccaagagggccgcagaccgcgcgttcatcgacgccgtgatggaccgcggggcgggccgcgacggaatcctcgtcgactacgccgacgccctgcgtacccacgaactggcctgtgcgatagcggaatccgcacacctggcacggccggtggcggtccatgtctga

SEQ ID NO: 33522 - protein, 324 aa, Mycobacterium sp. JLS
MGHCRVAFVGAGGVAVRHARHLAELPDVTIASVTDPAGPAADAFARATGAAVVPDLSALLADPPDAVYVCVPPHAHGPIEESLVEAGVALFVEKPLGTDPGTARHIAGLIGERGVTSAVGHHWRYSAAVGLVRDMLGDSVVRLAVASWLDRVPPVAWWCRRDLSGGQIVEQAVHVLDMLRYLVGEVAEVSAYANAAPPSAPDADIDGATAATLRFASGAVGTVAAACCLTWKHLAGIDIHADGLSVAVREDAITARTADGPLQRELDPDDAKRAADRAFIDAVMDRGAGRDGILVDYADALRTHELACAIAESAHLARPVAVHV

SEQ ID NO: 33523 - DNA, 1038 bp, Bradyrhizobium sp. ORS278
  CDS (1)..(1038): transl_table=11
ttgatcagtctccctgtccgtttggccgtcgccggagcgggtctcatcggccggcgtcacatcgagcagatcgacgcctgtccggaagcggtgctgacggcgatcatcgatccggcgcccgccgccaacgagcttgcgcaagcgcgcggcgtccgctgttattcgtcgcttgacgcgcttccggccgagcaccggcccgacggcgtggtcatcgccacgccgaaccagctgcacgtcgccaacggcatggcctgcctggccgcgggactgccggcgctgatcgagaagcccctggccgatgacgtcgcagcggcgcagacactggtcgaggccttcgaacgcgccggcgtgccgctcctgaccggtcatcaccgccgccacaatccgatgatccagcgcgccaaggccgagatcgacaccggccgtctcggccggatcgtcgccatccatggcgtattctggctgatcaagccgcacgattatttcgcgccggcctggcgccgcgaggccggcgccggcccggtgctgatcaatctcagccacgacatcgatttgctacgctatctctgcggcgacatcgtcgcagtgcaggcggcacagtccaaccaggtccgcggccatgccgtcgaggatacggcggcgatgatcctgcacttcgagtccggcgcgctcggcacgttcagcgtgtccgatacggtgcaggcgccctggagctacgagttcaccagtggcgagaacccggcctacagccggacgcaggaaagctgctaccagatcggcggcacgaaggggtcgctcgcgatcccgcagctcgacctgtggcatcatccggatgcggcgagctggtgggcaccgatcgcgcgcgagcggctcagctatgacatgcaggagccgctcgcccggcagattgggaatttctgcgcggtcatccgcggcacggccgctccggtggtcagcggtcgcgagggcctgaacacgctgcgcgtgatcgccgcgatcaagcgagccgcggcgtcgggagctcgtgagaccgtctga

SEQ ID NO: 33524 - protein, 345 aa, Bradyrhizobium sp. ORS278
MISLPVRLAVAGAGLIGRRHIEQIDACPEAVLTAIIDPAPAANELAQARGVRCYSSLDALPAEHRPDGVVIATPNQLHVANGMACLAAGLPALIEKPLADDVAAAQTLVEAFERAGVPLLTGHHRRHNPMIQRAKAEIDTGRLGRIVAIHGVFWLIKPHDYFAPAWRREAGAGPVLINLSHDIDLLRYLCGDIVAVQAAQSNQVRGHAVEDTAAMILHFESGALGTFSVSDTVQAPWSYEFTSGENPAYSRTQESCYQIGGTKGSLAIPQLDLWHHPDAASWWAPIARERLSYDMQEPLARQIGNFCAVIRGTAAPVVSGREGLNTLRVIAAIKRAAASGARETV

SEQ ID NO: 33525 - DNA, 1065 bp, Silicibacter pomeroyi DSS-3
  CDS (1)..(1065): transl_table=11
gtgagtgcgccgctgcccctttgcgtgatcggtgccgggtgtgtcggcatgcgtcatgtcgaggtggcgcggcggtcgccccaaattcgcctgaccgctgtggtcgagcccgtcgaaacccgccgccgcgccctggccgaaagcggccttgtcgcggttgccacgctggaggaggtgccgcgggaaacccgggcggcaatcgttgccacgcccacgccggaccaccttgcaaccgggctggccgcgctgagccggggctgggcggttctggtcgaaaagccgacggcgggcacgatggacgatgcccgcgtgctgctgggtgcggctgatcgcgccggtctgccgctttatgtggggcaccatcgccgctgccatccgttttcccgcgccgcgcgcgaggcgctgggcgggatcggcgatctcgtcggcctgcagggcctgtggtccctgcgcaagcacgacagctattatgccgaggactggcggcggcaggccggggcggggccgctgatgaccaatctcagccacgagatcgaccttttgcgttttctggtgggcgacatggtcgaggtctcagcgctgacctcctctgcccggcgcggtctggtggttcccgataccgccgcgcttgcgtttcgctttgccgatggggcgctggggtcgtttctgatctctgacgcgggcgcctcgccctggtcgttcgaggccgcctgtgccgagaaccccgccatcgcggtctccgggcaggattacatccgcattaccggcacagcgggcgcgctggagtttccgtcgctcacccgttggggccgctcggcccccggcgagatcgaatggtccaaaccgctggcccgcgcggccggggccgggtttgccagggtcgatccgctgctggaacagatcaaccgctttgccgctgtcctggagggcgcgcaggatgatgtcctgtgcaccggtaccgatgggaacgcggccctggaaatgacactggccgcggccctgtcgggcaagcttggacggccggtgagggcgcatgaggtgcccggcgactactctggcatatga

SEQ ID NO: 33526 - protein, 354 aa, Silicibacter pomeroyi DSS-3
MSAPLPLCVIGAGCVGMRHVEVARRSPQIRLTAVVEPVETRRRALAESGLVAVATLEEVPRETRAAIVATPTPDHLATGLAALSRGWAVLVEKPTAGTMDDARVLLGAADRAGLPLYVGHHRRCHPFSRAAREALGGIGDLVGLQGLWSLRKHDSYYAEDWRRQAGAGPLMTNLSHEIDLLRFLVGDMVEVSALTSSARRGLVVPDTAALAFRFADGALGSFLISDAGASPWSFEAACAENPAIAVSGQDYIRITGTAGALEFPSLTRWGRSAPGEIEWSKPLARAAGAGFARVDPLLEQINRFAAVLEGAQDDVLCTGTDGNAALEMTLAAALSGKLGRPVRAHEVPGDYSGI

SEQ ID NO: 33527 - DNA, 1149 bp, Pseudomonas syringae pv. syringae B728a
  CDS (1)..(1149): transl_table=11
atgcgcgaatcactttccacatcgcctgcgcaactgggtatcggactgatcggcaccggcttcatgggccgtgcccatgcgttggcgttcggcaacgccaacgctgcgcttgatctgcccgcacgcatccggctctgcgcgctggcggacgccgacagtgcacgcgccgagcaatgcgcaagcgcctgggggttcgaccgcagccacgctgactggcagcaattgatcgatgatccgcacgtacagatcgtggccattaccacccccaatcacctgcacttccccatggccatggctgccatcgccgcaggcaaggcggtgtattgcgaaaaaccgctggccgtgaatctcgccgaggccgatgaaatgcgccgcagcgccaaggctgcgggtgtcgttacccaggtgggctacaactaccagcacaacccgatgatcggactcgccagggaaatgatcgaagccggcgaactgggcgaaatcgtcagctttcagggcgagttcagcgaggatttcatgggcgatccggcgtcaccctggtcgtggcgctgtgaagcggcgcatgccggcggtgcactggccgatctgggcagccacttgctggcgatggcgcgtcatttgctgggcgacatcgaagcagtctgcgccgatgccagcaccgtacaccgtgaacgcccggcgagcatcggcagccagcaactgcgcgccattgcggtggacgaccagacccacgcgctgctgcgctttgccaacggtgcgcgcggaaccttcagcagcagctggctcaaacacggctataaaaaccacctgagtttcgagatcagcggcaccaaaggcacgttggcgttcgatcaggagcggctcaacgagctgcgcctctaccgtacaggcgcagccggacgcgatggttttcagcgactgctggccggcccagcacaaccgggttacgccgcattctgcccggctcccggccaccagctgggctacaacgagctcaaggcgctcgaagtacaagcgctcatccaggccgtctatggtcagcgcagccgtggcccggacttcgaggaagcgtggcaaatcgaacgcctggcgacggccattcgcgtggccgcagccgagcaacgctgggtcgcgctcaccgacatctga

SEQ ID NO: 33528 - protein, 382 aa, Pseudomonas syringae pv. syringae B728a
MRESLSTSPAQLGIGLIGTGFMGRAHALAFGNANAALDLPARIRLCALADADSARAEQCASAWGFDRSHADWQQLIDDPHVQIVAITTPNHLHFPMAMAAIAAGKAVYCEKPLAVNLAEADEMRRSAKAAGVVTQVGYNYQHNPMIGLAREMIEAGELGEIVSFQGEFSEDFMGDPASPWSWRCEAAHAGGALADLGSHLLAMARHLLGDIEAVCADASTVHRERPASIGSQQLRAIAVDDQTHALLRFANGARGTFSSSWLKHGYKNHLSFEISGTKGTLAFDQERLNELRLYRTGAAGRDGFQRLLAGPAQPGYAAFCPAPGHQLGYNELKALEVQALIQAVYGQRSRGPDFEEAWQIERLATAIRVAAAEQRWVALTDI

SEQ ID NO: 33529 - DNA, 1107 bp, Pseudomonas fluorescens Pf-5
  CDS (1)..(1107): transl_table=11
atggacgagctcggcattggtttgatcggcaccggtttcatggggcgtgcccacgccctggcgtttcgcagtgccggcgcggtcttcgaattgccggtgcgcctgcacttggcggccctggccgacgccgacgcccagcgcggcgaacactgcgccggcgcctggggctttgcccaggcccatgcagactggcaggccctggtggccaacccccgggtcaacctggtggccatcaccacccccaaccacctgcacttccccatggccatggcggcgctggccgcaggcaaggcggtgtactgcgaaaagcccctggcggtcagcgtcgaacaggcccggcagatgcaccacgcggcccaggccgccggggtggtgacccgggtgggctacaactaccagcacaacccggtgatcgcccaggccagggacatgatcggcaacggcgaactggggcaactggtgagtttccagggcgagttcagcgaagacttcatggccgacccggatgccccctggtcctggcgttgcgagccgcagcacgccggcggcgccctggcggacctgggcagccacctgctggccatggcacgctttctcatggggccggtgcaggcggtgtgcgccgatacccagaccgtgcacctgcaacgccccaccgaagccggcagccaggaacgccgcgccatcgccgtggatgaccaggcccatgccctgctgcgctttgccaatggcgcgcggggtacgctgagcagcagctggatcaagcatggttacaagaaccacctgagcttcgagatcagcggcaccctcggcaccctggcgttcgaccaggaacgcctcaacgaactgcgcctgtaccgggtcggccagaagggtttccagcgcctgctggccgggcccgccctgcccggctacgcggccttcagcccggccccggggcaccagctgggctacaacgaactcaagaccctggaagttcacgaattgatcatggccctgtgcggccagggccgggacggcacggatttcgctgaagcctgggaagtggagcgcctggccgcggcgatccgcactgccgccgccgaacagcgctgggtggcactgtag

SEQ ID NO: 33530 - protein, 368 aa, Pseudomonas fluorescens Pf-5
MDELGIGLIGTGFMGRAHALAFRSAGAVFELPVRLHLAALADADAQRGEHCAGAWGFAQAHADWQALVANPRVNLVAITTPNHLHFPMAMAALAAGKAVYCEKPLAVSVEQARQMHHAAQAAGVVTRVGYNYQHNPVIAQARDMIGNGELGQLVSFQGEFSEDFMADPDAPWSWRCEPQHAGGALADLGSHLLAMARFLMGPVQAVCADTQTVHLQRPTEAGSQERRAIAVDDQAHALLRFANGARGTLSSSWIKHGYKNHLSFEISGTLGTLAFDQERLNELRLYRVGQKGFQRLLAGPALPGYAAFSPAPGHQLGYNELKTLEVHELIMALCGQGRDGTDFAEAWEVERLAAAIRTAAAEQRWVAL

SEQ ID NO: 33531 - DNA, 1053 bp, Pseudomonas fluorescens Pf-5
  CDS (1)..(1053): transl_table=11
ttgagcacgccactgcgcatcgccctgatcggcgtcggcaatatggggcagcagcactatcagcacctcaagactctggccgaggcctgcctctgcgcggtggccgatcccggcccccaggcggcggctgtcgccgcacaatggcaggtgccgcactttgccgatcaccagaccctgctccgggaaatccgcccggatgcggtgatcgttgccaaccctaacaacctccatgtcagcaccgcccaggattgcctcgccgcaggcgtgccggtgctgctggaaaaaccggtgggcgtgcatctggatgaagtgcgcgaattggtagcggccacgcggaccactggggtcccggtgctggtgggtcatcatcgacggcacaacccattgatcgcccgcgcccatgaactgctgcgcagcggcgccctggggcgcctgaccaacgtcaccgcactctggcaattgcagaagcccgagcactatttcgacattccctggcgccgcgaggccggggccggcatgttgctgaccaacctgatccacgacctggacctgctgcgccacctgtgcggcgaggtgcgccaggtccaggccatcaccagcaacagcgtgcgcggctacgccaacgaggattgcgcagcggtgctgctgcaattcgacaacggcgccctgggcagcctgaccggttccgacgccgcggccgcgccctggagctgggagctggattccggggagaacccggtgtacccgcgccaggccgatcagccttgctacctgctggccggcactcagggagccttgagcattcctcagctcaagcgctggcactacgccgaagcgggcgccggttggcaccagcccttgttgatgcagcaggaaagcttcgtgccggatgaggcgctgcgcttgcaactgcagcatttcgtcaaggtcgcccggggcgaagtcgcgcccctggtcagcgccgccgatgccgctcgtaccctggccctgatcgaagccattcgccaggccgccgccacgggtcgcgcctgcaccccaacccacattgagtga

SEQ ID NO: 33532 - protein, 350 aa, Pseudomonas fluorescens Pf-5
MSTPLRIALIGVGNMGQQHYQHLKTLAEACLCAVADPGPQAAAVAAQWQVPHFADHQTLLREIRPDAVIVANPNNLHVSTAQDCLAAGVPVLLEKPVGVHLDEVRELVAATRTTGVPVLVGHHRRHNPLIARAHELLRSGALGRLTNVTALWQLQKPEHYFDIPWRREAGAGMLLTNLIHDLDLLRHLCGEVRQVQAITSNSVRGYANEDCAAVLLQFDNGALGSLTGSDAAAAPWSWELDSGENPVYPRQADQPCYLLAGTQGALSIPQLKRWHYAEAGAGWHQPLLMQQESFVPDEALRLQLQHFVKVARGEVAPLVSAADAARTLALIEAIRQAAATGRACTPTHIE

SEQ ID NO: 33533 - DNA, 1065 bp, Anabaena variabilis ATCC 29413; identical to SEQ ID NO: 12024
  CDS (1)..(1065): transl_table=11

SEQ ID NO: 33534 - protein, 354 aa, Anabaena variabilis ATCC 29413; identical to SEQ ID NO: 12025

SEQ ID NO: 33535 - DNA, 1062 bp, Synechococcus elongatus PCC 7942; identical to SEQ ID NO: 12030
  CDS (1)..(1062): transl_table=11

SEQ ID NO: 33536 - protein, 353 aa, Synechococcus elongatus PCC 7942; identical to SEQ ID NO: 12031

SEQ ID NO: 33537 - DNA, 942 bp, Methanococcoides burtonii DSM 6242; identical to SEQ ID NO: 12034
  CDS (1)..(942): transl_table=11

SEQ ID NO: 33538 - protein, 313 aa, Methanococcoides burtonii DSM 6242; identical to SEQ ID NO: 12035

SEQ ID NO: 33539 - DNA, 1041 bp, Acidobacteria bacterium Ellin345; identical to SEQ ID NO: 12036
  CDS (1)..(1041): transl_table=11

SEQ ID NO: 33540 - protein, 346 aa, Acidobacteria bacterium Ellin345; identical to SEQ ID NO: 12037

SEQ ID NO: 33541 - DNA, 1062 bp, Acidobacteria bacterium Ellin345
  CDS (1)..(1062): transl_table=11
atggcacatcccggttctgcgattaaggatcgcaaaattaggttcgctgttgttggttgcggccgaatttccaaaaaccactttgattcgttgaaaacgcacgaggcggacaccgaactcgtctcggtttgcgacgtagatccggcggcgctggaggctgccgtcaaaacgaccggcgccaagggctacgacaaactggacgccatgctggcggacagtccggcggacgtggtggtgctcgcgtctcccagcggcctgcactcgaaccaggccatcgcggtggcgcactccaagcgtcacgtggtcacggaaaagccaatggctacccgttgggcggacggccaggcgatggtccgcgcctgcgaccacgccggggtccggttgttcgtagtgaagcagaaccggggcaatgcgaccctgcgggctctgaagaccgccatcgaccaggggcggtttggacgcatttacatggtgaacgtaaacgtcttctggtcgcgtccgcagtcgtactacgacagcgctgattggcgcgggacgtgggagttcgatggcggcgcctttatgaaccaggcgagccattacgtggacctgctcgattacatgatcggcccggtggagagcgtgcaggcctatacggcgacgctggcacggaacatcgaggtcgaggacagcggcgtggctagcatcaagtggcggtccggggcgctcgggtccatcaacgtgaccatgctggtgcataagaagaacttcgaaggctcgctgaccatcatcggcgagaaggggaccgtgcgcattggtggcgtcgcggtgaacgagatccagcattgggagtttgaagattcccgtccggaagaccagaagatcaaggaagcgagctaccagacgacgtcggtgtatgggttcggacatccgcactattacaagaacgtgattgatgtcctgcgcggggagtgtgaaccgcaaactgacggcagagaggggctgcgttcgctcgagcttttgattgcgacgtatatctccgcacgcgacggtcgccgcatttcgctgccgctcgattactag

SEQ ID NO: 33542 - protein, 353 aa, Acidobacteria bacterium Ellin345
MAHPGSAIKDRKIRFAVVGCGRISKNHFDSLKTHEADTELVSVCDVDPAALEAAVKTTGAKGYDKLDAMLADSPADVVVLASPSGLHSNQAIAVAHSKRHVVTEKPMATRWADGQAMVRACDHAGVRLFVVKQNRGNATLRALKTAIDQGRFGRIYMVNVNVFWSRPQSYYDSADWRGTWEFDGGAFMNQASHYVDLLDYMIGPVESVQAYTATLARNIEVEDSGVASIKWRSGALGSINVTMLVHKKNFEGSLTIIGEKGTVRIGGVAVNEIQHWEFEDSRPEDQKIKEASYQTTSVYGFGHPHYYKNVIDVLRGECEPQTDGREGLRSLELLIATYISARDGRRISLPLDY

SEQ ID NO: 33543 - DNA, 975 bp, Mycobacterium sp. MCS
  CDS (1)..(975): transl_table=11
atgggtcgctgcagagtcgcgttcgtcggagccggcggtgtcgccgtccgccatgcccgtcacctcgccgaactgcccgacgtgaccatcgcctcggtcaccgatcccgcgggccctgccgccgacgcgttcgcgcgggccaccggcgcggcggtggtccccgaccttcccgcactcctggccgacccgccggatgccgtctacgtctgcgttccgccgcatgcgcacggtccgatcgaggagtcgctcgtcgaggcgggcgtcgcgttgttcgtcgagaaaccgttgggtaccgacccgggcaccgcccggcgtatcgccggtctgatcggcgagcgtggtgtcaccagcgccgtcggccaccactggcggtattcggcggccgttgggttggtacgggacatgttgggcgacagcgtcgttcggctcgccgtcgcgtcgtggctggatcgggtgccgccggtggcgtggtggtgccgacgggacctgtcgggcgggcagatcgtcgagcaggcggtgcacgtgctcgacatgttgcggtacctcgtcggcgaggtcgccgaggtcagcgcctacgccaacgccgccccgccgagcgcgcccgacgccgacatcgacggggcgaccgcggcgaccctgcgcttcgcctcgggtgcggtcggtacggtcgccgccgcctgctgcctgacctggaagcacctcgccggtatcgacatccacgcggacgggctgagtgtcgcggtccgcgaagacgcgatcacggcacggacggccgacggaccgctgcagcgcgacctggaccccgacgacgccaagagggccgcagaccgcgcgttcatcgacgccgtgatggaccgcggggcgggccgcgacggaatcctcgtcgactacgccgacgccctgcgtacccacgaactggcctgtgcgatagcggaatccgcacacctggcacgaccggtggcggtccatgtctga

SEQ ID NO: 33544 - protein, 324 aa, Mycobacterium sp. MCS
MGRCRVAFVGAGGVAVRHARHLAELPDVTIASVTDPAGPAADAFARATGAAVVPDLPALLADPPDAVYVCVPPHAHGPIEESLVEAGVALFVEKPLGTDPGTARRIAGLIGERGVTSAVGHHWRYSAAVGLVRDMLGDSVVRLAVASWLDRVPPVAWWCRRDLSGGQIVEQAVHVLDMLRYLVGEVAEVSAYANAAPPSAPDADIDGATAATLRFASGAVGTVAAACCLTWKHLAGIDIHADGLSVAVREDAITARTADGPLQRDLDPDDAKRAADRAFIDAVMDRGAGRDGILVDYADALRTHELACAIAESAHLARPVAVHV

SEQ ID NO: 33545 - DNA, 1191 bp, Rubrobacter xylanophilus DSM 9941
  CDS (1)..(1191): transl_table=11
gtgaggagggagatcggcgtagcggtgatcggcatggggtggatggggcaggtccacagccggggctaccggcggctcttccaccactaccccgagtgcccgctcaggccgcggctggtggtggccgccgacgccgtcggggagcgggcgcgccagagcgcggagctgctcggcttcgaggggtggaccgccgactggcgggaggccgtcgagcaccccgaggtagaggcggtaagcatcgccacgcccaactacctgcaccgcgagatagccgtcgcggcggcgcgggcgggcaagcacatctggctcgagaagccctgcggccgggtccccgaggagacgtacgagatcgcgcgcgccgtggaggaggccggggtccggagcaccgtcgggctcatgtaccgccacgtccccgtcgtggagcacgcgagagagctcatcgcctccggggcgctcggggagatcacgcactacaggggctacttcctcgccgactacgccgccgatcctcacggcgccctcacctggcgctacaagctcgacggcgcggggctcggggtgctcggggacatcatgccccacacggtggacatggcccagaacctgctcggccccatagagagtgtgctcgcgcagaaggagaccttcatcaaggagcgcccggaggtgccggaggggatggggacgggccacttcgtcgtcgagggcggcgagatgggcgcggtcgagaacgaggactacgtcggctgcctcgtgcgcttcgcgagcggggcgcgcgggacgctcgagaacagccgcgtctgcgtcgggccgcacgtcaggaacgccttcgaggtcaacggcaccgagggcgccctcgcctgggacttccagcgcctcaacgagctcgagctctaccgcttcgacgggaccggcgagaggggatacaagaccgtctacgccgcgccgaagatgggcgacttcgagcgcttccagcctggggcggggatctccatgggctacgacgacctgaaggtcaccgaggcgtacaggttcctcacctccatatacgagggccggcagaaggagccggggatggccgagatcgtctccgcgatgcgcgtcgtcgaggcgatggaccgctcctgccggtctggggggtgggaggcggtcgggcagggcgtcccctccgagcggggggccggggcatga

SEQ ID NO: 33546 - protein, 396 aa, Rubrobacter xylanophilus DSM 9941
MRREIGVAVIGMGWMGQVHSRGYRRLFHHYPECPLRPRLVVAADAVGERARQSAELLGFEGWTADWREAVEHPEVEAVSIATPNYLHREIAVAAARAGKHIWLEKPCGRVPEETYEIARAVEEAGVRSTVGLMYRHVPVVEHARELIASGALGEITHYRGYFLADYAADPHGALTWRYKLDGAGLGVLGDIMPHTVDMAQNLLGPIESVLAQKETFIKERPEVPEGMGTGHFVVEGGEMGAVENEDYVGCLVRFASGARGTLENSRVCVGPHVRNAFEVNGTEGALAWDFQRLNELELYRFDGTGERGYKTVYAAPKMGDFERFQPGAGISMGYDDLKVTEAYRFLTSIYEGRQKEPGMAEIVSAMRVVEAMDRSCRSGGWEAVGQGVPSERGAGA

SEQ ID NO: 33547 - DNA, 1038 bp, Mesorhizobium sp. BNC1
  CDS (1)..(1038): transl_table=11
atgcaggatgccacaaaactcggtctgggcgtggtcgggctcggcatggtcgcggcgacacatgcgcgggcgttgcaggatctttgcgacttgatcgccgtgcggggggtcttcgcccgcgatccgcggcggcgggcggacttcgccggggtgttcggctttccggcggcggaaagcgttgaggaactcatccgccgggacgacgtagatgccatcctggtgctgaccccgcccaatgcgcggatggagatcgtcgaggctgcttttaacgccggcaagcacgttctgttggagaagccgatcgaacgcgacagcgccgccgccggccgaatcgtcgagatgtgctgcgccgccggcgtcaccctgggcgtcacttttcagcaccgtttccgcgaggcatcgcaagcgctgaaggggctgatcgacggcggcagccttggcgcggtctgcgcggtgcgggtatcggttccctggtggcgcgaccagtcttattacgacgtgccgggccgcggcacctatgcgcgcgacggcggcggggtgctgatcagccaagcgatccacacgctggatctgatgatctggctgctgggccttcccgaggcggtgacggcgatggcggcgactaccggcctgcaccggatggaagccgaggattttgtcgctggggcgttgcgttggcccggcggcgccgtcggctccctgaccgccaccacggcagcctttccgggcaggaacgagtacatcgtcgtcgatttcgaacgcgcgtcggcttgcttggagggcggcgagctggtcgtccggcaccacgacagccgcaccgagataatcgggacggcgggcggctcgggcggcggcgtcgatccgatggcattcacccatgaatggcatcgctcagccatcgaggacttcgcccgcgccatcgccgggggcagggcccccgttgtctcgggcgaaagcgcactacaggtccaccggctgatcgacgcgcttctcgcctcggctagcgagggccggcaagtcctactgaacccacattga

SEQ ID NO: 33548 - protein, 345 aa, Mesorhizobium sp. BNC1
MQDATKLGLGVVGLGMVAATHARALQDLCDLIAVRGVFARDPRRRADFAGVFGFPAAESVEELIRRDDVDAILVLTPPNARMEIVEAAFNAGKHVLLEKPIERDSAAAGRIVEMCCAAGVTLGVTFQHRFREASQALKGLIDGGSLGAVCAVRVSVPWWRDQSYYDVPGRGTYARDGGGVLISQAIHTLDLMIWLLGLPEAVTAMAATTGLHRMEAEDFVAGALRWPGGAVGSLTATTAAFPGRNEYIVVDFERASACLEGGELVVRHHDSRTEIIGTAGGSGGGVDPMAFTHEWHRSAIEDFARAIAGGRAPVVSGESALQVHRLIDALLASASEGRQVLLNPH

SEQ ID NO: 33549 - DNA, 1092 bp, Rhodococcus sp. RHA1
  CDS (1)..(1092): transl_table=11
atgtcccccgcacgcctgaaagtcggaatcgtcggttgcggcaagatcgccatcaatcacgcaaaggctctgcacgccatgcccgaggtcgaactggtcgcctgcagcgacaccgaccaggccagagccgactcctttgccgccacacacggaatcgcccacgcctacgacgacctcgacgcactgctcggcagcggtctggacgccgtcaccatctgcacaccgcacccgacccacgaagcgatcgtcctcgcggccgccgaacacggactgcacgttctgtgcgagaagccgatcgcgatcacgctcgacgaagccgaccgcatggtcgaggcgacggccgccgcgggagtgaagttcggcgtactgttccagcgccggttctggcctgccgctcagcgcatccgcgctgcgatcgatgccggcgcgctcggcggcgcacccattgtcgcgacctgcaccgtacgactcggccgcgaccgcgactactacacgtccgatccgtggcgcggccgctgggacaccgacggcggaggtgtgctgatgactcaggccatccattacatcgacatgctgcagtggttcatgggcgacgccgtcgaggtgagtggtcacgtggacaccctggtgcacggtgactacatcgaggtcgaggacacggtcgcggccaccgtgaaattctcgtccggcggactcgccactatcacggccggcacaactttcacacccggcctcggtactcaaatcgtggtcggtggacgcaacgggcacaccgtgagcctgacggaatttcccgaggggatgcccgcagtcaacgacatttggaccgtcgagggcgaggaggcgtaccagcagatgcactcgacggacatcgaatcggaccctccgctctcgcagattcatgtcggtctcgccccgttccatcagatgcagatcgaggacttcgtccatgccgtcgtcgaggaccgtgctcccgcggtttccggacgcgatgctcgccgcgctctcgagatcgtcctcgccatctacgagtcctcccgcaccgggcaacccatcgcactcacctcgggcgcgctcgccggcctgcagtaa

SEQ ID NO: 33550 - protein, 363 aa, Rhodococcus sp. RHA1
MSPARLKVGIVGCGKIAINHAKALHAMPEVELVACSDTDQARADSFAATHGIAHAYDDLDALLGSGLDAVTICTPHPTHEAIVLAAAEHGLHVLCEKPIAITLDEADRMVEATAAAGVKFGVLFQRRFWPAAQRIRAAIDAGALGGAPIVATCTVRLGRDRDYYTSDPWRGRWDTDGGGVLMTQAIHYIDMLQWFMGDAVEVSGHVDTLVHGDYIEVEDTVAATVKFSSGGLATITAGTTFTPGLGTQIVVGGRNGHTVSLTEFPEGMPAVNDIWTVEGEEAYQQMHSTDIESDPPLSQIHVGLAPFHQMQIEDFVHAVVEDRAPAVSGRDARRALEIVLAIYESSRTGQPIALTSGALAGLQ

SEQ ID NO: 33551 - DNA, 1005 bp, Synechococcus sp. CC9311; identical to SEQ ID NO: 12040
  CDS (1)..(1005): transl_table=11

SEQ ID NO: 33552 - protein, 334 aa, Synechococcus sp. CC9311; identical to SEQ ID NO: 12041

SEQ ID NO: 33553 - DNA, 1068 bp, Rhizobium leguminosarum bv. viciae 3841
  CDS (1)..(1068): transl_table=11
atgaagccgctagagattgcagtcatgggagccggcctcatcggcaggcgccacgtcgagcgtgtcatgtccgagcccggaaccgttctctcggcggtgatcgatccttccgacgccggtcgcgactttgccgggactgtcggcgcccgatggtaccggagcttttcggacattcgcgtcgaggacaggcctgacggtgcgatcgtggcaacgccgaaccagcttcacgtcgagaacggcctggagatcgtcgccgccggtatccccgttctgatcgagaaaccgatcgccgacgacgtcgatgccgccgcggcattggtcgcagccggcgagaaggcgggcataccgctgctggtcggccatcacaggcgtcacaatccgatgatccaggcggtcaagcagatcgtcgacggcggaaggcttggccggatcatcgcggtgcacggcacgttctgggtcgcaaagcccgacgactatttcgatatcccctggcggcgcgaagcgggcgccggcccggtcttcgtcaacctgatccacgatgtcgatctcttccgatatctcctcggcgaggtcgaagccgtccatgcgatggaatcgcacgcggtgcggaaccatgccgtcgaggatacggccgtcgtcacgctgcgtttcgcaagcggggtgcttgcaaccctcaacggcagtgatgccgtggccgcgccctggagctgggagacgaccaccggggagaaccccgcttttccccgttacgatcaattctgctaccagatcggtggcaccaggagttcgctcggaattcccgatccgacgctttggacgagcccctcgaagcccgattggctggagcagcttgcccaggagcgcgtgccttacgcagcagccgatcccctttgcgttcagctcagacatttttgcgacgtcattcgtggcgatgccacgcctctggtgagtggccgggagggcctcgccactctaagggtcgtcgaagcgatcaagagatcggcgcgctggggacagatgatccacctctctaacgccagcgcctcttccgatccccagaaagtctga

SEQ ID NO: 33554 - protein, 355 aa, Rhizobium leguminosarum bv. viciae 3841
MKPLEIAVMGAGLIGRRHVERVMSEPGTVLSAVIDPSDAGRDFAGTVGARWYRSFSDIRVEDRPDGAIVATPNQLHVENGLEIVAAGIPVLIEKPIADDVDAAAALVAAGEKAGIPLLVGHHRRHNPMIQAVKQIVDGGRLGRIIAVHGTFWVAKPDDYFDIPWRREAGAGPVFVNLIHDVDLFRYLLGEVEAVHAMESHAVRNHAVEDTAVVTLRFASGVLATLNGSDAVAAPWSWETTTGENPAFPRYDQFCYQIGGTRSSLGIPDPTLWTSPSKPDWLEQLAQERVPYAAADPLCVQLRHFCDVIRGDATPLVSGREGLATLRVVEAIKRSARWGQMIHLSNASASSDPQKV

SEQ ID NO: 33555 - DNA, 1044 bp, Pseudomonas aeruginosa UCBPP-PA14
  CDS (1)..(1044): transl_table=11
ttggacgcaccgcttcgcatcgccctcatcggcgccggcaacatgggccgccagcattaccatcgcttgcagcgaatcgccggcgcgcgcctgtgtgcggtggccgatccccagggccaggcgttcgccgcggacgccggcgtgccctggttcggcgatcatcggaggttgctggaagaagcccggccgcaagcggcgatcgtcgccaatccgaacaacctgcatgtcgccaccgccctcgactgcctcgccgccggggtgccgctgctgctggaaaaaccggtcggcgtgcagctcgacgaagtgagcgagctggtggccgtcgcccggcgatctggcgttccgctgctggtcggtcaccatcgtcggcacaatccgctggtcgtgcgggcgcgccaattgatcgccgagggcgcgctcggtcggttgctgtcggtcaccgcgctctggcagttgaagaagcccgacagttatttcgaggtggcctggcgtcgcgagcccggcgcgggaatgttgctgaccaacctgatccatgacctcgacctgctccgccacctgtgcggggaagtgcgggaggtgcaggcgctggccggcaacgctatccgtggcctgcccaacgaagacaacgtcgcgctgctcctgcgcttcgccaatggcgccctgggcagcctgaccggttgcgacgctgcggcggcgccctggagctgggagctggccgccggggagaacccggtctatccgcgccaggccgagcaaccctgctacctgctggccggcaccgagggtgccctgagcctgccccagctccgccgctggcgctacgccgaggcccggcagggctggcacgacccgctggcggccagcgtggaggccgtggcggcaggcgaccccctgcaacgccagctagagcacttcgtccgggtcgcgcggggcgaggaagcgccattgatggatgccaccgacgccgctcgcaccctggcgctggtcgaggcggttcgcgaggccgcgcgcagtggccgggcctgcgcgccggccagtttctga

SEQ ID NO: 33556 - protein, 347 aa, Pseudomonas aeruginosa UCBPP-PA14
MDAPLRIALIGAGNMGRQHYHRLQRIAGARLCAVADPQGQAFAADAGVPWFGDHRRLLEEARPQAAIVANPNNLHVATALDCLAAGVPLLLEKPVGVQLDEVSELVAVARRSGVPLLVGHHRRHNPLVVRARQLIAEGALGRLLSVTALWQLKKPDSYFEVAWRREPGAGMLLTNLIHDLDLLRHLCGEVREVQALAGNAIRGLPNEDNVALLLRFANGALGSLTGCDAAAAPWSWELAAGENPVYPRQAEQPCYLLAGTEGALSLPQLRRWRYAEARQGWHDPLAASVEAVAAGDPLQRQLEHFVRVARGEEAPLMDATDAARTLALVEAVREAARSGRACAPASF

SEQ ID NO: 33557 - DNA, 1071 bp, Solibacter usitatus Ellin6076
  CDS (1)..(1071): transl_table=11
atgatccgcgtgtcctttgtcggctgcggcggcatggcggcgcactacctgggagtttatcgcgacctggactgggtacgcgtggtcaactgtatcgacgcggtgccggaggctgcgcagaaggccgcggataccattccgggagctgtggccggcacggattacgcgctggcccttggggacgggatcgacgcggtgatcatcagttcaccgaatcacctgcatcgcccgcaggcggtggcggcgatcgaggccggcaagcatgtgctgttgcagaagcccgtcgcgcccaacctgggcgacgccgaggcgattgaggaggccgcggcaggttccgcgcgcacggtcgggctctacatgagctatttcgatcaaccactgattcacgatttgcgcgacatggtgcggcagggatggctcggcgacattgtccactgctatgcgcggctgatgcataaaggcggcatgatgtggtcccgggaggcgctggcaggcaaccgcaactggcgaggcagcgtcgaacaaaccggaggcggctgttttatccagctcgcggtgcattacctgcacatcttcgagtgggccaccggcgccaaggtaactcgcgcgagcggctttgcgaacaggctgcactgtcccggcctggaaggcgaggatcttgcatcgggaatcttcgaactggataccggcggcctgctgacgatcgacacagcgtggtgcacaaacggcgaagagctttgcgtccacgggaccgaagggcgatttacgtaccgcgataacaaactggcgatctgctccacgaagggagcatttcacggtcgcgcggccgagtataccggcggaacggtgccgcagttcggcggcgagtggggagtagagcagcagatggaaatacggccgcccggcttcgcggccaccggaaatccgctgaatcaacacttgcagttcctggaagcggtgcgcgacagccgtgaggctccggtttcgattgcgagcggagtgcgcgatatgcggattgtggctgcgctgtacgaagcaacgcgttcgggtcgcgcggtggaggtggcatga

SEQ ID NO: 33558 - protein, 356 aa, Solibacter usitatus Ellin6076
MIRVSFVGCGGMAAHYLGVYRDLDWVRVVNCIDAVPEAAQKAADTIPGAVAGTDYALALGDGIDAVIISSPNHLHRPQAVAAIEAGKHVLLQKPVAPNLGDAEAIEEAAAGSARTVGLYMSYFDQPLIHDLRDMVRQGWLGDIVHCYARLMHKGGMMWSREALAGNRNWRGSVEQTGGGCFIQLAVHYLHIFEWATGAKVTRASGFANRLHCPGLEGEDLASGIFELDTGGLLTIDTAWCTNGEELCVHGTEGRFTYRDNKLAICSTKGAFHGRAAEYTGGTVPQFGGEWGVEQQMEIRPPGFAATGNPLNQHLQFLEAVRDSREAPVSIASGVRDMRIVAALYEATRSGRAVEVA

SEQ ID NO: 33559 - DNA, 1071 bp, Mycobacterium smegmatis str. MC2 155
  CDS (1)..(1071): transl_table=11
gtggtcggacatgctctccgtatcggaatcatcggtgccggtgtcatgggcaccaagcacgcagaatacgttgcacgcgaacaggatgcgaccgtcgtcgcagttgccgacccgttcagcagaaccctggccggaaagctcggcgtgccgcacttcgacagttatcacgatctcctcgcggcatcgggcgccgaggccgtgatcatcgccaacccgaacagcgcacatgtcgaaaccacgttggcggccatcgaggcccgcatacccgcgttgctcgagaaacctgtcgcggtgaccgcggcggaggccgcgcacctggtggcggctgtgcgcgactcagacacagtggttctcgtcgggcatcaccgcaggcaccatccagcggtgtcaaaagcccgtaacctcatcgcaagcggtgtgatcggcagactcgtcgccgtcaacggcatgtggctgaccaagaagtccgacgactacttcgagcagcgctggcgccgcgaaaccggcgcaggcgtgatgctgatcaacctcgtccacgacctcgacctggcccggtacctgtgcggcgagatcaccacggttcaagccgtcagcagcaacgcattacgcggattcgaggtcgaggacaccgcagccgtcatcgtcgggttcgacaacggcgcgatcggcaccttcatcctgtccgactctgccgtcgcaccctggggttgggatcaggcgacacaggatgatccccagttcccctgcaacccggacattcccgcatggtcgattgccggtaccaccggttccctgacctttccgcaactcgcgcgtttctatcatcagggcgaatccgactggtaccagccgttgtcgcgacggtacgagagcaccgacgccggcgactcctacacacggcagctgcaacatttcatcgccgtcgcacgcggcgacgccgcaccgttggtgacagtggaggatgccgccgccagcctgaccgtgatcgaagtcgcgcagcgtgctgcgaaatgcggtcacaggcttgatgtcccgatggtctccgctcccaccggcaaaaccactgagtga

SEQ ID NO: 33560 - protein, 356 aa, Mycobacterium smegmatis str. MC2 155
MVGHALRIGIIGAGVMGTKHAEYVAREQDATVVAVADPFSRTLAGKLGVPHFDSYHDLLAASGAEAVIIANPNSAHVETTLAAIEARIPALLEKPVAVTAAEAAHLVAAVRDSDTVVLVGHHRRHHPAVSKARNLIASGVIGRLVAVNGMWLTKKSDDYFEQRWRRETGAGVMLINLVHDLDLARYLCGEITTVQAVSSNALRGFEVEDTAAVIVGFDNGAIGTFILSDSAVAPWGWDQATQDDPQFPCNPDIPAWSIAGTTGSLTFPQLARFYHQGESDWYQPLSRRYESTDAGDSYTRQLQHFIAVARGDAAPLVTVEDAAASLTVIEVAQRAAKCGHRLDVPMVSAPTGKTTE

SEQ ID NO: 33561 - DNA, 1014 bp, Nocardioides sp. JS614
  CDS (1)..(1014): transl_table=11
atgacacagctacgagccggactcgtcggcatcggcatgatgggacgcaaccacgcccgcgtcctaaactccctcgatggcgtcactctcgtcgccgtcgccgatcccgggggcgacaagcacgggatggccggtgacgccaaggttgtcccgacagtcaccgagatgatcgacgccggcatcgaccttgcggtcgtcgcgacaccgacgatctatcacctcgaggccgggctggagctcgcggcggccggcgtacccacgatgatcgagaagcccctggcgaccgacgccgacgagtcacggcaactggtccacgcgttcgagagcgcgggtctcgtcaacgcagtgggccacatcgagcgattcaacccagcgctgcgcgccctccgcacccggctcgaggcgggcgatctgggcgagatatatcaagttgcgacccggcgccaagggccgttcccgaaccgcatcgcggacgtcggcgtggtcaaggatctcgcgacccatgacatcgaccttaccgcgtgggtcatccagtccccctacgcgatggtttccgcccataccgcgcacaagagcggtcgcccgcacgaggacctcatctccatcactgcacagatgacggacggaactgttgtcagccatctggtcaactggttgtcgcccctcaaggaacgttgcacggtggtcacgggcgaacgcggcgctttcgtggccgacaccctccatggagatctcaccttccacgagaacggcctggttagcacggagtgggagcaggtgtcgtcgttccgcggcgtcacggaaggcaacagcacgcggttcgccattcccaagccggagccgcttcggatgcaacacgagaatttccgagacgccgtcctgggactcgaggccgagatcgtgacgatgcgcgagggtatgaaggccgttgaagttgcagacgccgtgattcaggcagcccgtgagcgtcgaacgatcaacctcgaaacagatcgagacgggattcctgagtga

SEQ ID NO: 33562 - protein, 337 aa, Nocardioides sp. JS614
MTQLRAGLVGIGMMGRNHARVLNSLDGVTLVAVADPGGDKHGMAGDAKVVPTVTEMIDAGIDLAVVATPTIYHLEAGLELAAAGVPTMIEKPLATDADESRQLVHAFESAGLVNAVGHIERFNPALRALRTRLEAGDLGEIYQVATRRQGPFPNRIADVGVVKDLATHDIDLTAWVIQSPYAMVSAHTAHKSGRPHEDLISITAQMTDGTVVSHLVNWLSPLKERCTVVTGERGAFVADTLHGDLTFHENGLVSTEWEQVSSFRGVTEGNSTRFAIPKPEPLRMQHENFRDAVLGLEAEIVTMREGMKAVEVADAVIQAARERRTINLETDRDGIPE

SEQ ID NO: 33563 - DNA, 1080 bp, Erythrobacter sp. NAP1
  CDS (1)..(1080): transl_table=11
atgggtgagagcagacgatacgcgatcattggctgcggcatgatgggccgcgagcatatggcgaaccttgctctggtgccgggcgccgatctggtcgcgatcgccgatcctgacgaagggtcgcgcaatgccgcgctttcccatgcgaagacgcttggtcaggatgtttcgctgttcagcgacactgcgaccatgcttgccgaggcgaggccagatgccgtcatcatcgcctcgcccaacttcacgcactttgacgtagttcgccctgtgatggacgcggggcttgcggtgctcatggaaaagccaatgtgcaccgccatcgacgaggcgctggtcctcttcgagaaggcgcgcgattatcccaacctgttctgggtcgggcttgaataccgctacatgccgccggtcaccgatttcatccgccgcgtccatgaagggcaagcaggcgacatcaagatgctcgcgatccgcgagcaccgctttcccttcctcgtcaaggtcggcgactggaaccgctttaaccgcaacaccggcggcacgctggtcgagaagtgctgccacttcttcgacctcatgcgccatatccttcgcgacgagccggtacgcatctatgcgagcggcgcgcaggacgtgaaccatctggacgagcgctatgacggtgaagtgcccgacatcatcgataacgccttcgtgctggtcgacttcgcaggcggagcgcgcgcagtgctcgacctgtgcatgtttgccgaggggtctgaggagcaggagcagatcagcgcagtcggcccgacgggtaagctcgaggtcaagcttcccggcggctttgtcacctggtctccgcgcgacaagtcggggcctttctcccagcacatcgccaccccgcccgatgcgcttgccgctggcgatcaccacggtgcgacctactaccagcagcgcgactttcacgaggctttggtgagcggtagcgcgccgcttgtctccgcacgcgacggctatcgctctgtcgtgatgggagccgccgcgcagcagagcattgccaccggccttccggtcgagatccatttcgaagacgagagttag

SEQ ID NO: 33564 - protein, 359 aa, Erythrobacter sp. NAP1
MGESRRYAIIGCGMMGREHMANLALVPGADLVAIADPDEGSRNAALSHAKTLGQDVSLFSDTATMLAEARPDAVIIASPNFTHFDVVRPVMDAGLAVLMEKPMCTAIDEALVLFEKARDYPNLFWVGLEYRYMPPVTDFIRRVHEGQAGDIKMLAIREHRFPFLVKVGDWNRFNRNTGGTLVEKCCHFFDLMRHILRDEPVRIYASGAQDVNHLDERYDGEVPDIIDNAFVLVDFAGGARAVLDLCMFAEGSEEQEQISAVGPTGKLEVKLPGGFVTWSPRDKSGPFSQHIATPPDALAAGDHHGATYYQQRDFHEALVSGSAPLVSARDGYRSVVMGAAAQQSIATGLPVEIHFEDES

SEQ ID NO: 33565 - DNA, 1005 bp, Synechococcus sp. RS9916; identical to SEQ ID NO: 12062
  CDS (1)..(1005): transl_table=11

SEQ ID NO: 33566 - protein, 334 aa, Synechococcus sp. RS9916; identical to SEQ ID NO: 12063

SEQ ID NO: 33567 - DNA, 1053 bp, Pseudomonas putida GB-1
  CDS (1)..(1053): transl_table=11
ttgaacgcaccccttcgtattgccttgatcggcgctggcatcatgggccgccagcactaccagcacttgcgcaatgtgccgcaagcccaactgtgtgccgtggccgaccccggcccacaggccgaagccttcgccgccgagtgcggtgtgccttgttttgccgaccatcgccagatgctggagcgtgtgcgcccggaggcggtgatcatcgccaaccccaacaatcagcatgtggccaccgcgttggattgcgtcgaggccggcgtgccggtgcttgtagaaaaaccggtaggcgtacatctggatgaagctcgggcactggtagaggcttcgcatcggcgcaatgtgccggtgctggtcggccaccatcgccggcacaacccgctgatcgccaaggcgcaccaggtgatcagtgaaggcaagctgggccggctgatcaacgttaccgcgctgtggcagttgcaaaagcccgacagctatttcgaaaccccctggcgtcgcgagccaggggcgggctttttgctgaccaacctgatccacgacctggatctgctgcgtcacctgtgtggtgaggtggtgcaggtgcaggcgttcacccgcaacgatgtacgtggttttgccaacgaagacagcgcagcagtgctgctgcaattcgccaatggcgcgttgggcagcctgacgggctcggacgcggtggccgcgccctggagctgggagctggactctggcgaaagcccgatctacccgcgccaggacggtcagccgtgttacatgctggctggtactcaaggggcgttgagcattccccagctcaagcgctggcattacgccgaggccggttcgggctggcacacgccgctgctgcagtgcgaggagagcatccccgctggcgaggcgttgaccctgcagttgcagcacttcgtgcgggttgcccgtggtgaacaggcgccgctgatcgatgccgccgacggtggccgcaccctcgcgctgatcgaagcgatccgccaggcagccgaaagcggccgggcctgcgcgcccgagcacattggctga

SEQ ID NO: 33568 - protein, 350 aa, Pseudomonas putida GB-1
MNAPLRIALIGAGIMGRQHYQHLRNVPQAQLCAVADPGPQAEAFAAECGVPCFADHRQMLERVRPEAVIIANPNNQHVATALDCVEAGVPVLVEKPVGVHLDEARALVEASHRRNVPVLVGHHRRHNPLIAKAHQVISEGKLGRLINVTALWQLQKPDSYFETPWRREPGAGFLLTNLIHDLDLLRHLCGEVVQVQAFTRNDVRGFANEDSAAVLLQFANGALGSLTGSDAVAAPWSWELDSGESPIYPRQDGQPCYMLAGTQGALSIPQLKRWHYAEAGSGWHTPLLQCEESIPAGEALTLQLQHFVRVARGEQAPLIDAADGGRTLALIEAIRQAAESGRACAPEHIG

SEQ ID NO: 33569 - DNA, 1140 bp, Pichia guilliermondii
  CDS (1)..(1140)
atgattgctctggagcctgtatcaatagtggtagtgggcgcaggacttataggacctcgtcatgcacaacatattaaagagcacaagaacgctagactttttggtatagtagatccaagtgctattggtcgcaaagtagccgaggattataatactgactactttgattcgatatctgctatgataaaccactgtgataaccaaggaattgcttatcctcatggagcggttgtggctactccaaatgctacccatatacgagttgcagctgaattggcatcccacggaattcatttacttgttgagaagccactcagctcacgagccgaggagtcagaagcacttaaaaggtactgtgctgaaaaaaatgttcatcttttggtgggtcatcatcgtcggtttaatccatttatcatcgaaacgaaaaagcatctacaaacgctaggtacaattgttgcattgcaaggtacatggactctttgcaagccagacgactactttctagcatctccatggcgcacctccaacgaatctggtggaggaactcttttaatcaatcttgttcatgacattgacatccttcaatatttatttggacccgtcgaaagagtatacgccgaggtgctacagaaacagcgagatcactacccggaagcagacgagggcgcagcactcactctacgctttgttagtggagtttgtggtacatttgtttgttgcgattcggtaacctcaccgttcaactttgagtccggaaccggcgaaaatcccaatattccatttcatgaacaactagaaggattctatcgagtctacggtaccaacggaacactttcggtgccagacatgcatttataccaccagcagcatacactagaaaaaacctggaaccagccggtgataagagaaagagtcagtcctcatcccgaagtattgagaagcaaacacccattcgatctccaactagaccactttctcaacgtaataaatggtagtgaactgcctctttgcaccgctgaagacggaatacaggcacagctatgcatcaacgctgtgatgaactcgattaaaacaggacttccacaaacgattcccagcacctcgtccattcacccggactataaggcattgaatatatag

SEQ ID NO: 33570 - protein, 379 aa, Pichia guilliermondii
MIALEPVSIVVVGAGLIGPRHAQHIKEHKNARLFGIVDPSAIGRKVAEDYNTDYFDSISAMINHCDNQGIAYPHGAVVATPNATHIRVAAELASHGIHLLVEKPLSSRAEESEALKRYCAEKNVHLLVGHHRRFNPFIIETKKHLQTLGTIVALQGTWTLCKPDDYFLASPWRTSNESGGGTLLINLVHDIDILQYLFGPVERVYAEVLQKQRDHYPEADEGAALTLRFVSGVCGTFVCCDSVTSPFNFESGTGENPNIPFHEQLEGFYRVYGTNGTLSVPDMHLYHQQHTLEKTWNQPVIRERVSPHPEVLRSKHPFDLQLDHFLNVINGSELPLCTAEDGIQAQLCINAVMNSIKTGLPQTIPSTSSIHPDYKALNI

SEQ ID NO: 33571 - DNA, 1272 bp, Pichia guilliermondii
  CDS (1)..(1272)
atggatcaagagatatgtggtgacgcgttcaattctttagttcaaattgagatgaatcagaaaattcaattagtggtgattggtgccggccttattggtcctagacatgctcaacatgtacacgatcgtcctgattgtgaactttttgccatcattgatcactccgcaaaaggcccaggtgtcgccagccagtttaatacacttttgttccgctctgttgatgaaatgttggatttttgtgacgagagaggcttgagggttcctgatggagcaatcgtagccactccaaatcacacgcatgtttcgattggcagcaagttggcggcacgaggaatacacatgttaatggaaaagccattggctcccaccgttgctgattgcaaagcattaattgctcaatgtcgatatctgggtgttcaccttcttgttggacatcaccgtagattcaacccatacattatcactgccaagcaaaatatggacaaagtgggccgtccggtggcaatccaaggaacgtgggctttgaaaaaagcggacacatactttgcagaaaaaccttggcgctcatcaacgaagttgggaggcggaaccatgctaatcaatttaattcacgacattgatttacttcaatatttattggggccaattgttaaagtttactctgagttgttgatcaaacagagagctggatctcacgatggtaatgctgtggatgaaggggcagtattaacgttgaggtttgctaatggctgttgcggtacgtttgtgtgtgctgacaacgtgatctcaccatactcttttgaatcgggtacaggtgaaaaccccaccatccctcacagcgagaatgcgtcgggattttatcgcttgttcggtagtgatggaactctctcaattccggactttacgttgcatcaccaaaataacttaccttacgacaagcgtcattggttgaatcccgtgtcgtcagagaagttagacctttcctacaaggtgcttcaggatttcgatggaggcggaactcaaatgaattatggtcttgctaccccttctgcatctcccaatgacaaggatagccccatccaccacattggtcaaaagccgccagtaccatttgaattgcaactcgaacattttgtaaaccttatcactggccgcgaatcggaggtgaagtgtactggagaagatgctatgagggctctactttgtgtcgacgcaattttggagtcgagcagaactggtatgcctcagtatgtgcctgaaatagacgtctga

SEQ ID NO: 33572 - protein, 423 aa, Pichia guilliermondii
MDQEICGDAFNSLVQIEMNQKIQLVVIGAGLIGPRHAQHVHDRPDCELFAIIDHSAKGPGVASQFNTLLFRSVDEMLDFCDERGLRVPDGAIVATPNHTHVSIGSKLAARGIHMLMEKPLAPTVADCKALIAQCRYLGVHLLVGHHRRFNPYIITAKQNMDKVGRPVAIQGTWALKKADTYFAEKPWRSSTKLGGGTMLINLIHDIDLLQYLLGPIVKVYSELLIKQRAGSHDGNAVDEGAVLTLRFANGCCGTFVCADNVISPYSFESGTGENPTIPHSENASGFYRLFGSDGTLSIPDFTLHHQNNLPYDKRHWLNPVSSEKLDLSYKVLQDFDGGGTQMNYGLATPSASPNDKDSPIHHIGQKPPVPFELQLEHFVNLITGRESEVKCTGEDAMRALLCVDAILESSRTGMPQYVPEIDV

SEQ ID NO: 33573 - DNA, 1029 bp, Amycolatopsis mediterranei
  CDS (1)..(1029): transl_table=11
atggctcccaccggcggcgtgggcgagtctcgatacgtgaagacgttgcggcagctcgaggtggccctgatcggtgcggggctcatcgcccggctgcacctggaagcgtggctcggcgccggcgccgccgtgcgggtgtactccgacgacggccggagccgcgagctggcggcggagttcggcgcgaaggccgccgggtccctggaagaggcgctcgacggcgccgacgccgtcgacatctgcacgccgaccgcgagccaccacgagatcgccctgaccgccatcgccgccggtgtcggcgtcgtgtgcgagaagccgctggcggccagcgccgaagaggccgaagagatcgtcaccgccgccgaacgggccggggtgcggctctacgccgcccacgacgtgcggttcgcggcgccctacgcgcgattgcacgagctcgttgcgagcgggcggctcggggagggtgccctcggccggttctccttctccgcctaccacccgcggccctggaccgggcacgcctccgcgcggtcgggcggcatcctcaccgaccagctgctgcacggcgccgacctcgcccactgggtcttcggggacgtcgtccgcgtgcacgcctgctaccagggcgacatcgccaccccggcgcccgaaggggccgtcgcgaccgggaccgccgtgctcacccacgcgagcggcgccatcagccaggtggtgagccggtggacggccacgccgcggccgccggtgcgggtggccttccacgtctcgggtaccggcgggtccgtcagctacgactccgagtggccgcaggaggtccgggtcgtcgacggcggcgccgggaacttcgcttacggcgggccgtcggtgttcgacaccgaaatgcgggagttcgccacggctttcgcgggtggacccgagccgaggatcggcgcgaaggacgcgctggccgccgtgcggatcatccacgccgccgccgagtccgcgtggaccgggcgggccgtcgaactgccggtgaggggagcagcgtga

SEQ ID NO: 33574 - protein, 342 aa, Amycolatopsis mediterranei
MAPTGGVGESRYVKTLRQLEVALIGAGLIARLHLEAWLGAGAAVRVYSDDGRSRELAAEFGAKAAGSLEEALDGADAVDICTPTASHHEIALTAIAAGVGVVCEKPLAASAEEAEEIVTAAERAGVRLYAAHDVRFAAPYARLHELVASGRLGEGALGRFSFSAYHPRPWTGHASARSGGILTDQLLHGADLAHWVFGDVVRVHACYQGDIATPAPEGAVATGTAVLTHASGAISQVVSRWTATPRPPVRVAFHVSGTGGSVSYDSEWPQEVRVVDGGAGNFAYGGPSVFDTEMREFATAFAGGPEPRIGAKDALAAVRIIHAAAESAWTGRAVELPVRGAA

SEQ ID NO: 33575 - DNA, 921 bp, Rhizobium leguminosarum bv
  CDS (1)..(921): transl_table=11
atgagcgaattccgtcttggtttgatcggtgctggccgcatgggtcaggtacacttgcgagcggcttctgagagtttgctcgtggaagtcacggctgtggtcgaaccggtagccgctacgaggcttgcgttggaacgcagtggtatcaaaacttacaaaaccgcggatgaaatgattgacgcaggcgagatcgatggagttctcatcgcgactcccagcaagacgcatgtggaaaacattacgaacatagctgcacgcggcttgccaatcctctgcgagaagccctgcggcgtcactgccgaagaagctcgcaaggcagccgaggcggccgaacaattcaaagtgcacttgcagattggatactggcggcggttcgttcctgaactggagaaactgcgacagaatattcggagcggcctgcttggtgagccttacctcatatcttgcttccaatgggacgaaactcccccggcggcctcatttcgagctactggaggcggggcccttatcgatatgggcgttcatgaatttgaccagatgcgctggcttacgggtcaggaaccgagcaatttccgggttgccgcctcgaaaacgactttcgcaggaaaggtggaaggtgatccggatgctgttcagctgctttgcgatctttcaggcggtggcgtcggtctggtttctctggggcggagatttccacctggggacgcgtgctgggcccaggtcttcggcacctcaggcttcgaagaagttcgctttttctggcccccaaatggagaggcggtattcctaaatgcgttacggagccagcttgaagatttcgtccaagcggcacgcggtggagcctcccaaggtgcaaccgcacaagacgccgtcaccgcgctcgccatcgcagaagcagccactgaagtactctcggtgtga

SEQ ID NO: 33576 - protein, 306 aa, Rhizobium leguminosarum bv
MSEFRLGLIGAGRMGQVHLRAASESLLVEVTAVVEPVAATRLALERSGIKTYKTADEMIDAGEIDGVLIATPSKTHVENITNIAARGLPILCEKPCGVTAEEARKAAEAAEQFKVHLQIGYWRRFVPELEKLRQNIRSGLLGEPYLISCFQWDETPPAASFRATGGGALIDMGVHEFDQMRWLTGQEPSNFRVAASKTTFAGKVEGDPDAVQLLCDLSGGGVGLVSLGRRFPPGDACWAQVFGTSGFEEVRFFWPPNGEAVFLNALRSQLEDFVQAARGGASQGATAQDAVTALAIAEAATEVLSV

SEQ ID NO: 33577 - DNA, 1290 bp, Aspergillus oryzae
  CDS (1)..(1290)
atgggtaggttaaggtctttcctcggcaatgaagtttcgcttggccctgaatttatcccgaaatcgtgtggtatggcccgattcgtcaacaatcttctgttcaacaaatatatcatatacacatgttttcttttcccctatttgctcacaccaatacatctccccagtgattcctccaacagcacctccaaaatggttctaagagttgtcgtcgtcggcgcaggcctgattggccctcgacatgccaaatccgttatctccaatccagacacagagctcgtagcgctcatcgatccgcttcccaatgctgccagggtagcgcaggagctgcaaacgagctactatccaactgtcgaagccatgctgcaggctattcccaagcccgatgcagccattgtttgcacgcccaaccacacccacgtccccgtgtcgcgacagctcctagccagtggtatccacgttctagtcgagaaaccagtcagtgacagcatcgaaaatggcctaacactgctacaatttgggcagcggtcggagaacgcccatctcaagctgctggtcggacaccaccgtcggttcaacccgtatgtcctaaagacgaagcagatattggatgccggttctctgggccaggttatcgctatcaacggcctgtggacattgttcaaaccagaagaatactttgcgcctccaggtgactggcgtcgtgctcggtcgtcgggtggtgttgttccgatcaaccttgtgcatgatattgacattatgcaccacctgttcggccccattgtgcgcgttcacgctgagaaaaccctctcgcagcgccctaacccccctcatgaggcagaggagggtgctgcactgacgctccggttcgcttcaggcgttgtcggtaccttccttgtctgcgatgctactccctctccacacaactttgaagccggcaccggcgagaatccgctcattcccaagtgttcttctggtgcagacttttaccgcatctttggttcggacgcctccctcagtgtcccagatatgacgcgctggagttacgatggccgtccggacaagagctggaaccaaccattgacggtcgagaagtttgatgtggaagaagcgactcctttcgatttgcagcttgcccatttcgtcgatgttatccaaggcaaagctgagcctagttgttccggtgaagaaggcctgagggcattacttgtatgccaggctgtgcgaaaggcactagagactggagagacaatcgaactagatcagaccatccttgagggaaaccgttaa

SEQ ID NO: 33578 - protein, 429 aa, Aspergillus oryzae
MGRLRSFLGNEVSLGPEFIPKSCGMARFVNNLLFNKYIIYTCFLFPYLLTPIHLPSDSSNSTSKMVLRVVVVGAGLIGPRHAKSVISNPDTELVALIDPLPNAARVAQELQTSYYPTVEAMLQAIPKPDAAIVCTPNHTHVPVSRQLLASGIHVLVEKPVSDSIENGLTLLQFGQRSENAHLKLLVGHHRRFNPYVLKTKQILDAGSLGQVIAINGLWTLFKPEEYFAPPGDWRRARSSGGVVPINLVHDIDIMHHLFGPIVRVHAEKTLSQRPNPPHEAEEGAALTLRFASGVVGTFLVCDATPSPHNFEAGTGENPLIPKCSSGADFYRIFGSDASLSVPDMTRWSYDGRPDKSWNQPLTVEKFDVEEATPFDLQLAHFVDVIQGKAEPSCSGEEGLRALLVCQAVRKALETGETIELDQTILEGNR

SEQ ID NO: 33579 - DNA, 1038 bp, Rhizobium sp
  CDS (1)..(1038): transl_table=11
atgacccaacgggttaagctggccgtacttggggcaggcctcatcggtaagcggcatattcagcacctcctggccgagccctcggcgcaactcagtgccgtggtcgatcccacgcccgctggccagaccattgccaagaaagcgggtgtgaagtggtttccaagcttcgcagacatgattgccgcagaccgacctgacgggatcatcgtggctacgcccaaccaggctcacgtccagaacgggttggaagccgttgaagccggcgttcccgcactcatcgagaagccgatcgccgacgacactatatccggggaaaagctgatcgcagcggctgaggcaaaaggtgttcctcttttgaccggccatcaccgccggcacaatccggtgattcagaaggcaaaggaaatcatcgaaagcgggaagctcggccgcgttcttgttgccaatgtgatgttctggctgttcaagcccgacgattactttgacatctcgtggcgtcgtgagcgcggcgcggggccggttttcctcaatctcatccacgatgtcgataatctgcgttatcttctcggcgatgtggctgcggttcaggcacgcgagtccaacgcggtgcgcggcaacgcagttgaggaaactgctgtgatcctgatcgagttcaagaatggcgttttgggaactgcgacagtctcggacgcggtggtcgcaccgtggagctgggagatgacaagcggcgagaatccggcttaccccaaaaccgagcaatcctgttacatgatcggaggaacgcacgggtcgctggctgttccgtcgctcgaggtctggcgcaatcctggtaaacggagttggtgggaaccatttgaccaaacgcgcatcgaggtcgacgacgaggacccgctcgttctgcagatcaggcaattctgcaaggtgatccgcggagacgaaccgccgcttgtcagcgggcgcgaggggctcgaaaccttgagggtagtcgatgcggtaaaacgcgcggcggcaacgggagagcgtatcgctttgaactga

SEQ ID NO: 33580 - protein, 345 aa, Rhizobium sp
MTQRVKLAVLGAGLIGKRHIQHLLAEPSAQLSAVVDPTPAGQTIAKKAGVKWFPSFADMIAADRPDGIIVATPNQAHVQNGLEAVEAGVPALIEKPIADDTISGEKLIAAAEAKGVPLLTGHHRRHNPVIQKAKEIIESGKLGRVLVANVMFWLFKPDDYFDISWRRERGAGPVFLNLIHDVDNLRYLLGDVAAVQARESNAVRGNAVEETAVILIEFKNGVLGTATVSDAVVAPWSWEMTSGENPAYPKTEQSCYMIGGTHGSLAVPSLEVWRNPGKRSWWEPFDQTRIEVDDEDPLVLQIRQFCKVIRGDEPPLVSGREGLETLRVVDAVKRAAATGERIALN

SEQ ID NO: 33581 - DNA, 969 bp, Amycolatopsis mediterranei
  CDS (1)..(969): transl_table=11
gtggccctgatcggtgcggggctcatcgcccggctgcacctggaagcgtggctcggcgccggcgccgccgtgcgggtgtactccgacgacggccggagccgcgagctggcggcggagttcggcgcgaaggccgccgggtccctggaagaggcgctcgacggcgccgacgccgtcgacatctgcacgccgaccgcgagccaccacgagatcgccctgaccgccatcgccgccggtgtcggcgtcgtgtgcgagaagccgctggcggccagcgccgaagaggccgaagagatcgtcaccgccgccgaacgggccggggtgcggctctacgccgcccacgacgtgcggttcgcggcgccctacgcgcgattgcacgagctcgttgcgagcgggcggctcggggagggtgccctcggccggttctccttctccgcctaccacccgcggccctggaccgggcacgcctccgcgcggtcgggcggcatcctcaccgaccagctgctgcacggcgccgacctcgcccactgggtcttcggggacgtcgtccgcgtgcacgcctgctaccagggcgacatcgccaccccggcgcccgaaggggccgtcgcgaccgggaccgccgtgctcacccacgcgagcggcgccatcagccaggtggtgagccggtggacggccacgccgcggccgccggtgcgggtggccttccacgtctcgggtaccggcgggtccgtcagctacgactccgagtggccgcaggaggtccgggtcgtcgacggcggcgccgggaacttcgcttacggcgggccgtcggtgttcgacaccgaaatgcgggagttcgccacggctttcgcgggtggacccgagccgaggatcggcgcgaaggacgcgctggccgccgtgcggatcatccacgccgccgccgagtccgcgtggaccgggcgggccgtcgaactgccggtgaggggagcagcgtga

SEQ ID NO: 33582 - protein, 322 aa, Amycolatopsis mediterranei
MALIGAGLIARLHLEAWLGAGAAVRVYSDDGRSRELAAEFGAKAAGSLEEALDGADAVDICTPTASHHEIALTAIAAGVGVVCEKPLAASAEEAEEIVTAAERAGVRLYAAHDVRFAAPYARLHELVASGRLGEGALGRFSFSAYHPRPWTGHASARSGGILTDQLLHGADLAHWVFGDVVRVHACYQGDIATPAPEGAVATGTAVLTHASGAISQVVSRWTATPRPPVRVAFHVSGTGGSVSYDSEWPQEVRVVDGGAGNFAYGGPSVFDTEMREFATAFAGGPEPRIGAKDALAAVRIIHAAAESAWTGRAVELPVRGAA

SEQ ID NO: 33583 - DNA, 1017 bp, uncultured Acidobacteria bacterium
  CDS (1)..(1017): transl_table=11
atgatcggtgtcgcgatcgtcggctgcgggctgatcgggcgcaagcgcgccgcgaacctcggaccaacggtgcggctggcggcctgcgccgacctcgaagcagggcgcgccgaggctctcgcggcgaccgcctgtgacgcggtcgcgaccgccgactggcaccaggccatcgcccgtaccgacgtcgacatcgtcgtcgtcgcgaccaccaacgagatgctctccgagatcgccggcgccgccgtcgcggccggcaagcacgtgctggtcgagaaaccggcggcccgcagcacgtgcgagctcgatccgctgatcgccgcggcgcgagcgtcgcaccggctggtccgggttggtttcaaccaccgctaccacccggccctgcgccaggcccgcgcgcttctcgacgccggcgccgcaggggagctgatgttcgtgcgcggccgctacggacacggcgggcgcgtcggctacgaccgcgaatggcgcgccgacccggcccgctcgggcggcggcgagctgatcgatcagggcgtccacctgatcgatctgtcgcgctggttcctgggggagttcaccgcagtcgaagggctggcgcacaccttcttctggcagatgtccgtcgacgacaacgcgttcctgctgctccggacggaggccgccagggccgcctttctccacgtcagctgcaccgaatggaagaacctgttctccctcgagatctacggccggaccgccaagctgcacgtcgaaggcctcggaggcagctacgggctcgagcggctgacgctctacgcgatgctcccggcaatgggcccaccggtcacgaccgtctgggactacccgggaccggaccagtcgtgggcgctggagtttgcggagttcctcgaagacatccggctcggacgggctccttcggcagggctgccggatgcccgggcggccctggtggtggtcgaggagatctaccgacggtcgggcgtcatcgacccggcgctgctggtcgaggcggcgcgatga

SEQ ID NO: 33584 - protein, 338 aa, uncultured Acidobacteria bacterium
MIGVAIVGCGLIGRKRAANLGPTVRLAACADLEAGRAEALAATACDAVATADWHQAIARTDVDIVVVATTNEMLSEIAGAAVAAGKHVLVEKPAARSTCELDPLIAAARASHRLVRVGFNHRYHPALRQARALLDAGAAGELMFVRGRYGHGGRVGYDREWRADPARSGGGELIDQGVHLIDLSRWFLGEFTAVEGLAHTFFWQMSVDDNAFLLLRTEAARAAFLHVSCTEWKNLFSLEIYGRTAKLHVEGLGGSYGLERLTLYAMLPAMGPPVTTVWDYPGPDQSWALEFAEFLEDIRLGRAPSAGLPDARAALVVVEEIYRRSGVIDPALLVEAAR

SEQ ID NO: 33585 - DNA, 1011 bp, Pseudomonas aeruginosa
  CDS (1)..(1011): transl_table=11
atgacaagcaacgagtgttttctgatagttggcagcggaagcatagcacgccgacatatgagaaatatacagtctacttatccgcaggccaagatagtatgtgtctctgcctcaggtagagagttgaactcaaatgaattgccttcaggtgtatcagctcttggttctttgcatgacgctttgcaggtaatccccacttttgccattattgcttctccagctcctttacatgtagagcaggcgagtcttttggcttcgagtggtgtctcgattttagttgaaaaaccattaagtgattcattggtacgctttgcctctcagggtggagcttcgctgaacggaaaacgtattcttgttgcatataatcttcgctttatgccttcaataagagtattcaggcagtatattgatagtgggaagctagggcgaattcattctgtaagttgtgaagttggtcaatatcttcccgactggagaccagatagtgactatcgaaaaaatgtttctgcacaacgcaccttaggcggtggtgctctacttgagttaagtcacgaactagactaccttcaatggctctttggacccgttgccaatgtctattgcatagcacgaatatctggtgcattagagttggacgcggaagatactgttgatgccttgctcgtatcccaaaagggctatgtcatcaatctacatatggattttctgcagcgaactgcgacacgtaaatgcaaagtggttggtgagcatgcttctctggaatggaatattttagataacagtgttgttttgtacagttcattgggtaaaaaacaagtactttacagtgaccaggaatatgatcggaatagaatgtatatagatgaactgcttcattttgtcgacgttgcgaaaggaaaaacttcggcactggtaacgatagaacaaggacttgagacattaaagttggttgaggcgctgaagcggtcttcagcaagcggaaaggtcatttctcttagggatttctcatga

SEQ ID NO: 33586 - protein, 336 aa, Pseudomonas aeruginosa
MTSNECFLIVGSGSIARRHMRNIQSTYPQAKIVCVSASGRELNSNELPSGVSALGSLHDALQVIPTFAIIASPAPLHVEQASLLASSGVSILVEKPLSDSLVRFASQGGASLNGKRILVAYNLRFMPSIRVFRQYIDSGKLGRIHSVSCEVGQYLPDWRPDSDYRKNVSAQRTLGGGALLELSHELDYLQWLFGPVANVYCIARISGALELDAEDTVDALLVSQKGYVINLHMDFLQRTATRKCKVVGEHASLEWNILDNSVVLYSSLGKKQVLYSDQEYDRNRMYIDELLHFVDVAKGKTSALVTIEQGLETLKLVEALKRSSASGKVISLRDFS

SEQ ID NO: 33587 - DNA, 990 bp, Streptomyces galilaeus
  CDS (1)..(990): transl_table=11
atgccgaaggacactccacggcccgtactccgcatcggggttctgggctgtgccgatatcgcggtgcgccggatcctgcccgcgatcgtggagcatccgtcggtccggctggtcgctctggcgagccgggacggggcgcgcgccgaacggctcgcggcccgtttcggatgcgcggcggtgaccggctacaaggcgctgctggaccgtgaggacatcaacgccgtctacgttcccctgccgcccggcatgcaccacgaatgggtcaccgaagcgctgacggcgggcaagcacgtgctggtggagaagccgctcagcacgacgtacgcgcagagcgtcgacctggtggcgatggccggccggctcggcctcgcgctcaccgagaacttcatgttcctgcaccactcgcagcacgaggcggtccgggccatgaccggcgagatcggggaactgcgggtcttcaccagttccttcggcgtgccgccgccccacccctcgtccttccggcacgacgcgcggctcggcggcggcgccctgctggacgtcggtgtctatccgctgcgcgcggcccagctccacctcgccggggaactcgacgtgctgggcgcctgtctgcgcgtggacgaggcgaccggcgtcgacgtcgcgggaagcgcgctgctgtccacggcgacgggtgtgaccgcgcagctcgacttcggcttccagcacgcgtaccggtccgtgtacgcgctgtggggcagccgcggcaggctgagcgtgccgcgggccttcaccccgccccgtgagcaccgcccggtggtccgtatcgaacagcaggaccgtctcaccgaagtgacgctgcccgccgatcaccaggtgggcaacgcgctcgacgcgttcgcctcggcggtgcactcggagaccgtccgtgcctccctgggggaggcgctgctgcgtcaggcgctcctggtcgagcaggtacgcaaagccgcgcgggtcgtcagcggctga

SEQ ID NO: 33588 - protein, 329 aa, Streptomyces galilaeus
MPKDTPRPVLRIGVLGCADIAVRRILPAIVEHPSVRLVALASRDGARAERLAARFGCAAVTGYKALLDREDINAVYVPLPPGMHHEWVTEALTAGKHVLVEKPLSTTYAQSVDLVAMAGRLGLALTENFMFLHHSQHEAVRAMTGEIGELRVFTSSFGVPPPHPSSFRHDARLGGGALLDVGVYPLRAAQLHLAGELDVLGACLRVDEATGVDVAGSALLSTATGVTAQLDFGFQHAYRSVYALWGSRGRLSVPRAFTPPREHRPVVRIEQQDRLTEVTLPADHQVGNALDAFASAVHSETVRASLGEALLRQALLVEQVRKAARVVSG

SEQ ID NO: 33589 - DNA, 1125 bp, Streptomyces spectabilis
  CDS (1)..(1125): transl_table=11
gtgcagaaagaacgtgtccgcgtgggcgtcatcggttgcggaaccgtcgcccagatcatgcatctgccctatctgcagagcctctccgaccagttcgagatcaccgcgctcagcgacctctcccccggcctcctcgacgccctcggcgagcggtacggggtgccgcacgggcggcgcttcacggactaccgcgcgctgctcgacaccgatgtggacgctgtcctcgtgctcagcggcggcagtcacgcgccgcaggtcctggccgccgccgaggcgggcaaacacgtcctggtggagaagccgctgtgcttcacgctccgcgaggccgacgcgatcgaggcggccgtcgcccggtccggagtgcgcctcatggtggcctacatgaagcgcttcgaccccggcttcctctatgggaaacagctggtcagcgccatcgaggagcctcggtacgcgcagatcaacaccctgcaccccagcgaggaccagtacatcgccatgcacggcgtgcgccgcttcgacgacgtgccgggccaggtcgcgcgggagctgcaccgggcccaggaggagctgctcgacgaggcggtcggcgcggtcccggacgccctgcgcttcgtctaccacgacgtgttcctcggcagcatggtgcacgacgtgaacgcgctgcggtcccttgtgggagagccggacgacgtgctgttcacggagatctggccgcgggactcccgcttcccctccgtgacgacggtcctcgcgcacccgggcgacctgcggaccagctacacctggacctatctcgacgacgtccgcgactacttcgaagagatcgcggtgctttccgcagggcagcgggtgcgcattcagttcccctccccattcctcaagcactggcccactcctgtcgtcgcccagcacatggaggacggcgccctggtggaaaggagaattcaggcctcgtacgacgaggcgttccgcgaggaactgcgcgctttccatgcctgcgtcgtggacggcacgccaccgctcaccgatgtgcgcgacgctcgggaggacatcgccgtactccagcgcgtcttcgccaggagcgcacccggaggactcggcggcgaagcgggcaaatgcccgtga

SEQ ID NO: 33590 - protein, 374 aa, Streptomyces spectabilis
MQKERVRVGVIGCGTVAQIMHLPYLQSLSDQFEITALSDLSPGLLDALGERYGVPHGRRFTDYRALLDTDVDAVLVLSGGSHAPQVLAAAEAGKHVLVEKPLCFTLREADAIEAAVARSGVRLMVAYMKRFDPGFLYGKQLVSAIEEPRYAQINTLHPSEDQYIAMHGVRRFDDVPGQVARELHRAQEELLDEAVGAVPDALRFVYHDVFLGSMVHDVNALRSLVGEPDDVLFTEIWPRDSRFPSVTTVLAHPGDLRTSYTWTYLDDVRDYFEEIAVLSAGQRVRIQFPSPFLKHWPTPVVAQHMEDGALVERRIQASYDEAFREELRAFHACVVDGTPPLTDVRDAREDIAVLQRVFARSAPGGLGGEAGKCP

SEQ ID NO: 33591 - DNA, 1047 bp, Streptomyces griseus
  CDS (1)..(1047): transl_table=11
atgagagtgggaatcgttggagccggccgtatgggccgactgcacgcgcgcacactgctcgaactgcccgacccacccgatctggtggtgcacgacgtcgaccccgacggggcgcaccggctggcccaggagcttgcggccggcacgaaggcccaggtgaccgtggagcgggaactcgccgacaccgtcacgaaggcggacgcgatcgtcgtggccaccccggcgacccagcgccgggccccgctgctggcggcggcgcgggccggactcccggtgttctgcgagaaacctctgaccgccgacgagaccgaggccgccgaactggtcgaggcactcgcgcacacacggctgcacgtcgggttccagcgccgctgcgaccccgagtaccagcggctgcgcgagctgatcgccgcgggcgagctgggccgcgtcctgctggtgcgctgcacggccttcgaccaccgtccgccggccgacgcctacgaggagacggcgggcgacatcttcacggactgcctcatccacgacatcgacgccgtgcactggctgaccgggcagcccacggtcgccgtgcaggccgacggggcacgcctgctcgccggctccgggtacgacgtggcgaccgcggtgctcaccctggccgacggggcccgcgccgtcctgtccgcctcccggctcgatccgcacggatacgaccaccgggtcgaggtcttggggaccaagggctccctctccgtcgggctcgacgcgcggacgccgctgcgactgctcggccaggacggcacgggctgcccgcccggtcccggggcgcagcccgcgtaccaggacttcaccgaccgcttcgaggccgcctaccggcgggaagtcctcgccttcgtccgtacggtgaccgagggggcgcccagtccctgcaccggacaggaggccctgcgggcccagcgcgtggcggcggcggcgggccgcgccgcccgaaccggcacccgcgtcgagctggacccggcaccgcacggcgcccccgccgcactggtcgcgggagcggcccgatga

SEQ ID NO: 33592 - protein, 348 aa, Streptomyces griseus
MRVGIVGAGRMGRLHARTLLELPDPPDLVVHDVDPDGAHRLAQELAAGTKAQVTVERELADTVTKADAIVVATPATQRRAPLLAAARAGLPVFCEKPLTADETEAAELVEALAHTRLHVGFQRRCDPEYQRLRELIAAGELGRVLLVRCTAFDHRPPADAYEETAGDIFTDCLIHDIDAVHWLTGQPTVAVQADGARLLAGSGYDVATAVLTLADGARAVLSASRLDPHGYDHRVEVLGTKGSLSVGLDARTPLRLLGQDGTGCPPGPGAQPAYQDFTDRFEAAYRREVLAFVRTVTEGAPSPCTGQEALRAQRVAAAAGRAARTGTRVELDPAPHGAPAALVAGAAR

SEQ ID NO: 33593 - DNA, 21 bp, Artificial sequence
  primer
atgaccgagccgcttcgtgtc

SEQ ID NO: 33594 - DNA, 21 bp, Artificial sequence
  primer
tcagaaggtggaaatgacctg

SEQ ID NO: 33595 - protein, 391 aa, Artificial sequence
  consensus sequence
  Variant (2)..(2): Xaa in position 2 is any amino acid
  Variant (4)..(7): Xaa in position 4 to 7 is any amino acid
  Variant (8)..(8): Xaa in position 8 is any or no amino acid
  Variant (10)..(58): Xaa in position 10 to 58 is any amino acid
  Variant (59)..(76): Xaa in position 59 to 76 is any or no amino acid
  Variant (78)..(80): Xaa in position 78 to 80 is any amino acid
  Variant (82)..(90): Xaa in position 82 to 90 is any amino acid
  Variant (91)..(91): Xaa in position 91 is any or no amino acid
  Variant (93)..(97): Xaa in position 93 to 97 is any amino acid
  Variant (101)..(126): Xaa in position 101 to 126 is any amino acid
  Variant (127)..(131): Xaa in position 127 to 131 is any or no amino acid
  Variant (133)..(147): Xaa in position 133 to 147 is any amino acid
  Variant (148)..(149): Xaa in position 148 to 149 is any or no amino acid
  Variant (151)..(175): Xaa in position 151 to 175 is any amino acid
  Variant (176)..(197): Xaa in position 176 to 197 is any or no amino acid
  Variant (199)..(200): Xaa in position 199 to 200 is any amino acid
  Variant (202)..(214): Xaa in position 202 to 214 is any amino acid
  Variant (215)..(216): Xaa in position 215 to 216 is any or no amino acid
  Variant (218)..(238): Xaa in position 218 to 238 is any amino acid
  Variant (239)..(262): Xaa in position 239 to 262 is any or no amino acid
  Variant (264)..(315): Xaa in position 264 to 315 is any amino acid
  Variant (316)..(390): Xaa in position 316 to 390 is any or no amino acid
GXGXXXXXHXXXXXXXXXXXXXXXXXXXXXXXXXXXXXXXXXXXXXXXXXXXXXXXXXXXXXXXXXXXXXXXXXXXPXXXHXXXXXXXXXXGXXXXXEKPXXXXXXXXXXXXXXXXXXXXXXXXXXXXXXXRXXXXXXXXXXXXXXXXXGXXXXXXXXXXXXXXXXXXXXXXXXXXXXXXXXXXXXXXXXXXXXXXXHXXDXXXXXXXXXXXXXXXAXXXXXXXXXXXXXXXXXXXXXXXXXXXXXXXXXXXXXXXXXXXXXGXXXXXXXXXXXXXXXXXXXXXXXXXXXXXXXXXXXXXXXXXXXXXXXXXXXXXXXXXXXXXXXXXXXXXXXXXXXXXXXXXXXXXXXXXXXXXXXXXXXXXXXXXXXXXXXXXXXXXXXXXXXXXXXF

SEQ ID NO: 33596 - DNA, 2841 bp, Azotobacter vinelandii
  CDS (1)..(2841): transl_table=11
atggcggtggcttctgcaccgtccgggatgagcgtttctactcctatcgccgcacgccgcgcaccggccgtttcgccagtctggtgtggctggccgcgccctgatcgcctcgtctcgcggccgggcgggtttccgcgccgatttttcggcccatgggcctggctgctgacgcggatcaattccgcggccttgaatccccgccgatcatccttatctatgcttcaacccggcaggccatccagtatgccagcccgctccttcaggaaggatgactccatgcgaatcgaccgattgaccagcaaactgcaacttgccttgtccgatgcccagtccgtggcagtcggcctcgaccacgccgccatcgagccgctacacctgatgcaggcgctgctcgatcaacaggggggctcgatcaggccgctcctgatgcaggtcggcttcgatatcaacggcctgcgccaggctctgagcaaggagctggatcaactgcccaagctgcagaaccccactggcgacgtgaatctgtcccaggacctggcgcgtctgctcaaccaggcggaccgcttggcccagcagaagggggatcagttcatttccagcgaactggtgctgctcgccgcgctggacggcaacacccgcctgggcaagctgctgcttggccagggcgtgtcgaagaaggctatcgagaacgccatcggtaacctgcgtggcggccagacggtgaacgatccgaatgccgaggagtcccgccaggccctggacaagtactgcgtcgacatgaccgcccgggccgaggagggcaagctcgacccggtgatcggacgcgacgacgagatccgccgcaccatccaggtgctgcagcggcgtaccaagaacaacccggtgctgatcggcgagccgggtgtcggcaagaccgccatcgtcgaaggcctcgcccagcgcatcgtcaacggcgaggtgccggacggactcagggacaagcgcctgctggcgctggacatgggttcgctgatcgccggcgccaagttccgcggcgagttcgaggagcgcctgaaggccgtgctcaacgagctggccaagcaggaggggcgcgtcatcctgttcatcgacgaactgcacaccatggtcggcgccggcaaggccgaaggcgccatggatgccggcaacatgctcaagcccgctctggcgcgtggcgagctgcattgcgtcggcgccaccaccctcgacgagtaccgccagtacatcgagaaagatgccgcgctggagcgccgcttccagaaggtgctggtggacgagccgagcgaggaggacaccatcgccatcctgcgcggcctgaaggagcgctacgaggtgcaccatggagtgaccatcaccgacggcgccatcatcgctgcggccaagctgtcgcaccgctacatcaccgaccgccaactgccggacaaggccatcgacctgatcgacgaggcggccagccgcattcgcatggagatcgactccaagcccgaggaactggatcgcctggatcgccggctgatccagctgaagatcgagcgtgaggcgctgaagaaggaaaccgacgaggcgaccaaaaagcgcctggccaagttggaagaggacatcgccaagctcgagcgcgagtacgccgacctcgaggagatctggaagtcggagaaggccgaggtgcagggctcggcacagatccagcagcaattggagcaggccaagctggatctggaggcggcacgccgcaagggtgatctgaaccggatggccgagctgcagtacggtttgattccggagctggagcgcaagctggcctccgccgacggcgggcagccgcgggagaaccagttgttgcgcaatcgtgtcaccgacgaggagatcgccgaggtggtctccaagtggaccggcatcccggtggccaagatgctcgagggcgagcgcgagaagctgctgaagatggaggagttgctgcatcagcgggtgatcggccagaacgaggcggtgaccgccgtggccaatgcggtgcggcgttcccgcgccgggctcgccgatccgaaccggccgagcggctccttcctgttcctcggcccgaccggggtcggcaagaccgagctgtgcaaggcgctggccgagttcctcttcgataccgaggaggccctggtgcgcatcgacatgtccgagttcatggagaagcactcggtagcccgcttgatcggcgcccctccggggtatgtcggctatgaggagggcggctacctgaccgaggcggtgcgccgcaagccttactccgtggtgctgatggacgaggtggaaaaggctcaccccgatgtgttcaacatccttctgcaggtgctggaggacggtcgtctgaccgatagccacgggcgtaccgtggacttcaagaacaccgtggtggtgatgacttccaaccttggttcggcgcagatccaggagctggccggcgatcgcgaggcgcagcgggcggcggtgatggatgcggtaagccaccatttccggccggagttcatcaaccgcatcgacgaggtggtggtattcgacccgctggcccgcgagcagatcgccggcatcgccgagattcagttgaagcgcctgcgccagcgtctggccgagcgcgagctgagcctcgaactttccgatgaggccctggacaagctgatcgccgtcggttacgacccggtctacggggcacggcccctgaagcgggcgatccagcgctggatcgagaacccgctggcgcagcagattctcgccgggcagttcgcgcctggcgcgaagatcttcgccagggtggagggcgacgagatcgtctttggctga

SEQ ID NO: 33597 - protein, 946 aa, Azotobacter vinelandii
MAVASAPSGMSVSTPIAARRAPAVSPVWCGWPRPDRLVSRPGGFPRRFFGPWAWLLTRINSAALNPRRSSLSMLQPGRPSSMPARSFRKDDSMRIDRLTSKLQLALSDAQSVAVGLDHAAIEPLHLMQALLDQQGGSIRPLLMQVGFDINGLRQALSKELDQLPKLQNPTGDVNLSQDLARLLNQADRLAQQKGDQFISSELVLLAALDGNTRLGKLLLGQGVSKKAIENAIGNLRGGQTVNDPNAEESRQALDKYCVDMTARAEEGKLDPVIGRDDEIRRTIQVLQRRTKNNPVLIGEPGVGKTAIVEGLAQRIVNGEVPDGLRDKRLLALDMGSLIAGAKFRGEFEERLKAVLNELAKQEGRVILFIDELHTMVGAGKAEGAMDAGNMLKPALARGELHCVGATTLDEYRQYIEKDAALERRFQKVLVDEPSEEDTIAILRGLKERYEVHHGVTITDGAIIAAAKLSHRYITDRQLPDKAIDLIDEAASRIRMEIDSKPEELDRLDRRLIQLKIEREALKKETDEATKKRLAKLEEDIAKLEREYADLEEIWKSEKAEVQGSAQIQQQLEQAKLDLEAARRKGDLNRMAELQYGLIPELERKLASADGGQPRENQLLRNRVTDEEIAEVVSKWTGIPVAKMLEGEREKLLKMEELLHQRVIGQNEAVTAVANAVRRSRAGLADPNRPSGSFLFLGPTGVGKTELCKALAEFLFDTEEALVRIDMSEFMEKHSVARLIGAPPGYVGYEEGGYLTEAVRRKPYSVVLMDEVEKAHPDVFNILLQVLEDGRLTDSHGRTVDFKNTVVVMTSNLGSAQIQELAGDREAQRAAVMDAVSHHFRPEFINRIDEVVVFDPLAREQIAGIAEIQLKRLRQRLAERELSLELSDEALDKLIAVGYDPVYGARPLKRAIQRWIENPLAQQILAGQFAPGAKIFARVEGDEIVFG

SEQ ID NO: 33598 - DNA, 2574 bp, Klebsiella pneumoniae subsp. pneumoniae MGH 78578
  CDS (1)..(2574): transl_table=11
atgcgtctggatcgtcttaccaataaattccagcttgctcttgccgatgcccagtcgctcgcactcgggcacgacaaccaattcatcgaacctcttcatttaatgagcgccttgctgaatcaggaagggggatcggtacgtcctttattaacctcggcgggcgtgaatgccgggaaactgcgcactgacatcgaacaggccttgagccgtttaccgcaggtggaaggcaccggcggcgatgtgcaaccttctcaggatttagtgcggatcctcaacctttgcgacaagctggcgcaaaagaaaaaggacaactttatttcgtcggaactgttcgttctggcggcgcttgaatcgcgcggtacgctgaccgaccttttaaaatccgccggagcaacaaccgccaacgtgactcaggcgattgaacaaatgcgcggaggtgaaagcgtgaacgatcagggtgccgaagaccaacgtcaggcattgaagaaatttaccgtcgatctgaccgagcgagccgagcagggcaagctggatccggtgatcggccgtgatgaagagattcgccgtaccattcaggtactgcagcgtcgtaccaaaaacaacccggtgctgatcggtgaacccggggtgggtaaaacggcaatcgtcgaaggcctggcgcagcgtatcgtcaacggcgaagtaccagaagggctgaaaggccgtcgggtattggcgctggatatgggggcgctggtggccggggcgaaataccgcggtgagtttgaagagcgtctgaaaggcgtgctgaccgacctgtccaaacaggaaggcaacgtcattctgtttatcgacgaactgcataccatggttggcgctggtaaagccgacggcgcgatggatgcgggtaacatgctgaagccggcgctggcgcgtggtgaactgcactgcgtcggggcgacgacgcttgatgaataccgtcagtacatcgaaaaagacgccgcgctggaacgtcgcttccagaaagtgttcgttgccgagccttcggtagaagataccatcgcgattctgcgcggtctgaaagaacgttatgagctgcaccaccacgtgcagatcactgacccggctatcgtggcggcggcgaccttatcgcatcgctatattgccgaccgtcagctgccggataaagccatcgacctcatcgatgaggcggcatccagcatccgtatgcagattgactccaaaccggaagagctggaccgtctcgatcggcgtattatccagctgaaactggaacagcaggcgctgaagaaagagtctgatgaggcgagcctgaagcgtctcgatatgctcaacgaggagctggcggataaagaacggcagtactcggtgctggaagaagagtggaaagcggaaaaagcgtcgctctccggcacccagaccatcaaagctgagctggagcaggcgaaaatcgccatcgaacaggcgcgccgcgtcggcgatctggcgcggatgtccgagctgcagtatggcaaaattccggaactggagaaacagctggcggctgccactcagtccgaagggaaaaccatgcgtctgctgcgtaataaagtgacggatgctgaaatcgccgaagtgctggctcgctggaccggtatcccggtctcccgcatgatggaaagcgagcgtgacaaactgctgcgtatggagcaggagctgcatcatcgggtgattggccaggatgaggcggttgaagcggtatccaacgccattcgccgcagccgcgccgggctgtccgatccgaaccggccgattggttcgttcctgttcctcggtccaaccggggtcggtaaaaccgagctgtgtaaaacgctggctaactttatgttcgacagcgacgacgcaatggtgcgtatcgatatgtccgagtttatggagaaacattccgtctcgcgtctggtcggtgcgcctccgggatacgtcggctatgaagagggcggttacctgaccgaggcggtgcgccgtcgtccttattccgtcatcctgctggatgaagtggaaaaagcgcacccggatgtgttcaacattctgctgcaggtactcgacgacgggcgtctcaccgacgggcaggggagaacggtcgacttccgtaatacggtagtcatcatgacctcgaacctcggttccgatctgattcaggaacggttcggcgagctggactacggacatatgaaggacctggtgctgggggtagtcagccagaacttccgtccggagttcatcaaccgtatcgacgaagtggtggtcttccatccgctgggcgagaaacatattgcctctattgcccagatccagctgcagcgtctgtataaacgtctggaagagcgcggatatgaagtgcagatgtccgatgaggcgctgaagctgctgagcgccaacggttacgatccggtatacggcgcgcggccattgaaacgtgctattcagcagcagattgagaacccgttagcccagcagatcctttccggtgagctggttccgggtaaaaccatcgagctggtagtaaaagacgaccgcattgtggcagtgcagtaa

SEQ ID NO: 33599 - protein, 857 aa, Klebsiella pneumoniae subsp. pneumoniae MGH 78578
MRLDRLTNKFQLALADAQSLALGHDNQFIEPLHLMSALLNQEGGSVRPLLTSAGVNAGKLRTDIEQALSRLPQVEGTGGDVQPSQDLVRILNLCDKLAQKKKDNFISSELFVLAALESRGTLTDLLKSAGATTANVTQAIEQMRGGESVNDQGAEDQRQALKKFTVDLTERAEQGKLDPVIGRDEEIRRTIQVLQRRTKNNPVLIGEPGVGKTAIVEGLAQRIVNGEVPEGLKGRRVLALDMGALVAGAKYRGEFEERLKGVLTDLSKQEGNVILFIDELHTMVGAGKADGAMDAGNMLKPALARGELHCVGATTLDEYRQYIEKDAALERRFQKVFVAEPSVEDTIAILRGLKERYELHHHVQITDPAIVAAATLSHRYIADRQLPDKAIDLIDEAASSIRMQIDSKPEELDRLDRRIIQLKLEQQALKKESDEASLKRLDMLNEELADKERQYSVLEEEWKAEKASLSGTQTIKAELEQAKIAIEQARRVGDLARMSELQYGKIPELEKQLAAATQSEGKTMRLLRNKVTDAEIAEVLARWTGIPVSRMMESERDKLLRMEQELHHRVIGQDEAVEAVSNAIRRSRAGLSDPNRPIGSFLFLGPTGVGKTELCKTLANFMFDSDDAMVRIDMSEFMEKHSVSRLVGAPPGYVGYEEGGYLTEAVRRRPYSVILLDEVEKAHPDVFNILLQVLDDGRLTDGQGRTVDFRNTVVIMTSNLGSDLIQERFGELDYGHMKDLVLGVVSQNFRPEFINRIDEVVVFHPLGEKHIASIAQIQLQRLYKRLEERGYEVQMSDEALKLLSANGYDPVYGARPLKRAIQQQIENPLAQQILSGELVPGKTIELVVKDDRIVAVQ

SEQ ID NO: 33600 - DNA, 2640 bp, Xanthobacter autotrophicus Py2
  CDS (1)..(2640): transl_table=11
atgaattttgagatctataccgagcgcgcgcgcggcttcgtccagtcggcccagtcgctggcgacccgggagggtaaccagcagttcacgcccgagcacctgctcaaggtgctgatggacgatcccgaaggcctgtgctcgggcctgatccagcgcgcgggcggcaatctcgtgctggtgcgggccgaggtcgaagcggcgctgaagaagctgccgaaggtggaaggcggctccggccaggtctatctcagccagcagctggccaaggtgttcgagaccgccgagcaggcggccaagaaggcgggcgacggctatgtcaccgtcgagcggatgctgctcgccctgaccatcgagaaggacaccgaggcgggccgcatcctggtgaaggccggcgtgacgccgcagaccctgaatgcggccatcgaggccctgcgcaagggccgcactgcggacagcgctaccgccgagaatgcctatgacgccctgaagaaatacgcccgcgacctcacccaggccgtgcgggacggcaagctcgacccggtcattggccgcgacgaggagatccgccgcaccatccaggtgctggcgcgccgcaccaagaacaatcccgtgctcatcggcgagcccggtgtcggcaagaccgccatcgtggagggccttgcccgccgcatcgtggacggcgacgtgccggagagcctgaagaacaagagcctgctggccctcgacatgggctccctcatcgccggcgcgaaatatcgcggcgagttcgaggagcgcctgaagagcgtgctctccgaggtggagagcgcggaaggcggcatcatcctgttcatcgacgagatgcacaccctggtcggcgccggcaagaccgacggcgccatggatgcctccaacctcttgaagccggcgctggcccgcggcgagctgcactgcgtcggcgcgaccacgctggatgaatatcgcaagcacgtggagaaggacgcagccctggcccgtcgcttccagcccgtcttcgtctccgagcccacggtggaggataccgtctccatcctgcgcgggctgaaggagaagtacgagctgcaccacggcgtgcgcatcaccgattcggcgctggtgtcggcggcggtcctgtccaaccgctacatcaccgaccgcttcctgcccgacaaggccatcgacctgatggacgaggcggcttcccgcctgcgcatgcaggtggattcgaagcccgaggagctggacagtctcgatcgcgagatcatgcgccgcaagatcgagcaggaggccctcaagaaggagaccgacaccgcctccaaggaccgcctgaagcggtccgagaaggagttggccgaccttgaggagaaggcttccgtcctcacctccaagtggaaggcggagaaggagaagctgggcgccgcgaccacgctgaagtcgaagctcgaccaggcgcgggcggatctggccaccgcgcagcggcagggcgaataccagaaggccggcgagctgacctattcggtcatccccgagcttgagaagaagctcgccgaggtcgagaaggcgggcgcagccgggcagatggtggaagaggcggtgacgccgaaccacatcgccggcgtcgtctcgcgctggaccggcgtgccggtggacaagatgctggaaggcgagcgcgagaagctcttgcgcatggagctggagctggccaagcgcgtggtgggccagtcggaggcggtggccgccgtctccactgccgtgcgtcgcgcccgcgccggcctccaggacccgaaccggcccatcggctcgttcctgttcctcggccccaccggcgtcggcaagaccgagctgaccaaggcgctcgccgaattcctgttcgacgacgagaccgccatggtccgcatcgacatgtcggaatacatggagaagcactccgtgagccgcctcatcggcgcgcctcccggctatgtgggctatgacgagggcggtgccctcaccgaggcggtccgccgccggccctaccaggtggtgctgttcgacgaggtggagaaggcccatccggacgtgttcaatgtcctcctgcaggtgctcgacgacgggcgcctcacggacgggcaggggcgcacggtggacttccgcaatgtgcttatcgtcatgacctccaacctcggcgccgaattcctcgccgacccgcgccagcccatgggcttcaaggtgccgggccacgagggagagaccgtggtgtcggacgaggaggcctacgatatggtgatgggggcggtgcggcgtcatttccgccccgaattcatcaaccgcatcgacgagatcgtcatgttccaccgcctgaagcgggagcagatggactccatcgtggacatccagatgggccggctgcgcaagctgctggaggatcgcaagatcaccatcgagctgtcccccgaggcgcgggccttcctcgccgagaagggttacgacccggcctatggcgcgcgtcccctgaagcgcaccatccagaagctggtgcaggacccgctggccgagaagatcctcgccggcaccgtcctggacggcgcaacggtgaaggtgggcctggacaacggccagcttaccttcgcgggagaggcggcgccggtggaccaggccgcctga

SEQ ID NO: 33601 - protein, 879 aa, Xanthobacter autotrophicus Py2
MNFEIYTERARGFVQSAQSLATREGNQQFTPEHLLKVLMDDPEGLCSGLIQRAGGNLVLVRAEVEAALKKLPKVEGGSGQVYLSQQLAKVFETAEQAAKKAGDGYVTVERMLLALTIEKDTEAGRILVKAGVTPQTLNAAIEALRKGRTADSATAENAYDALKKYARDLTQAVRDGKLDPVIGRDEEIRRTIQVLARRTKNNPVLIGEPGVGKTAIVEGLARRIVDGDVPESLKNKSLLALDMGSLIAGAKYRGEFEERLKSVLSEVESAEGGIILFIDEMHTLVGAGKTDGAMDASNLLKPALARGELHCVGATTLDEYRKHVEKDAALARRFQPVFVSEPTVEDTVSILRGLKEKYELHHGVRITDSALVSAAVLSNRYITDRFLPDKAIDLMDEAASRLRMQVDSKPEELDSLDREIMRRKIEQEALKKETDTASKDRLKRSEKELADLEEKASVLTSKWKAEKEKLGAATTLKSKLDQARADLATAQRQGEYQKAGELTYSVIPELEKKLAEVEKAGAAGQMVEEAVTPNHIAGVVSRWTGVPVDKMLEGEREKLLRMELELAKRVVGQSEAVAAVSTAVRRARAGLQDPNRPIGSFLFLGPTGVGKTELTKALAEFLFDDETAMVRIDMSEYMEKHSVSRLIGAPPGYVGYDEGGALTEAVRRRPYQVVLFDEVEKAHPDVFNVLLQVLDDGRLTDGQGRTVDFRNVLIVMTSNLGAEFLADPRQPMGFKVPGHEGETVVSDEEAYDMVMGAVRRHFRPEFINRIDEIVMFHRLKREQMDSIVDIQMGRLRKLLEDRKITIELSPEARAFLAEKGYDPAYGARPLKRTIQKLVQDPLAEKILAGTVLDGATVKVGLDNGQLTFAGEAAPVDQAA

SEQ ID NO: 33602 - DNA, 2769 bp, Oryza sativa (japonica cultivar-group)
  CDS (1)..(2769)
atgggccggctcggtggaggcgggctgctggttccgccgccgccgccgcagcggaggctgttccaccccacgcaggcggcgaggtacagcacctcgtcgtcgtctcagataactccaggagaatttactgagatggcctgggagggggttgtcggcgcggttgatgcagctagaatgtcgaagcaacaagtagtggaagcagagcacctgatgaaagctcttctggagcagaaggatggtttagcgcgcagaatattttcgaaagctggaatagataacacatctgtcctgcaagctactgatgagttcatctcgagacagccaaaggttgttggcgatacaagtggaccgatcattgggtcaagctttgtatcaattttggataatgcaaggaagcataagaaagaatatgctgatgagtttgtatctgttgagcacatattgcgagcattcacagaagataagaggtttggacaacagctgttcagagatctcaaaattggggagaatgagttgaaggaagctatctccgctgtacgtggcagtcagcgggtcacagatcagaatccggaggggaagtaccaggctctagagaagtatggtattgacatgacagaattagctcgacgtggaaaactggatcctgttattggccgtgatgatgaagtgcgacgatgcattcagatcctttgcaggagaactaagaataatcctgtaattattggtgagccaggagtcggcaaaactgctatcgctgaaggattggcacagcgtattgtgcggggagatgttcctgaacctttacagaatagaaagcttatttcattggacatgggagcattacttgctggggctaaattccaaggtcaatttgaagagagacttaaggctgttctgaaggagatcactgcctcgaatgggcagatcatcttgttcattgatgagatccacactattgttggtgcaggagcagcaggtggggcaatggatgctggtaatttgctgaagccaatgttaggtcggggtgaactccgttgcattggagcaacaacactagatgagtacaggaagtacattgagaaggatgctgctctggagcgtaggttccagcaggtttattgtggtgagccagcagttgaggatacaatctctatactgcgtggcctaagagagcggtatgaactgcaccatggtgtcaaaatatcagatggagctcttgtttctgcggctgttttatcagatcgctacatcactggacgttttttgcctgataaagctattgacctagttgatgaagcagctgctaagctgaaaatggagataacatcgaaacctattgaattggatgaggtagatagggaaatcataaggcttgaaatggagaagctctcattgaagaatgataccgataaagcctccaaacagcgactgagcaagcttgaagctgatctagaatctctgaagcagaagcagaaaaacctttcagaacattgggaatatgagaagtccttgatgactcgcataagatcgatcaaggaagagactgacagagttaacctggagattgaagctgctgagagagagtatgatttgaaccgtgcagctgagctcaagtacggaacacttctgtcgctacaaaaacagcttgaagaggctgagaacaaactcatggaattccagcagtcaggcaagtcaatgcttcgagaagaggtgactgatgttgacattgctgagattgttagcaagtggactggtattccagtgtcaaaccttcaacaatctgaaaaggaaaagctactgctattggaagatgtactccacaagagggttattggccaagatattgcagtgaagtcagtggctaatgcaatccgtcgttctagggcaggcctatcagaccctaaccgtcccatagcaagcttaatgtttatgggtccaacaggtgtaggaaagaccgaactggggaaaacactagctgaattccttttcaacacagagaatgctctaatacggattgatatgagcgagtacatggaaaagcatgccgtctcccgtttggttggagcccctcctggctatattggttatggggaagggggccaactgacagaagctgttcgtcgtaggccttattctgtggttcttttcgatgaaattgagaaagcgcaccaggatgtgttcaacatcttattgcaacttttggatgatggaagaataaccgactctcagggcagaacagtcagctttactaactgtgttatcatcatgacttcaaacattgggtcgccattgattcttgatacgcttagaaacacatcagacagcaaggaggcagtttatgaaataatgaagaagcaagtgattgacatggctcggcagtcattccggccagagtttttgaataggatagatgagtacattgtattccagccgctggacaccacagagataaatcgcatcgtggagatccagctgaaccgagtcaagaaccggctgaggcaacagaagattcatctgcagtacacaccagaagctgtggagcatcttggctctctcggctttgaccctaactacggtgctaggcctgtgaagagggtgatccagcagatggtagagaacgagatcgccctcagtgtcctgaagggcgacttcaaagaagacgacaccgtcctcgtcgacgtgagctccgtggcgatcgcgaaaggccttgctccacagaagaagcttgtcctccagaggggagggattgagaggagaagagaagattga

SEQ ID NO: 33603 - protein, 922 aa, Oryza sativa (japonica cultivar-group)
MGRLGGGGLLVPPPPPQRRLFHPTQAARYSTSSSSQITPGEFTEMAWEGVVGAVDAARMSKQQVVEAEHLMKALLEQKDGLARRIFSKAGIDNTSVLQATDEFISRQPKVVGDTSGPIIGSSFVSILDNARKHKKEYADEFVSVEHILRAFTEDKRFGQQLFRDLKIGENELKEAISAVRGSQRVTDQNPEGKYQALEKYGIDMTELARRGKLDPVIGRDDEVRRCIQILCRRTKNNPVIIGEPGVGKTAIAEGLAQRIVRGDVPEPLQNRKLISLDMGALLAGAKFQGQFEERLKAVLKEITASNGQIILFIDEIHTIVGAGAAGGAMDAGNLLKPMLGRGELRCIGATTLDEYRKYIEKDAALERRFQQVYCGEPAVEDTISILRGLRERYELHHGVKISDGALVSAAVLSDRYITGRFLPDKAIDLVDEAAAKLKMEITSKPIELDEVDREIIRLEMEKLSLKNDTDKASKQRLSKLEADLESLKQKQKNLSEHWEYEKSLMTRIRSIKEETDRVNLEIEAAEREYDLNRAAELKYGTLLSLQKQLEEAENKLMEFQQSGKSMLREEVTDVDIAEIVSKWTGIPVSNLQQSEKEKLLLLEDVLHKRVIGQDIAVKSVANAIRRSRAGLSDPNRPIASLMFMGPTGVGKTELGKTLAEFLFNTENALIRIDMSEYMEKHAVSRLVGAPPGYIGYGEGGQLTEAVRRRPYSVVLFDEIEKAHQDVFNILLQLLDDGRITDSQGRTVSFTNCVIIMTSNIGSPLILDTLRNTSDSKEAVYEIMKKQVIDMARQSFRPEFLNRIDEYIVFQPLDTTEINRIVEIQLNRVKNRLRQQKIHLQYTPEAVEHLGSLGFDPNYGARPVKRVIQQMVENEIALSVLKGDFKEDDTVLVDVSSVAIAKGLAPQKKLVLQRGGIERRRED

SEQ ID NO: 33604 - DNA, 2772 bp, Escherichia coli O157:H7 EDL933
  CDS (1)..(2772): transl_table=11
atgatccagattgatcttcccacgctggtaaaacggctgaacctgttctcccgccaggcgctggagatggccgcctcagaatgtatgagccagcaggcagcggaaattaccgtcagccatgtgcttattcagatgctcgccatgccacgcagtgacctgcgggttattacccgccagggcgatattggcatggaagagttgcgccaggcgttgacggtagagaactacacaaccgcccgttctgcggacagctacccggcgttttccccgatgctggttgagtggcttaaagagggctggctgctggcgtcggctgagatgcagcacagcgaactgcgcggcggcgtgttgctgctggccttgctgcattcgccgctgcgttatataccgcctgctgccgcccggctgttgaccggcattaaccgtgaccgtctgcaacaggactttgtgcagtggacacaggagtcggcggaatcagtcgtgccggatgcagacggtaaaggcgcaggcacactgacggacgcctctgacaccctgcttgcccgctacgccaaaaacatgacagaagacgcccgtaacggcaggctagccccagtactgtgccgcgaccacgaaatcgacctgatgatcgacattctctgccgccgccgtaaaaacaacccggtggtggtgggcgaagcaggcgtgggtaaaagcgcgctgattgaagggctggcgctgcgcatcgtggcaggccaggtgccggacaaactgaaaaacaccgatatcatgacccttgacctgggcgcattgcaggccggggcatcggtgaagggtgagtttgaaaaacgcttcaaggggctgatggcggaggtcatttcctctccggtgccggtcattctgtttatcgacgaagcgcataccctgattggcgcgggcaaccagcagggcgggctggatatctccaacctgctgaaaccggcgctggcgcgtggcgaactgaaaaccatcgccgccaccacctggagcgagtacaaaaaatacttcgagaaagacgccgccctgtcgcgccgcttccagttagtgaaggtcagcgaacccaacgctgccgaagccaccattattctgcgtggtctgtcggcggtctatgaacggtctcacggcgtgctgattgacgatgatgccttgcaggccgcagcaacgctgagcgaacgttatctctccgggcgtcagttaccggacaaagcgattgatgtgctggataccgcctgcgcccgtgtggccatcaacctgtcgtcgccgccgaagcaaatctcggcgctgaccactctgagccaccagcaggaggcggaaattcgccagcttgagcgcgagcttcgcatcggactgcgtaccgacacatcacggatgaccgaggtgctggtgcagtatgatgaaacgctgacggcgctggatgaactggaagcggcttggcaccagcagcagacgctggtccgggagattatcgcgctgcgccagcagttactgggcgtggcagaggacgatgcggcgccgttgccggacgcagatactgtggaggatacgcagccagagtcagagtcagagtcagaacaggataataccggtgccgtaccggctgatgagaccgacagagaacagccggaagagaccgctgaaacagtttccccggtacagcggctggcccagctcactgccgaactggacgccctgcataacgaccggttgctggtctccccgcacgtcgataaaaaacagattgcggcggtgattgccgaatggaccggcgtgccgctcaaccgcctgtcgcagaatgaaatgtcggtcatcaccgacctgccgaaatggctgggcgacaccatcaaaggccaggacctggcgattgccagcctgcataagcatctactgaccgcacgcgccgacctgcgtcgtccgggacgcccgctcggtgcgttcctgctcgctggccccagcggcgtgggtaaaaccgaaaccgtcctgcaactggcagagctgctctacggcggtcgccagtacctgaccaccatcaatatgtccgagttccaggagaaacacaccgtttcgcggctgattggctcccctccgggctatgtcggctatggcgaaggcggcgtgctgactgaagccatccgccagaaaccctactcggtggtgctgctcgatgaagtggaaaaagcgcacccggatgtcctcaacctgttctaccaggcgtttgacaagggcgagatggccgacggcgaaggccgcctgattgactgtaaaaacatcgtcttcttcctcacctccaacctcggttaccaggtgattgtcgaacacgcggatgacccggaaaccatgcaggaagccctctatccggtgctggcggacttctttaaacctgccctgctggcgcgaatggaggtggtgccgtacctgccgctgtcgaaagagacgctcgccaccattatcgccgggaaactggcccgtctggataacgtgctgcgcagtcgctttggtgcagaagtggtcattgaaccggaagtgacggacgaaatcatgagccgcgtcacccgcgcggaaaacggcgcgaggatgctggaatctgtcatcgatggcgacatgctaccgccgctctcgctgctgctgttgcagaaaatggcggctaacacggcgattgcccggattcggttgtcggcagtggacggcgcatttacggcagacgtggaagatgctcagaacgacgagtccgtcacaaaggatgaaacggttttatga

SEQ ID NO: 33605 - protein, 923 aa, Escherichia coli O157:H7 EDL933
MIQIDLPTLVKRLNLFSRQALEMAASECMSQQAAEITVSHVLIQMLAMPRSDLRVITRQGDIGMEELRQALTVENYTTARSADSYPAFSPMLVEWLKEGWLLASAEMQHSELRGGVLLLALLHSPLRYIPPAAARLLTGINRDRLQQDFVQWTQESAESVVPDADGKGAGTLTDASDTLLARYAKNMTEDARNGRLAPVLCRDHEIDLMIDILCRRRKNNPVVVGEAGVGKSALIEGLALRIVAGQVPDKLKNTDIMTLDLGALQAGASVKGEFEKRFKGLMAEVISSPVPVILFIDEAHTLIGAGNQQGGLDISNLLKPALARGELKTIAATTWSEYKKYFEKDAALSRRFQLVKVSEPNAAEATIILRGLSAVYERSHGVLIDDDALQAAATLSERYLSGRQLPDKAIDVLDTACARVAINLSSPPKQISALTTLSHQQEAEIRQLERELRIGLRTDTSRMTEVLVQYDETLTALDELEAAWHQQQTLVREIIALRQQLLGVAEDDAAPLPDADTVEDTQPESESESEQDNTGAVPADETDREQPEETAETVSPVQRLAQLTAELDALHNDRLLVSPHVDKKQIAAVIAEWTGVPLNRLSQNEMSVITDLPKWLGDTIKGQDLAIASLHKHLLTARADLRRPGRPLGAFLLAGPSGVGKTETVLQLAELLYGGRQYLTTINMSEFQEKHTVSRLIGSPPGYVGYGEGGVLTEAIRQKPYSVVLLDEVEKAHPDVLNLFYQAFDKGEMADGEGRLIDCKNIVFFLTSNLGYQVIVEHADDPETMQEALYPVLADFFKPALLARMEVVPYLPLSKETLATIIAGKLARLDNVLRSRFGAEVVIEPEVTDEIMSRVTRAENGARMLESVIDGDMLPPLSLLLLQKMAANTAIARIRLSAVDGAFTADVEDAQNDESVTKDETVL

SEQ ID NO: 33606 - DNA, 2586 bp, Escherichia coli O157:H7 EDL933
  CDS (1)..(2586): transl_table=11
atgggaggagttatgcgtctggatcgtcttactaataaattccagcttgctcttgccgatgcccaatcacttgcacttgggcacgacaaccaatttatcgaaccacttcatttaatgagcgccctgctgaatcaggaagggggttcggttagtcctttattaacatccgctggcataaatgctggccagttgcgcacagatatcaatcaggcattaaatcgtttaccgcaggttgaaggtactggtggtgatgtccagccatcacaggatctggtgcgcgttcttaatctttgcgacaagctggcgcaaaaacgtggtgataactttatctcgtcagaactgttcgttctggcggcacttgagtctcgcggcacgctggccgacatcctgaaagcagcaggggcgaccaccgccaacattactcaagcgattgaacaaatgcgtggaggtgaaagcgtgaacgatcaaggtgctgaagaccaacgtcaggctttgaaaaaatataccatcgaccttaccgaacgagccgaacagggcaaactcgatccggtgattggtcgtgatgaagaaattcgccgtaccattcaggtgctgcaacgtcgtactaaaaataacccggtactgattggtgaacccggcgtcggtaaaactgccatcgttgaaggtctggcgcagcgtattatcaacggcgaagtgccggaagggttgaaaggccgccgggtactggcgctggatatgggcgcgctggtggctggggcgaaatatcgcggtgagtttgaagaacgtttaaaaggcgtgcttaacgatcttgccaaacaggaaggcaacgtcatcctgtttatcgacgaattacataccatggtcggcgcgggtaaagccgatggcgcaatggacgccggaaacatgctgaaaccggcgctggcgcgtggtgaattgcactgcgtaggtgccacgacgcttgacgaatatcgccagtacatcgaaaaagatgctgcgctggaacgtcgtttccagaaagtgtttgttgccgagccttctgttgaagataccattgcgattctgcgtggcctgaaagaacgttacgaattgcaccaccatgtgcaaattactgacccggcaattgttgcagcggcgacgttgtctcatcgctacattgctgaccgtcagctgccggataaagccatcgacctgatcgatgaagcagcatccagcattcgtatgcagattgactcaaaaccagaagaactcgaccgactcgatcgccgtatcatccagctcaaactggaacaacaggcgttaatgaaagagtctgatgaagccagtaaaaaacgtctggatatgctcaacgaagaactgagcgacaaagaacgtcagtactccgagttagaagaagagtggaaagcagagaaggcatcgctttctggtacgcagaccattaaagcggaactggaacaggcgaaaatcgctattgaacaggctcgccgtgtgggtgacttggcgcggatgtctgaactgcaatacggcaaaatcccggaactggaaaagcaactggaagccgcaacgcagctcgaaggcaaaactatgcgtctgttgcgtaataaagtgaccgacgccgaaattgctgaagtgctggcgcgttggacggggattccggtttctcgcatgatggaaagcgagcgcgaaaaactgctgcgtatggagcaagaactgcaccatcgcgtaattggtcagaacgaagcggttgatgcggtatctaacgctattcgtcgtagccgtgcggggctggcggatccaaatcgcccgattggttcattcctgttcctcggcccaactggtgtggggaaaacagagctttgtaaggcgctggcgaactttatgtttgatagcgacgaggcgatggtccgtatcgatatgtccgagtttatggagaaacactcggtgtctcgtctggttggtgcgcctccgggatatgtcggttatgaagaaggtggctacctgaccgaagcggtgcgtcgtcgtccgtattccgtcatcctgctggatgaagtggaaaaagcgcatccggatgtcttcaacattctgttgcaggtactggatgatgggcgtctgactgacgggcaagggagaacggtcgacttccgtaatacggtcgtcattatgacctctaacctcggttccgatctgattcaggaacgcttcggtgaactggattatgcgcacatgaaagagctggtgctcggtgtggtaagccataacttccgtccggagttcattaaccgtatcgatgaagtggtggtcttccatccgctgggcgaacagcacattgcctcgattgcgcagattcagttgaaacgtctgtacaaacgtctggaagaacgtggttatgaaatccacatttctgacgaggcgctgaaactgctgagcgagaacggttacgatccagtctatggtgcacgtcctttgaaacgtgctatccagcagcagatcgaaaacccgttggcacagcaaatactgtctggtgaattggttccgggtaaagttattcgcctggaagttaatgaagaccggattgtcgccgtccagtaa

SEQ ID NO: 33607 - protein, 861 aa, Escherichia coli O157:H7 EDL933
MGGVMRLDRLTNKFQLALADAQSLALGHDNQFIEPLHLMSALLNQEGGSVSPLLTSAGINAGQLRTDINQALNRLPQVEGTGGDVQPSQDLVRVLNLCDKLAQKRGDNFISSELFVLAALESRGTLADILKAAGATTANITQAIEQMRGGESVNDQGAEDQRQALKKYTIDLTERAEQGKLDPVIGRDEEIRRTIQVLQRRTKNNPVLIGEPGVGKTAIVEGLAQRIINGEVPEGLKGRRVLALDMGALVAGAKYRGEFEERLKGVLNDLAKQEGNVILFIDELHTMVGAGKADGAMDAGNMLKPALARGELHCVGATTLDEYRQYIEKDAALERRFQKVFVAEPSVEDTIAILRGLKERYELHHHVQITDPAIVAAATLSHRYIADRQLPDKAIDLIDEAASSIRMQIDSKPEELDRLDRRIIQLKLEQQALMKESDEASKKRLDMLNEELSDKERQYSELEEEWKAEKASLSGTQTIKAELEQAKIAIEQARRVGDLARMSELQYGKIPELEKQLEAATQLEGKTMRLLRNKVTDAEIAEVLARWTGIPVSRMMESEREKLLRMEQELHHRVIGQNEAVDAVSNAIRRSRAGLADPNRPIGSFLFLGPTGVGKTELCKALANFMFDSDEAMVRIDMSEFMEKHSVSRLVGAPPGYVGYEEGGYLTEAVRRRPYSVILLDEVEKAHPDVFNILLQVLDDGRLTDGQGRTVDFRNTVVIMTSNLGSDLIQERFGELDYAHMKELVLGVVSHNFRPEFINRIDEVVVFHPLGEQHIASIAQIQLKRLYKRLEERGYEIHISDEALKLLSENGYDPVYGARPLKRAIQQQIENPLAQQILSGELVPGKVIRLEVNEDRIVAVQ

SEQ ID NO: 33608 - DNA, 2595 bp, Agrobacterium tumefaciens str. C58
  CDS (1)..(2595): transl_table=11
gtgcgtatggggcacaggtacgtggatataccgcattggctgctggcggttgtagatgccggtatctatgcggaaacattcgacgaattaaaaattccacttccggtattgaaggctgaaatcggccgcagtctggaagaggccattatcggcgacggggaggccttgtcgctctcccagaacatcctcacggcagcccgggaggcatggattcttgcgtcgctggaggctggccgtgaccgcgtgacgctttgcgatctcctgttggcgatggatgaggaaacctcacttcgctcctttgtccgctcggcatttccgtctctcaaggcgatggatcgcggtgcgcttgagcgtcttcgcagctcggccgagaacggcgcaggcgtggatgttccttccgcgctgacaagttcaggagaggcaggctcggcacaggccgccggccagaatgatttcttgcgcctttacacccacgacatgaccaccgatgcccgcaacggcaaggtcgatcctgttatcggccgcgatgatgagttgcgccagctcgttgatattctgacccgccgccgacagaacaatcctattctggtgggcgaggccggcgtgggcaagaccgcggtcgccgaagcgctggcgttggaaatcgcctccggcaacgttccggagaaactgcgcaatgtctgcctgctgaacctcgatatttcgctgctgcaggccggtgccggcgtgaaaggtgagttcgagcggcgcctgcacggcgtgatcgatgcggtcaagcgttcggccgaaccggtcatcctgttcatcgatgaggcccatggccttgttggcgcgggtggtgcggcgggccagggtgatgcggcgaatattcttaagcccgcactcgcacgaggcgaggtgcggaccgtcgcggcaacgacgtggagtgaatacaagaaatatttcgagaaggatgcggcgctgacgcgtcgtttccagccagtgcatgtgcgcgagccggacgaggcgactgcgatacggatgttgcgcggtgtggcggatactttcgtcagccatcacaacgttaccgttcgtgatgaggcgatcgtggctgccgtgcaattatccgcgcgctacatgcccgctcggcaattgccggacaaggcggtcagcctgctcgataccgccgccgcggccgtttcgctggcgcggcagacgttgccagagcggttacgtgccatggaaagcgagcgacaccttctgtctgacgaactgaactggcttctgcgtgaaccgcaggatgaggacatgcaaaaccgcatccagtcgatacgcgacgagcttgaacggcttgaggccgggatcgatgatctgcgcggccgttatgacgcggaaatggctgaactggcggcgctcagtgaagagcagccggccgaaaccggcgcgtcgaatgtttcgcacctgcggcctgccacggagatgcggcccgcaaatgccgaaagacttgttccgacagtggttgatcgtgaagcgatcgccgccgtcgtctcgcgatggaccgggattccgctcggcaaacttctggcggaccagatcgaaagcgcccgcactctggatgtgcgcatgcggcagcgcgtggttgggcaggatgccgcaattacccggattgccgatgccatgcgcaccgcccgtgccggattgtccgatccgcgccgtccgccggcggtgtttttccttgtcggcatgtccggaacgggcaagaccgaaacggcgctgtcgctggccgatcttctctatggcggcaacagccatctgacgacgatcaacatgtcggagttcaaggaggagcacaaggtttccctgcttctcggctcaccgcctggctatgtcggtttcggcgaaggtggggtgctgacggaagcggtgcgccgccggccgttcggcgttctgcttctcgatgaaatcgacaaggctcaccccggcgtccaggatattttttatcaggtgttcgacaagggcgtgcttcgcgatggcgaaggccgcgacgtcgatttcaagaacaccacgatcttcatgacggccaataccggttcggaattgctgtcggcgctttccgccgatcccgacactatgccggaaggtgaggcgctggaagcgcttctgatgccggagcttaccaaacagttcaagcccgcattcctcgggcgcacgatcatcctgcccttcatgccgcttggcgcggaggagcttgcaagtgtcgtggacatgcagattggcaagatcagggaccgtgtgctcgcaacatatggcaccgacctgagattgtccgatgcggcgcgcgatgccttggtggcgcgcgccggtgcaagtgaaatcggcgcacgcgccatcgaaatcatgatcggcaaggatctcctgccgcctctttccagctttttcctcgagaaggtcatcgcgggagaacgcgtcgggaagatcgttgtcgattttggtgaaaacgggttcggcattcgtgcggaagcggctggggaagcagatgaattcgccgtaaccgaagaggttggggtggataaagttgccgcgtcggatggggctacccgacgcatgcggcattaa

SEQ ID NO: 33609 - protein, 864 aa, Agrobacterium tumefaciens str. C58
MRMGHRYVDIPHWLLAVVDAGIYAETFDELKIPLPVLKAEIGRSLEEAIIGDGEALSLSQNILTAAREAWILASLEAGRDRVTLCDLLLAMDEETSLRSFVRSAFPSLKAMDRGALERLRSSAENGAGVDVPSALTSSGEAGSAQAAGQNDFLRLYTHDMTTDARNGKVDPVIGRDDELRQLVDILTRRRQNNPILVGEAGVGKTAVAEALALEIASGNVPEKLRNVCLLNLDISLLQAGAGVKGEFERRLHGVIDAVKRSAEPVILFIDEAHGLVGAGGAAGQGDAANILKPALARGEVRTVAATTWSEYKKYFEKDAALTRRFQPVHVREPDEATAIRMLRGVADTFVSHHNVTVRDEAIVAAVQLSARYMPARQLPDKAVSLLDTAAAAVSLARQTLPERLRAMESERHLLSDELNWLLREPQDEDMQNRIQSIRDELERLEAGIDDLRGRYDAEMAELAALSEEQPAETGASNVSHLRPATEMRPANAERLVPTVVDREAIAAVVSRWTGIPLGKLLADQIESARTLDVRMRQRVVGQDAAITRIADAMRTARAGLSDPRRPPAVFFLVGMSGTGKTETALSLADLLYGGNSHLTTINMSEFKEEHKVSLLLGSPPGYVGFGEGGVLTEAVRRRPFGVLLLDEIDKAHPGVQDIFYQVFDKGVLRDGEGRDVDFKNTTIFMTANTGSELLSALSADPDTMPEGEALEALLMPELTKQFKPAFLGRTIILPFMPLGAEELASVVDMQIGKIRDRVLATYGTDLRLSDAARDALVARAGASEIGARAIEIMIGKDLLPPLSSFFLEKVIAGERVGKIVVDFGENGFGIRAEAAGEADEFAVTEEVGVDKVAASDGATRRMRH

SEQ ID NO: 33610 - DNA, 2664 bp, Agrobacterium tumefaciens str. C58
  CDS (1)..(2664): transl_table=11
gtgccgaaagcgggcgggccggtctatggaggttcgactatgaatattgataaatactccgagcgcgttcgcggttttctgcaatcggcgcaaacctttgcgctcgccgaaaatcatcagcagttctcgcccgaacatgttctgaaagttctgcttgatgatgagcagggcatggccgcatcgctgatcgagcgtgcgggcggcgacgccaaggaagcgcgtctcgccaatgacgcggcccttgcaaaattgcccaaggtatccggcggcaatggcggcctttcgctgacggctccgctcgccaaggtattttcgaccgcagaagaccttgccaagaaggccggcgacagtttcgtgaccgtcgagcgtcttctgcaggcgcttgcgatcgaaagctccgcttccacctcggcttccctgaaaaaagcgggtgcgaccgcacaggcgctcaatcaggtcatcaacgacattcgcaagggccgcacggccgatagcgccaatgccgaacagggctttgacgcgctgaagaaatatgcgcgcgacctgacggaggaagcccgcgagggtagactcgaccccgtcatcggtcgtgacgacgaaattcgtcgcaccatccaggtcctgtcgcgccgcaccaagaacaatcccgtgctgatcggtgaaccgggcgtcggtaaaacggcgattgccgaaggccttgcgctgcgcatcgtcaatggcgacgtgccggagagcctgaaggacaaaaagctgatggcgctcgatatgggcgcgctgatcgccggtgcgaaatatcgcggtgagttcgaagagcgcctgaaggctgtgctgaacgaggtgcaggccgaaaatggcggcatcatcctgttcatcgatgagatgcacaccctggtcggcgccggcaaggccgatggcgccatggatgcgtccaacctgctgaaacctgcgcttgcccgcggtgagctgcactgcgtcggcgccaccacgctcgatgaatatcgcaagcatgtggagaaggatccagcccttgcccgccgtttccagcccgttctggtggatgaaccgaacgtcgaggatacgatctcgatcctgcgcggtctgaaggaaaaatacgaacagcaccacaaggtccgcatctcggattcggccctggttgcggctgcgacgctttccaaccgttacattaccgaccggtttctgcccgacaaggcaatcgacctgatggacgaggccgcttcgcgtcttcgcatgcaggtggattccaagccggaagaactggacgaactggatcgtcgcatcatccagctgaagatcgagcgcgaagccctgaagcaggaaacggaccagtcctccgtcgaccgtttgaggaagctcgaggacgaactggccgatacggaagaaaaggcagatgcgctgacggcccgctggcaggcggaaaagcagaagctcggccacgccgccgacctgaagaagcggctggatgaagcccgaaacgaactggcaatcgcccagcgcaatggccagttccagcgtgccggcgagttgacctacggcatcattcccggcctcgaaaaggaactggcagcggcggaagcccgcgatagcagcggtgccggttcgatggttcaggaagtggtgacgccggacaatattgcccatgtcgtctcccgctggaccggcattccggtcgacaagatgctggaaggccagcgcgaaaagctgttgcgcatggaagacgagctcgccaagtccgttgtcgggcagggtgaggccgttcaggcggtgtccaaggcggttcgccgttcgcgcgccggcctgcaggatcctaaccggccgatcggttcgttcatctttctcggcccgacgggtgtgggcaagaccgagctgaccaagtcgctcgcccgcttcctgttcgacgacgaaaccgcgatggtccgcctcgatatgtcggaatatatggagaaacactccgttgcccggctgatcggtgcacctccgggctatgtcggctacgaagagggcggtgccctgacggaagcggttcgccgccggccctatcaggtcgtgttgttcgatgagatcgaaaaagcgcatccggatgtcttcaacgtcctgctgcaggtgctggatgatggccgcctgaccgatggccagggccgcaccgtcgatttcaagaacaccatcatcatcatgacctcaaacctcggttcggaattcatgacgcagatgggcgacaacgacgatgtggattcggttcgcgaacttgtcatggaacgggttcggtcgcatttccggccggaattcctcaaccgcatcgacgatatcatcctgttccatcgcctgcggcgtgacgaaatgggtgcgatcgtggaaatccagttgaagcgccttgtctcgcttctggccgatcgcaagatcacgctcgaactggatgaggatgctcgcagctggcttgccaacaagggttacgatccggcttatggtgcgcggccgctgaagcgggtgatccagaaatcggttcaggaccggctggcggaaatgatcctcggcggtgaaatccccgatggttcgcgggtcaaggtaacttcgggcaccgaccggttgctgttcaaggtcaagcccgccaagggtgaggccgagactgaaacggccgatgcggcataa

SEQ ID NO: 33611 - protein, 887 aa, Agrobacterium tumefaciens str. C58
MPKAGGPVYGGSTMNIDKYSERVRGFLQSAQTFALAENHQQFSPEHVLKVLLDDEQGMAASLIERAGGDAKEARLANDAALAKLPKVSGGNGGLSLTAPLAKVFSTAEDLAKKAGDSFVTVERLLQALAIESSASTSASLKKAGATAQALNQVINDIRKGRTADSANAEQGFDALKKYARDLTEEAREGRLDPVIGRDDEIRRTIQVLSRRTKNNPVLIGEPGVGKTAIAEGLALRIVNGDVPESLKDKKLMALDMGALIAGAKYRGEFEERLKAVLNEVQAENGGIILFIDEMHTLVGAGKADGAMDASNLLKPALARGELHCVGATTLDEYRKHVEKDPALARRFQPVLVDEPNVEDTISILRGLKEKYEQHHKVRISDSALVAAATLSNRYITDRFLPDKAIDLMDEAASRLRMQVDSKPEELDELDRRIIQLKIEREALKQETDQSSVDRLRKLEDELADTEEKADALTARWQAEKQKLGHAADLKKRLDEARNELAIAQRNGQFQRAGELTYGIIPGLEKELAAAEARDSSGAGSMVQEVVTPDNIAHVVSRWTGIPVDKMLEGQREKLLRMEDELAKSVVGQGEAVQAVSKAVRRSRAGLQDPNRPIGSFIFLGPTGVGKTELTKSLARFLFDDETAMVRLDMSEYMEKHSVARLIGAPPGYVGYEEGGALTEAVRRRPYQVVLFDEIEKAHPDVFNVLLQVLDDGRLTDGQGRTVDFKNTIIIMTSNLGSEFMTQMGDNDDVDSVRELVMERVRSHFRPEFLNRIDDIILFHRLRRDEMGAIVEIQLKRLVSLLADRKITLELDEDARSWLANKGYDPAYGARPLKRVIQKSVQDRLAEMILGGEIPDGSRVKVTSGTDRLLFKVKPAKGEAETETADAA

SEQ ID NO: 33612 - DNA, 2640 bp, Salmonella typhimurium LT2
  CDS (1)..(2640): transl_table=11
atggaaactcctgtttcacgcagtgcgttgtatggaaaactggccggcccactattccggtcgctggaatcggcaacggcattttgcaaactacgctctaatccctgggttgagctgactcactggctgcaccagttaacacagcagcccgataacgatattctccacgttcttcggcattaccagatccctctttctgatgtggagaaagcgttactccggcaactggatatgctgcccgccggggccagcgccattagtgatttttctcaccatatcgatctcagcgttgaaaaggcctggatgctggcgagcgtccgttacggcgataacaaaattcgcagcggctggttgctgctggccttgttgaccacgccagaactgcgtcgggtactgagcagtatctgcgcgccgctggccacgcttccggttgatgaactgacggaaatactgccctcgttgatcgaaacatcgccggaagcgcaggagcgcccttacgacggctccggcctggcatcagccattcccggtgaaagcagtcaggcgattcccaacggcgggcaggacggtaaatccgcgctggcaaaatactgtcaggacatgacggcacaggcgcgcgacggcaaaatcgacccggtgacggggcgtgagcatgaaatccgcaccatgacggatattctgctgcgccgtcgccagaataatccactactgactggtgaggcgggcgtcgggaaaacggcggtcgtcgaaggttttgccctcgcgattgcgcagggggaagtgccgcccgcgctgcgggaagtacggctactggcgctggacgttggcgctctgttggccggagccagcatgaaaggcgagtttgaatcgcgtctgaaagggttactggaagaggccgggcgctcgccgcagccggttattctgtttgtcgatgaagttcacactctggtgggcgcgggcggcgcatccggcacgggcgatgccgctaacctgctgaaaccggcgctggcgcgcggcaccctgcggactatcggcgccaccacctggagcgaatacaagcgccatattgagaaagatccggcgctgacccgtcgttttcaggtgttgcagattgccgaaccggaagagatccccgcaatggaaatggtgcgtggtctggtggatacgctggaaaaacaccataacgtactgattctggatgaggcggtacgtgcggcggtacagctttctcaccgctacattcccgcccggcagttgccggataaggccatcagcctgctggataccgccgcggcccgcgtggcgctgacgctgcacacgccgcctgccagcgtacagttcctgcgccagcagctaaaagcggcggaaatggaacggtcgctgttgcagaagcaggaaaaaatggggattcagtcagatgagcggcgcgatgcgctgatggcgcgaattttctcgctcaacaatgaactgactgcatccgaatcccgctggcagcgggagctggaactggtacatacgttgcaggaactgcgtctcgcagagtctgatgctgatgacaaaaccacgctgcaacaggccgaaacggcgctaagggagtggcagggcgacgcgccggtggtgttcccggaagtcagcgcggcggttgtcgcggcgattgtcgccgactggaccggtattcctgctgggcgcatggtgaaagatgaggccagccaggtgctggaactgcctgcccgactggcgcaacgcgttaccgggcaagacggcgcgctggcgcagattggtgaacgtattcagaccgccagggcgggactgggcgatccacgcaaaccggtgggcgtgtttatgctggccgggccgtccggtgtcggtaaaaccgaaaccgcgctggcgctggcggaggctatctacggcggcgagcagaacctggtaaccatcaatatgagcgagttccaggaggctcacaccgtttccacgctgaaaggcgcgccgcccggctatgtgggctatggcgagggtggtgtgctgacggaagcggtgcgtcgccacccctggagcgtagtgctgctcgacgagatcgaaaaagcgcaccatgacgtccacgaactcttctatcaggtgtttgacaagggtgggatggaggacggcgagggtacacatgtcgatttcaaaaacaccacgctattactcaccaccaacgtgggttccgacctcatcagccagatgtgtgaagatccggccttaatgcccgatgctacggggcttaaagaggcgctaatgccggaattgcgcaagcatttcccggcggcatttctgggccgcgtgacggtgatcccttacctgccgctggacgaaacgtcgcgtggcgtgattgcccgtctgcaccttgaccggctggtggcgcggatgagtgaacagcacggcgtgacgctgacgtatagcgaggaactggtcgcacatattgtggcgtgctgtccaatgcatgaaacgggcgcgcggttgctgattggctacatcgaacagcacattctgccacgactgtcgcgctactggttgcaggccatgacggaaaaagccgcgatcaggcagattgatatcggcgttaatggtgatgagcagattgtttttgagatcgtttgctga

SEQ ID NO: 33613 - protein, 879 aa, Salmonella typhimurium LT2
METPVSRSALYGKLAGPLFRSLESATAFCKLRSNPWVELTHWLHQLTQQPDNDILHVLRHYQIPLSDVEKALLRQLDMLPAGASAISDFSHHIDLSVEKAWMLASVRYGDNKIRSGWLLLALLTTPELRRVLSSICAPLATLPVDELTEILPSLIETSPEAQERPYDGSGLASAIPGESSQAIPNGGQDGKSALAKYCQDMTAQARDGKIDPVTGREHEIRTMTDILLRRRQNNPLLTGEAGVGKTAVVEGFALAIAQGEVPPALREVRLLALDVGALLAGASMKGEFESRLKGLLEEAGRSPQPVILFVDEVHTLVGAGGASGTGDAANLLKPALARGTLRTIGATTWSEYKRHIEKDPALTRRFQVLQIAEPEEIPAMEMVRGLVDTLEKHHNVLILDEAVRAAVQLSHRYIPARQLPDKAISLLDTAAARVALTLHTPPASVQFLRQQLKAAEMERSLLQKQEKMGIQSDERRDALMARIFSLNNELTASESRWQRELELVHTLQELRLAESDADDKTTLQQAETALREWQGDAPVVFPEVSAAVVAAIVADWTGIPAGRMVKDEASQVLELPARLAQRVTGQDGALAQIGERIQTARAGLGDPRKPVGVFMLAGPSGVGKTETALALAEAIYGGEQNLVTINMSEFQEAHTVSTLKGAPPGYVGYGEGGVLTEAVRRHPWSVVLLDEIEKAHHDVHELFYQVFDKGGMEDGEGTHVDFKNTTLLLTTNVGSDLISQMCEDPALMPDATGLKEALMPELRKHFPAAFLGRVTVIPYLPLDETSRGVIARLHLDRLVARMSEQHGVTLTYSEELVAHIVACCPMHETGARLLIGYIEQHILPRLSRYWLQAMTEKAAIRQIDIGVNGDEQIVFEIVC

SEQ ID NO: 33614 - DNA, 2277 bp, Salmonella typhimurium LT2
  CDS (1)..(2277): transl_table=11
atgctcaatcaagaactggaactcagtttaaacatggctttcgccagagcgcgcgagcaccgtcatgagtttatgaccgtcgagcatctgttgctggcgctgctcagcaacccatcggctcgcgaagcgctggaagcatgctccgtggatctggtggcgctccgtcaggaactcgaagccttcattgaacaaaccacacccgtactgcctgccagtgaagaagagcgtgatacgcagccgacgttaagtttccagcgtgtcctgcaacgtgccgtcttccacgttcagtcttccgggcgtagtgaagtgactggcgcgaatgtgctggtggctatctttagcgaacaggaatcacaggcggcttatctgctgcgcaagcatgaagtgagccgtctggatatcgtgaactttatttctcacgggacgcgaaaagacgaaccgagccaatcttccgatctcggcaatcagccaactggcgacgaacaagctggcggggaggaacgtatggaaaacttcacgacgaatcttaaccaacttgctcgcgtgggcggcatcgatccgctgattggtcgtgaaaaagaactggaacgcgcgatccaggtcttgtgtcgtcgccgtaaaaataacccgttgctggtaggggaatccggcgtcggcaaaacggcgattgccgaagggctggcctggcgtatcgtgcagggcgatgtgccggaagtgatggccgattgcaccatttactcgctggatatcggttcgctgctggcgggcaccaaataccgcggcgattttgaaaaacggtttaaggcgttgctgaaacagcttgagcaggataccaacagcatcctgtttatcgatgaaatccataccattatcggcgctggcgcggcgtcgggcggacaggtggatgcggcaaatctgattaaaccgctgctttccagcggtaagatccgggtgatcggctcaacgacctatcaggaattcagcaatatttttgagaaagaccgggcattagcgcgccgtttccagaaaattgatattaccgagccttcggtggaagagacggtgcaaattatcaacggcttgaaacctaagtacgaagcgcaccacgacgtgcgttataccgcgaaagcggtgcgtgcggcggtcgagctggcggtaaaatatatcaatgaccgccatctgccggataaagccattgacgtgattgacgaagcgggcgctcgggcgcgtctgatgccggtgagcaaacgtaagaaaacggtcaacgtggcggatattgagtccgtagtggcgcgaattgcgcgaattcctgaaaagagcgtctcgcagagcgatcgcgatacgctgaagaacctgggcgatcgtctgaaaatgctggtcttcggccaggataacgcgattgaggcgctgaccgaagctattaagatgagtcgtgcgggtctgggccatgagcataaacctgtcggctcattcttgttcgccgggccaactggcgtagggaaaactgaagttacggtacagctttcaaaagcgctgggtattgagctgttgcgcttcgatatgtctgaatatatggagcgtcatacggtgagccgtttgatcggcgcacctccgggatacgtcggtttcgaccagggcgggctgctgacggatgcggtgattaagcatcctcatgcggtgctgttgctggatgagatcgaaaaagcgcacccggatgtctttaacctgctgctgcaggtgatggataacggtacgctgaccgataacaacggccgcaaggcggatttccgcaacgtggtgctggtgatgaccaccaacgctggcgtgcgagaaaccgaacgtaaatctattggtcttattcatcaggacaacagtaccgatgcgatgggcgagatcaagaaagtgtttacgccggagttccgtaaccgtctcgacaacattatttggttcgatcatctgtctggcgaggtgattcatcaggttgtcgataagtttatcgtcgagttgcaggctcagttggatcagaaaggcgtctctctggaagtcagtcaggaagcgcgcgactggctggcggaaaagggctatgaccgggcgatgggcgcacgaccaatggcgcgtgtgattcaggataacctgaaaaaaccgctggccaatgagttgttgtttggatcgctggttgacggcggacaggtcaccgtcgcgctggataaagagaaaaatgcgttgacgtatgacttccagagtgcgcaaaagcacaagccggaagccgcgcactaa

SEQ ID NO: 33615 - protein, 758 aa, Salmonella typhimurium LT2
MLNQELELSLNMAFARAREHRHEFMTVEHLLLALLSNPSAREALEACSVDLVALRQELEAFIEQTTPVLPASEEERDTQPTLSFQRVLQRAVFHVQSSGRSEVTGANVLVAIFSEQESQAAYLLRKHEVSRLDIVNFISHGTRKDEPSQSSDLGNQPTGDEQAGGEERMENFTTNLNQLARVGGIDPLIGREKELERAIQVLCRRRKNNPLLVGESGVGKTAIAEGLAWRIVQGDVPEVMADCTIYSLDIGSLLAGTKYRGDFEKRFKALLKQLEQDTNSILFIDEIHTIIGAGAASGGQVDAANLIKPLLSSGKIRVIGSTTYQEFSNIFEKDRALARRFQKIDITEPSVEETVQIINGLKPKYEAHHDVRYTAKAVRAAVELAVKYINDRHLPDKAIDVIDEAGARARLMPVSKRKKTVNVADIESVVARIARIPEKSVSQSDRDTLKNLGDRLKMLVFGQDNAIEALTEAIKMSRAGLGHEHKPVGSFLFAGPTGVGKTEVTVQLSKALGIELLRFDMSEYMERHTVSRLIGAPPGYVGFDQGGLLTDAVIKHPHAVLLLDEIEKAHPDVFNLLLQVMDNGTLTDNNGRKADFRNVVLVMTTNAGVRETERKSIGLIHQDNSTDAMGEIKKVFTPEFRNRLDNIIWFDHLSGEVIHQVVDKFIVELQAQLDQKGVSLEVSQEARDWLAEKGYDRAMGARPMARVIQDNLKKPLANELLFGSLVDGGQVTVALDKEKNALTYDFQSAQKHKPEAAH

SEQ ID NO: 33616 - DNA, 2511 bp, Agrobacterium tumefaciens str. C58
  CDS (1)..(2511): transl_table=11
gtgccaactttttccccaagtctcgagaaggcgctgcaccaggcactgacctttgcgaatgagcgtcaccacgaatatgcgacgctcgaacacctgcttctggcgctgatcgacgacgcggatgccgccgccgttatggctgcctgcaatgtcgatctcgacgcgctgcgcaagaccgtcagcgattacgtcgacaatgaactgactaacctcgtcaccggttatgacgaggattccaaacccacatccggcttccagcgcgtcatccagcgcgccgtcatccatgttcagtcgtccggccgcgaggaagtgactggcgccaatgtgcttgtggccatttttgccgagcgcgaaagccatgccgcctatttcctgcaggaacaggaaatgacccgttacgatgcggtcaattacatctctcacggcatcggcaagcgtccgggcacgtcgcagacgcgcgcgccgcgcggtgccgatgagcccgaaagcgaaagcaagcccagccgcggtaatcccgaggaagacggatcgtccgccaagaagcagcaggatgcgctgaaggcctattgcgtcaacctcaacgacaaggcgaggaacggcaagatcgacccgctgatcggccgtcacgacgaggtcaatcgcaccatccagattctctgccgccgctccaagaacaacccgctttatgtgggtgatccgggcgtgggcaagacggcgatcgccgagggcctggccaagcgtatcgtcgaaggtaaggtgccggaggcgctcgccaatgacaccatcttctcgctcgacatgggcacgctgcttgccggcacccgttatcgcggtgatttcgaggagcgtctgaagcaggtcgtcaaggaactggaagagtttccgggcgcggttctgttcatcgatgaaatccataccgtcatcggtgccggcgccacatccggcggcgcgatggatgcatcgaacctgttgaagcctgcgctgtcatcgggtgctatccgttgcatcggttcgaccacctacaaggaatatcgccagttcttcgaaaaggaccgcgcgctggtgcgtcgtttccagaagatcgacgtcaacgagccgtcgatcgatgatgccattgcgatcatgaagggtctgaagccctatttcgaggattatcatcacctcagatattccaacgaggcgatcaaggccgccgttgaattgtcggctcgctatatctccgaccgcaagctgccggacaaggcgatcgacgtgatcgacgagacaggtgccgcacagatgctgctgccagcctccaagcgccgcaagctgatcaccgaacgggaaatcgaggccaccatcgcgacgatggcccgcattccgccgaagacggtttccaaggatgacgagatggttctcgccaatcttgaaaaggaactgcgctcggtcgtttatggtcaggacatcgccatcgaggcgctggcgaccgccatcaagctggcgcgtgccggcttgcgcgagccgaacaagccgatcggctcctatgtcttctccggcccgacgggcgtgggcaagacggaagtggccaagcagcttgccgcctcgctcggtgtcgagatgctgcgcttcgacatgtcggaatatatggagcgccataccgtctcacgtctgctcggcgcacctcccggttatgtcggcttcgatcagggcggtcttttgaccgacggcgtcgatcaacatccacattccgtggtgctgctggacgaaatcgaaaaggcgcatcctgatatctacaacatcctgttgcaggtgatggaccacggctcgctgaccgaccataacggcaagaagatcgacttccgcaacgtcatcctgatcatgacgaccaatgcgggtgcgtccgaaatggcgaaatcggcgatcggtttcggctcttcgcgccgcacgggtgaggatgaagaggcgatcaaccgcctgttcacgccggagttccgcaaccgtctggatgcgatcattccgttctcgccgctgccaacagccgttatacacaaggtggtgcagaagttcgtcatgcagctggaaacccagctctccgaacgtaacgtcaccttcgacctgcatgaggatgcgatctcctggctggcggaaaagggttacgacgaaaagatgggtgcccgcccgctgtcgcgcgtgatccaggaacacatcaagaagccgctcgccaatgaaatcctcttcggcaagctgaagaagggtggcgtcgtcagtgtcaccgttggcaagaaggatgacggcgccgacggtctgattctcgaggttctgccggagaccgcgcccgtgaaaccgcagccggaagccgagctgaaggcggcgaaatcgccgggcaagccgaaagccaaagcgaaaacggcttccaaggcggcaaagactgccgatgaggctgagattctggtggccgaggccgacaagtctgatgaggacaagccgcgccgcaagaccaatacggtgccgaaagtaccgaagaagaagtag

SEQ ID NO: 33617 - protein, 836 aa, Agrobacterium tumefaciens str. C58
MPTFSPSLEKALHQALTFANERHHEYATLEHLLLALIDDADAAAVMAACNVDLDALRKTVSDYVDNELTNLVTGYDEDSKPTSGFQRVIQRAVIHVQSSGREEVTGANVLVAIFAERESHAAYFLQEQEMTRYDAVNYISHGIGKRPGTSQTRAPRGADEPESESKPSRGNPEEDGSSAKKQQDALKAYCVNLNDKARNGKIDPLIGRHDEVNRTIQILCRRSKNNPLYVGDPGVGKTAIAEGLAKRIVEGKVPEALANDTIFSLDMGTLLAGTRYRGDFEERLKQVVKELEEFPGAVLFIDEIHTVIGAGATSGGAMDASNLLKPALSSGAIRCIGSTTYKEYRQFFEKDRALVRRFQKIDVNEPSIDDAIAIMKGLKPYFEDYHHLRYSNEAIKAAVELSARYISDRKLPDKAIDVIDETGAAQMLLPASKRRKLITEREIEATIATMARIPPKTVSKDDEMVLANLEKELRSVVYGQDIAIEALATAIKLARAGLREPNKPIGSYVFSGPTGVGKTEVAKQLAASLGVEMLRFDMSEYMERHTVSRLLGAPPGYVGFDQGGLLTDGVDQHPHSVVLLDEIEKAHPDIYNILLQVMDHGSLTDHNGKKIDFRNVILIMTTNAGASEMAKSAIGFGSSRRTGEDEEAINRLFTPEFRNRLDAIIPFSPLPTAVIHKVVQKFVMQLETQLSERNVTFDLHEDAISWLAEKGYDEKMGARPLSRVIQEHIKKPLANEILFGKLKKGGVVSVTVGKKDDGADGLILEVLPETAPVKPQPEAELKAAKSPGKPKAKAKTASKAAKTADEAEILVAEADKSDEDKPRRKTNTVPKVPKKK

SEQ ID NO: 33618 - DNA, 2679 bp, Agrobacterium tumefaciens str. C58
  CDS (1)..(2679): transl_table=11
atgtcgcatatcgatctcaatcgcctcgttggagcgcttgagccagacctgcgcgttaccctcgaagctgcggcttccgttgcggtgcgtatggggcacaggtacgtggatataccgcattggctgctggcggttgtagatgccggtatctatgcggaaacattcgacgaattaaaaattccacttccggtattgaaggctgaaatcggccgcagtctggaagaggccattatcggcgacggggaggccttgtcgctctcccagaacatcctcacggcagcccgggaggcatggattcttgcgtcgctggaggctggccgtgaccgcgtgacgctttgcgatctcctgttggcgatggatgaggaaacctcacttcgctcctttgtccgctcggcatttccgtctctcaaggcgatggatcgcggtgcgcttgagcgtcttcgcagctcggccgagaacggcgcaggcgtggatgttccttccgcgctgacaagttcaggagaggcaggctcggcacaggccgccggccagaatgatttcttgcgcctttacacccacgacatgaccaccgatgcccgcaacggcaaggtcgatcctgttatcggccgcgatgatgagttgcgccagctcgttgatattctgacccgccgccgacagaacaatcctattctggtgggcgaggccggcgtgggcaagaccgcggtcgccgaagcgctggcgttggaaatcgcctccggcaacgttccggagaaactgcgcaatgtctgcctgctgaacctcgatatttcgctgctgcaggccggtgccggcgtgaaaggtgagttcgagcggcgcctgcacggcgtgatcgatgcggtcaagcgttcggccgaaccggtcatcctgttcatcgatgaggcccatggccttgttggcgcgggtggtgcggcgggccagggtgatgcggcgaatattcttaagcccgcactcgcacgaggcgaggtgcggaccgtcgcggcaacgacgtggagtgaatacaagaaatatttcgagaaggatgcggcgctgacgcgtcgtttccagccagtgcatgtgcgcgagccggacgaggcgactgcgatacggatgttgcgcggtgtggcggatactttcgtcagccatcacaacgttaccgttcgtgatgaggcgatcgtggctgccgtgcaattatccgcgcgctacatgcccgctcggcaattgccggacaaggcggtcagcctgctcgataccgccgccgcggccgtttcgctggcgcggcagacgttgccagagcggttacgtgccatggaaagcgagcgacaccttctgtctgacgaactgaactggcttctgcgtgaaccgcaggatgaggacatgcaaaaccgcatccagtcgatacgcgacgagcttgaacggcttgaggccgggatcgatgatctgcgcggccgttatgacgcggaaatggctgaactggcggcgctcagtgaagagcagccggccgaaaccggcgcgtcgaatgtttcgcacctgcggcctgccacggagatgcggcccgcaaatgccgaaagacttgttccgacagtggttgatcgtgaagcgatcgccgccgtcgtctcgcgatggaccgggattccgctcggcaaacttctggcggaccagatcgaaagcgcccgcactctggatgtgcgcatgcggcagcgcgtggttgggcaggatgccgcaattacccggattgccgatgccatgcgcaccgcccgtgccggattgtccgatccgcgccgtccgccggcggtgtttttccttgtcggcatgtccggaacgggcaagaccgaaacggcgctgtcgctggccgatcttctctatggcggcaacagccatctgacgacgatcaacatgtcggagttcaaggaggagcacaaggtttccctgcttctcggctcaccgcctggctatgtcggtttcggcgaaggtggggtgctgacggaagcggtgcgccgccggccgttcggcgttctgcttctcgatgaaatcgacaaggctcaccccggcgtccaggatattttttatcaggtgttcgacaagggcgtgcttcgcgatggcgaaggccgcgacgtcgatttcaagaacaccacgatcttcatgacggccaataccggttcggaattgctgtcggcgctttccgccgatcccgacactatgccggaaggtgaggcgctggaagcgcttctgatgccggagcttaccaaacagttcaagcccgcattcctcgggcgcacgatcatcctgcccttcatgccgcttggcgcggaggagcttgcaagtgtcgtggacatgcagattggcaagatcagggaccgtgtgctcgcaacatatggcaccgacctgagattgtccgatgcggcgcgcgatgccttggtggcgcgcgccggtgcaagtgaaatcggcgcacgcgccatcgaaatcatgatcggcaaggatctcctgccgcctctttccagctttttcctcgagaaggtcatcgcgggagaacgcgtcgggaagatcgttgtcgattttggtgaaaacgggttcggcattcgtgcggaagcggctggggaagcagatgaattcgccgtaaccgaagaggttggggtggataaagttgccgcgtcggatggggctacccgacgcatgcggcattaa

SEQ ID NO: 33619 - protein, 892 aa, Agrobacterium tumefaciens str. C58
MSHIDLNRLVGALEPDLRVTLEAAASVAVRMGHRYVDIPHWLLAVVDAGIYAETFDELKIPLPVLKAEIGRSLEEAIIGDGEALSLSQNILTAAREAWILASLEAGRDRVTLCDLLLAMDEETSLRSFVRSAFPSLKAMDRGALERLRSSAENGAGVDVPSALTSSGEAGSAQAAGQNDFLRLYTHDMTTDARNGKVDPVIGRDDELRQLVDILTRRRQNNPILVGEAGVGKTAVAEALALEIASGNVPEKLRNVCLLNLDISLLQAGAGVKGEFERRLHGVIDAVKRSAEPVILFIDEAHGLVGAGGAAGQGDAANILKPALARGEVRTVAATTWSEYKKYFEKDAALTRRFQPVHVREPDEATAIRMLRGVADTFVSHHNVTVRDEAIVAAVQLSARYMPARQLPDKAVSLLDTAAAAVSLARQTLPERLRAMESERHLLSDELNWLLREPQDEDMQNRIQSIRDELERLEAGIDDLRGRYDAEMAELAALSEEQPAETGASNVSHLRPATEMRPANAERLVPTVVDREAIAAVVSRWTGIPLGKLLADQIESARTLDVRMRQRVVGQDAAITRIADAMRTARAGLSDPRRPPAVFFLVGMSGTGKTETALSLADLLYGGNSHLTTINMSEFKEEHKVSLLLGSPPGYVGFGEGGVLTEAVRRRPFGVLLLDEIDKAHPGVQDIFYQVFDKGVLRDGEGRDVDFKNTTIFMTANTGSELLSALSADPDTMPEGEALEALLMPELTKQFKPAFLGRTIILPFMPLGAEELASVVDMQIGKIRDRVLATYGTDLRLSDAARDALVARAGASEIGARAIEIMIGKDLLPPLSSFFLEKVIAGERVGKIVVDFGENGFGIRAEAAGEADEFAVTEEVGVDKVAASDGATRRMRH

SEQ ID NO: 33620 - DNA, 2796 bp, Brucella melitensis 16M
  CDS (1)..(2796): transl_table=11
atggcgcggttttccgcgccatttttatttggattttccgatgcctgccggtcttgccgaaagagggcaatattcccatatgcacttttgagaagagcccgcccttgtggggggtcgtcacccaacatctctcggtgccgcgggacggaccgagaggcaaacggagacattatgaatatcgaaaaatatacagaacgggtccgcggcttcatccagtctgcccagaccttcgcgctttcctccggcaatcagcaattcactccagaacatatcctgaaggttctcatcgacgacgatgaggggttggcggcgtcgctggtcgagcgggctggcggacgggttggcgatgtgcgcatgggcctgcaaagcgcgcttgaaaaactgccgaaagtttcgggtggcaatgaccagctctatctttcgcagcctcttgccaaggtgttctcgcttgccgaggaactggccagcaaggcgggtgacagcttcgtcaccgtcgagcgcctcctgacggcgctggcgatggaaaaatccgccaaaacctccgagatactttctgctgcgggcgtcaccccgacggcattgaacagggttatcaacgatatgcgcaaaggccgcaccgccgattccgcctcagccgaaagcaattatgatgctttgaagaaatatgcgcgcgatctgacggaagacgcacgcgcgggcaagcttgatccggtcatcggccgcgatgaggaaatccgccgcacgatccaggttctgtcacgccgcaccaagaacaatccggtgctgatcggtgagccgggcgtgggcaagaccgcaatcgcggaaggtctggcgctgcgcatcgtcaatggcgacgtgcccgaatcgctgaaggacaagcaattgatggcgctcgacatgggcgcgctgattgcgggcgccaaatatcgcggcgaattcgaggaacgcctgaaggccgttctctcggaagtgcagacggctgccgggcagatcatcctcttcatcgacgaaatgcacacattggtcggcgcgggcaagacggatggcgcaatggatgcgtcgaaccttttgaagcctgctctggcgcgcggtgaattgcattgcgtcggcgccaccacgcttgaggaatatcgcaaatatgtggagaaggacgccgcccttgcgcgccgtttccagcccgtttttgtcgatgagccaacagtggaggacacaatctccattctgcgtggcctgaaggagaaatacgagcagcaccataaggtgcgcgtgtcggactccgcgctggtggctgcggcaatgctctcaaaccgctatatcaccgaccgtttcctgccggacaaggccatcgaccttgtggatgaggctgcatcgcgcctgcgtatgcaggtcgattccaagccggaagaactggacgagatcgatcgtcgcatcatgcagctcaagatcgagcgcgaagcactgaaggtggaaacggacgccgcttccaaggaccgcttgcagcgcattgaaaaggaactgagcgatcttgaggaagaatcagccgaactgaccgccaagtggcaggcggaaaagcagaagcttgggcttgctgccgatctcaagcgtcagcttgaagaggcacgcaatgcacttgccattgcgcagcgcaatggtgagtttcagaaagcgggcgagcttgcctatggcacgatcccgcaactggaaaagcaacttgctgatgcggaaagtcaggaaaacaagggttccctcctggaagaaaccgtgacgccggaccatgtggcgcaggtcatttcgcgctggaccggcattccggttgaccggatgctggaaggtgagcgcgaaaagctgttgcgcatggaagacgagatcggcaagcgcgtcgtcggccagggcgaggcggtgcaggccatatccaaggcggtgcgccgtgcccgtgccggtctgcaggacccgaaccggcccatcggctcgttcatcttcctcggccccactggcgtcggcaagacggaactcaccaaggcgctcgcctcgttcctgttccaggatgataccgcaatggtgcgtatcgatatgtcggaattcatggaaaagcattccgtgagccgccttatcggtgctcctcccggctatgtcggctatgaagagggtggtgtgctgaccgaagctgtccggcgcaggccctatcaggtgatcctgttcgacgagattgaaaaggcgcacccggatgtcttcaatgttctgttgcaggtgctggacgacggacgcctgacggacggccagggccacacggttgatttccgcaatacggtcatcatcatgacgtcaaacctcggcgcggaatatctcgtcaatctgggcgaaaacgatgatgtcgagactgttcgcgatgatgtgatgggcgtggtccgtgcttcgttccggccggaattcctcaaccgtgttgatgaaatcatcctgttccaccggctgcgccgcgaagacatgggtgcaattgtcgatatccagatgcagcgtctccaatatctgctttccgatcgcaagatcaccttgcagcttgaggacgacgcccgcgaatggctcgccaacaaggggtatgacccggcctatggcgcgcgcccgctgaagcgcgtaatccagaaggaagtgcaggatccgctggccgaacgtatcctgcttggtgatattctcgacggttccctcgtcaagatcactgccggttcggatcggctcaatttccgtccgatcagcggtgcgttcagcgcggcggagccggaaagagaagacgagaaagcctga

SEQ ID NO: 33621 - protein, 931 aa, Brucella melitensis 16M
MARFSAPFLFGFSDACRSCRKRAIFPYALLRRARPCGGSSPNISRCRGTDREANGDIMNIEKYTERVRGFIQSAQTFALSSGNQQFTPEHILKVLIDDDEGLAASLVERAGGRVGDVRMGLQSALEKLPKVSGGNDQLYLSQPLAKVFSLAEELASKAGDSFVTVERLLTALAMEKSAKTSEILSAAGVTPTALNRVINDMRKGRTADSASAESNYDALKKYARDLTEDARAGKLDPVIGRDEEIRRTIQVLSRRTKNNPVLIGEPGVGKTAIAEGLALRIVNGDVPESLKDKQLMALDMGALIAGAKYRGEFEERLKAVLSEVQTAAGQIILFIDEMHTLVGAGKTDGAMDASNLLKPALARGELHCVGATTLEEYRKYVEKDAALARRFQPVFVDEPTVEDTISILRGLKEKYEQHHKVRVSDSALVAAAMLSNRYITDRFLPDKAIDLVDEAASRLRMQVDSKPEELDEIDRRIMQLKIEREALKVETDAASKDRLQRIEKELSDLEEESAELTAKWQAEKQKLGLAADLKRQLEEARNALAIAQRNGEFQKAGELAYGTIPQLEKQLADAESQENKGSLLEETVTPDHVAQVISRWTGIPVDRMLEGEREKLLRMEDEIGKRVVGQGEAVQAISKAVRRARAGLQDPNRPIGSFIFLGPTGVGKTELTKALASFLFQDDTAMVRIDMSEFMEKHSVSRLIGAPPGYVGYEEGGVLTEAVRRRPYQVILFDEIEKAHPDVFNVLLQVLDDGRLTDGQGHTVDFRNTVIIMTSNLGAEYLVNLGENDDVETVRDDVMGVVRASFRPEFLNRVDEIILFHRLRREDMGAIVDIQMQRLQYLLSDRKITLQLEDDAREWLANKGYDPAYGARPLKRVIQKEVQDPLAERILLGDILDGSLVKITAGSDRLNFRPISGAFSAAEPEREDEKA

SEQ ID NO: 33622 - DNA, 2895 bp, Arabidopsis thaliana
  CDS (1)..(2895)
atggcgctaaggagattatcaaagtctgtttcgtcagccatcaaagctcaatacactctctcgagaccctctcctctcctccgttctcgctctctctcttcctctcctcactacacctctattggccggccaacaaattcattcatcggaaaaatcaataactcttctatcactcatgcgactactactcatggtcaactcttccctctttcttctccgcgacgcttttgtactaccacagctcaggttaatcaaaatgagtttacggagatggcatgggaagggcttatcaacgcctttgacgcggctcgtgaatcgaaacaacagattgtggaatctgaacatttgatgaaagctcttcttgagcaaaaagatggtatggctagaaagattttcactaaagctggaattgacaattcctctgttcttcaagctacagacttgttcatatctaaacaaccaacggttagtgatgcaagtggtcagagactagggtcatctcttagtgttatattagaaaatgcaaagaggcataagaaagatatgttggatagttatgtatccgtggagcactttttgttggcttattattcagatacaaggtttggacaagagtttttcagggacatgaaacttgatattcaagtgctaaaggatgctattaaagatgtacgcggtgatcaacgagtaactgatcggaatcctgaaagcaaatatcaagcacttgaaaagtatggaaatgatttaactgagatggctagacgagggaagctggatcctgtcattgggcgggatgatgaaattaggcgttgcatccagatattatgtaggagaacaaaaaacaatccggttattattggtgaacctggtgtagggaaaactgcaattgcagaggggttggctcaacgaattgtgcgaggagatgtccctgaacctctcatgaatcgaaagttgatatctctcgacatgggttcacttcttgctggtgccaaatttcgaggagattttgaggagaggttgaaagcagtaatgaaggaagtatctgcttccaatgggcaaacaatcttgtttattgatgagatccacactgttgttggtgcaggagctatggatggagcaatggatgcaagcaacctcttgaaaccaatgcttggacgaggtgaactgagatgcattggtgcaactacactgaccgaataccgcaaatatatagagaaagacccagctctagagcgtaggtttcaacaagtgttatgtgttcagccctctgttgaagatacaatctcgattcttcgtgggttaagagagcggtacgagttacaccatggcgttactatatcagatagtgcccttgtttcagcagcagttcttgcagaccgctacatcaccgaacgctttctgccagacaaagctattgatcttgttgacgaagctggtgcaaagctgaagatggagatcacttctaaaccaactgaactagatggaatagatagagctgtgatcaaattggagatggaaaagctttctcttaaaaatgatactgataaagcatctaaagaacggctacagaagattgagaatgatctgtccacgctcaaacagaaacagaaagaactcaatgtccaatgggagaaagaaaagtcgctcatgacaaaaatacgttcgtttaaggaagagattgatcgagttaacctcgaaattgaatctgctgaacgtgaatatgatctaaaccgagctgctgagctgaagtatggaacacttttgtccctccaacgccaattagaagaagctgagaagaatctcacgaatttccgacagtttggacagtcactactccgagaagtggttaccgatcttgacatagcagaaatagtaagcaagtggactggtattccactatctaatcttcagcaatcagagagagagaagttagtgatgttggaagaagtgctccaccatagagttattggtcaagacatggctgtaaaatcagtagcagatgctatccgacgttcaagggctggtctttctgatcctaaccgcccaatagctagtttcatgttcatgggtccaacaggtgttggtaagaccgagcttgccaaggctctagcgggatacctttttaacactgaaaatgcaatagtgagggtcgatatgagtgagtacatggaaaaacactcagtctcacggcttgttggtgcaccacctggctatgtcggttatgaagaaggtgggcagttaactgaagttgttcgcaggagaccttactcggtggttctgtttgatgagatcgagaaagcccaccctgatgtctttaatatcttgctacaactgctagacgatggaagaataactgattctcaaggaaggaccgtaagtttcaaaaactgtgttgtaattatgacgtcgaatataggatctcaccacatacttgagaccctccgcaacaatgaagacagcaaagaagcagtttatgagataatgaagcggcaagttgtggagttagcaagacaaaatttcaggcctgagttcatgaacagaattgacgagtacatagttttccagccgctggattctaacgaaatctccaaaatcgtagagttacagatgagacgggtgaagaatagcttggaacagaagaaaatcaaacttcagtataccaaagaggcagtggatctccttgctcagcttggctttgaccctaactacggggcaaggccggtgaagcgagtgattcaacagatggtggagaatgagatcgctgtcgggattttgaaaggagattttgcagaagaagataccgttcttgtcgatgttgaccacttggctagtgacaacaaattggttatcaagaagcttgagagtaatgcttcagctgaagaaatggccgcttaa

SEQ ID NO: 33623 - protein, 964 aa, Arabidopsis thaliana
MALRRLSKSVSSAIKAQYTLSRPSPLLRSRSLSSSPHYTSIGRPTNSFIGKINNSSITHATTTHGQLFPLSSPRRFCTTTAQVNQNEFTEMAWEGLINAFDAARESKQQIVESEHLMKALLEQKDGMARKIFTKAGIDNSSVLQATDLFISKQPTVSDASGQRLGSSLSVILENAKRHKKDMLDSYVSVEHFLLAYYSDTRFGQEFFRDMKLDIQVLKDAIKDVRGDQRVTDRNPESKYQALEKYGNDLTEMARRGKLDPVIGRDDEIRRCIQILCRRTKNNPVIIGEPGVGKTAIAEGLAQRIVRGDVPEPLMNRKLISLDMGSLLAGAKFRGDFEERLKAVMKEVSASNGQTILFIDEIHTVVGAGAMDGAMDASNLLKPMLGRGELRCIGATTLTEYRKYIEKDPALERRFQQVLCVQPSVEDTISILRGLRERYELHHGVTISDSALVSAAVLADRYITERFLPDKAIDLVDEAGAKLKMEITSKPTELDGIDRAVIKLEMEKLSLKNDTDKASKERLQKIENDLSTLKQKQKELNVQWEKEKSLMTKIRSFKEEIDRVNLEIESAEREYDLNRAAELKYGTLLSLQRQLEEAEKNLTNFRQFGQSLLREVVTDLDIAEIVSKWTGIPLSNLQQSEREKLVMLEEVLHHRVIGQDMAVKSVADAIRRSRAGLSDPNRPIASFMFMGPTGVGKTELAKALAGYLFNTENAIVRVDMSEYMEKHSVSRLVGAPPGYVGYEEGGQLTEVVRRRPYSVVLFDEIEKAHPDVFNILLQLLDDGRITDSQGRTVSFKNCVVIMTSNIGSHHILETLRNNEDSKEAVYEIMKRQVVELARQNFRPEFMNRIDEYIVFQPLDSNEISKIVELQMRRVKNSLEQKKIKLQYTKEAVDLLAQLGFDPNYGARPVKRVIQQMVENEIAVGILKGDFAEEDTVLVDVDHLASDNKLVIKKLESNASAEEMAA

SEQ ID NO: 33624 - DNA, 2859 bp, Arabidopsis thaliana
  CDS (1)..(2859)
atggcttggtcgatagctcttcttacacctcctttttttggtcccggaaggcatgtgcaggccaaagaatacagggaaccaagagggtgtgtgatgaagatgagcagtttaaaagcacctgttctgagaattcaggccacagaatacagagaaccaagagggcgtgtgaagatgatgtccagtttacaagcacctcttctgacaattcagagcttctcagggttaagggcccccagtgcattagattatttgggaaggcctagtccaggtttccttgttaagtataaacttgcaaaatcatctgggagagaaaaagctagccgatgtgtacccaaagcaatgtttgagcgttttaccgagaaagcaattaaggtcataatgctgtctcaagaggaagctcggagacttggccataactttgttgggactgagcaaatactgttgggtctaattggagaagggactgggattgccgccaaggttcttaaatccatggggatcaatcttaaagattcacgcgtggaagtagaaaagataattgggagaggcagtggattcgtggcagtggagattccatttactcctcgcgcaaagcgggtgctggagttgtcactagaggaagctcgacaacttgggcataactacattggttcagagcaccttttgcttggtctacttcgtgaaggggagggtgtggcagctcgtgtcttggagaatttgggtgcagatcctagtaatatacggacacaggttatacgtatggtcggggaaaacaatgaagtcacagcaagcgttggtgggggaagcagcggaaacagcaaaatgccaacacttgaagagtatgggactaacttaactaaactagcagaggagggtaaactggatccggttgttggaaggcagccacagatcgaacgaatggtccagatcttggctcgaagaaccaagaacaacccatgtcttattggagaacctggagttggtaagacggcaatagcagaaggacttgcacagcgaatagctagtggtgatgttcctgaaacaatcgaggggaagacggttataacccttgatatgggtcttctagtggctggaacgaaataccgtggagagttcgaggaaagattgaagaagcttatggaggaaatcaggcaaagtgatgagataattctgtttattgatgaagtgcacacgctcatcggtgcaggagccgctgaaggtgcgatcgatgctgctaacatcttaaagccagctctagcaagaggtgaattgcagtgtattggtgcaacaacaattgatgagtacaggaaacacattgagaaagatcctgcattggagagacggttccagcctgtgaaagtacctgaaccaactgtagaagaagctatacagattttgcaaggtctgcgtgagcgctatgagatccaccacaaacttcgatacactgatgaagccttggttgctgctgcacaattgtcacatcagtacatcagtgatcggtttcttcccgacaaagcgattgacttgattgatgaagctgggtctcgggttcgactacgccatgctcagcttcctgaggaagctagagagcttgaaaagcaactcaggcaaatcaccaaagagaagaatgaagctgtgcgaagccaagacttcgagatggctggttctcatcgtgaccgtgaaatagagctcaaggctgagatagctaatgttttatctcgaggcaaagaagtggccaaagccgagaatgaagctgaggaaggaggacctactgtcacagaatctgacatccaacacatcgtcgccacctggacaggaatcccggtagagaaagtctcgtctgatgaatctagccgtcttctccaaatggagcagacccttcacacaagagtcattggccaagatgaagccgttaaagcaatcagtcgggctatccgccgtgcccgtgttgggctcaaaaacccaaaccgtcctatcgccagtttcatcttctctggtccaactggtgttgggaaatcagagcttgctaaggccttggctgcttactacttcggttcagaagaagcaatgatccgtcttgacatgagtgagttcatggaacgacacactgtttcgaaactcatcggttcacctcctggttacgtaggatacacagaaggaggtcagttaacagaggcggttcgacgcaggccctacactcttgttctctttgacgaaattgagaaagcacatcccgatgttttcaacatgatgcttcagatcctagaagacggtagactaactgatagcaaaggaagaactgtcgatttcaagaacacgcttctgatcatgacttcaaacgtagggagcagcgtgatcgaaaaaggtggtagaagaattgggtttgatcttgaccacgacgagaaagacagcagttacaacagaatcaagagcttagtgactgaggaactaaaacagtatttcagaccagagttcttgaacaggttagatgagatgattgttttcagacagttaacaaagctggaagtcaaggagattgctgatataatgcttaaagaagtggtggcgagacttgaggtcaaagagattgagcttcaggtgactgagaggtttaaagagagagtggtggatgaaggattcgacccgagttatggtgcgaggccacttagacgtgcaataatgaggcttttggaggatagtatggcggagaagatgctttcaagggacattaaagaaggagattctgtgattgttgatgttgatgccgaaggaagtgtggttgtgttgagtggtaccactggacgtgttggtggttttgctgctgaagaagccatggaagatcctattccaatattgtag

SEQ ID NO: 33625 - protein, 952 aa, Arabidopsis thaliana
MAWSIALLTPPFFGPGRHVQAKEYREPRGCVMKMSSLKAPVLRIQATEYREPRGRVKMMSSLQAPLLTIQSFSGLRAPSALDYLGRPSPGFLVKYKLAKSSGREKASRCVPKAMFERFTEKAIKVIMLSQEEARRLGHNFVGTEQILLGLIGEGTGIAAKVLKSMGINLKDSRVEVEKIIGRGSGFVAVEIPFTPRAKRVLELSLEEARQLGHNYIGSEHLLLGLLREGEGVAARVLENLGADPSNIRTQVIRMVGENNEVTASVGGGSSGNSKMPTLEEYGTNLTKLAEEGKLDPVVGRQPQIERMVQILARRTKNNPCLIGEPGVGKTAIAEGLAQRIASGDVPETIEGKTVITLDMGLLVAGTKYRGEFEERLKKLMEEIRQSDEIILFIDEVHTLIGAGAAEGAIDAANILKPALARGELQCIGATTIDEYRKHIEKDPALERRFQPVKVPEPTVEEAIQILQGLRERYEIHHKLRYTDEALVAAAQLSHQYISDRFLPDKAIDLIDEAGSRVRLRHAQLPEEARELEKQLRQITKEKNEAVRSQDFEMAGSHRDREIELKAEIANVLSRGKEVAKAENEAEEGGPTVTESDIQHIVATWTGIPVEKVSSDESSRLLQMEQTLHTRVIGQDEAVKAISRAIRRARVGLKNPNRPIASFIFSGPTGVGKSELAKALAAYYFGSEEAMIRLDMSEFMERHTVSKLIGSPPGYVGYTEGGQLTEAVRRRPYTLVLFDEIEKAHPDVFNMMLQILEDGRLTDSKGRTVDFKNTLLIMTSNVGSSVIEKGGRRIGFDLDHDEKDSSYNRIKSLVTEELKQYFRPEFLNRLDEMIVFRQLTKLEVKEIADIMLKEVVARLEVKEIELQVTERFKERVVDEGFDPSYGARPLRRAIMRLLEDSMAEKMLSRDIKEGDSVIVDVDAEGSVVVLSGTTGRVGGFAAEEAMEDPIPIL

SEQ ID NO: 33626 - DNA, 2907 bp, Arabidopsis thaliana
  CDS (1)..(2907)
atggcgacggctacgacgactgctacggcggcgtttagtggtgtagtcagtgtaggaacggagactcgaaggatttattcgttttctcatcttcaaccttctgcggcttttccggcgaagcctagttccttcaaatctctcaaattaaagcagagcgcgaggctcacacggcggcttgatcatcggccgttcgttgtccgatgtgaagcttcttcttctaatggaaggcttacacagcaagaattcacagaaatggcgtggcaatcgatagtttcgtcaccagatgttgcaaaagagaataagcaacagattgtggagacagagcatctaatgaaagctcttttggagcagaagaatggtttagctcgtaggattttctctaagatcggtgtggataacacaaaggttctagaagcaacagagaagttcattcaacgccaaccaaaggtgtatggagatgctgctggttcgatgttggggcgtgatttggaagctctgttccagagagcaagacagtttaagaaagatttaaaggactcttatgtgtcagtggagcatttggttcttgcttttgctgatgataagcggtttgggaaacagttgtttaaggattttcagatatcagagaggagcttgaaatctgcaattgaatccattagagggaaacaatcagtcattgaccaagatccggaaggcaagtatgaggcgttggagaagtatggaaaagacttgacagcaatggcaagagagggaaaactagatcctgtgataggtagagatgacgagatccgaagatgcattcagattctctcaaggagaacaaagaacaaccctgtgttgatcggtgaaccaggtgttggtaaaactgcaatttcagaaggacttgctcagaggattgtgcaaggagatgtacctcaagcattgatgaacagaaagttgatatctcttgatatgggtgctctcattgctggagcaaagtatcggggagaattcgaagacagactaaaagctgtgcttaaggaagtcacagactcagaaggccaaatcattttgttcatcgatgagatccatacagttgttggtgcaggtgcgactaatggggccatggatgctggtaatctgctgaaaccgatgctgggccgaggcgagttacgttgtatcggtgcaaccacgcttgatgaatataggaaatacatagagaaagatccagccttggagcgtaggtttcaacaggtttatgttgatcaacctacggttgaagacacgatttctattctccgtggtttgcgggaaaggtatgaactacatcatggagttcgcatctcagatagtgctctagtggaagctgctatcctctcagaccgttacatcagtggccggtttctacccgataaagcaattgacttggtcgatgaagcggcagccaaattgaaaatggaaatcacttcgaaacctacagctcttgacgagcttgaccgttcggtaataaagcttgaaatggagaggctttcacttaccaatgatacagacaaagcttctagagagagattgaatcgaattgaaactgagttagtgctattaaaggagaaacaagctgagttaactgaacagtgggagcacgagaggtctgttatgtcccgtcttcagtcgattaaagaggagattgatcgagtaaacctcgagatccagcaggcggaacgtgaatacgatctcaaccgtgcagctgagctcaaatacggaagcttaaactcattgcagcgacagcttaatgaagcagagaaagagctgaacgagtacttaagctctgggaaatctatgttcagagaagaggttttgggtagcgatatcgccgagattgtgagtaaatggactggaatcccggtatcaaaacttcaacagtctgaacgagataagcttctacatttggaagaagaattgcataaaagagtagtcggtcaaaacccagcagtgactgcggtagctgaagcaatccaacgatcaagagctggtctttcggatccaggccgtcctatagctagtttcatgtttatgggaccaactggtgttggtaaaacagagctagccaaagcacttgcttcttatatgttcaacactgaagaagctttagtgagaattgacatgagtgaatacatggagaagcatgcggtgtctaggctcattggagctccacctggatatgttggttacgaagaaggaggacagttaacagaaacggttagaagaaggccttattcggtcattctatttgatgagattgagaaagctcatggagatgtcttcaatgtgtttctccaaatcttggacgatgggcgagtcacagattctcaaggacgtacagtgagtttcaccaataccgtcattattatgacctcaaatgttggttcgcagtttattctgaacaacacagatgatgatgctaatgagctctcttatgaaacgattaaagagagagtgatgaatgctgcaaggtcaatctttcgtcctgaattcatgaatagggttgatgagtatatagttttcaaacctcttgaccgcgagcagatcaaccgcattgtccggttacagctggcacgtgtgcagaagcgaattgcagacaggaaaatgaagataaacatcacggatgcagcagtcgatcttcttggaagcctagggtatgatccaaactatggagctagacctgttaagcgtgtgatacagcaaaacattgagaatgagcttgctaagggtatcttgagaggagatttcaaggaggaagatggcattttgatcgataccgaggtcacagcgttctccaatggccagttacctcagcaaaagctcacattcaagaagattgagtcagaaacagcagatgctgaacaagaagaagcagctttctcaaaatag

SEQ ID NO: 33627 - protein, 968 aa, Arabidopsis thaliana
MATATTTATAAFSGVVSVGTETRRIYSFSHLQPSAAFPAKPSSFKSLKLKQSARLTRRLDHRPFVVRCEASSSNGRLTQQEFTEMAWQSIVSSPDVAKENKQQIVETEHLMKALLEQKNGLARRIFSKIGVDNTKVLEATEKFIQRQPKVYGDAAGSMLGRDLEALFQRARQFKKDLKDSYVSVEHLVLAFADDKRFGKQLFKDFQISERSLKSAIESIRGKQSVIDQDPEGKYEALEKYGKDLTAMAREGKLDPVIGRDDEIRRCIQILSRRTKNNPVLIGEPGVGKTAISEGLAQRIVQGDVPQALMNRKLISLDMGALIAGAKYRGEFEDRLKAVLKEVTDSEGQIILFIDEIHTVVGAGATNGAMDAGNLLKPMLGRGELRCIGATTLDEYRKYIEKDPALERRFQQVYVDQPTVEDTISILRGLRERYELHHGVRISDSALVEAAILSDRYISGRFLPDKAIDLVDEAAAKLKMEITSKPTALDELDRSVIKLEMERLSLTNDTDKASRERLNRIETELVLLKEKQAELTEQWEHERSVMSRLQSIKEEIDRVNLEIQQAEREYDLNRAAELKYGSLNSLQRQLNEAEKELNEYLSSGKSMFREEVLGSDIAEIVSKWTGIPVSKLQQSERDKLLHLEEELHKRVVGQNPAVTAVAEAIQRSRAGLSDPGRPIASFMFMGPTGVGKTELAKALASYMFNTEEALVRIDMSEYMEKHAVSRLIGAPPGYVGYEEGGQLTETVRRRPYSVILFDEIEKAHGDVFNVFLQILDDGRVTDSQGRTVSFTNTVIIMTSNVGSQFILNNTDDDANELSYETIKERVMNAARSIFRPEFMNRVDEYIVFKPLDREQINRIVRLQLARVQKRIADRKMKINITDAAVDLLGSLGYDPNYGARPVKRVIQQNIENELAKGILRGDFKEEDGILIDTEVTAFSNGQLPQQKLTFKKIESETADAEQEEAAFSK

SEQ ID NO: 33628 - DNA, 2790 bp, Arabidopsis thaliana
  CDS (1)..(2790)
atggctatggccacaagggtgttggctcaatcgactccaccgtctttagcttgttaccagaggaatgttccttcacgtggatctggaagatcgagaagatcggtgaaaatgatgtgtagtcagttacaagtgtctggtttaagaatgcaagggtttatgggattacgtggtaacaatgctttagacactcttggaaaaagtcgtcaagattttcattcgaaggtgcgacaggcaatgaatgtgcccaaggggaaagctagccggtttacggtgaaagcaatgtttgaaagatttacggagaaagctatcaaagttattatgcttgctcaggaggaagctagaagactaggccacaattttgtgggaaccgaacaaattcttcttggtcttattggtgagggtactggaatcgctgctaaagttttgaaatccatggggattaacttaaaagatgcacgtgtggaggttgagaagattattggaaggggaagtggctttgttgctgttgagatcccattcactcctcgtgccaagcgtgttcttgaactctctcttgaggaagctcgccaacttggtcacaattacattggatccgagcaccttttgcttgggttgctacgtgaaggtgaaggagttgcagctcgagtccttgagaatttaggtgcagatcctagtaatattcgcactcaggtgatacgcatggtgggtgagaacaatgaagtaactgctaatgttgggggaggaagcagcagcaataagatgccaactcttgaagagtacggaacaaacttgacgaaactggctgaggagggtaaattggacccagttgttggaaggcagccgcagatagaacgtgtggtgcaaattcttggcaggagaaccaagaacaacccttgtcttattggagaacctggtgttggtaagacagctattgctgaaggacttgcacagcgtattgccagtggcgatgtccctgaaactattgaagggaagaaggttataacactcgacatgggtcttctagttgctggaacaaaatatcgtggagagtttgaagagagattgaaaaagcttatggaggaaattagacagagcgatgagataatcttatttatcgacgaagtgcatactttgattggggctggagcagcagaaggtgcaattgacgcagctaacattttaaaaccagctctcgctagaggtgaattgcagtgcattggagcgacaacattagatgaataccgaaagcacattgagaaagaccctgccttggaaagaagattccagccagtgaaagtacctgaacctaccgtggatgaaactattcagatccttaagggtctgcgagagcgatatgaaattcaccacaagcttcgttacacagacgaatctttagtagcagctgcacagttgtcataccagtatataagtgatcgtttccttcctgacaaggcaattgacttgattgatgaagctggttctcgggttcgacttcgtcatgcacaggtccctgaggaagctagggagcttgagaaggagcttaggcagataacaaaggagaagaatgaagctgtccgtggccaggactttgagaaggctgggacacttcgggatagagaaattgaactcagagctgaggtatctgcaatccaagcgaaaggcaaggagatgagcaaagcagagagtgagaccggtgaggaaggccctatggtcacggagtcagacatccaacacattgtgtcttcatggactggtattcctgttgagaaagtatcaaccgatgagtctgaccgtctcctcaagatggaagaaaccctccacaaacgtatcataggccaagacgaagctgtgaaagccataagccgagccattcgccgtgcacgtgttggactcaagaatcctaaccgtccaatcgctagtttcatattctcgggtccaaccggtgttgggaaatctgagcttgccaaagctttagcagcttactacttcggttccgaagaagccatgattcgtctagatatgagtgagttcatggagaggcacactgtctccaaactcatcggttcacctcctggatatgtcggatacaccgaaggaggtcagttaacagaagcggttagacgtcgcccttacaccgtcgttctattcgatgagattgaaaaagcccatccagatgttttcaacatgatgcttcaaatccttgaagatggtagattaacagacagcaaaggaagaacagttgacttcaaaaacacacttctcatcatgacatcaaacgtcggaagcagcgtgattgagaaaggaggaagacgtatcggattcgacttagactacgacgagaaagacagcagttacaacagaatcaagagccttgtaacagaggagctgaaacaatacttcagacccgagttcctaaacaggctagacgagatgattgtgttcagacagctaacaaagctggaagtgaaagaaattgctgacatactgttgaaggaagtgttcgagaggttgaagaagaaagagattgagcttcaggtgaccgaaagattcaaagagagagtagtagacgaaggttataacccgagctatggagcaagaccgttgagaagagccatcatgaggcttttagaggatagtatggcagagaagatgcttgcgagagagatcaaagaaggagactcggtgattgtggacgttgacgctgaaggtaacgtcacggtgctaaatggtggaagtggcactccaactacttccttggaggagcaggaagattctctccctgttgcttaa

SEQ ID NO: 33629 - protein, 929 aa, Arabidopsis thaliana
MAMATRVLAQSTPPSLACYQRNVPSRGSGRSRRSVKMMCSQLQVSGLRMQGFMGLRGNNALDTLGKSRQDFHSKVRQAMNVPKGKASRFTVKAMFERFTEKAIKVIMLAQEEARRLGHNFVGTEQILLGLIGEGTGIAAKVLKSMGINLKDARVEVEKIIGRGSGFVAVEIPFTPRAKRVLELSLEEARQLGHNYIGSEHLLLGLLREGEGVAARVLENLGADPSNIRTQVIRMVGENNEVTANVGGGSSSNKMPTLEEYGTNLTKLAEEGKLDPVVGRQPQIERVVQILGRRTKNNPCLIGEPGVGKTAIAEGLAQRIASGDVPETIEGKKVITLDMGLLVAGTKYRGEFEERLKKLMEEIRQSDEIILFIDEVHTLIGAGAAEGAIDAANILKPALARGELQCIGATTLDEYRKHIEKDPALERRFQPVKVPEPTVDETIQILKGLRERYEIHHKLRYTDESLVAAAQLSYQYISDRFLPDKAIDLIDEAGSRVRLRHAQVPEEARELEKELRQITKEKNEAVRGQDFEKAGTLRDREIELRAEVSAIQAKGKEMSKAESETGEEGPMVTESDIQHIVSSWTGIPVEKVSTDESDRLLKMEETLHKRIIGQDEAVKAISRAIRRARVGLKNPNRPIASFIFSGPTGVGKSELAKALAAYYFGSEEAMIRLDMSEFMERHTVSKLIGSPPGYVGYTEGGQLTEAVRRRPYTVVLFDEIEKAHPDVFNMMLQILEDGRLTDSKGRTVDFKNTLLIMTSNVGSSVIEKGGRRIGFDLDYDEKDSSYNRIKSLVTEELKQYFRPEFLNRLDEMIVFRQLTKLEVKEIADILLKEVFERLKKKEIELQVTERFKERVVDEGYNPSYGARPLRRAIMRLLEDSMAEKMLAREIKEGDSVIVDVDAEGNVTVLNGGSGTPTTSLEEQEDSLPVA

SEQ ID NO: 33630 - DNA, 2556 bp, Encephalitozoon cuniculi GB-M1
  CDS (1)..(2556)
atgactacaaggaagtatactgagagagcgcagaatgccctgaagatgtgtgtggacgaggcgcttgcaaataacaacaacaccatcgagcccgagcatcttctgaaggcgatactaagcgaccagacgtctgtgttacataacgtgctgagtcctacagagaggaacaacgtcaagaatgcactcataaagagaatcggggggtttgcaaagcagtataactgcacggagccccgtgtcggagagacacttgcaaaagttctgatggcggctgaaagtaagggggagggcgagtatgtttctgtgaatgcgttagtgctgagtcttcttgaagtggagagcatcagggagctgattgccaactcggaggacataagaaaaaaggttgaagagcagacaaagaacaagaggttcgactctcgaaacgccgacgatgggaccgatgtgatgtcgagattcgctgttgacatggttgagcaggccaggcagaatgtctttgaccctgtgattgggagggacgaggagatccgcagggttcttgagatattgtcgaagaagacaaagagtaacgcaatattggttggaaagccgggggttgggaagactgcaatagtgaatggaattgcacagctgatagcaaacggagaggcgcctacgcttcggggtgcccggatctataatgtggacgtgggatcgatggttgcggggacgtctcacaggggggactttgaagaaaggctgaagaccctggtcaaggaggcggaaacaacacctggggtgattctgtttattgacgagatccacattgtgctgggcgcaggaaagacggacggggcgatggatgcggcaaacatgctgaagcctggactggcagcagggacgatcaaatgcattggggcgacaacgcatgacgagtacaggaagtacattgagaacgacccggcgtttgaaagaaggtttgtgcaggttgttgtgaacgagccgtccattgaggactcgatcacgatgctccgaggactcaaggggagactggaggcataccacggtgtgaagatagccgacagtgctattgtgtatgcagtcaactcgtcgaagaagtatatttctaacagaaggcttccggatgtggcaattgacctgctggacactgcctgtgccagcgtgatgatagctcttgagagtgagccgcaggagattctaaatcaaaagtcaaaggcgtggggtttggatatcgcgaagacaagcctggagtttgacctttctcaaaagaaggacgagcagactctaaagaagcttaaggaagtggttgaagagttggagaaggtgaaggcgagcctacagccgatggaggaggcatatctgagggataagaagcacataatagaggcgaagaagctaaagaagaagctggaggacaccaagctaaggcttgcacaggcggagagagacagaaacacatatgttgcatacgacctcaagaccaacgtgattcctgtgattgaaagtgagctcaaaaggctcgagctcgagagtgtggtggttattctcccttcgcatgttgcagagatcataagcagatggacggggattgatgtaaagaggctgacgatcaaagagaacgaaaggctgatggagatgtcctcgaggataaagaagaggatatttgggcaggaccacgcggtggatgcaattgttgactcgattcttcagtccagggttgggctggacgacgatgacaggccggttgggtcctttcttcttctcgggcccactggggttggaaagacagagcttgccaaggcggttgcgatggagctgtttgacaatgagaaggacatgcttgtgattgacatgagcgagtatggaaatgagatgggtataacaaagctgattggagcaaatgcagggtatgttgggtataaccagggtggaacgcttacggagcccatcaagggaaggccctacaatgtgattctgctggacgaggttgacctggcacaccagactgtcctgaatacactgtaccaactcctggacgagggacgggtcacggatggaaaaggggctgtcgtggacttcagaaactgtgtggtgatcatgacctcgaatctaggccaggagataataatgcggtctcgtggtgagcttaacgacgatgaaaggaagaaaattgaggagatagtgctgaacaggtttggagcaccctttgtcaatcgtattgacgaggtgctgtatttcaacaatcttgatagagagaacatgcacaggattcttgaatatcagatgggctacttggagaagaagctcaggggccgcggcataacattcaaggtctctgatgctgtgaaggaagacatggttaccaaggtcctctcctcgatctatggagcccggcaacttaggagattcatccggtcaagctttaagcgtgcactaacgaaggtcctcttgatgagagtaaacgaggatcccattgaggtcagctgcactcatccatctgagggagctggaggaatccgcatttccgactatgtctactctatggtgcagcagtag

SEQ ID NO: 33631 - protein, 851 aa, Encephalitozoon cuniculi GB-M1
MTTRKYTERAQNALKMCVDEALANNNNTIEPEHLLKAILSDQTSVLHNVLSPTERNNVKNALIKRIGGFAKQYNCTEPRVGETLAKVLMAAESKGEGEYVSVNALVLSLLEVESIRELIANSEDIRKKVEEQTKNKRFDSRNADDGTDVMSRFAVDMVEQARQNVFDPVIGRDEEIRRVLEILSKKTKSNAILVGKPGVGKTAIVNGIAQLIANGEAPTLRGARIYNVDVGSMVAGTSHRGDFEERLKTLVKEAETTPGVILFIDEIHIVLGAGKTDGAMDAANMLKPGLAAGTIKCIGATTHDEYRKYIENDPAFERRFVQVVVNEPSIEDSITMLRGLKGRLEAYHGVKIADSAIVYAVNSSKKYISNRRLPDVAIDLLDTACASVMIALESEPQEILNQKSKAWGLDIAKTSLEFDLSQKKDEQTLKKLKEVVEELEKVKASLQPMEEAYLRDKKHIIEAKKLKKKLEDTKLRLAQAERDRNTYVAYDLKTNVIPVIESELKRLELESVVVILPSHVAEIISRWTGIDVKRLTIKENERLMEMSSRIKKRIFGQDHAVDAIVDSILQSRVGLDDDDRPVGSFLLLGPTGVGKTELAKAVAMELFDNEKDMLVIDMSEYGNEMGITKLIGANAGYVGYNQGGTLTEPIKGRPYNVILLDEVDLAHQTVLNTLYQLLDEGRVTDGKGAVVDFRNCVVIMTSNLGQEIIMRSRGELNDDERKKIEEIVLNRFGAPFVNRIDEVLYFNNLDRENMHRILEYQMGYLEKKLRGRGITFKVSDAVKEDMVTKVLSSIYGARQLRRFIRSSFKRALTKVLLMRVNEDPIEVSCTHPSEGAGGIRISDYVYSMVQQ

SEQ ID NO: 33632 - DNA, 2412 bp, Schizosaccharomyces pombe 972h-
  CDS (1)..(2412)
atgaatattttacctaagagtattccgatacgaatacaatcgctccgtaggtaccaaggaagtttaaaaacttctcttcgggcattgagtactcgacccatttttgaaaaacggctgttagctgaaacaccattttctataagaccaagtaatgcttctgtactcatagctaagagatctccaaagtttggatggaagcaagtacgcttttatgcagcaaatccaaatggaggaaattttcgaatggatttaggcggcggacgcaaacaaggagccgctttggaagaatatggcacagacttaacagccttggctaaacaaggaaaattggatcctgtaattgggcgtgaagaagagattcaaagaaccatccaaattctctctcgacgcacaaagaataatcctgcgttagttggtccggctggtgtaggtaaaacagcaattatggagggattagcctcgcgaatcattcgtggagaggtccctgagtccatgaaggataaacgtgttattgtcctagatttaggcgctctcatttcaggagccaaatttcggggagattttgaggaacgtttaaaatctgtactgagtgacctggaaggagctgaaggaaaggtcattttgtttgttgatgaaatgcaccttttacttggctttggtaaagctgaaggctcaattgatgccagcaatctattaaaacctgctttagcccgtggtaaattgcactgttgtggtgcgacaaccttggaggaatacagaaaatacatcgagaaagacgctgctttggcaagaagatttcaagcagttatggtaaatgaaccttctgtagctgacaccatctcaattcttcgtggtctgaaagaacgatacgaagttcatcatggtgtacgtatcactgacgatgctttggtaacagcagctacgtacagcgctagatacatcaccgatcgatttcttcccgataaagccattgatttagtcgatgaagcctgctcctctcttcgcttacaacaagagtctaaacctgatgaattgcggcgtttagaccgtcaaatcatgactatacaaattgaattggaatcccttaggaaggaaactgacacgacatcggttgagcgacgtgagaaattggagtccaagctcactgatttgaaggaggaacaagataaactatctgcggcatgggaagaagagagaaagcttttggactccatcaagaaggctaaaactgaacttgaacaggctcgaatagagcttgagagaacacaacgtgaaggtaattatgcccgtgcttctgagctccaatatgcgattattcctgaattggagcgtagtgttccaaaggaagagaaaacgcttgaagaaaagaagccatccatggtacatgattcggttactagcgatgatattgcggttgttgtatcaagggcgacaggaattcctaccactaatttaatgcgtggtgaaagagacaagctccttaatatggaacaaactattggcaagaagattattggtcaggacgaagctttgaaagcgatagccgatgcagttcgtttatcacgcgcaggtctccaaaacaccaacagacctttggcatcattccttttccttggacctaccggtgtaggtaagactgcacttaccaaagctttagcagagtttctatttgacactgacaaggctatgattcgttttgatatgtccgagtttcaggagaaacatacaattgcgcgtctgattggtagtcctcctggatatattggttatgaagaatctggagagttgactgaagctgtgcgtcgcaaaccatacgccgtacttttgtttgacgaattagaaaaagcgcatcatgatattaccaaccttcttctacaagtactagacgaaggatttttgaccgattcacaaggacgtaaagtggatttccgatctaccttgattgttatgacctcgaatttgggaagcgatatcttggttgctgatcctagtactactgtcacccccaaatccagggatgccgttatggatgttgtacagaaatattatcctcctgaatttttgaacagaattgacgaccaaattgttttcaacaaattatcggaaaagaaccttgaagacatagtaaacgttcgtttggacgaagttcaacaacgtcttaatgaccgtcgtataatccttacagttacagaagcagctcgcaaatggcttgctgaaaaaggttattctccagcgtatggcgctagacctttgaatcgcttaatacagaagcgtattttgaacacaatggcgatgaaaattattcagggagaaattaagtcggacgaaaatgttgtgatcgacgttttggatggtgaacttgagtttaaagcaaataagcttgagccacaatctacaagtcatgaggattaa

SEQ ID NO: 33633 - protein, 803 aa, Schizosaccharomyces pombe 972h-
MNILPKSIPIRIQSLRRYQGSLKTSLRALSTRPIFEKRLLAETPFSIRPSNASVLIAKRSPKFGWKQVRFYAANPNGGNFRMDLGGGRKQGAALEEYGTDLTALAKQGKLDPVIGREEEIQRTIQILSRRTKNNPALVGPAGVGKTAIMEGLASRIIRGEVPESMKDKRVIVLDLGALISGAKFRGDFEERLKSVLSDLEGAEGKVILFVDEMHLLLGFGKAEGSIDASNLLKPALARGKLHCCGATTLEEYRKYIEKDAALARRFQAVMVNEPSVADTISILRGLKERYEVHHGVRITDDALVTAATYSARYITDRFLPDKAIDLVDEACSSLRLQQESKPDELRRLDRQIMTIQIELESLRKETDTTSVERREKLESKLTDLKEEQDKLSAAWEEERKLLDSIKKAKTELEQARIELERTQREGNYARASELQYAIIPELERSVPKEEKTLEEKKPSMVHDSVTSDDIAVVVSRATGIPTTNLMRGERDKLLNMEQTIGKKIIGQDEALKAIADAVRLSRAGLQNTNRPLASFLFLGPTGVGKTALTKALAEFLFDTDKAMIRFDMSEFQEKHTIARLIGSPPGYIGYEESGELTEAVRRKPYAVLLFDELEKAHHDITNLLLQVLDEGFLTDSQGRKVDFRSTLIVMTSNLGSDILVADPSTTVTPKSRDAVMDVVQKYYPPEFLNRIDDQIVFNKLSEKNLEDIVNVRLDEVQQRLNDRRIILTVTEAARKWLAEKGYSPAYGARPLNRLIQKRILNTMAMKIIQGEIKSDENVVIDVLDGELEFKANKLEPQSTSHED

SEQ ID NO: 33634 - DNA, 2718 bp, Schizosaccharomyces pombe 972h-
  CDS (1)..(2718)
atggctgattatccttttactgacaaagccgcaaagacattgtctgatgcgtactcaattgcacaatcttatggtcattcacaattaacccctattcacattgctgctgctcttttgtccgacagtgacagtaacggtactaccttactgcgcaccatcgtcgacaaagctggtggtgatggtcaaaagtttgagcgaagtgttactagtcggttagttcgcttgcctgctcaggatccacctccagaacaagtgactctgtcacctgaaagtgcgaaactgctgcgaaatgctcatgaacttcaaaaaacacaaaaagattcttacattgctcaagatcattttatcgctgtgttcactaaagacgacacgctaaagagtttattggcagaagccggtgtcaccccgaaagcgtttgaatttgctgtaaataacgtccgtggtaataaaagaatcgattcaaagaatgccgaggaaggatttgatgcactaaataaatttactgttgatcttacagagctcgctagaaatggtcaactggatccagttatcggacgtgaagatgaaattcgtcgtacaattcgcgtactttctagaagaacgaaaaataatccagttcttattggtgagcctggtgtaggtaagacctccattgctgaaggacttgctcgtcgtataattgacgatgatgtccccgctaatctttcgaattgtaagcttctcagcctggacgtcggaagcttagttgccggctccaaatttcgtggtgaatttgaagagcgtatcaaatctgttttaaaagaagttgaagaaagtgaaactcccattattttattcgtagatgaaatgcatcttttaatgggcgcaggttccggtggtgaaggtggcatggacgctgccaatttgctgaagccaatgcttgcacgtggtaagcttcactgtattggtgctactactttggctgaatacaagaaatacatcgaaaaagatgctgctttcgaacgtagattccaaatcatcttggtaaaagagccttctattgaagatacgatttctatccttcgtggtcttaaagaaaagtatgaggttcatcatggtgttactatctctgaccgtgccttggttactgctgcccatctcgcttcccggtacctaacttctcgtcgtcttccagattctgccatcgacttggtcgatgaagctgcggctgcagttcgtgttactcgtgaatctcagcccgaagttcttgataaccttgagagaaagcttcgacaactccgcgttgaaattcgtgctttagagcgtgagaaggacgaagcttccaaagaacgtctcaaggctgctcgtaaagaggctgaacaagtggaagaagaaacaagacctattcgtgagaagtatgaattagaaaagtctcgtggaagtgaacttcaagatgctaagcgtcgtcttgatgagttgaaggctaaggctgaggatgccgagcgtcgtaatgatttcactcttgctgctgatttgaaatactatggtattcctgatttgcaaaaacgtattgaatatttagagcaacaaaaaagaaaggctgatgcagaagcgattgcaaacgctcaaccaggctcagaacctttacttattgacgtagttgggcccgatcaaatcaacgaaatcgttgcaaggtggactggtattccggttactcgtttgaagacaactgaaaaggaacgactccttaacatggagaaggttctcagtaaacaagtaattggtcaaaatgaagcagttactgcagttgcaaacgccattcgcttatctcgtgctggtctttctgatcctaatcaaccaatcgcatctttcttgttttgcggtccttccggtactggtaagactttattgacaaaggcattggcatcatttatgtttgatgatgaaaatgcaatgattcgtattgacatgtctgaatacatggaaaaacactctgtttcacgtctcattggagcaccacccggttatgttggacatgaagctggtggacagcttactgaacaacttcgtcgacgaccttactccgtcatcttgtttgacgagattgaaaaggctgctccagaagtattgactgtacttttgcaggtactagatgatggacgtatcactagtggccaaggccaggttgttgatgccaagaatgctgttatcattatgacttctaacttgggcgctgaatacttgacaacagacaatgagtctgatgatggaaagatagatagtaccactcgggaaatggttatgaactcgattcgtggcttcttccgtcccgaatttttgaatcgtatctcttcaatcgttatctttaatcgtctgcgtcgtgtggatatccgcaatattgtcgaaaatcgtatattagaggttcagaaacggcttcaatccaatcatcgctcaattaaaatcgaggttagcgacgaagctaaagaccttcttggaagcgctggttattcccctgcttatggtgcaagacctttgaaccgtgtcattcaaaatcaagttttgaatcccatggctgtcttaattttgaatggccagcttcgcgataaggagactgctcatgtcgtagtccaaaatggcaagatatttgtcaaaccaaatcatgaagctaatgcaaacggctctgctgatattgacatggatggtattgacgacgatgttaatgatgaagaattggaataa

SEQ ID NO: 33635 - protein, 905 aa, Schizosaccharomyces pombe 972h-
MADYPFTDKAAKTLSDAYSIAQSYGHSQLTPIHIAAALLSDSDSNGTTLLRTIVDKAGGDGQKFERSVTSRLVRLPAQDPPPEQVTLSPESAKLLRNAHELQKTQKDSYIAQDHFIAVFTKDDTLKSLLAEAGVTPKAFEFAVNNVRGNKRIDSKNAEEGFDALNKFTVDLTELARNGQLDPVIGREDEIRRTIRVLSRRTKNNPVLIGEPGVGKTSIAEGLARRIIDDDVPANLSNCKLLSLDVGSLVAGSKFRGEFEERIKSVLKEVEESETPIILFVDEMHLLMGAGSGGEGGMDAANLLKPMLARGKLHCIGATTLAEYKKYIEKDAAFERRFQIILVKEPSIEDTISILRGLKEKYEVHHGVTISDRALVTAAHLASRYLTSRRLPDSAIDLVDEAAAAVRVTRESQPEVLDNLERKLRQLRVEIRALEREKDEASKERLKAARKEAEQVEEETRPIREKYELEKSRGSELQDAKRRLDELKAKAEDAERRNDFTLAADLKYYGIPDLQKRIEYLEQQKRKADAEAIANAQPGSEPLLIDVVGPDQINEIVARWTGIPVTRLKTTEKERLLNMEKVLSKQVIGQNEAVTAVANAIRLSRAGLSDPNQPIASFLFCGPSGTGKTLLTKALASFMFDDENAMIRIDMSEYMEKHSVSRLIGAPPGYVGHEAGGQLTEQLRRRPYSVILFDEIEKAAPEVLTVLLQVLDDGRITSGQGQVVDAKNAVIIMTSNLGAEYLTTDNESDDGKIDSTTREMVMNSIRGFFRPEFLNRISSIVIFNRLRRVDIRNIVENRILEVQKRLQSNHRSIKIEVSDEAKDLLGSAGYSPAYGARPLNRVIQNQVLNPMAVLILNGQLRDKETAHVVVQNGKIFVKPNHEANANGSADIDMDGIDDDVNDEELE

SEQ ID NO: 33636 - DNA, 2778 bp, Corynebacterium glutamicum ATCC 13032
  CDS (1)..(2778): transl_table=11
atgttcgagaggtttaccgatcgtgcacgccgcgtgattgtgctcgcgcaggaagaggcgcgcatgctcaaccacaattacatcggcacggagcacattctcctcggcctcattcacgagggcgagggcgttgcagccaaggctttggaatccatgggaatttccctggacgccgtccgccaggaagtcgaagagattatcggccagggctcccagcccaccaccggccacattccttttactccacgtgccaagaaggtcctggagctcagcctccgcgaaggcctacaaatgggacacaagtacatcggtactgagttcctgcttctcggtttgatccgtgagggcgagggcgttgctgcccaggtcctggtcaagcttggtgctgatctgccacgcgtgcgtcagcaagttattcagcttctctccggctacgaaggtggccagggcggatccccagagggcggccagggcgcccctactggcggtgacgctgttggtgcaggagctgctcctggcggtcgtccatcttcgggcagcccaggcgagcgttctacctctttggtccttgaccagttcggccgcaacctcacccaggctgcaaaggacggcaagctggatccagttgttggtcgcgataaggaaatcgagcgcatcatgcaggtgctctcccgtcgtaccaagaacaacccagttcttattggtgagccaggtgttggtaagaccgcagttgttgaaggtcttgcactagacattgttaacggcaaggttccagagaccctcaaggacaagcaggtttactcccttgacttaggttccctggttgcaggttcccgttaccgcggtgacttcgaagagcgactgaagaaggtcctcaaggagattaaccagcgcggcgacatcatcctgtttatcgatgagatccacaccctcgtgggtgcaggtgcagcagaaggcgcaatcgacgctgcctccctgcttaagccaaagcttgcccgcggtgaactgcagaccattggtgcaaccaccctggatgagtaccgtaagcacattgaaaaggacgcagctcttgagcgtcgtttccagccagtgcaggttccagagccttcggttgatctcaccgttgagatcttgaagggtctgcgcgaccgctacgaagctcaccaccgcgtatccatcaccgatggtgctcttactgcagcagctcagcttgctgatcgctacatcaacgaccgcttcttgccagataaggccgttgacctcatcgatgaggctggcgcccgcatgcgcatcaagcgcatgaccgcaccttcctccctccgcgaggttgatgagcgtatcgctgatgttcgccgtgagaaggaagcagcgatcgatgctcaggactttgagaaggcagcaggtcttcgcgataaggagcgcaagctcggcgaagagcgttcagagaaggaaaagcagtggcgctccggcgacctcgaggacatcgctgaggttggcgaagagcagatcgcagaagtactggccaactggactggtattcctgtcttcaagctcaccgaagctgaatcttcacgcctgctcaacatggaagaagagttgcacaagcgcatcatcggacaggatgaagctgtcaaggctgtctcccgtgcgatccgtcgtacccgtgcaggtctgaaggatcctaagcgtccttccggctccttcatcttcgctggtccatccggcgttggtaagaccgagctgtccaaggctctcgcaggattcctcttcggtgacgatgattccctcatccaaatcgacatgggtgagttccacgaccgcttcaccgcgtcccgacttttcggtgcccctccgggatacgttggctacgaagaaggtggccagctgaccgagaaggttcgccgtaagccattctccgttgtgcttttcgacgaaatcgagaaggcccacaaggagatctacaacaccttgctgcaggtgttggaagatggtcgccttaccgatggtcagggacgcatcgtggacttcaagaacaccgtcctgatcttcacctccaacctgggcaccgctgacatctccaaggctgttggcctgggcttctccggatcctccgagactgacagcgatgctcagtacgaccgcatgaagaacaaggtccacgacgagctgaagaagcacttccgccctgagttcctgaaccgtattgatgagatcgtggtcttccaccagctcaccaaggatcagatcgttcagatggtcgaccttcttatcggtcgcgtttccaacgcactggctgagaaggacatgagcatcgaactgactgagaaggccaaggacctcctggctaaccgaggcttcgatccagttctgggtgcacgaccattgcgtcgcaccatccagcgcgaaattgaagaccagatgtccgagaagatcctcttcggtgaaatcggcgcaggcgagatcgtcaccgttgacgtcgaaggctgggacggcgagtccaaggacaccgaccgtgcgaagttcaccttcacaccacgtccaaagccaatgccagaaggtaagttctctgagatctctgtcgaggctgcggaagcaattcaagatgtagattctgcagctgacggcgatgtcccagaaaccgattcactttccgacattgaccttgaaacccttgaaaagtttgaggaagatgtagaaaacggcaccgacattgatcaggtgtccggtgactactacggcaccgatgatcagggaggcactgctccaagcaaggagtag

SEQ ID NO: 33637 - protein, 925 aa, Corynebacterium glutamicum ATCC 13032
MFERFTDRARRVIVLAQEEARMLNHNYIGTEHILLGLIHEGEGVAAKALESMGISLDAVRQEVEEIIGQGSQPTTGHIPFTPRAKKVLELSLREGLQMGHKYIGTEFLLLGLIREGEGVAAQVLVKLGADLPRVRQQVIQLLSGYEGGQGGSPEGGQGAPTGGDAVGAGAAPGGRPSSGSPGERSTSLVLDQFGRNLTQAAKDGKLDPVVGRDKEIERIMQVLSRRTKNNPVLIGEPGVGKTAVVEGLALDIVNGKVPETLKDKQVYSLDLGSLVAGSRYRGDFEERLKKVLKEINQRGDIILFIDEIHTLVGAGAAEGAIDAASLLKPKLARGELQTIGATTLDEYRKHIEKDAALERRFQPVQVPEPSVDLTVEILKGLRDRYEAHHRVSITDGALTAAAQLADRYINDRFLPDKAVDLIDEAGARMRIKRMTAPSSLREVDERIADVRREKEAAIDAQDFEKAAGLRDKERKLGEERSEKEKQWRSGDLEDIAEVGEEQIAEVLANWTGIPVFKLTEAESSRLLNMEEELHKRIIGQDEAVKAVSRAIRRTRAGLKDPKRPSGSFIFAGPSGVGKTELSKALAGFLFGDDDSLIQIDMGEFHDRFTASRLFGAPPGYVGYEEGGQLTEKVRRKPFSVVLFDEIEKAHKEIYNTLLQVLEDGRLTDGQGRIVDFKNTVLIFTSNLGTADISKAVGLGFSGSSETDSDAQYDRMKNKVHDELKKHFRPEFLNRIDEIVVFHQLTKDQIVQMVDLLIGRVSNALAEKDMSIELTEKAKDLLANRGFDPVLGARPLRRTIQREIEDQMSEKILFGEIGAGEIVTVDVEGWDGESKDTDRAKFTFTPRPKPMPEGKFSEISVEAAEAIQDVDSAADGDVPETDSLSDIDLETLEKFEEDVENGTDIDQVSGDYYGTDDQGGTAPSKE

SEQ ID NO: 33638 - DNA, 2526 bp, Streptomyces coelicolor A3(2)
  CDS (1)..(2526): transl_table=11
atgttcgagaggttcaccgaccgcgcgcggcgggttgtcgtcctggctcaggaagaagcccggatgctcaaccacaactacatcggcaccgagcacatcctcctgggcctgatccacgagggtgagggtgtcgccgccaaggcccttgagagcctcgggatttcgctcgaggcggtccgccagcaggtggaggagatcatcggccagggccagcaggccccgtccggccacatccccttcaccccccgtgccaagaaggttctggagctgtcgctccgcgaggccctccagctgggccacaactacatcggcacggagcacatcctgctcggcctgatccgcgagggcgagggcgtcgccgcccaggtcctggtcaagctgggcgcagatctgaaccgggtgcggcagcaggtcatccagctgctctccggttaccagggcaaggagaccgccaccgccggcggtcctgcggagggcaccccctccacgtccctggtcctcgaccagttcggccggaacctcacccaggccgctcgcgagtccaagctcgacccggtcatcgggcgcgagaaggagatcgagcgggtcatgcaggtgctgtcccgccgtacgaagaacaacccggtgctgatcggtgagcccggcgtcggcaagaccgccgtcgtcgagggcctcgcgcaggccatcgtcaagggcgaggtgcccgagaccctcaaggacaagcacctctacaccctggacctcggtgccctggtcgccggctcccgctaccgcggtgacttcgaggagcgcctgaagaaggtgctcaaggagatccgcacccgcggcgacatcatcctgttcatcgacgagctgcacacgctggtcggtgccggtgccgccgagggcgccatcgacgccgcgtcgatcctcaagccgatgctggcccgcggtgagctccagaccatcggtgcgaccacgctggacgagtaccgcaagcacctggagaaggacgcggccctcgagcgccgcttccagccgatccaggtcgcggagccgtcgctgccgcacacgatcgagatcctcaagggcctgcgcgaccgctacgaggcccaccaccgcgtctccatcacggacgaggccctggtccaggcggcgacgctcgccgaccgctacatctcggaccgcttcctgccggacaaggcgatcgacctgatcgacgaggccggatcccggatgcgcatccgccggatgaccgcgccgccggacctccgcgagttcgacgagaagatcgccggcgtccgccgcgacaaggagtccgcgatcgactcgcaggacttcgagaaggccgcttccctccgcgacaaggagaagcagctcctggccgccaaggccaagcgggagaaggagtggaaggccggcgacatggacgtcgtcgcggaggtggacggcgagctgatcgccgaggtcctcgccacggcgaccggcatcccggtcttcaagctcacggaggaggagtcgtcccgcctgctgcgcatggaggacgagctccacaagcgggtcatcggccagaaggacgccgtcaaggcgctctccaaggcgatccgccgtacccgtgccggcctgaaggacccgaagcgtcccggtggctcgttcatcttcgccggcccgtccggtgtcggtaagaccgagctgtccaaggcactcgccgagttcctcttcggtgacgaggacgcgctgatctccctcgacatgtcggagttcagcgagaagcacacggtctcgcgcctcttcggttcgccccccggctacgtgggctacgaggagggcggccagctgacggagaaggtccgccgcaagccgttctcggtcgtcctcttcgacgaggtcgagaaggcccacccggacatcttcaacagccttctccagatcctggaggacggtcgcctgaccgactcccagggccgggtcgtggacttcaagaacacggtcatcatcatgacgaccaacctcggcacccgggacatctccaagggcttcaacctcggcttcgccgccgcgggcgacacgaagtccaactacgagcgcatgaagaacaaggtccaggacgagctgaagcagcacttccggcccgagttcctcaaccgtgtcgacgacgtggtcgtcttcccgcagctcagccaggacgacatcctgcagatcgtcgacctgatgatccagaaggtcgacgagcgcctcaaggaccgggacatgggcatcgagctctcccagtccgccaaggagctgctgtccaagcggggctacgacccggtgctgggcgcgcgtccgctgcgccgcacgatccagcgcgaggtcgaggactcgctgtcggagaagatcctcttcggcgagctgcgtcccggtcacatcgtggtcgtggacaccgagggcgagggcgacgcggcgaccttcaccttccggggtgaggagaagtcgaccctccccgacgtcccgccgatcgagcaggcggcgggcggcgcggggcccaacctgagcaaggaggcctag

SEQ ID NO: 33639 - protein, 841 aa, Streptomyces coelicolor A3(2)
MFERFTDRARRVVVLAQEEARMLNHNYIGTEHILLGLIHEGEGVAAKALESLGISLEAVRQQVEEIIGQGQQAPSGHIPFTPRAKKVLELSLREALQLGHNYIGTEHILLGLIREGEGVAAQVLVKLGADLNRVRQQVIQLLSGYQGKETATAGGPAEGTPSTSLVLDQFGRNLTQAARESKLDPVIGREKEIERVMQVLSRRTKNNPVLIGEPGVGKTAVVEGLAQAIVKGEVPETLKDKHLYTLDLGALVAGSRYRGDFEERLKKVLKEIRTRGDIILFIDELHTLVGAGAAEGAIDAASILKPMLARGELQTIGATTLDEYRKHLEKDAALERRFQPIQVAEPSLPHTIEILKGLRDRYEAHHRVSITDEALVQAATLADRYISDRFLPDKAIDLIDEAGSRMRIRRMTAPPDLREFDEKIAGVRRDKESAIDSQDFEKAASLRDKEKQLLAAKAKREKEWKAGDMDVVAEVDGELIAEVLATATGIPVFKLTEEESSRLLRMEDELHKRVIGQKDAVKALSKAIRRTRAGLKDPKRPGGSFIFAGPSGVGKTELSKALAEFLFGDEDALISLDMSEFSEKHTVSRLFGSPPGYVGYEEGGQLTEKVRRKPFSVVLFDEVEKAHPDIFNSLLQILEDGRLTDSQGRVVDFKNTVIIMTTNLGTRDISKGFNLGFAAAGDTKSNYERMKNKVQDELKQHFRPEFLNRVDDVVVFPQLSQDDILQIVDLMIQKVDERLKDRDMGIELSQSAKELLSKRGYDPVLGARPLRRTIQREVEDSLSEKILFGELRPGHIVVVDTEGEGDAATFTFRGEEKSTLPDVPPIEQAAGGAGPNLSKEA

SEQ ID NO: 33640 - DNA, 2529 bp, Streptomyces coelicolor A3(2)
  CDS (1)..(2529): transl_table=11
atgaccagcggctacatgggcccggagggcgacccgttcgcggagttcctggcacgcttcttcggcgggcccaggccccggcagatcgacatcggccggctgctcagccagcccgcccgggagctggtgcgcggcgccgcccagtacgccgccgagcacggcagccgggacctggacaccgagcacctgctgcgggccgcgctcgccaccgagccgacccgggggctgctcagccgggccggtgccgaccccgactcgctggcctcgcagatcgacgagcggaccggaccggtgcagcacccgccgggcgaggtcccgccgcccacgtcgctctcgctcaccccggccgtcaagcgtgccctgctggacgcgcacgagctggcccgctccaccggcaccgggtacatcggcccggagcacgtgctcagcgccctggccgccaaccccgactcggccgccgggcacatcctgaacgcggcccgcttcgcgccctcgaacctgcccacggagacgccggaggccgcgaagggccgtaccgagagcgcccggaccacgaacacgccgaccctcgacaagtacggccgcgatctcaccgatctggcgcagcagggccggatcgacccggtgatcgggcgtgaggaggagatcgagcagaccgtcgaggtgctctcccggcgcggcaagaacaaccccgtcctgatcggggacgccggcgtcggcaagaccgcgatcgtggaggggctcgcccagcgcatcaccgacggcgacgtgccggacgtgctgatcgggcgccgggtggtcgcgctcgacctgacgggcgtcgtcgcgggcacccgctaccggggcgacttcgaggagcggatgaacaacatcgtgggcgagatccgcgcccactccgacgagctgatcatcttcatcgacgagctgcacaccgtcgtcggcgcgggcgggggcggcgagagcgggtcgatggacgccgggaacatcctcaagccggccctggcccgcggcgagctgcacatcgtgggcgccaccacgctggaggagtaccgcaggatcgagaaggacgcggccctcgcccgccgcttccagccgatcctggtgccggagcccaccaccgccgacgcgatcgagatcctgcgcggcctgcgcgaccgctacgaggcccaccaccaggtccgctacaccgacgaggcgctggtcgcggccgtggagatgtccgaccgctacctcaccgaccggcgcctgcccgacaaggccatcgacctgatcgaccaggcgggcgcccgcgtgcggctgcgggcgcgcaccaagggcaccgacgtacgggccctggagcgcgaggtcgaccagctggtgagggacaaggaccaggcggtcgcggacgagcagtacgagcaggcgacccagctgcgggaccggatcgtcgggctgaagcagcgcatcaccgaggccaccggcgacggccaggccgacgagggcctcgacctggtcgtggacaccgagtccatcgccgaggtggtctcccggcagaccggcatcccggtcagcagcctcacccaggaggagaaggaccgcctgctgggcctggagtcccacctgcacgagcgggtcgtcggccaggacgaggcggtacgggtcgtctccgacgccgtgctgcgctcccgcgccgggctgtccagtgcggaccggcccatcggcagcttcctcttcctcggcccgaccggcgtcggcaagaccgagctggcccgggcactggccgaggcgctgttcggcagcgaggaccggatggtgcgcctcgacatgagcgagtaccaggagcgccacaccgtcagccgcctggtcggcgccccgcccggctacgtcgggcacgaggaggccggtcagctcaccgaggtggtgcgccggcacccgtactcgctgctcctgctggacgaggtggagaaggcgcaccccgacgtcttcaacatcctgctccaggtcctggacgacgggcggctgaccgactcgcagggccggacggtggacttctccaacacggtcgtcgtgatgaccagcaacctgggctccgacgtgatcacccggcgcggtgccggcatcggcttcggcgcgggcggcgcggaggcggacgaggaagcccggcgcgagcaggtgctgcgcccgctgcgggagcacttccggcccgagttcctcaaccgcgtcgacgagatcgtggtcttccgccagctcagcggcgagcagctgcggcagatcaccagcctgctcctggagcagacccgtcgcatggtgcacgcgcagggcgtcaccgtcgacttcaccgacgcggccgtggactggctcgccgagcgcggctaccagcccgagtacggcgcccgaccgctgcgccgcaccatccagcgcgaggtggacaacgagctgtcccggctgctgctcgacggccgggtggcggagggcggccgggtgacggtcgacgtcgaggacgggcggctggcgttccgcacgccggagcgacccgtccccgaactgtga

SEQ ID NO: 33641 - protein, 842 aa, Streptomyces coelicolor A3(2)
MTSGYMGPEGDPFAEFLARFFGGPRPRQIDIGRLLSQPARELVRGAAQYAAEHGSRDLDTEHLLRAALATEPTRGLLSRAGADPDSLASQIDERTGPVQHPPGEVPPPTSLSLTPAVKRALLDAHELARSTGTGYIGPEHVLSALAANPDSAAGHILNAARFAPSNLPTETPEAAKGRTESARTTNTPTLDKYGRDLTDLAQQGRIDPVIGREEEIEQTVEVLSRRGKNNPVLIGDAGVGKTAIVEGLAQRITDGDVPDVLIGRRVVALDLTGVVAGTRYRGDFEERMNNIVGEIRAHSDELIIFIDELHTVVGAGGGGESGSMDAGNILKPALARGELHIVGATTLEEYRRIEKDAALARRFQPILVPEPTTADAIEILRGLRDRYEAHHQVRYTDEALVAAVEMSDRYLTDRRLPDKAIDLIDQAGARVRLRARTKGTDVRALEREVDQLVRDKDQAVADEQYEQATQLRDRIVGLKQRITEATGDGQADEGLDLVVDTESIAEVVSRQTGIPVSSLTQEEKDRLLGLESHLHERVVGQDEAVRVVSDAVLRSRAGLSSADRPIGSFLFLGPTGVGKTELARALAEALFGSEDRMVRLDMSEYQERHTVSRLVGAPPGYVGHEEAGQLTEVVRRHPYSLLLLDEVEKAHPDVFNILLQVLDDGRLTDSQGRTVDFSNTVVVMTSNLGSDVITRRGAGIGFGAGGAEADEEARREQVLRPLREHFRPEFLNRVDEIVVFRQLSGEQLRQITSLLLEQTRRMVHAQGVTVDFTDAAVDWLAERGYQPEYGARPLRRTIQREVDNELSRLLLDGRVAEGGRVTVDVEDGRLAFRTPERPVPEL

SEQ ID NO: 33642 - DNA, 2514 bp, Streptomyces coelicolor A3(2)
  CDS (1)..(2514): transl_table=11
atgtcgatgtcgtcgttcggattcggtgcgtccgatccgttcagtgatctgttcaaccggttcttcggaacgtcgcccgcgtcctcgcccccggcggtgcagcgggtgccgatcggccggatgctgaccgagtcctcgcaggagctcctcaacctggcggcacggcggtcgctggaggacgggacgtccgacctggacacggagcacctgttgtgggcggccacgaaggtcgagcccgcgcgggggctgctcgcccgggcgggcgccgaccccgacgcgctcgcctcccggatcgccgaggtcctgccccgcgaggcgggcgagccgtccgccgagccgggcctcaccccggccgccaagcgcaccctcgccaccgcctacgcccgctcccgggcctccggcgtctcctacatcggccccgagcacatcctgggcgccctgctggcggacggcgacacgggcgcggcccggctgctgggcgcccaggggcaggacatcggcaagctggaggggctcaccgagcaggccgcccgtccgggcggggccccgggcgacgacggcgggagaccggccaccacgctggacgagtacggacgggacctgaccgacgaggcgaaggccgggaagctcgaccccgtcgtcggccgcgccgaggagatcgagcagaccgtcgagatcctctcccggcgctccaagaacaatccggtgctgatcggcgagcccggcgtcggcaagaccgccatcgtggagggactggcccagcgcatcgtggccggtgaggtcccgaacacgctgaaggacaagagggtggtcgccctcgacctgtccgccatggtggcgggcgcgcagtaccggggccagttcgaggagcggctcaagaaggtcatcgaggacgtccagcaggcccgcggcgacatcatcctgttcatcgacgaactgcacaccgtcgtcggcgccggagcgagcggcgagagctccatggatgccggcaacatgctcaagccggccctcgcgcgcggcgaactgcacgtggtgggcgccacgaccatcgacgagtaccgcaagtacgtcgagaaggacgccgccctcgaacgccgcttccagcccgtgatggtccccgagccctcggtcgaggagacggtgcagatcctggagggcctgcgcgacgcctacgaggcgcaccaccaggtccgcttcgccgacggagcgctgaccgcggcggcggagctgtccgaccgctacgtcagcgaccgcttcctgcccgacaaggcgatcgacgtcatggaccaggcgggcgcccgggtacggctgcgcagcgcgagccgttccaccgaggtcgtcggccgcgaggaccgcatcgcgaagctgcgccgggagcaggagcaggccgtcgcggccgaggactacgcccgcgcgggcgagctgaaacgcgagatcgccgaggcggagggcgaactggcgggcatcgaggagcgccgcgagggcgtcgtctccgtcaccgccgacgacatcgcggacgtgatctcccgccgcaccggcatcccggtctcccagctgacggcgggggagaaggagcggctgctcaggctggaggaggagatgcacgcccggatcgtcggccaggacgaggcggtcaccgccgtctcacgggccgtgcgccgcaaccgggccggcatgggcgaccccgaccgccccgtgggctccttcctcttcctcggccccaccggtgtcggcaagaccgagctggccaagaccctcgccgagctgctgttcggcgaggagaaccgcatgatccgcttcgacatgagcgagttccaggagaagcacacggtcgcccggctcgtcggcgcgcccccgggctacgtcggctacgaggaggccggccagctcaccgagaaggtccgcaggcagccctacagcgtggtcctgttcgacgaggtcgagaaggcccaccccgacgtcttcaacacgctgctgcagatcctcgacgacggccgcctcaccgacggacagggacgcaccgtcgacttccggcactgcgtggtcatcatgacgtccaacatcggcgcccaccgcatcctcgaccacaagggcgacgtgtccgacctcaaggacgaactcatgcaggagctgcggggccggttcctgccggagttcctcaaccgcatcgacgagatcatcgtcttccacggcctcaccgaggacgacctctcgcggatcgtggaccacctgctggcgcagagcgaacggcgggtgcacgcccagggcatgacactgaaggtcaccgaggcggccaagaagctgctgatcgcccacggacaccagccggagttcggcgcccgaccgctcaggcgcaccatccaggccgaactcgacaaccgcgtcgccgacctgctcctcggcggcgaggccgaccccggcgacaccatcgtcgccgacgtggtcgacgactccctgcactgcacggtcgacaagtccggcaccgcacgacccgcggaggcgagcggcacatga

SEQ ID NO: 33643 - protein, 837 aa, Streptomyces coelicolor A3(2)
MSMSSFGFGASDPFSDLFNRFFGTSPASSPPAVQRVPIGRMLTESSQELLNLAARRSLEDGTSDLDTEHLLWAATKVEPARGLLARAGADPDALASRIAEVLPREAGEPSAEPGLTPAAKRTLATAYARSRASGVSYIGPEHILGALLADGDTGAARLLGAQGQDIGKLEGLTEQAARPGGAPGDDGGRPATTLDEYGRDLTDEAKAGKLDPVVGRAEEIEQTVEILSRRSKNNPVLIGEPGVGKTAIVEGLAQRIVAGEVPNTLKDKRVVALDLSAMVAGAQYRGQFEERLKKVIEDVQQARGDIILFIDELHTVVGAGASGESSMDAGNMLKPALARGELHVVGATTIDEYRKYVEKDAALERRFQPVMVPEPSVEETVQILEGLRDAYEAHHQVRFADGALTAAAELSDRYVSDRFLPDKAIDVMDQAGARVRLRSASRSTEVVGREDRIAKLRREQEQAVAAEDYARAGELKREIAEAEGELAGIEERREGVVSVTADDIADVISRRTGIPVSQLTAGEKERLLRLEEEMHARIVGQDEAVTAVSRAVRRNRAGMGDPDRPVGSFLFLGPTGVGKTELAKTLAELLFGEENRMIRFDMSEFQEKHTVARLVGAPPGYVGYEEAGQLTEKVRRQPYSVVLFDEVEKAHPDVFNTLLQILDDGRLTDGQGRTVDFRHCVVIMTSNIGAHRILDHKGDVSDLKDELMQELRGRFLPEFLNRIDEIIVFHGLTEDDLSRIVDHLLAQSERRVHAQGMTLKVTEAAKKLLIAHGHQPEFGARPLRRTIQAELDNRVADLLLGGEADPGDTIVADVVDDSLHCTVDKSGTARPAEASGT

SEQ ID NO: 33644 - DNA, 2616 bp, Xanthomonas axonopodis pv. citri str. 306
  CDS (1)..(2616): transl_table=11
gtgccggccacctgttcagaggatcttcccatgcggatggacaagctcacctcgcggttccagcaggcgctggccgacgcgcagtcgttggctgtgggccgcgaccacaacatcatcgagccggtgcacgtgctggccgcgctgctcgaccagagcggcggcagcacccgaccgctgctgtcgcaggccggcgtcaacgtgccgctgctgcgcgagcgcctcggcgaggcgctggacacgctgcccaaggtgtccgggcaggaaggcaatctgtcgatcggcaacgatctcaatcgcctgctcaaccagaccgacaagcttgcccagcaacatggcgacgcgttcatcgccagcgaatggttcgtgctggccgccgccgacgatgccagcccgctgggcgtggcgttgcgcgctgccggcggtgacaagaagaagatcgaagcggccatcgacaagctgcgtggtggcgaaaccgtgcagtcggaaaacgccgaagaacagcgccaggcgctggagaaatacaccatcgatctgaccgcacgcgccgagagcggcaagctcgatccggtgatcggccgcgacgaagaaatccgccgcaccatccaggtgctgcagcgccgcaccaagaacaacccggtgctgatcggcgaaccgggcgtgggcaagaccgccatcgtcgagggcctggcccagcgcatcatcaacggcgaagtgcccgaaggcctgcgcggcaagcgcgtgctgtcgctggacatgggcgcgctgattgccggtgccaagtttcgcggcgagttcgaagaacgcctgaaggcggtgctcagcgacctgtccaagaacgaaggccagatcatcctgttcatcgatgagctgcacaccatggtcggcgccggcaaggccgacggcgcgatggatgccggcaacatgctcaagccggcgctggcgcgcggtgagctgcattgcatcggcgccaccacgctggacgaataccgcaagtacatcgaaaaagatgcggcattggagcgccgcttccagaaagtgttcgtgggcgagccgacggtggaagacaccattgcgatcctgcgtgggctgaaggagcgctacgccgtgcatcacggcgtggagatcaccgacccggccatcgtggccgccgcgacgttgtccaaccgctacatcaccgaccgccagttgccggacaaggccatcgatttgatggacgaagcggcatcgcgcatccgcatggagatcgactccaagccggaggagctcgatcgcctggagcgccgcctgatccagctcaagatccagcgcgagatgctcaagaaggaaaaggacgatgcctcgcggcaacggctggccgatctggaaaccgatatcgacaagctcgagcgcgagttctatgacctcaacgagctgtggaaatccgagaaggctgcgctgcagggcaccaccaaggtcaaggagcagatcgaacacgccaagctggaactggaggccgcgcagcgccgccaggactacgccaagatgagcgagatccagtacggcgtgctgccgcagctggaaaagcagatggcgttggccaacgaagtcgaacaccacgatttcaagctggtgcaggaccgcgtgaccgccgaggaaatcgccgaagtggtgtcgcgctggaccggcattccggtcaacaagatgctcgaaggcgagcgcgacaagctgttgcgcatggaagacgaactgcatcatcgcgtggtcgggcagaacgaggcgatcaaggtggtgtccgatgcggtgcgccgctcgcgcgccggcctgtccgacccgaaccgccccagtggctcgttcctgttcttaggtcccaccggcgtgggtaagaccgagctgtgcaaggcgctggcggatttcctgttcgacagcaccgaagcgatgattcgcatcgacatgagcgagttcatggagaagcattcggtcgcgcgcctgatcggtgcacctcctggctatgtgggttatgaagaaggcggttatctcaccgaggccgtgcgtcgtcgtccgtattcgctgatcctgctggacgaagtggaaaaggcgcatccggatgtcttcaacatcctgctgcaggtgctcgacgatggccgcctgaccgatggccagggccgcaccgtggacttccgcaataccgtcatcgtgatgacctccaacctgggctcgcaccagatccaggagctgtccggcgacgatagcgccgaggcgtacacgcagatgaaggccgcggtgatgggggtggtgcaggcccacttccgcccggagttcatcaaccggctggacgacatcgtggtgttccatccgctggacaaggcgcagatcaagtcgattgcgcgcatccagttgcaaggcctggaaaaacgcctggccgagcgcggcctcaagctggacctggacgatgcggcgctggaggtgctgggcagtgtcggcttcgacccggtgtacggcgcgcgtccgctcaaacgcgcgatccaatcgcaggtggagaacccgctggcgcagcagatcctgtcgggccagtatctcagcggcgatagcgtgcgcgtgcgtgccgacggcggacggctggtgtttaccaaggactga

SEQ ID NO: 33645 - protein, 871 aa, Xanthomonas axonopodis pv. citri str. 306
MPATCSEDLPMRMDKLTSRFQQALADAQSLAVGRDHNIIEPVHVLAALLDQSGGSTRPLLSQAGVNVPLLRERLGEALDTLPKVSGQEGNLSIGNDLNRLLNQTDKLAQQHGDAFIASEWFVLAAADDASPLGVALRAAGGDKKKIEAAIDKLRGGETVQSENAEEQRQALEKYTIDLTARAESGKLDPVIGRDEEIRRTIQVLQRRTKNNPVLIGEPGVGKTAIVEGLAQRIINGEVPEGLRGKRVLSLDMGALIAGAKFRGEFEERLKAVLSDLSKNEGQIILFIDELHTMVGAGKADGAMDAGNMLKPALARGELHCIGATTLDEYRKYIEKDAALERRFQKVFVGEPTVEDTIAILRGLKERYAVHHGVEITDPAIVAAATLSNRYITDRQLPDKAIDLMDEAASRIRMEIDSKPEELDRLERRLIQLKIQREMLKKEKDDASRQRLADLETDIDKLEREFYDLNELWKSEKAALQGTTKVKEQIEHAKLELEAAQRRQDYAKMSEIQYGVLPQLEKQMALANEVEHHDFKLVQDRVTAEEIAEVVSRWTGIPVNKMLEGERDKLLRMEDELHHRVVGQNEAIKVVSDAVRRSRAGLSDPNRPSGSFLFLGPTGVGKTELCKALADFLFDSTEAMIRIDMSEFMEKHSVARLIGAPPGYVGYEEGGYLTEAVRRRPYSLILLDEVEKAHPDVFNILLQVLDDGRLTDGQGRTVDFRNTVIVMTSNLGSHQIQELSGDDSAEAYTQMKAAVMGVVQAHFRPEFINRLDDIVVFHPLDKAQIKSIARIQLQGLEKRLAERGLKLDLDDAALEVLGSVGFDPVYGARPLKRAIQSQVENPLAQQILSGQYLSGDSVRVRADGGRLVFTKD

SEQ ID NO: 33646 - DNA, 2640 bp, Yersinia pestis KIM
  CDS (1)..(2640): transl_table=11
atgacaacgcattcagcacacttattacgtcggttaaatccctattgcgcacaggcactggccggtgccgccaccctgtgtcagacccgcgcccatgctgagatcactgtcgaacactggttgttaaaattgctggagcagggcgaaggcgatattacagtcattgcccggcgttatgagtgggacatggacagcctgtggcagggattactgtcccatctggacaccttgccgcgcacggtacagggcaaacctcagttgtccgccgcgttacagcaactgatcaaaaacgcctggctggatgcctcgttgcaggaaaatgctgatgcggtgcgctcggttcatctaatggcagcgctgattgccacgccgtcattattggtcgccgaggccgcctggccgttgctcagcctgagcaccactcagctacagcgcctgttaccgctgctggacaaccagtccgacgaacgccctgaggtgcagcaggctgcggcactggccgacagcccggtcaatctgaccgatgaggccgcgacggttacctccgccagtggtcagccgcaactgaatgacgcgctgcaagcggcgctggataaattcaccctcgacgtcaccgccaaagcccgtgccaaccagattgacccgatttttggccgcgacagcgaaatccgccagatgatcgacatcctgtcgcgccgccgtaaaaacaacccgattctggtgggtgaaccgggtgtggggaaaaccgcgctggttgaagggctggcactgcggattgccgacggcaacgtaccggacagcctgaaaaccgtcagtgtgcgcacactggatttgggtctgttacaggccggggctggggtgaaaggcgaattcgaacagcgcctgaaaaatgttatcgaggcggtgcaacaatcccccagcccggtgctgctgtttatcgacgaagcccacaccattatcggggccggtaatcaggccggtggtgccgatgcggccaacctgctgaaacctgcactggcgcgtggcgaactgcgcaccatcgccgccacctggtccgaatacaaacagtattttgaacgcgatgccgcactggagcgccgcttccagatggtcaaagtggacgagccggatgatgacaccgcctgcctgatgctgcgtggcctgaaagaacgttacgccacccatcacggcgtgcatattctggacgccgctatcaccgcagcggttaccctgtcgcgccgctttctgaccggtcgccaactgccggacaaagcggtggatcttctcgacaccgcaggtgcgcgcgtgcgcatgagcatcgacaccttgccgactgcgttgatggagattaacgccgaactggccgcactggcgatggagcaacaggccatcgaacaggacttgctcctgctgccgaatgtcagttcaacgcgcttacctgagattgagcaacgccgcgccgcgctggcggttgggcagcacacactcgaacagcaatataaagaagagaagcggttgaccaccctgattattgaggcgcgtcaggacatcgccaacgcagcacatctggtcgcgttgcaggaggaactcgttcagattcagggcaatgcgccgctgttgtcgctggacgttgatgtgcgcactgttgcggctgtgatcgccgactggaccggtgtgccgctgggcagtttactcaaagacgaacaaaccaacttgctgtcactggaaaatcgtctgggtgagcgagtgattgggcaggatgcggcattaggtgcgctggcgcaacggctgcgggccgccaaaaccggcctgacatcagagaatggcccgctgggggtgttcctgctggtcgggccgagtgggatcggcaaaaccgaaaccgcgttggcactggccgacagcctgttcggcggggaaaaatcgctgatcaccatcaacttatcggagtatcaggaagcgcacaccgtctcccagttgaaagggtcgcccccgggttatgtcggttacggacagggcggcgtattaaccgaagcggtacgtaaacggccttacagcgtggtgctgctggatgaagtggaaaaagcccatcgtgatgtgctgaacctgttctatcaggtgtttgaccgggggttcatgcgcgacggtgaagggcgcgaaattgatttccgcaacacggtcattgtgatgaccgccaatctgggcagtgatcatctgatgcagttgctggatgagcaaccggacgcgccggacagcaccctgcatgaactgctgcggccgatcctacgcgaccacttccagcccgcgctgctggcccgcttccagaccttgatttaccgcccgcttcaggtggatgcgctcaaacgcattgtggcgataaaactgaatcaggtggcgcaacgcctgcactgtcactacggcctgagctgccagattgaagacagcctgaccgacacactggtcgccgcctgcctgctgccggacaccggcgcacgcaacatcgacagcctgctcaatcagcagattttaccggtattgagccagcagctgttaagccgcatgagcgagcaacagcgcaccacctcgctgacgctgggctggcatgaagaagatggcatcacgctgacatttgagggcgaataa

SEQ ID NO: 33647 - protein, 879 aa, Yersinia pestis KIM
MTTHSAHLLRRLNPYCAQALAGAATLCQTRAHAEITVEHWLLKLLEQGEGDITVIARRYEWDMDSLWQGLLSHLDTLPRTVQGKPQLSAALQQLIKNAWLDASLQENADAVRSVHLMAALIATPSLLVAEAAWPLLSLSTTQLQRLLPLLDNQSDERPEVQQAAALADSPVNLTDEAATVTSASGQPQLNDALQAALDKFTLDVTAKARANQIDPIFGRDSEIRQMIDILSRRRKNNPILVGEPGVGKTALVEGLALRIADGNVPDSLKTVSVRTLDLGLLQAGAGVKGEFEQRLKNVIEAVQQSPSPVLLFIDEAHTIIGAGNQAGGADAANLLKPALARGELRTIAATWSEYKQYFERDAALERRFQMVKVDEPDDDTACLMLRGLKERYATHHGVHILDAAITAAVTLSRRFLTGRQLPDKAVDLLDTAGARVRMSIDTLPTALMEINAELAALAMEQQAIEQDLLLLPNVSSTRLPEIEQRRAALAVGQHTLEQQYKEEKRLTTLIIEARQDIANAAHLVALQEELVQIQGNAPLLSLDVDVRTVAAVIADWTGVPLGSLLKDEQTNLLSLENRLGERVIGQDAALGALAQRLRAAKTGLTSENGPLGVFLLVGPSGIGKTETALALADSLFGGEKSLITINLSEYQEAHTVSQLKGSPPGYVGYGQGGVLTEAVRKRPYSVVLLDEVEKAHRDVLNLFYQVFDRGFMRDGEGREIDFRNTVIVMTANLGSDHLMQLLDEQPDAPDSTLHELLRPILRDHFQPALLARFQTLIYRPLQVDALKRIVAIKLNQVAQRLHCHYGLSCQIEDSLTDTLVAACLLPDTGARNIDSLLNQQILPVLSQQLLSRMSEQQRTTSLTLGWHEEDGITLTFEGE

SEQ ID NO: 33648 - DNA, 2475 bp, Thermosynechococcus elongatus BP-1
  CDS (1)..(2475): transl_table=11
atgtttgaacgctttacagaaaaagccattaaagtcatcatgctggcacaggaagaggctcgccgcctcggccacaactttgtcggtaccgaacaaattctcctcggactgattggtgaaggtaccggtgtggccgccaaggttctacgttctatgggcgtgaacctcaaggatgcccgcatcgaagtggaaaaaattattggccgtggatctggttttgtcgcggtggagattccctttaccccccgtgccaagcgagtgttagaactctcccttgaagaagctcgtcaactgggtcacaactacattggtactgaacacctcctgctgggactgatccgcgaaggggaaggggtggccgcccgcgtccttgaaaatttgggtgttgatctatcgaaagtgcgcacccaagtcattcggatgctgggtgaaaccgcagaagtgaccgctggcgctagccaaggacgtaccaaaacgccgacgctggacgaatttggtgtcaacctcacccagctggctattgagggcaagctagatcccgtggtgggtcggcaaaaagaaattgagcgggtgattcaaattctgggccgtcgcaccaaaaataaccccgtgctgatcggtgaaccgggggtgggtaaaaccgcgattgctgaaggcctggcccagcgcattgccaacaaagatgttcccgacattcttgaagacaagcgggtggtcaccctcgatatcggcctcttggtggcaggcacgaagtaccggggtgaatttgaagagcggctgaaaaagatcatggatgaaatccgccaagccggtaacgtgatcttggtgattgacgaggtgcacacgttaattggggctggggcggcggagggtgctattgatgcagccaatatcctcaaacccgccctggctcgtggggagttgcagtgcattggtgccactactttggatgagtaccgcaaacacattgagcgggatgccgccttggagcggcgcttccaaccggtgatggtgggtgagccctccgttgaggaaaccattgagatcctctacggcctgcgggaacgctatgagaagcaccacaaactgaaaatttccgatgaagcccttgaggcggcagcgaagctgtccgatcgctacattagcgatcgctatctaccggacaaggccattgacctcattgacgaagcaggctcacgggtgcgcctgattaactcgcaactaccccctgcggccaaggaactggatcgcgaattgcggcaagtgctcaaagaaaaagacgatgccgtgcgggcccaaaactttgacaaagcgggtgaactgcgcgatcgcgagatggaactgaaagcacaaatccgtgccattgcccagcagaaaaaagccgaaatcgccaacggtgaagaggagacccccgtcgtcaccgaagaggacattgcccacattgtcgcctcgtggacgggtgtgcccgttagcaagctcaccgaaagcgagtcggaaaaactgctgcacatggaggagaccttgcaccagcgggtcattggccaagatgaagcggtgaaagcgatctcccgcgccattcgccgtgcccgtgtcggtctcaaaaatcccaatcgtcccattgccagctttatcttctcggggccaaccggtgtcggtaaaaccgagttaacgaaagccttggcggcctacttctttggctcggaagaggcgatgatccgcttggatatgtccgaatacatggagcggcataccgtctccaagctcatcggttcgccccccggctatgttggctacaacgagggcggtcagctcaccgaagccgtgcggcggcgtccctatacggtggtgctcttcgatgaaatcgagaaagctcaccccgatgtctttaacctgctactgcaaatccttgaggatggccgtcttactgactccaagggacgtaccgttgacttcaagaataccctcttgatcatgacctcgaacattggctccaaggtgattgagaagggggcggcgggccttggctttgagtttggcactgaggatgccgccgaatcccaatacaaccgcattcgctccttggtgaatgaggaactgaagcaatacttccgccctgaattcctcaaccgccttgatgagattattgtcttccgtcaattgacgaaggacgaagtcaagcaaattgccgacattctccttaaggaagtgttctcgcgcctcacagaaaaaggcatcaccttggaggtgaccgaacgcttcaaggaacggctcattgatgagggctacaaccccagctatggagcgcggcccctgcggcgggcaattatgcgccttttggaggacaccttggctgaggaaatgctctctggccgcatccgcgaaggcgacactgccctcattgatgtggatgaatccggtcaagtgaagatccaagctcaacctcggcgtgagctattgccccaggcggttgagtag

SEQ ID NO: 33649 - protein, 824 aa, Thermosynechococcus elongatus BP-1
MFERFTEKAIKVIMLAQEEARRLGHNFVGTEQILLGLIGEGTGVAAKVLRSMGVNLKDARIEVEKIIGRGSGFVAVEIPFTPRAKRVLELSLEEARQLGHNYIGTEHLLLGLIREGEGVAARVLENLGVDLSKVRTQVIRMLGETAEVTAGASQGRTKTPTLDEFGVNLTQLAIEGKLDPVVGRQKEIERVIQILGRRTKNNPVLIGEPGVGKTAIAEGLAQRIANKDVPDILEDKRVVTLDIGLLVAGTKYRGEFEERLKKIMDEIRQAGNVILVIDEVHTLIGAGAAEGAIDAANILKPALARGELQCIGATTLDEYRKHIERDAALERRFQPVMVGEPSVEETIEILYGLRERYEKHHKLKISDEALEAAAKLSDRYISDRYLPDKAIDLIDEAGSRVRLINSQLPPAAKELDRELRQVLKEKDDAVRAQNFDKAGELRDREMELKAQIRAIAQQKKAEIANGEEETPVVTEEDIAHIVASWTGVPVSKLTESESEKLLHMEETLHQRVIGQDEAVKAISRAIRRARVGLKNPNRPIASFIFSGPTGVGKTELTKALAAYFFGSEEAMIRLDMSEYMERHTVSKLIGSPPGYVGYNEGGQLTEAVRRRPYTVVLFDEIEKAHPDVFNLLLQILEDGRLTDSKGRTVDFKNTLLIMTSNIGSKVIEKGAAGLGFEFGTEDAAESQYNRIRSLVNEELKQYFRPEFLNRLDEIIVFRQLTKDEVKQIADILLKEVFSRLTEKGITLEVTERFKERLIDEGYNPSYGARPLRRAIMRLLEDTLAEEMLSGRIREGDTALIDVDESGQVKIQAQPRRELLPQAVE

SEQ ID NO: 33650 - DNA, 2637 bp, Pseudomonas putida KT2440
  CDS (1)..(2637): transl_table=11
ttgcgccgtcttccacattccttacgatggggtcgccttgtgaacctgaagtctctgttcgccaagctcaacgaaaccagccgcacggccaccgaaagcgcggcggccctgtgcctgtcggagcaccattacgaggtggaagtggagcacctgctgctgcagttgctcgacaacaacgacagcgacctggcgccgatcctgcgccactaccaggtcgtcgccgaacgcctgcaagcgcagctggtcaccgccctgggcaccttcaagaaaggtaatacccgcaccccggcgctgtcgccgcacattacccgcatgatcgagcaagcctggttgctggcctcgatcgaatacggcgtaggccaggtgcgcagcgctcacctgctgcaggctctgcttgacgatgctgaactgcgtcgcgtggtgatcgcctcggcaccggagctggaaaaaatcaacgccgatgacctgcgcctgaaccttgccgcgctggtggagggtagcgccgagtccaggcaggccagcccgctggccagcccagcggcgccagtgagcacgtcgagcaaggccagcggcaagaccccggcgctggaccagtacacggtcaaccttacccaaagcgcccgcgaaggccgcatcgacccggtgctgggccgtgagttcgaagtacggcagatggtcgacatcctcacccgccgccggcagaacaacccgatcctcacgggcgaagccggggtcggcaaaaccgccgtggtcgaaggcctggcgctgcgcatcgcccagggtgacgtgccggcggtgctcaaggacgttgccctgcacaccctcgacctgggcctgttacaggccggcgccggggtcaagggcgagttcgagaaccgcctcaaggctgtgatcgaagaggtcaagcgcagcctgcacccgatcatcctgttcatcgacgaagcccacaccctgatcggctccggcggccaggccgggcagaacgatgccgccaacctgctcaagccggccctggcccgtggcgagttgcgcaccatcgctgccactacctgggccgaatacaagaagtacttcgagaaggacgccgccctcgcccgccgcttccaggtggtcaaagtggaagagcccgacgaagacaaggccattcacatgctgcgcggcctgctcggcaagatgcgcgagcaccacaaggtggcggtgatggacgaagcgctggtgcaggcggtacgcctgtccaaccgctacatcaccggccgccagctgcccgacaaggcggtcagcgtgctcgacacggcctgcgcgcgcattgccctggcgcaatcttcgctgcccggcgcactggaagactgccgccggcagatcgacaacctgcaggcggaaatcgacgtgctcggccacgaagccggcaaggggcacgaccatgcccgccgcctggaatcgctgcaggctgccctgcaggccgagcagcagcaggaacagcagctcaatgcccagtggcagcaggagctggaactggtcgaacagctcaaggcgctggacgccgccaacgatgccgacgcccagcagctcaataccctgcgtgccgagctggcgcgcgtgcaaggcgaccagccactggtccacgcgctggtcgacagcggcgccatcgcccaggtcatcagtggctggaccggcatcccgctgggcaagatgctgcgtgacgaaatcgataccgtgcagcgcctgccggccctgcttggtgagcgcgtgctgggccaggaccacgccctgcatgagatcggcaagcgcatcaagatttcccgagcgcgcatggaagacccgaacaaaccgattggcgtgttcctgctgctcggccccagcggcgtcggcaagaccgaaaccgccctggccctggccgacaccttgtacggcggcgagcgcaacctgatcaccatcaacatgtccgagtaccaggaagcccacaccgtgtcgagcctcaagggctcgccacccggctatgtcggctacggcgaaggcggcgtactgaccgaggcggtgcgccgcaagccgtacagcgtggtgttgctcgacgaggtggaaaaagcccaccccgacgtgctcgaactgttcttccaggtgttcgacaagggcgtgctggacgatggcgaaggccgcgagatcaacttccgcaacacggtgatcatcctcacctccaacaccggcaccgagcgcatcatgcagacctgcctgaacgccaccgagctgccgacgcccgaggcgatcgtcgaagacctgcgcgaccagctcaaccatgtgttcaagccggccttcctcggtcgcctgagcatcgtgccgttctacccggtgcaggaccagatcctcgagcgcatcgtcgccctcaagctcgaacgcatcgccaagcgcttcgcccgcaaccaccaggccgagctcagctatgaccaggcgctggtcaaggccatcgccgcgcgctgcaccgaggtcgacagcggcgcacgcaacatcgacaacatcctgtcccagaccctgatgcccgaactcgcccagcgcgtgctcgagcgcatggcccaggacgcgccgatccagcaccttgcgatcgagctgggcagcgatggcgatttcgcctatcgcctggcctga

SEQ ID NO: 33651 - protein, 878 aa, Pseudomonas putida KT2440
MRRLPHSLRWGRLVNLKSLFAKLNETSRTATESAAALCLSEHHYEVEVEHLLLQLLDNNDSDLAPILRHYQVVAERLQAQLVTALGTFKKGNTRTPALSPHITRMIEQAWLLASIEYGVGQVRSAHLLQALLDDAELRRVVIASAPELEKINADDLRLNLAALVEGSAESRQASPLASPAAPVSTSSKASGKTPALDQYTVNLTQSAREGRIDPVLGREFEVRQMVDILTRRRQNNPILTGEAGVGKTAVVEGLALRIAQGDVPAVLKDVALHTLDLGLLQAGAGVKGEFENRLKAVIEEVKRSLHPIILFIDEAHTLIGSGGQAGQNDAANLLKPALARGELRTIAATTWAEYKKYFEKDAALARRFQVVKVEEPDEDKAIHMLRGLLGKMREHHKVAVMDEALVQAVRLSNRYITGRQLPDKAVSVLDTACARIALAQSSLPGALEDCRRQIDNLQAEIDVLGHEAGKGHDHARRLESLQAALQAEQQQEQQLNAQWQQELELVEQLKALDAANDADAQQLNTLRAELARVQGDQPLVHALVDSGAIAQVISGWTGIPLGKMLRDEIDTVQRLPALLGERVLGQDHALHEIGKRIKISRARMEDPNKPIGVFLLLGPSGVGKTETALALADTLYGGERNLITINMSEYQEAHTVSSLKGSPPGYVGYGEGGVLTEAVRRKPYSVVLLDEVEKAHPDVLELFFQVFDKGVLDDGEGREINFRNTVIILTSNTGTERIMQTCLNATELPTPEAIVEDLRDQLNHVFKPAFLGRLSIVPFYPVQDQILERIVALKLERIAKRFARNHQAELSYDQALVKAIAARCTEVDSGARNIDNILSQTLMPELAQRVLERMAQDAPIQHLAIELGSDGDFAYRLA

SEQ ID NO: 33652 - DNA, 2823 bp, Pseudomonas putida KT2440
  CDS (1)..(2823): transl_table=11
gtgctgcggcaggctccatctcgtcatctcaatgactcaaggagcgcccgcatggccagcaaacaatgccaggtctgtggccaacccgccacgacacgggtggaggccaaggtcaatggccgccacagcatcatgctgttgtgtgatgatcactaccgccaattggtgcgccagcaaaaacgcaccctttccccactggaagcccttttcggctcgcgcagcggtttgttcgaagagttcatgggcagcgatttgctgcgcatcggagaagactcggcatccgttgccacggatgccgatgaagtggctgaagcgtcgtctggggaacctggccgcgcagcgtccggcacgccacgccgccgcagcagcgggctggccagccgcatcagcgaacactccgaggccctgttgcaggaagccgccaagcgtgccacggagttcggtcggtccgaagtcgacaccgaacacctgctattggcgctggccgacagcgacgtggtgaagaccatcctgagccagttcaagatcaaggttgatgagctcaagcgccagatcgaagccgaagccaagcgcggcgacaagccatttgaaggcgaagtcggcgtgtcgcctcgggtcaaggatgcgctcagtcgcgccttcgtcgcctccaatgagttggggcacgcatacgtaggccccgagcacttcttgatcgggctggccgaagagggcgaagggctggccgccaacttgctgcgccgctatggccttatgccgcaggccctgcgccagtgcgtcagcaaggtggttggcaagggtgcagaggatggtcgcgccgaggcaccgaccgaaacgccggagctcgacaagtactcgcgcgatctcaccaggatggcgcgcgatggcaagctggacccggtcatcgggcgggcacaggaaatcgaaaccaccattgaggtactggcgcggcgcaagaagaacaacccggtgttgatcggcgagcctggcgtgggcaagacggccatcgtcgaggggctggcgcagcgcatggtggccggcgaggtgcccgagacgctgcgcgacaagcgcctggtcgaactgaacatcaattcgttggtggctggcgcgaagtaccgaggcgagttcgaggagcgcgtgcagaaggtgctgaaggaaatcgccgagcatcagggcgagctgattctcttcatcgacgaagtgcacaccatcgtcggggcaggccagggcggtggagaaggcggcttggacgtggccaacgtcttcaagccgatgatggcgcgtggtgagctgaacctgattggcgcgacgacgctcaacgagtaccagaagtacatcgagcaggacgctgcgctggagcggcgtttccaaccggtcgtggtgcccgagccaacggtggcgcagaccatcatgatcctgcgcggcctgcgcgacaccttcgaagcgcaccacaaggtcagcatcaccgaggaggcgatcatcgctgccgccgaactgtccgaccgctacgtcagcgcgcgctttctgccggacaaggccatcgatctgctcgatcaggctgccgcccgcgtcaagttatcggcgacggcgcgtccggttgcggtgcaggaaatggagtcggagttgcaccagttgcgccgcgagcaggactacgcggcttcgcgcaagcaatatgacaatgcggcgcagatcagcaagcgcgtcgaagccacggaggccgaactcaagcagcgggtcgaggagtgggagcgcgagcgcggctcgggcagcaccgaggtcaaggcggaacatgtggcgcaaatcgtctcgcggctaaccggcattccggtcaatgaactgacggtggaggagcgcgagaagctgttgcacctggagcagcggctgcatgagcgcctggtggggcaggacgaggcggtgcgtgcggtggcggacgcggttcggctgtcgcgcgctgggctgcgcgaaggcagcaagcccgttgccacgttcctgttcctgggctccaccggtgtcggcaagaccgagctggccaaggcgctggccgaaaccatctacggcgacgagagcgccctgttgcgtatcgacatgtcagagtatggcgagcgccattccgtggctcggctggtgggcgcgcctccgggttacgttggttatgacgaaggcggccagcttaccgaaaaggtccggcgcaagccctatagcgtgctgctgctcgacgaaatcgagaaggcccacgccgacgtctacaacatcctgctgcaggtgttcgacgacgggcgactgaccgatggcaaggggcgcgtggtggacttcaccaacaccattatcatcgccacgtccaacctgggctccgacattattcagcggcggctgaaggcgcctggagcggctggtgaggagtacgagaagaccaaggtcgaggtgatggaagtgctgcgcgggcactttcgccccgagttcctcaaccgaatcgatgagatcatcgtcttccatgcgctgggcaagcaggagatccgccacattgttggcctgcaacttgagcgcgtagcccgcaatgccgcgagccagggcgtgacgctgacgttcgacgagacactggtcgatcacttggcgcaagtcggctacaagcccgaattcggtgcccgcgagctcaagcgactgatccgcagcgagctggagacggcactggcacgtgaaatgctcggcggcggcattggcaagggtgatcacgcccatgtgcgctgggacgacaaggcggagcgggtcgggttcgaccgccggcaagccgcgccggccaaagagctcgacagtgaaaatgcgtga

SEQ ID NO: 33653 - protein, 940 aa, Pseudomonas putida KT2440
MLRQAPSRHLNDSRSARMASKQCQVCGQPATTRVEAKVNGRHSIMLLCDDHYRQLVRQQKRTLSPLEALFGSRSGLFEEFMGSDLLRIGEDSASVATDADEVAEASSGEPGRAASGTPRRRSSGLASRISEHSEALLQEAAKRATEFGRSEVDTEHLLLALADSDVVKTILSQFKIKVDELKRQIEAEAKRGDKPFEGEVGVSPRVKDALSRAFVASNELGHAYVGPEHFLIGLAEEGEGLAANLLRRYGLMPQALRQCVSKVVGKGAEDGRAEAPTETPELDKYSRDLTRMARDGKLDPVIGRAQEIETTIEVLARRKKNNPVLIGEPGVGKTAIVEGLAQRMVAGEVPETLRDKRLVELNINSLVAGAKYRGEFEERVQKVLKEIAEHQGELILFIDEVHTIVGAGQGGGEGGLDVANVFKPMMARGELNLIGATTLNEYQKYIEQDAALERRFQPVVVPEPTVAQTIMILRGLRDTFEAHHKVSITEEAIIAAAELSDRYVSARFLPDKAIDLLDQAAARVKLSATARPVAVQEMESELHQLRREQDYAASRKQYDNAAQISKRVEATEAELKQRVEEWERERGSGSTEVKAEHVAQIVSRLTGIPVNELTVEEREKLLHLEQRLHERLVGQDEAVRAVADAVRLSRAGLREGSKPVATFLFLGSTGVGKTELAKALAETIYGDESALLRIDMSEYGERHSVARLVGAPPGYVGYDEGGQLTEKVRRKPYSVLLLDEIEKAHADVYNILLQVFDDGRLTDGKGRVVDFTNTIIIATSNLGSDIIQRRLKAPGAAGEEYEKTKVEVMEVLRGHFRPEFLNRIDEIIVFHALGKQEIRHIVGLQLERVARNAASQGVTLTFDETLVDHLAQVGYKPEFGARELKRLIRSELETALAREMLGGGIGKGDHAHVRWDDKAERVGFDRRQAAPAKELDSENA

SEQ ID NO: 33654 - DNA, 2271 bp, Pseudomonas putida KT2440
  CDS (1)..(2271): transl_table=11
atgttaaaccgcgagctcgaagtcaccctcaatcttgccttcaaggaggcccgttcgaagcgtcatgagttcatgaccgtcgagcatctgctgctggcactccttgacaatgaggctgccgcgaccgttctgcgcgcctgtggcgccaatctcgacaagctcaagcatgacctgcaagagttcatcgactccaccacgccgttgatccctgtcaacgacgaagaccgtgaaacccagccgaccctgggcttccagcgcgtgctgcagcgtgccgtgttccacgtgcaaagctctggcaagcgcgaagtgaccggcgccaacgtgctggtggcgatcttcagcgaacaggaaagccaggccgtgttcctgctcaagcagcagagcgtggcccgtatcgacgtggtcaactacatcgcccatggcatctccaaggtgccagggcatggtgcacagtctgaaagcgagcaggacatgcaggacgatgaggggggcgaaacctcctcttcgagcaacccgctggacgcctacgccagcaacctgaacgagctggcccgtgccggccgtatcgatccgctggtaggtcgcgagcaggaagtggagcgtgtggcgcaaatcctcgctcgtcggcgcaagaacaacccgctgttggtgggtgaggcaggcgtgggcaagacggccatcgccgaaggcctggccaaacgcatcgtcgatggtcaggtgcctgacctgctggcgcagagcgtggtgtactcccttgatctgggcgccttgctggccggtaccaaataccgtggtgacttcgagaagcgcttcaaggcgctgctcggtgagctgcgcaagcgtccgcaggccatcctgttcatcgacgaaattcacaccatcatcggcgccggtgcggcgtcgggcggggtgatggatgcctccaacctgctcaagccgctgctgtcgtcgggtgaaatccgctgcatcggttcgactacgttccaggagtttcgcggcatcttcgagaaggatcgtgccctggcgcgtcgcttccagaaggtggatgtcagcgagccatcggtcgaagacaccgtgggcattctgcgcggcctgaaagggcgtttcgaaagccaccacaacatcgagtacagcgacgaagccctgcgcgccgctgccgaactggcttcgcgctacatcaatgaccgacacatgcctgacaaggccatcgatgtgatcgacgaggctggcgcctaccagcgcctgcagccagaggccagtcgcgtcaagcgcattgatgtgccgcaagtagaggacatcgtcgccaagattgcgcgaattccgccgaagcacgtcaccagttccgacaaggagctgctgcgcaaccttgagcgcgacctgaaactgaccgtgtttggccaggaccaggcaatcgactcgctggccaccgcgatcaagttgtcccgtgccggcctcaagtcgccagacaagccggtgggttcgttcctgttcgccggccctaccggcgtcggcaagaccgaagcggcgcggcaattggccaaggcgctgggtgtggagttggtgcgtttcgacatgtctgagtacatggagcgccacaccgtgtcgcgtttgattggtgcgccgccgggttatgtcggtttcgaccagggtggcttgttgaccgaggcaatcaccaaacagccgcactgcgtattgttgctcgacgaaatcgagaaggcccacccggaagtcttcaatctgctgctgcaggtgatggaccacggtaccctgaccgacaacaacgggcgcaaggccgacttccgtaacgtgatcctgatcatgaccaccaacgccggtgcagaaactgcggcgcgggcgtcgatcggctttactcatcaggaccacgcgtccgatgccatggaagtgatccgcaagagcttcacgccagagttccgcaaccgtctggataccatcatccagtttggccgcctgagcacggagaccatcaaaagcatcgtcgacaagttccttatcgaattgcaggcgcagctggaagacaagcgtgtgctgctggaagtcagcgatgaagcacgcggttggctggcggtttcgggctatgacgtgcagatgggcgcgcggccaatggcgcggctgatccaggacaagatcaagcggccgctggccgaggagatcctgtttggcgagctggccgagcatggtggcgtggtgcatgtcgacctgcgcgatggcgaactggtgttcgacttcgaaaccacggctgaggtcgcgtga

SEQ ID NO: 33655 - protein, 756 aa, Pseudomonas putida KT2440
MLNRELEVTLNLAFKEARSKRHEFMTVEHLLLALLDNEAAATVLRACGANLDKLKHDLQEFIDSTTPLIPVNDEDRETQPTLGFQRVLQRAVFHVQSSGKREVTGANVLVAIFSEQESQAVFLLKQQSVARIDVVNYIAHGISKVPGHGAQSESEQDMQDDEGGETSSSSNPLDAYASNLNELARAGRIDPLVGREQEVERVAQILARRRKNNPLLVGEAGVGKTAIAEGLAKRIVDGQVPDLLAQSVVYSLDLGALLAGTKYRGDFEKRFKALLGELRKRPQAILFIDEIHTIIGAGAASGGVMDASNLLKPLLSSGEIRCIGSTTFQEFRGIFEKDRALARRFQKVDVSEPSVEDTVGILRGLKGRFESHHNIEYSDEALRAAAELASRYINDRHMPDKAIDVIDEAGAYQRLQPEASRVKRIDVPQVEDIVAKIARIPPKHVTSSDKELLRNLERDLKLTVFGQDQAIDSLATAIKLSRAGLKSPDKPVGSFLFAGPTGVGKTEAARQLAKALGVELVRFDMSEYMERHTVSRLIGAPPGYVGFDQGGLLTEAITKQPHCVLLLDEIEKAHPEVFNLLLQVMDHGTLTDNNGRKADFRNVILIMTTNAGAETAARASIGFTHQDHASDAMEVIRKSFTPEFRNRLDTIIQFGRLSTETIKSIVDKFLIELQAQLEDKRVLLEVSDEARGWLAVSGYDVQMGARPMARLIQDKIKRPLAEEILFGELAEHGGVVHVDLRDGELVFDFETTAEVA

SEQ ID NO: 33656 - DNA, 2673 bp, Vibrio parahaemolyticus RIMD 2210633
  CDS (1)..(2673): transl_table=11
atgataaatataaacctttcttcattaattcagcgtctacacccgatagctaaagtagcattagaagatgccgcagcactcgcagtctcggaaaaagcaaacgaagttcaaattgagcattatttactgagtctattagaaaggccaaatagtgattttgacgtcttattaagtcattttgattgttctgagaacttattgagacaatcggttcgatccacactcgataccaacgccaaaggaaatggcagcaaacctgttttttctgctttattaatcgaatggttacaagaaagctggctggtttcttctttagatctatccgaaacacaaatccgctctggcgccctactccttactcttgttagcaaccctctgcgttatggccaacatggttacgcctctattcttgaagcagtaaaccctgatagccttaaacgtaactttgcagaactaacaagccactctattgaggcgcaagtcgcgacttcagagaaaacacaagctcgtgaagatggttcagcactgagcaagttcacgacagacttcactggtaaagcacgcaaaggcgaaatcgatcctgttttctgccgtgaccaagaaatccgccaaattgtagacattcttgctcgtcgccgtaaaaacaaccctattgccgttggtgagccgggcgttggtaaaaccgcagtagtagaaggcttggcacttaagattgtacaaggtgacgtaccagacaaccttaaaggtgttgagctttacggcttggacatgggtcttctgcaagctggcgcaagcgtaaaaggcgaattcgaaaaacgcctaaatgcagtattggatgaagtgaaaaactcgccaacaccgatcatcttgttcatcgatgaagcgcacacccttgttggcggcggcaaccaagcgggcggtagcgatgctgctaacttattaaaacctgccctagcacgtggtgaagtaaagacaatcgcagcaacaacatggtcggaatacaaaaagtactttgagaaagatccagctcttgcgcgtcgtttccaactggtgaaactcgacgaaccgtctcctgagcaagcagcattgatcattcgtggtctgcgcccggcgtacgagaaatctcacaatgtttacgtacgtgacgacgctatcaccgcagcggcagcgctttctgctcgatacatctctggtcgccaactgccagacaaagcgatcgatgtactagatacggcatgtgcacgagtgaacatcagccttaatgccattcctgcttctgttgagactcttcagcaagaacttgcagctcaacagcgcgagcttgaagcgcttgagcgtgatgctctgcagcaaactggcgacaagcacagccttgctaacattccagacctaaaattggcaatggaaacgacaaaagaagagctagcagaacaagaagtgcaatggcacaaagaaaaagagcagatccaagagatgattgctctacgctctcgcttacatgaactggtctttggcaaagtaaatgaagaagagcttgttgtagacgaagattcagaacaagacgtttctccatatacagaaatggatgaagaagcggtccgcattgcgatttcagcatgccaagaacagttagacgcaatccgcaatggcaacccattagttcactttgaagttgggccagatgaagtcagccacgttatctcagactggactggcattccaatgggtaagatgcttcaagacgaagcagaaaccacgctaaaactgaaagaaagcctaacacaaagcatcaaaggccaagaatacgctatcgatgcactgtctgaaggcattcaaaccgcaaaagctggcttgggtaatccagacgcaccgacaggcgtattcctgctagttggcccaagtggcgtgggtaaaaccgaaactgctcgtgcgatcgctgatcaaatgtttggtggtgagcgctttatgacgaccattaacatgtctgagttccaagagaagcacacggtatctcgcctaatcggttcgcctcctggttacgtaggttacggtgaaggcggcatgctgacagaagcggtacgtcagcgtccatattctgttgtacttcttgatgaagtagaaaaagccgatccagaagtgttgaacctgttctaccaagtgttcgacaaaggtacgctgaacgacggcgaaggccgcaccatcgacttcaagaacacgctgatcatcatgaccagcaaccttgcgacgcacgaaattgaatctctggttcaccagtctaaagaaattgatgctaacatcatcgcagaagccatccgccctactttgaaccaacacttcaagccggcgctgttggcacgtatgtccgtacttccgtttgtgcctctgtctgacgaagcaatgacagaaattatccaccacaaactaaacaaagtttctcagcgcctacatagccatcacaagttgtccctgagctacgaagaaagcttggtcgagttcgtactaggtaactgtcgccttgctgaaacaggcgcacgtaacattgacgcggtcatcaaccgtcagttactacctcagctatcgacacagctattggtgcatgataaggatgattcacacacgcaaatcacagtttctgtcgatgagcaaggaacactgacctatgcgttcagctaa

SEQ ID NO: 33657 - protein, 890 aa, Vibrio parahaemolyticus RIMD 2210633
MININLSSLIQRLHPIAKVALEDAAALAVSEKANEVQIEHYLLSLLERPNSDFDVLLSHFDCSENLLRQSVRSTLDTNAKGNGSKPVFSALLIEWLQESWLVSSLDLSETQIRSGALLLTLVSNPLRYGQHGYASILEAVNPDSLKRNFAELTSHSIEAQVATSEKTQAREDGSALSKFTTDFTGKARKGEIDPVFCRDQEIRQIVDILARRRKNNPIAVGEPGVGKTAVVEGLALKIVQGDVPDNLKGVELYGLDMGLLQAGASVKGEFEKRLNAVLDEVKNSPTPIILFIDEAHTLVGGGNQAGGSDAANLLKPALARGEVKTIAATTWSEYKKYFEKDPALARRFQLVKLDEPSPEQAALIIRGLRPAYEKSHNVYVRDDAITAAAALSARYISGRQLPDKAIDVLDTACARVNISLNAIPASVETLQQELAAQQRELEALERDALQQTGDKHSLANIPDLKLAMETTKEELAEQEVQWHKEKEQIQEMIALRSRLHELVFGKVNEEELVVDEDSEQDVSPYTEMDEEAVRIAISACQEQLDAIRNGNPLVHFEVGPDEVSHVISDWTGIPMGKMLQDEAETTLKLKESLTQSIKGQEYAIDALSEGIQTAKAGLGNPDAPTGVFLLVGPSGVGKTETARAIADQMFGGERFMTTINMSEFQEKHTVSRLIGSPPGYVGYGEGGMLTEAVRQRPYSVVLLDEVEKADPEVLNLFYQVFDKGTLNDGEGRTIDFKNTLIIMTSNLATHEIESLVHQSKEIDANIIAEAIRPTLNQHFKPALLARMSVLPFVPLSDEAMTEIIHHKLNKVSQRLHSHHKLSLSYEESLVEFVLGNCRLAETGARNIDAVINRQLLPQLSTQLLVHDKDDSHTQITVSVDEQGTLTYAFS

SEQ ID NO: 33658 - DNA, 2628 bp, Chromobacterium violaceum ATCC 12472
  CDS (1)..(2628): transl_table=11
ctgaaatccctgatagaccggttgacgcccaccgcgcgccaggccatcgagcaggccgccagccgcgcgctggcccgcacccacttcgagatcgagatcgagcatgtgctgctggcgatgttcgatcaggacgacaatgccgcgctggcggcgctgcgcgcgctgggcgcggacctgggccgcgtcgagcgcgagctggacgccgcgctggacaacttccgcagcggcaatacccgcaatccggtgctgtcgtcgtggctgcccaagtggctggaaaaggcctggctgctggccagcgccgagcacggccaggacagtgtctccacgttggacttgctgctggcgctgtggcaggacgacgccctgcgcggcgcgctgcagtccggcgcgccggcattggcgcgccaggatgccggcaggctgtccggcgcctacgccgcgctgcgccagcacggcggcgaggcggcgggcggcgagcagccgtcggccgcggcagacgagggcgaaggcgaggcgccggccgcgccgcagggcaagcgcggcggcgccgcgctggacaagtacacgatagacctgaccgcgcaggccaaggccggcaagatcgaccccatcctgggccgcgatgtcgaaatccgccagatgatagacatcctgatgcgccgccggcagaacaatcccatcctcaccggcgagccgggcgtgggcaagaccgcggtggtggaaggcttggcgcgcaagatcgtgctgggcgaggtgccgccggtgctgtccggcgtcacgctgcgcacgctggacctgggcctgctgcaggccggcgccagcgtcaagggcgagttcgagaaccgcctgcgccaggtgatagacgaggtcaaggccagcccggtgcccatcatcctgttcatcgacgaggcgcacaccctgatcggcgccggcggcgcggccggccagaacgacgcggccaacctgctgaaaccggcgctggcgcgcggcgagctgcgcaccatcgcggcgacgacctgggccgagtacaagaagtatttcgagaaggacgccgcgctggcgcgccgcttccaggtggtgaaggtcgaagagccggcgccggaaatcgccgtgcagatggtgcgcggcctgaccgacgcgatggccaagcaccacaaggtggaaatcctcaacgaggcggtggccgccgcagtgcagctgtccagccgctacatcgccggccgccagctgccggacaaggcgatcagcgtgctcgacaccgcttgcgcccgcgtcgcgctgtcgcgcgccggcaagccggggccgatcgaggacgtgacggtgctgatagacaacatcgaccgcgaaaccgccgcgctggagcgcgaggaaggccacgccgagcgcatcgccgagctgcaggcgcagcgcgccaagctggagcaggatctggccgcgctgcatcaggcctgggaggcgcagcagaagctgatcgaagagatagacgagctgaaggcggccaaggacgaggccaagccggccaagggcaggaagctcagcccgctgcaggccaagcgcaaggaattgcgcgagttgcagaagcatcagccgctggcgttcgaatgcgtggacgagagcgtgatcgccgacgtgatcgccggctggaccggcatcccgctgggccgcatggtcagcaacgagctggagcaggtgcagaagctggccaagctgctggccgagcgcgtgatcggccaggaccacgcgttggagcagatcgccgagcgggtgcagatcgccaaggccaatctggaagatcccggcaagcccaagggcgtattcctgctggtgggcccgtccggcgtcggcaagaccgagaccgcgctggcgctggccgaggcgctgtacggcggcgagcgcaatctgatcaccatcaacatgtccgaataccaggaagcgcacagcgtgtccggcctgaagggctcgcccccgggttatgtcggctacggcgagggcggcgtgctgaccgaggcggtgcgccgcaagccgtactccgtcgtgctgctggatgaagtggagaaggcgcacccggacgtgctggagctgttctttcaggtattcgacaagggcgtgctggaggatagcgaaggccgcgaggtggacttcaagaacaccatcatcctgctgacgtccaacgccggcaccgatctggtgatgcgcgcctgcgagcacggcgtgacggtggaggacgagacccgcgacccgaccgcggaagacctggtggaaatcctgcgcccgacgctgcagaagaccttcaagccggctttcctcggccgcctgaccatcgtgccttacttcccgatcagcgacgacgtgctgcgcgccatcgtcggcctgaagctggacaagatccgccgccgcatcgccgacaaccacggcgcccaggtcgagttcccggaagaactggccgatcagatggccgcgcgctgcctggacgtggacagcggcgcgcgcaacgccgacgccatcctcacccgcacgctgctggcgcagatctccaacgacctgctgtcgcgtatggccagcggcaaaccggtgaagaagatcgccgtcgcgctgaagggcgagcaggtcaaggtgaaggtgagttaa

SEQ ID NO: 33659 - protein, 875 aa, Chromobacterium violaceum ATCC 12472
MKSLIDRLTPTARQAIEQAASRALARTHFEIEIEHVLLAMFDQDDNAALAALRALGADLGRVERELDAALDNFRSGNTRNPVLSSWLPKWLEKAWLLASAEHGQDSVSTLDLLLALWQDDALRGALQSGAPALARQDAGRLSGAYAALRQHGGEAAGGEQPSAAADEGEGEAPAAPQGKRGGAALDKYTIDLTAQAKAGKIDPILGRDVEIRQMIDILMRRRQNNPILTGEPGVGKTAVVEGLARKIVLGEVPPVLSGVTLRTLDLGLLQAGASVKGEFENRLRQVIDEVKASPVPIILFIDEAHTLIGAGGAAGQNDAANLLKPALARGELRTIAATTWAEYKKYFEKDAALARRFQVVKVEEPAPEIAVQMVRGLTDAMAKHHKVEILNEAVAAAVQLSSRYIAGRQLPDKAISVLDTACARVALSRAGKPGPIEDVTVLIDNIDRETAALEREEGHAERIAELQAQRAKLEQDLAALHQAWEAQQKLIEEIDELKAAKDEAKPAKGRKLSPLQAKRKELRELQKHQPLAFECVDESVIADVIAGWTGIPLGRMVSNELEQVQKLAKLLAERVIGQDHALEQIAERVQIAKANLEDPGKPKGVFLLVGPSGVGKTETALALAEALYGGERNLITINMSEYQEAHSVSGLKGSPPGYVGYGEGGVLTEAVRRKPYSVVLLDEVEKAHPDVLELFFQVFDKGVLEDSEGREVDFKNTIILLTSNAGTDLVMRACEHGVTVEDETRDPTAEDLVEILRPTLQKTFKPAFLGRLTIVPYFPISDDVLRAIVGLKLDKIRRRIADNHGAQVEFPEELADQMAARCLDVDSGARNADAILTRTLLAQISNDLLSRMASGKPVKKIAVALKGEQVKVKVS

SEQ ID NO: 33660 - DNA, 2682 bp, Photorhabdus luminescens subsp. laumondii TTO1
  CDS (1)..(2682): transl_table=11
atggataccgtatgtaccgcactattgtgccgcttaaattcttattgcgcacgggcattggaagctgctgctgcattttgccagacacgggcacatgctgaaatcacggtggaacactggttgctcaagctgcttgagggtggtgaaggcgatattacggtgattgctcgacgttatgcgtgggatatggatgcgttatggcagtcgttgctgactacaattaaccgtttaccacatagcatcaaccaacgcccgcggttatcaagcgatctgtgtagtttgttacaggttgcttggtgtattgcttctctggaagagggtaacgaatctatccgttcggtgcatcttttgcaggtgttgcgcggccaaccggcttggttgcgtattcatcatagctggccgttactcaacttgagtgtgacgcaactacaatgtttgcgcccgttgctggatcaacaatcggatgagcgcccggagatacagatagcggcgtgtctgacggcggatggatcaatcgctgaaattgcgggtagcgacccagataaatatgcgcttaatccccaaccattatcatcggctttgcagaacgtattggacaaattcacgctggatatcacagccagagccgctgagggtggcattgatccggtatttggtcgtgaccgcgaaatccgccagatgatcgacatcctatcgcgtcggcgtaaaaacaacccaattctggtgggggaaccgggggtagggaaaaccgcgctggtggaaggattggcactgcgtattattgagggcaatgttcctgacagcctaaaaaccgtcagcgtgcggatgctggatctcggcttgttgcaggcaggcgcgggggtaaaaggcgaatttgagcagcgattgaaaaacgtcattgaagcggtgcaacagtcacctgcccccattctgctatttattgatgaagcgcacacactgattggcaccggtaatcaggcagggggcgctgatgcggctaacttgctaaaacctgcgctggcacggggagaattacgcacgattgccgctactacttggtcggaatacaaacagtattttgagcgggatgcggcactggagcgacgcttccagacgatcaaagtcgatgaaccggatgatgagacagcttgcctgatgctgcgtggactgaaagcgcgttacgcccgttatcacggtgtacatattcaggaagatgcggtgaaagccgctgtcactttatctcgtcgttacctgactggccgacagcttccagataaagcggtagacctgttggataccgccagtgcgcgagtcaggatgagcctggatacggtaccggaggcgttgacgcaactccagtcccaattgaccgcacttgagatagagcaacaggcgatactggaagatattgcactggggcaatgccatcactcagaccgtttgacacaaattgaaatgcaacgtcatgaactgtatcggcaacaacaacagcgggataaacagtatcaacaggaaaaacagctcacgcaacagttgctcgatgcccggcaggatatcagtcggcagggtgatatagcccggttgcaacagcaactggcgacacgacagcaagggcagccgttactctcgtcggatgttgatgtgcgttctgtagcaacggtgattgctgattggaccggtgttccactgagtagcttgttgaaagacgaacagaccggtttgctgcatttagaacagcatttaggggaacgggttgttggtcaggaggcggcgctacgggaaatcgcccaacgtttacgtgctgctaaaacaggattgacgccggaacaggggccattgggcgtattcctgttggttgggccgagtggcgtagggaaaaccgaaaccgcgctggcattggcggataacctgtttggtggagcgcgttcgctgatcactatcaacctatcggaatatcaggaaccgcatacggtatctcagcttaaaggttcaccgcccggttatgtcggatatggtcagggggggatcttaacggaagcggtacgtaaacgcccgtatagtgtggtgctgttggatgaagtggaaaaagcccatcgtgacgtcattaacctgttctatcaggtatttgatcgcggctttatgcgcgacggcgaagggcgcgagatcgattttcgtcataccgtaatcttaatgacctctaatctgggcagtgatcaactgatggcgttattggcacaacaacctgatgccccgaacgccgtattgcatgagctgttacatccgatgcttcgtgatcacttccagccagctctgttggctcgctttcagaccgtgatttaccgcccgttacaggctggtgcactcagacgcattgttgaaatcaaactggaacaagtgactcggcgtcttcatagccattatggcctgacttgcacggtggaaagcagcctgtgcgacatcttagtgaatgcttgtctgttgccggacagtggagcacgcaatatcgacagcctgcttaaccagcaaattttaccggtgttatcacaggcactgctggaacgtctggcccatcacaataaacctgctggcgtgacgttgggcttcgacgaagaagagggtatcacccttgcttttaccgatgctgaaccggtcgcttcattggatagcgaggaaaacccatga

SEQ ID NO: 33661 - protein, 893 aa, Photorhabdus luminescens subsp. laumondii TTO1
MDTVCTALLCRLNSYCARALEAAAAFCQTRAHAEITVEHWLLKLLEGGEGDITVIARRYAWDMDALWQSLLTTINRLPHSINQRPRLSSDLCSLLQVAWCIASLEEGNESIRSVHLLQVLRGQPAWLRIHHSWPLLNLSVTQLQCLRPLLDQQSDERPEIQIAACLTADGSIAEIAGSDPDKYALNPQPLSSALQNVLDKFTLDITARAAEGGIDPVFGRDREIRQMIDILSRRRKNNPILVGEPGVGKTALVEGLALRIIEGNVPDSLKTVSVRMLDLGLLQAGAGVKGEFEQRLKNVIEAVQQSPAPILLFIDEAHTLIGTGNQAGGADAANLLKPALARGELRTIAATTWSEYKQYFERDAALERRFQTIKVDEPDDETACLMLRGLKARYARYHGVHIQEDAVKAAVTLSRRYLTGRQLPDKAVDLLDTASARVRMSLDTVPEALTQLQSQLTALEIEQQAILEDIALGQCHHSDRLTQIEMQRHELYRQQQQRDKQYQQEKQLTQQLLDARQDISRQGDIARLQQQLATRQQGQPLLSSDVDVRSVATVIADWTGVPLSSLLKDEQTGLLHLEQHLGERVVGQEAALREIAQRLRAAKTGLTPEQGPLGVFLLVGPSGVGKTETALALADNLFGGARSLITINLSEYQEPHTVSQLKGSPPGYVGYGQGGILTEAVRKRPYSVVLLDEVEKAHRDVINLFYQVFDRGFMRDGEGREIDFRHTVILMTSNLGSDQLMALLAQQPDAPNAVLHELLHPMLRDHFQPALLARFQTVIYRPLQAGALRRIVEIKLEQVTRRLHSHYGLTCTVESSLCDILVNACLLPDSGARNIDSLLNQQILPVLSQALLERLAHHNKPAGVTLGFDEEEGITLAFTDAEPVASLDSEENP

SEQ ID NO: 33662 - DNA, 2421 bp, Magnaporthe grisea 70-15
  CDS (1)..(2421)
atgctattacgtagccaaattcacacttcatcacgccgcctcgcaggagttacatcccaaccacttctccgaggtcaatcgttaccaagagtagcggggctcagtgctcggctgccttcaccatcaaagaatgccattacattaactcactccggtgctcgccctcggcagttactacccattacaaccgttaggcattatgccaatggtcgaccgcatcctccaggcggcacccaccgcatgaacatgagcggcggggaggaggaaaagccggccctggaacagtacggcatagacctcaccgccaaggcgaaggagggaaagctggatcccgtcataggccgcgatggcgagatccaaaggactatccaagtgctgtctcgcaggaccaagaacaacccggtcttgatcggaaatgcaggaaccggaaagacggctatcctggagggcttggctctgcggattgttcggggtgatgtgccggagagtatcaaaaataagcgtgtcatcagtctggatctgggctcgcttatcgccggtgccaaattcaggggtgactttgaggaacgcttgaaaaaggtgctcacagaggttgagcaagccaacggacaggtcattctctttatcgacgagctccacacgttgcttgggctgggcaaggcagaagggtccatcgatgcctcaaatttgctgaagcctgctttgtctcgcggcgagctccaatgctgcggagccacaacgctgaacgagtaccgactcatcgaaaaggacgttgcactggctcgccgtttccagccaattctcgtcaacgagcctaccgtagaggataccatcagcattctgcgcggtattaaggacaagtacgaggttcaccatggagttcgaattactgatggtgccctcgttgcagctgctgcctactcgaaccgctatatcactgaccggttcctaccagacaaggccattgatcttatggacgaggcagccagctcgctcaggctgcaacaggaaagcaaaccggaggacataatgcgtctggatcaaaagatcatgaccattcaaatcgagctcgaatcactgcgcaaagagaaggatgtggccagccgcgaacgtcgcgagaaactggaatccgatctcaaaaagctgcaagatgaggtgaaggagctcaacgacaagtgggacaaggagcgctctgaaatcgatgccataaaacagacgcaggccgaacttgaccgggcacgcatcgaactcgaggtcgcccagcgtgagggcaacttcggtcgtgcctcggagctccgcttcggcgtcataccctcacttgaggccaagctgcctaaggaaggcgaggaagccaaaagcgatggcagcctcctccacgactccgtaactgccgatgatatcgccaacgtcgtctcccgcatcacgggcatccccgtctccaagctgacgtctggccacatcgagaaactggtgcacatggaggagacactccgagaggctgttcgcggtcaggacgaggccctacacgccgtcgccgacgcagtccgtctgcagcgtgcaggactcagcggggagaaccgccccacggcatccttcttcttccttggccctactggtgtcggtaagacggaactttgcaagaagcttgccgggttcctgttctcgacggaatcggccgtcgtccgcttcgacatgagcgagttccaggagaaacacaccatcagccgtctcatcggagctccgtcaggctacgttggctacgaggacgcaggccagctgaccgaggctgtgcgccgcaagccctacgccgtgctgctgtttgacgagtttgaaaaggcgcaccgcgacatctcggcgcttctgctgcaggtcctcgacgaagggttcctgactgacgcgcagggccacaaggtcgacttccgcaacaccataatcgtcttcacgtcgaacctgggcgccgacatactcgtcggtgccaacccggccgttccctacaaagaactcgccgatggcgccatcagcccagaggtcaagacggccgtcatggacgtggtgcagtcgcgatacccgcccgagttcctcaaccgcatcgacagcttcatcgtcttcaagcgcctctccctcgaggccctgcgtgacattgtcgacatcagactgaaagagttgcagggccgcctgactgataggcgcatcacgctcgaggcctcgggcgaggtaagggactggctcgccgagaagggctacgaccccaagtacggcgcaaggccgctcaacaggctcatcacggtcgagatcgccaacagcctcgcggataggatcatcaggggtgagctcaagagtggcgataccgcgctcgtgaggattaccgaggacaagagcgccttggaagtcgtcaagggggaggagaaggcggctcagtga

SEQ ID NO: 33663 - protein, 806 aa, Magnaporthe grisea 70-15
MLLRSQIHTSSRRLAGVTSQPLLRGQSLPRVAGLSARLPSPSKNAITLTHSGARPRQLLPITTVRHYANGRPHPPGGTHRMNMSGGEEEKPALEQYGIDLTAKAKEGKLDPVIGRDGEIQRTIQVLSRRTKNNPVLIGNAGTGKTAILEGLALRIVRGDVPESIKNKRVISLDLGSLIAGAKFRGDFEERLKKVLTEVEQANGQVILFIDELHTLLGLGKAEGSIDASNLLKPALSRGELQCCGATTLNEYRLIEKDVALARRFQPILVNEPTVEDTISILRGIKDKYEVHHGVRITDGALVAAAAYSNRYITDRFLPDKAIDLMDEAASSLRLQQESKPEDIMRLDQKIMTIQIELESLRKEKDVASRERREKLESDLKKLQDEVKELNDKWDKERSEIDAIKQTQAELDRARIELEVAQREGNFGRASELRFGVIPSLEAKLPKEGEEAKSDGSLLHDSVTADDIANVVSRITGIPVSKLTSGHIEKLVHMEETLREAVRGQDEALHAVADAVRLQRAGLSGENRPTASFFFLGPTGVGKTELCKKLAGFLFSTESAVVRFDMSEFQEKHTISRLIGAPSGYVGYEDAGQLTEAVRRKPYAVLLFDEFEKAHRDISALLLQVLDEGFLTDAQGHKVDFRNTIIVFTSNLGADILVGANPAVPYKELADGAISPEVKTAVMDVVQSRYPPEFLNRIDSFIVFKRLSLEALRDIVDIRLKELQGRLTDRRITLEASGEVRDWLAEKGYDPKYGARPLNRLITVEIANSLADRIIRGELKSGDTALVRITEDKSALEVVKGEEKAAQ

SEQ ID NO: 33664 - DNA, 2781 bp, Magnaporthe grisea 70-15
  CDS (1)..(2781)
atgaattcaaaaatggaattcacagatagggccaagaaggccatggaggacgccatggacctggcagaacaacacgcccactcccagcttctacccgtccaccttgcagtttctctcctggaccctcccccggatttgtccaaggaccagcagaaccctacacctggtgcttcacacactctcctgaggcaggtcgttgagcgagcccaaggtgaccctcagcttctcgacagggcgctgaaaaagaccctggttcggcttcccagccaagacccgcccccagagaatgtcaccatgtctccatcgttcaacaaccttatccgcaaggctatggaactgcagaaggtccagaaagactcattcattgcagtggaccacttgatttcagccttggccgaagacgttagcttccaaaattgtctcaaggaggccaatgttcccaaacacaagctcattcaggatgctgtccagaccatccgtggtaccaagagggtggattccaagacggcagacactgaggaagagcacgagaacctctcgaaattcaccattgacatgacggctatggcacgggaagggaaaatcgacccggtcatcggacgtgaggaggaaatccgcagggttgttcgaatcctctcgaggagaaccaagaacaaccccgtgctcatcggtgagcctggtgtaggaaagaccaccgtcgtcgagggtcttgcccaacgaatcgtcaatgccgacgtaccggacaacctggctgcctgcaagctcctttcattggacgtcggtgccttggtcgccgggagcaagtaccgtggagagttcgaggagagaatgaagggcgtcttgaaagaaatcgaggaggccaaggagatgattgtgctcttcgttgacgaaatccacttgctcatgggggctggctcctctggtgagggtggcatggatgctgccaatctcttgaagcccatgcttgctcgtggccagctgcactgtattggcgccacaaccctggctgagtaccgcaaatacatcgagaaggatgccgccttcgagcgtcgtttccagcaggttcttgtcaaggagcccacaatcaacgagaccatttctattctccgaggtctcaaggagaaatacgaggttcaccatggtgtgaccatcgcagacagcgccctggttgcttcagcgaaccttgcggcacgctacctcacaactcggcgcatgcctgactctgctgtggacctgatcgacgaggcagctgcggctgtgcgtgttgctcgtgaatctcaaccggaaataatcgattctcttgagcgcaagctacgacaactgaagatcgagattcacgcgctctcccgcgaaaaggacgaggcatctaagggtcggcttgctcttgcgaagcaggaggcgcaaaacgtggaggaggagctcaggcctcttcgcgaaaagtacgagagtgagaggaagcgtggcaaagatatccaggaggcgaagatgaagcttgaccagctcaaagtcaagatggaggatgctagcagaatgggcgatcatgcacgtgccgcagacctccagtactatgccatccctgagcaagaaaacgtcatcaagcagctcgagaaggacaaggctgctgccgatgctgctatcagcgctcaggcccagaccgatcacggtggttcaatgatcaccgatgttgttggacctgatcagatcaacgaaattgtgtcgagatggactggaatccccgtcacccgactcaagacatccgagaaagagaagcttatccagatggagaaggctctcggcaaactcgtcgtcggtcagaaggaggcggtgcaatcggtttcgaacgccatccgtctgcaacgctctggacttagcaacccgaaccagccaccgagcttcctattttgcggtccatcaggtactggtaagacgctgcttaccaaggcgcttgccgagttcctcttcgacgactcgaaggccatgatcaggctcgacatgtcggaataccaggagagacattcactcagccgcatgattggagctccgccaggatatgtcggtcatgacgcgggtggtcaactgactgaagcgcttcgccgcaagcccttctccatcctcctgtttgacgaggttgagaaggctgccaaggaggtcctgactgtactcctccagctcatggacgacggtcgcatcaccgatggccaaggacgtgttatcgacgctcgtaactgtatcgtcgtcatgacctccaacttgggtgcagagttcctcgctcgaccagctggcaaggacggcaagattgacccaacgacgcgcgagcttgtgatgaacgcgttgcgcaactacttcctgcccgagttcctgaaccgtatctcctcaaccgtcatattcaaccgtctcacacgtaaggaaattcgcaagatcgttgacttgcgcatttccgagatccagaagcgacttgcagacaataaccgcaacatcgccatatcggtgtcgaatgaagctaaagactacctgggcaacgctggctactcaccggcctatggtgctcgcccactggcccgccttattgagcaggaagttctcaacaagcttgctgtattgatcttgcgcggcagcattcaagatggcgaggtcgcgcgggtggagctcattgacaacaagatcgttgtcctatcaaatcactccagcagtgaaaatggtgacgatgtcgagatgattgattctgaggaggatgcagtggaagagcttatcagggacgacgatgatgagttgtttgactaa

SEQ ID NO: 33665 - protein, 926 aa, Magnaporthe grisea 70-15
MNSKMEFTDRAKKAMEDAMDLAEQHAHSQLLPVHLAVSLLDPPPDLSKDQQNPTPGASHTLLRQVVERAQGDPQLLDRALKKTLVRLPSQDPPPENVTMSPSFNNLIRKAMELQKVQKDSFIAVDHLISALAEDVSFQNCLKEANVPKHKLIQDAVQTIRGTKRVDSKTADTEEEHENLSKFTIDMTAMAREGKIDPVIGREEEIRRVVRILSRRTKNNPVLIGEPGVGKTTVVEGLAQRIVNADVPDNLAACKLLSLDVGALVAGSKYRGEFEERMKGVLKEIEEAKEMIVLFVDEIHLLMGAGSSGEGGMDAANLLKPMLARGQLHCIGATTLAEYRKYIEKDAAFERRFQQVLVKEPTINETISILRGLKEKYEVHHGVTIADSALVASANLAARYLTTRRMPDSAVDLIDEAAAAVRVARESQPEIIDSLERKLRQLKIEIHALSREKDEASKGRLALAKQEAQNVEEELRPLREKYESERKRGKDIQEAKMKLDQLKVKMEDASRMGDHARAADLQYYAIPEQENVIKQLEKDKAAADAAISAQAQTDHGGSMITDVVGPDQINEIVSRWTGIPVTRLKTSEKEKLIQMEKALGKLVVGQKEAVQSVSNAIRLQRSGLSNPNQPPSFLFCGPSGTGKTLLTKALAEFLFDDSKAMIRLDMSEYQERHSLSRMIGAPPGYVGHDAGGQLTEALRRKPFSILLFDEVEKAAKEVLTVLLQLMDDGRITDGQGRVIDARNCIVVMTSNLGAEFLARPAGKDGKIDPTTRELVMNALRNYFLPEFLNRISSTVIFNRLTRKEIRKIVDLRISEIQKRLADNNRNIAISVSNEAKDYLGNAGYSPAYGARPLARLIEQEVLNKLAVLILRGSIQDGEVARVELIDNKIVVLSNHSSSENGDDVEMIDSEEDAVEELIRDDDDELFD

SEQ ID NO: 33666 - DNA, 2331 bp, Gibberella zeae PH-1
  CDS (1)..(2331)
atggctgctagtgtccgggctcgatcagcctggccacttacaagagtactcgcaacacaacctttgaaaccaacatccctacgcttgataccaagtcttgccatcaggacatatgccaatggcagacctcatcccccaggcggtactcaccgcatgaatatgggtggtgaggaggagaagcctgctctggaacaatttggtatcgaccttactgcccgggccaaggatggtaagctggatcctgttattggaagagatgccgagattcagcgaacaatccaaattttgtcacgacgtaccaagaataacccagttctcatcggtaatgcgggaactggaaagacagcaattcttgagggtctcgctcttcgtattgttcgtggcgacgtccccgagagtgtcaagaacaagagggtcatcagtcttgatcttggctctctggttgccggtgccaagttcagaggagacttcgaagaaagactgaagaaggtcttgacagaggtcgagcaggctgagggagaagttattctattcatcgatgaactacacactctccttggcctcggaaaggccgaaggctccatcgatgcctcgaacctcttaaagcctgctttggcccgtggcgaacttcagtgctgtggtgcaacaacccttaacgagtatcgtcagattgaaaaagatgttgccctggcacgacgattccaacctatcattgtcagcgaaccatccgtggaggacacaataagtattctcagaggaatcaaagacaagtacgaagtccaccatggtgtccgcattacagacggcgcattggtggctgccgcaactttgtctaaccgctacatcaccgaccgattcttaccagacaaagctattgacctcatggacgaggcagccagtcatctcaagctgcagcacgagtccaagcctgaagacatcatgcgtcttgaccacaagatcatgaccattcagattgagcttgagagtttgaggaaggagtctgatgtggcaagcaaggagcgccgagagaagctcgaaaatgacctcaagaaattgaacgaggaaatttctgggctcaacgcgcgctgggagaaggagcgtgctgagatcgagtcggtcaagaagattcaagaggatctcgacaaggccaagtttgcgcttgagcaggctcagcgagaaggaaactttgggcgtgcctctgaactcagatttggtgtgattcccgaccttgaacagaagttgcccaaggagggagaagcccaagagtcaacctccagcgagactcttatccatgattcggtcagcccagacgacatcgccaatgtcgtctcccgtatcaccggcatccccgtgacaaagctcacttcaggccacatcgaaaagctggtccacatggaggactcactcagccaggcagtcaaaggacaagatgaagccatcaaggctgtttcagatgccgttcgtctccagcgagctggtctgagcggtgagaacaaacccttggcttccttcttcttcctaggccctaccggcgtgggtaaaacagagctttgtaagaagctggcaggatttttgttttcaacagagtctgcagttgttcgcttcgacatgtccgaattccaggagaagcacaccatctctcgacttattggtgcgccatctggttatgttggctacgaagatgccggccaactgactgaggcggttcgtcgcaagccttacgctgtccttctctttgacgagttcgagaaggcacaccgtgacatctctgccctgctcctccaggttcttgatgagggatatctcacagatgcccaaggccacaaggtcgacttcaagaacaccatcattgtcctgacgtccaacttgggtgccgacatcctcgttggccagaaccaccttcacccctatagcgaaacagctgacggtgagatcgacccatccgtccgcaaggccgtcatggatgttgtcgcctcagcttacccacccgaattcctcaaccgaatcgactccttcattgtcttcaagcgtctcgcccgcagcgctcttcgcgacatcgtggatatacgcctcaaggaactccaacaacgcctcgacgaccgccgcatcgtgctcaatgttcccagcgacgtaagagactggcttgcggagcgtggctacgatcccaaattcggtgcccgtcccttgaaccgactcatcaccaacgagatcggcaacggccttgcagacaagatcatcaagggccagctgaagatgggagagacggccgagatcaaggttcgcgaggacaaggaaggcttggacattgccatcaagtccaaggaggcctaa

SEQ ID NO: 33667 - protein, 776 aa, Gibberella zeae PH-1
MAASVRARSAWPLTRVLATQPLKPTSLRLIPSLAIRTYANGRPHPPGGTHRMNMGGEEEKPALEQFGIDLTARAKDGKLDPVIGRDAEIQRTIQILSRRTKNNPVLIGNAGTGKTAILEGLALRIVRGDVPESVKNKRVISLDLGSLVAGAKFRGDFEERLKKVLTEVEQAEGEVILFIDELHTLLGLGKAEGSIDASNLLKPALARGELQCCGATTLNEYRQIEKDVALARRFQPIIVSEPSVEDTISILRGIKDKYEVHHGVRITDGALVAAATLSNRYITDRFLPDKAIDLMDEAASHLKLQHESKPEDIMRLDHKIMTIQIELESLRKESDVASKERREKLENDLKKLNEEISGLNARWEKERAEIESVKKIQEDLDKAKFALEQAQREGNFGRASELRFGVIPDLEQKLPKEGEAQESTSSETLIHDSVSPDDIANVVSRITGIPVTKLTSGHIEKLVHMEDSLSQAVKGQDEAIKAVSDAVRLQRAGLSGENKPLASFFFLGPTGVGKTELCKKLAGFLFSTESAVVRFDMSEFQEKHTISRLIGAPSGYVGYEDAGQLTEAVRRKPYAVLLFDEFEKAHRDISALLLQVLDEGYLTDAQGHKVDFKNTIIVLTSNLGADILVGQNHLHPYSETADGEIDPSVRKAVMDVVASAYPPEFLNRIDSFIVFKRLARSALRDIVDIRLKELQQRLDDRRIVLNVPSDVRDWLAERGYDPKFGARPLNRLITNEIGNGLADKIIKGQLKMGETAEIKVREDKEGLDIAIKSKEA

SEQ ID NO: 33668 - DNA, 2727 bp, Candida glabrata CBS 138
  CDS (1)..(2727)
atgaacgacgaaacacagttcacagagagggcactgcatatccttacagttgcccagaagctagccactgaccaccagcatcctcagttgcaacctatccatttgcttgctgcttttattgagactcctgaggatgggtccgtggcgtacttacaaaacttgatcgagaaaggtcgctacgactacgatttgttcaagaagacagtgaacaaagcattggtgcgtgtgcctcagcagcatcctgcaccagcggaagtcacaccaagctatgccttgggtaaagtgatccaggacgcggtaaagatacagaagcaacaaaaggactcttttatcgcccaggatcatctgctattcgctttgttcaatgacgctagtataaaacaggtgttcaaggatgccggtgtcgatactgaggctgttaaacaacaggccttggaattgagaggtagccaaaggatagactccagaggtgccgacactaatacacccttggaatacctaggtaaatatgctatcgatatgacagaacaagccaggcaaggtaagctggaccctgtcatcggtagagaagaagaaatcagaagtaccatcagagtcttggctagaagaataaagtctaacccatgtctgatcggtgaacctggtatcggtaaaaccgccatcatcgaaggtgtcgctcaaagaatcatcgacgatgatgttccaaccattctacaaggttcaaagctgttcagtctggatctggctgctctaacggctggtgcaaagtacaaaggtgactttgaagagagattaaagggtgtgttgaaggaagtcgaggaatcaaagactttgattgtcttgttcattgatgaaattcacatgcttatgggaaatggtaaggatgatgctgccaacatcttgaagccagccttatccagaggacatttgaaggtgattggtgctacaaccaacaatgaatatagatctattgtcgaaaaagatggtgctttcgagagaagatttcaaaagatcgacgtccaggagccaacaattagacaaactgtcgctattttgagaggtctacaaccaaagtacgaaattcaccacggtgtcagaattttagatagtgctttggttactgcttctcagttggctaagcgttacttaccctacagaagattgccagattcagcaattgatctggtagatatttcatgtgcgggtgtcgctgtggcaagagactcaaagccagaagaacttgactctaaggaacgtcaactgcaattgctacaagttgaaataaaagctctagaaagagacaaggatgctgactgcaccactaaggacagattgaagcaggctaagaagagagaggcatctttgatcgaagaattagaaccattgagacaacgttacaacgaagaaagaaagggccatgaagagctaaccaaattgaagaagaagttagatgaattggaaaataaggctcttgatgccgagcgtagatatgatactgctactgccgctgatttgagatactttgctatcccagatatcaagaagaagattgacgacttagaaaaccaagttgccgaagaggaacagcgtgcgggtgctaattcaatgattcaaaacgttgtggactcggacactatatctgagacagccgcaagactgactggtattcctgtgaagaaactatcagaatctgagaatgagaagctaatccatatggaacgtgatctctcctcagaagttgttggtcagatggaggctgttaaggctgtgtccaacgctgtaagactttccagatctggcttagccaatcctagacaaccggcatcatttatgttccttggtttgtccggttctggtaagacagaactggccaagaagattgccggattcttattcaatgatgaaaacatgatgattagggttgattgttcggaattgagtgaaaagtactctgtatccaagttattaggtacaactgcaggttacgttggttacgaagagggtggtttcttaactaatcaactacaatacaagccatactcagttttgctatttgatgagatagaaaaagcacaccctgatgttttgactattttgttgcaaatgctagatgacggtagaattacttctggccagggtaagacgattgattgttccaactgtattgtcattatgacttccaaccttggtgcccaatatattaacttacagaaaggttccaagattatggatgaaaccaagactttggtaatggaagctgttaagcagcacttcagaccagagtttttgaacagaatctcctcaattgttgtattcaataaactatcaagaaaggcaatccacaagattgtagatattagattgaaagaaattgaagacagattcgagatgaatgataagcactacaagttagaactaactccagaagccaaggatttcctagcaaagtacggttattctgaagacatgggtgcccgtccattaaacagactaattcaaactgaaatcttgaataagatggctttaaggatcttaaagggagaaattcaagataaggaaactgttaaagttgtcttaaaggttggcaaggaacgtgggtctgctagtactgaagatgaggaagaaagtcttgatgtcctaccaaaccacgaggcaaccattgcaattgataacgacactatggatattgacgatgatgatgacgatgatgctgttgatgttgattaa

SEQ ID NO: 33669 - protein, 908 aa, Candida glabrata CBS 138
MNDETQFTERALHILTVAQKLATDHQHPQLQPIHLLAAFIETPEDGSVAYLQNLIEKGRYDYDLFKKTVNKALVRVPQQHPAPAEVTPSYALGKVIQDAVKIQKQQKDSFIAQDHLLFALFNDASIKQVFKDAGVDTEAVKQQALELRGSQRIDSRGADTNTPLEYLGKYAIDMTEQARQGKLDPVIGREEEIRSTIRVLARRIKSNPCLIGEPGIGKTAIIEGVAQRIIDDDVPTILQGSKLFSLDLAALTAGAKYKGDFEERLKGVLKEVEESKTLIVLFIDEIHMLMGNGKDDAANILKPALSRGHLKVIGATTNNEYRSIVEKDGAFERRFQKIDVQEPTIRQTVAILRGLQPKYEIHHGVRILDSALVTASQLAKRYLPYRRLPDSAIDLVDISCAGVAVARDSKPEELDSKERQLQLLQVEIKALERDKDADCTTKDRLKQAKKREASLIEELEPLRQRYNEERKGHEELTKLKKKLDELENKALDAERRYDTATAADLRYFAIPDIKKKIDDLENQVAEEEQRAGANSMIQNVVDSDTISETAARLTGIPVKKLSESENEKLIHMERDLSSEVVGQMEAVKAVSNAVRLSRSGLANPRQPASFMFLGLSGSGKTELAKKIAGFLFNDENMMIRVDCSELSEKYSVSKLLGTTAGYVGYEEGGFLTNQLQYKPYSVLLFDEIEKAHPDVLTILLQMLDDGRITSGQGKTIDCSNCIVIMTSNLGAQYINLQKGSKIMDETKTLVMEAVKQHFRPEFLNRISSIVVFNKLSRKAIHKIVDIRLKEIEDRFEMNDKHYKLELTPEAKDFLAKYGYSEDMGARPLNRLIQTEILNKMALRILKGEIQDKETVKVVLKVGKERGSASTEDEEESLDVLPNHEATIAIDNDTMDIDDDDDDDAVDVD

SEQ ID NO: 33670 - DNA, 2364 bp, Candida glabrata CBS 138
  CDS (1)..(2364)
atgttaagcagggtatgtaggtcgtcgttgaggaacagtgtagctagggtctcgcggtacgctggtccgagggctctggctctgtccatggttgtaagcgggaggcaggttagtggtagttggcaaacgtgtgcttatggtgtgcggtacatacatagttcgaggcctcggtatgtgcagatgcgtatgaatcccaatcaaggagagcctgagaagccgcctttggagcagtttggtactaatctgacgaagttggctagggatggtaagctggatcccgtgataggtcgtgacgaggagatctcgagggctatccagatcttatcgagaaggaccaagaacaacccggttctgatcgggagagctggtgtcggtaagactgcacttatcgatggcttggcgcaacggattgtcgctggtgaagtaccggagtcgttgaaggataaagaactagtggccttagatctgggtgctctgatcgctggtgcgaagtacagaggtgaattcgaagaaaggctgaagaaagtcctggaggacatagacaaagcagacgggaaagtgatagtgtttattgatgaggtccacatgctgcttggcctcgggaaaactgacggtagcatggatgcttccaatatattgaagccaaagttggcaagaggactaaggtgcatatctgccactacaatcgatgagttcaagataatcgagaaggatcctgctctgactaggagattccaacctatcttgctaaatgaaccttctgtgcaagatacaatctctatcttaagaggtctaaaggaaagatacgaagttcaccacggtgtcaggatcacggatactgctctggtgtccgctgctgtactatcaaacaggtacatcaacgatagattcttaccagataaggctatcgacctggtggatgaggcatgtgctgtgttgaggttacaacatgagtcaaagcccgatgagattcaaagattggatagggccattatgaaaattcaaattgaactagaatcattaaagaaagaaactgacccagtgtctattgaaaggaaagaagatctagaaaaagagctagaaaggaaaaatgaggaacttcaacgactaactaagatctgggaggaagaaaaagctgaaatagagtctattaagaactccaaagccgacttggagaaagctagaatcgaattggatagatgccaaagagaaggtgactatgcaaaggcgtccgagcttagatatgccaagatcccagctttagaagagaaagtgaaactcagcgaaactaaggactcaaataaggaaaacttactgcatgatgctgtcacttcagatgatatttcaaaagtcattgccaagatgacaggtattccaatggaaacagtattaaaaggagacaaagatagacttttatatatggaaaactccttgagagaaagagttgtaggtcaagacgaagctatcgaagctgtttcagatgcagtgagactacaaagagctggcctaacgagtgaaaagagaccaattgccagtttcatgtttctgggcccaactggtacaggtaagaccgaactaaccaaggcgcttgctgagttcctgttcgatgacgagtctaatgtaattagatttgatatgtccgagtttcaggaaaaacacactgtttcaaagttaataggtgcccctccaggatatgtattaagtgaatcaggtggtcaattaacggaggctgttaggcggaaaccttatgctgtcgttttgttcgatgaatttgaaaaggctcatccagatgtttgtaagattttgttgcaagtccttgacgagggtaagttgacagattcattgggacaccacgtcgatttccgtaataccataattgtcatgacttctaatattggtcaagatattttactatcagacacgaaattagatgacgaagggaagatcgatccatctacaagaaacgaagttatcgaagcgatgaaaagatcttatcctccagagttcattaatcgtattgatgacatcctagtgttcaatagattatccaagaaggtcctaagatcgattgtcgacatcagagccaaagaaattcaagaaagattgaacgataagcgtatgacgattgaaatatcggatactgctaaagaatggctgacagaacacggttatgaccaactatatggcgctagacctttgaatagattaattcatagaagaatattgaatcctatggcaacttatctattaaagggccaaatcaggaatggtgaaaccgtccaagtagatgttgaaaataaggaacttgttgttaaaagtaatcacgccgaaggagaaatcgtggatgaagaacctgagaaataa

SEQ ID NO: 33671 - protein, 787 aa, Candida glabrata CBS 138
MLSRVCRSSLRNSVARVSRYAGPRALALSMVVSGRQVSGSWQTCAYGVRYIHSSRPRYVQMRMNPNQGEPEKPPLEQFGTNLTKLARDGKLDPVIGRDEEISRAIQILSRRTKNNPVLIGRAGVGKTALIDGLAQRIVAGEVPESLKDKELVALDLGALIAGAKYRGEFEERLKKVLEDIDKADGKVIVFIDEVHMLLGLGKTDGSMDASNILKPKLARGLRCISATTIDEFKIIEKDPALTRRFQPILLNEPSVQDTISILRGLKERYEVHHGVRITDTALVSAAVLSNRYINDRFLPDKAIDLVDEACAVLRLQHESKPDEIQRLDRAIMKIQIELESLKKETDPVSIERKEDLEKELERKNEELQRLTKIWEEEKAEIESIKNSKADLEKARIELDRCQREGDYAKASELRYAKIPALEEKVKLSETKDSNKENLLHDAVTSDDISKVIAKMTGIPMETVLKGDKDRLLYMENSLRERVVGQDEAIEAVSDAVRLQRAGLTSEKRPIASFMFLGPTGTGKTELTKALAEFLFDDESNVIRFDMSEFQEKHTVSKLIGAPPGYVLSESGGQLTEAVRRKPYAVVLFDEFEKAHPDVCKILLQVLDEGKLTDSLGHHVDFRNTIIVMTSNIGQDILLSDTKLDDEGKIDPSTRNEVIEAMKRSYPPEFINRIDDILVFNRLSKKVLRSIVDIRAKEIQERLNDKRMTIEISDTAKEWLTEHGYDQLYGARPLNRLIHRRILNPMATYLLKGQIRNGETVQVDVENKELVVKSNHAEGEIVDEEPEK

SEQ ID NO: 33672 - DNA, 2478 bp, Kluyveromyces lactis NRRL Y-1140
  CDS (1)..(2478)
atgctaaggtctgctgaaaatttgaatcgtaagctaagtcggacgtcgctattaaagaacgttaaaatatatcaacctagtatatctgatgttgaacttggatgtacgtgccggtcttttagcagtttggttcaaaaaccaaaccaaactacagttggaataagccggggtaataaagttatatctggtttaaatattggtgctagaaggcccaatataagtagtataccgcccatttctactgcattcaatgtcgcttctgttcgtagctatgctaagaattataatttaaatttgaataaagatcaggagggtggagaatcagctttacaacagttcggtacgaatttaacggagttggctaaacaggggaaattagacccagtgattggtcgtgatcaggaaatatcgagagctatccaaattctttcgcgtagaaccaagaacaatccagtgttgatcggtagagccggtgtcggtaagactgcgttgattgatggtttagctcaaagaattgttgccaatgaagtgccagaatctttgaaagacaaagacttatacgctttggatttaagttcattggtcgctggtgctaagtaccgtggtgaattcgaggaaaggttgaagaacgttttggatgaaattgataagtccaatggtaagatcattgttttcatcgatgaagttcacatgttactaggcttgggtaagacagatggctctatggatgcttcgaatatcttgaaaccgcgtttggcaagagggttacgttgtatcagtgctaccacattggatgaattcaaaatcattgaaaaagaccctgccttgaccagaagatttcagcctatcatcttgaatgaaccttctgttcatgatacaatctcaatcttgagaggtctaaaggaaaagtatgaagtgcaccacggtgtaagaatcacagattcagccttagtttccgctgctgtgctatccaacagatacattaacgaccgtttcctcccagataaagctattgatttggtcgatgaagcatgtgctgttttacgtttgcaacacgagtcaaagcctgactccattcaagcaattgatcgggctgttatgacaatgcaaattgaattagaatccttgaagaaagaaactgatcccgtttctgttgaaagaagagaggaacttgaaaaggatttggaagtgaagaagaaagaattggagaggttgactgaaatttgggaaaccgaaaaatctgaattggattccatcaagactgccaaggaagatttagataagttgagaaccgaattggatatttgtcaaagagaaggtgattatgccaaggcttctgaactaagatatgccaagatccctgaattggaaagaaaagtagcactgaacagcaagaaggatactgaaaacaacttgttacatgactctgttacctctgatgacatttctaaagtcattgccaagatgacaggtattccaatggaaaccgttttgaaaggtgataaggacagattactatatatgcagaattcattaagagaaagagttgttggtcaagatgaagcaatcgatgctataagtgacgcagtgcgtttacaaagagctggattgaccagtgaaaagagacctattgctagtttcatgtttttgggacctactggtaccggtaagacagaattaactaaagctttggcagagtttttgtttgatgatgaatctaacgttatcagatttgatatgtctgaattccaggagaaacatacagtatcaagattaatcggtgcacctcccggttatgtgttaagtgaaagcggtggtcagttaactgaagccgtgagacgtaagccatatgctgttgtattatttgatgaattcgaaaaggctcatccagatgtttgtaaagtcttattgcaagtattggatgaaggtaaactaacagattctcaaggtcaccaagttgatttccgtaacaccattgttgttatgacatcgaacatcggccaagacattttgctgcatgataccgaattaggtgatgatggtaaggttagcaagaagactaagagaagcgtaattgaagctgttaaaaagaactatcctccagaatttgtcaatcgtattgatgatttgattgtctttaacagactatcaaaagaagttctccgttcaatcgtcgatattagactcaaggaaattcaagaaagattgaacgacaagcgtatgaccctaaatctaactgacgaagctaaggattggttaactgaaagaggttatgacccattgtacggtgctagacctttgaacagattgatccataaacaaatcctaaatccaatggctattcaattgctaaggggtcaattgagacacgaggagactgtaaatgtggttattgaagatagcaagttagtggttaaaccaaaccacgatcccgaatcaagtgaactcggaaatgacaagcaagctgatgttgagtaa

SEQ ID NO: 33673 - protein, 825 aa, Kluyveromyces lactis NRRL Y-1140
MLRSAENLNRKLSRTSLLKNVKIYQPSISDVELGCTCRSFSSLVQKPNQTTVGISRGNKVISGLNIGARRPNISSIPPISTAFNVASVRSYAKNYNLNLNKDQEGGESALQQFGTNLTELAKQGKLDPVIGRDQEISRAIQILSRRTKNNPVLIGRAGVGKTALIDGLAQRIVANEVPESLKDKDLYALDLSSLVAGAKYRGEFEERLKNVLDEIDKSNGKIIVFIDEVHMLLGLGKTDGSMDASNILKPRLARGLRCISATTLDEFKIIEKDPALTRRFQPIILNEPSVHDTISILRGLKEKYEVHHGVRITDSALVSAAVLSNRYINDRFLPDKAIDLVDEACAVLRLQHESKPDSIQAIDRAVMTMQIELESLKKETDPVSVERREELEKDLEVKKKELERLTEIWETEKSELDSIKTAKEDLDKLRTELDICQREGDYAKASELRYAKIPELERKVALNSKKDTENNLLHDSVTSDDISKVIAKMTGIPMETVLKGDKDRLLYMQNSLRERVVGQDEAIDAISDAVRLQRAGLTSEKRPIASFMFLGPTGTGKTELTKALAEFLFDDESNVIRFDMSEFQEKHTVSRLIGAPPGYVLSESGGQLTEAVRRKPYAVVLFDEFEKAHPDVCKVLLQVLDEGKLTDSQGHQVDFRNTIVVMTSNIGQDILLHDTELGDDGKVSKKTKRSVIEAVKKNYPPEFVNRIDDLIVFNRLSKEVLRSIVDIRLKEIQERLNDKRMTLNLTDEAKDWLTERGYDPLYGARPLNRLIHKQILNPMAIQLLRGQLRHEETVNVVIEDSKLVVKPNHDPESSELGNDKQADVE

SEQ ID NO: 33674 - DNA, 2700 bp, Kluyveromyces lactis NRRL Y-1140
  CDS (1)..(2700)
atgaacgacgaaacacaatttacaaataaggccaacgaaattatccgtttggcccagaaattggctcaggatcacagacatgctcagttacaaccaattcacttacttgctgcatttgttgagccaaacgaggatggttctgttggattcttacaaaacttggtggaattagcgaaatatgattatgaacctttgaaaagggccatcaacagaaacctagtcaggactccatctcagacgcccgcaccattagaaattcagccaagttatgctttcgggcaggtcttgaaagatacttcagaaattaggaaacagcaaaaagattcattcgtcggtcaagatcatatattgactgctttgttcaaagatgcaacaactcaaagcatttttaaggagtgttccattgacatagaatctgtgaagcagcagatgctcgaattgagaggcaatcaacgaattgattcaagagacgctgatacaaatgaaaaatgggaatatttgaagaagtatgcgatcgatatgactgaacaggctagagcaggtaagttggatcctgttatcggtagagaagaagaaattagaactgccatcactgttcttgctagaagaatcaagtcaaatccatgtttgatcggtgagccaggtattggtaagactgccattgtagaaggtgttgctcaaagaattatcgacgatgatgttccacaaattctacagggttgcaaattattttctttggatcttgctgcattgacggctggtgccaaatataaaggtgatttcgaggaaagattaaaaggtgtcttgaaagaaatcgaggaatcaaagactttaattatattattcatcgatgagattcatatgttgatgggccaaggtgtagatgattctgccaatgctgctaatattttgaaaccagccttatctcgtggtggcttgaaggtaattggtgccactaccactaacgaatatagatctttggtcgagaaggatggtgctttcgaaagaagattccagaagattgatgtccctgaaccaacgacaaggcaaacggtagctattttgagaggtttacagccaaagtatgaaatacatcatggtgttagaattctagatagtgccctagtgtctgcagctcaactagctaagaggtacttgccatacagaagattacctgattctgctattgacttggttgatatttcatgtgccggtgtcgctgttgctcgtgattctaagcccgaagaattagacaataaagagcgcgaattgcatttactacaggttgaaatcaaggcattagaaagagatgaagaaacggatccaacgacaaaagaaaggctacaacaagccagacaaaaggaagcttcattaattgaggaattggaaccaatgagacagcgttaccaacaggaagtggattctcatgaacaactaagacaagccaaaaagaagctcgatgaattggaaaacaaatgcatggatgccgaacgtcgttacgataatgctaccgcagctgatttgaaatactttgctattccggatatcaagaaacgtattgaggaattggaacaaaaagttgctgaagaagaatccagggaaggttctgaaacaatggtgaagaacgtggttaacagcgaggttattgccgagactgccgctagaatgaccggtattccagtgaataaactaactgaatctgaaaacacaaagttgatccatatggaacgtgagttatcgcaacaagttgtgggtcaaatggaggctgtgaaagccgtttctaacgctgtcagactttctagatctggtttgtctaaccctaatcaaccggcatctttcttattcctaggtttatctggttccggtaagactgaattagctaagaaagtcgcatccttcttgtttaatgatgaaaaagctatggtcagaatcgattgttcagaattgatggagaaacattcagtttcgaaattattaggtactactgccggttacattggttaccaagaaggtggtttcttaactaatcaattacagagaagaccatacagtgtgttgttatttgatgaagtcgaaaaggcccaccctgatgtcttgaccgttcttttgcaaatgttagatgacggcagaatcactagtggtcaaggtaagacaattgactgttcgaactgtattgtaattatgacttctaatttgggtgcccaatttatcaatgctcagactggatcaaaggttactgagggttccaaagagttggtgatgagtgccgttaaagcacatttcagaccagaattcttgaatagaatctcaagtatcgtggtattcaacaagctttctcacaaggccattcacaaaattgttgatatcagaatcaaagacttggagaagcaatttgcggataatgataagaattacaagatcaacgtttcaccaccagctcgggatttcttgaccaagaatggttactcggaggatatgggtgctaggccattgaacagattaattcaaaccgagattttgaacccaatggcaatccatatcttgaagggtgagatcaaagacaaagaaattgtcaatgtagaagtgggtgccgatggatctcatttagaagttttaccaaatcacccagcttcatcagaaattggtgatgaagacatggatttggacttggacgacgatgacgacttagacctagactga

SEQ ID NO: 33675 - protein, 899 aa, Kluyveromyces lactis NRRL Y-1140
MNDETQFTNKANEIIRLAQKLAQDHRHAQLQPIHLLAAFVEPNEDGSVGFLQNLVELAKYDYEPLKRAINRNLVRTPSQTPAPLEIQPSYAFGQVLKDTSEIRKQQKDSFVGQDHILTALFKDATTQSIFKECSIDIESVKQQMLELRGNQRIDSRDADTNEKWEYLKKYAIDMTEQARAGKLDPVIGREEEIRTAITVLARRIKSNPCLIGEPGIGKTAIVEGVAQRIIDDDVPQILQGCKLFSLDLAALTAGAKYKGDFEERLKGVLKEIEESKTLIILFIDEIHMLMGQGVDDSANAANILKPALSRGGLKVIGATTTNEYRSLVEKDGAFERRFQKIDVPEPTTRQTVAILRGLQPKYEIHHGVRILDSALVSAAQLAKRYLPYRRLPDSAIDLVDISCAGVAVARDSKPEELDNKERELHLLQVEIKALERDEETDPTTKERLQQARQKEASLIEELEPMRQRYQQEVDSHEQLRQAKKKLDELENKCMDAERRYDNATAADLKYFAIPDIKKRIEELEQKVAEEESREGSETMVKNVVNSEVIAETAARMTGIPVNKLTESENTKLIHMERELSQQVVGQMEAVKAVSNAVRLSRSGLSNPNQPASFLFLGLSGSGKTELAKKVASFLFNDEKAMVRIDCSELMEKHSVSKLLGTTAGYIGYQEGGFLTNQLQRRPYSVLLFDEVEKAHPDVLTVLLQMLDDGRITSGQGKTIDCSNCIVIMTSNLGAQFINAQTGSKVTEGSKELVMSAVKAHFRPEFLNRISSIVVFNKLSHKAIHKIVDIRIKDLEKQFADNDKNYKINVSPPARDFLTKNGYSEDMGARPLNRLIQTEILNPMAIHILKGEIKDKEIVNVEVGADGSHLEVLPNHPASSEIGDEDMDLDLDDDDDLDLD

SEQ ID NO: 33676 - DNA, 2703 bp, Debaryomyces hansenii CBS767
  CDS (1)..(2703)
atggataattcagaatttacggataacgcattgaggatcattacaaatgctactcagttagctaaagataatgctcacactcagttagctccattgcactttttagcagcaatggtaccaacggatgatgaaaattcgacacaatatcttaaaacattgattcaaaaggctagatatgaatggcctacatttgaaagaaatgtgaataagcacttagttagattgccatcacaaactcctgcaccagatgatattagacccagttatgctacaggccaagtgttggccaatgcaacaaaaataaaatcacaacagaaagatgattttgttgcacaagatcacttgttattggcattgttggatgatagttcgattaaagctattttcaaggaaagtggaattaacgttgatagcatcaagacacaggccatcgaattgagaggaagccagagaattgattcaagacaagctgactcctcgtcatcttatgaattcttgaacaagtactgtgaagacttcacagagaaggccagagaaggtaaaattgaccccgtgataggaagagaagaagaaataagaagggtcattagggtcttggccagaagaaccaaatcaaactctgttttgattggtgaacctggtgttggtaagacatctattgttgaaggggttgctcaaagaatcattgatggtgatgtgccaaatattttagccaattctcgtttatttgcattggatttgggtgctttgaccgcaggtgcaaagtacaaaggtgaatttgaagaaagaattaagggtgtcttgaatgatattgaaaaatcaaatgaaatgattattcttttcatagacgaaattcatatgttaatgggtgatggtaaatccgatgcagctaatttattaaagccaatgttggctagaggttctcttcattgtatcggtgcaaccacattcactgaataccgtaagtttatcgcaaaggatggtgctttcgaaagaaggttccaaaaaattgatgttcctgctagcactgttccagaaactgtcgctatattgagaggtttacaaccaagatatgaaatccatcacggtgttcgtattttggatagtgctttagttactgctgctcaattagcttcgaggtatttaacttacagaagtttgcctgattcagctgttgatcttatagatgaaactgcagctacggttgccgttgcaagagattctaagccagaagaattagatactttggaaagacagttgcatttaattgaagttgaaattaatgcattagaaagagatgttgaagctgatgcagattccaaagaccgtcttgaagttgctaaaagaaagaaggctgaattagaagaacaattaggtccattaagagaaagattcaaccaagaacgtgcgggccatgaagaattaattgcagcaaaacgtaagttagatgaactagaaatcaaggcactggacgctgaaagaagacatgatactgcaaccgctgctgatttgagatacttcgctattccagatgttgctaaacaaattgaagagttggaagtaaaggtagcagaagaagaacagtccttaggttcagaatcaatgttaaagaatgctgtcagtagtgaacaggttgctgaaactgccgcaagattaacaggtattccagtaacaaaattgtctcaagctgagaacactaagttgatcaatatggaaagggaattgtcttcagaggttgtcggtcaaagtaaggctgttaaggctgtctccaatgctatcagattaaaccgttcgggattagcgaacccaaatcaaccagcttctttcttgttcttaggtttatctggttcaggtaaaactgaattggctaagaaggttgctggattcttatttgcagatgaaagagctatgataagaattgactgttccgaattaggcgataaatggtctgcatctaagttgttaggtgcagctccagggtatgttggatacgaagagggtggtattttaaccgaagccttattacgtcgtccttactcggtgattttatttgacgaggtcgagaaagctgctcccgaagtcttaacaattttgttacaaattttggacgatggtagagtcacttcttcccaaggtaagttagtcaattgctccaattcaatcataattatgacatcgaacattggtgcagagtatatcaatgcctcaaagggccctacgattgacgacactacaaaaggattagtcatggatgctgttagggctaatttcaggcctgaattcttgaatcgtatttcaagcacagtcattttcaatagattgtcgaagaaggctatttctaagattgtcaagatcagattgaaagaaatacaagagagatttgcggccaatggtaaagctttagctttggaggtcgatgatgctgcattggaatacttgtgcaacaaaggttattctcccgatcttggtgcaagaccacttaaccgtcttatccaaagtgaaattttgaaccgtttggctgtcttattattaaagggtcaaatcaaggacaaggaagtagctagagttactttaggtcctaaaggcttggaagtcttaccaaaccatgaggcagaagatgaagatatggcagatgtccaagtcgacgactggaaagatagtgaagatgaagatgattacttagactcaactcctcttgactaa

SEQ ID NO: 33677 - protein, 900 aa, Debaryomyces hansenii CBS767
MDNSEFTDNALRIITNATQLAKDNAHTQLAPLHFLAAMVPTDDENSTQYLKTLIQKARYEWPTFERNVNKHLVRLPSQTPAPDDIRPSYATGQVLANATKIKSQQKDDFVAQDHLLLALLDDSSIKAIFKESGINVDSIKTQAIELRGSQRIDSRQADSSSSYEFLNKYCEDFTEKAREGKIDPVIGREEEIRRVIRVLARRTKSNSVLIGEPGVGKTSIVEGVAQRIIDGDVPNILANSRLFALDLGALTAGAKYKGEFEERIKGVLNDIEKSNEMIILFIDEIHMLMGDGKSDAANLLKPMLARGSLHCIGATTFTEYRKFIAKDGAFERRFQKIDVPASTVPETVAILRGLQPRYEIHHGVRILDSALVTAAQLASRYLTYRSLPDSAVDLIDETAATVAVARDSKPEELDTLERQLHLIEVEINALERDVEADADSKDRLEVAKRKKAELEEQLGPLRERFNQERAGHEELIAAKRKLDELEIKALDAERRHDTATAADLRYFAIPDVAKQIEELEVKVAEEEQSLGSESMLKNAVSSEQVAETAARLTGIPVTKLSQAENTKLINMERELSSEVVGQSKAVKAVSNAIRLNRSGLANPNQPASFLFLGLSGSGKTELAKKVAGFLFADERAMIRIDCSELGDKWSASKLLGAAPGYVGYEEGGILTEALLRRPYSVILFDEVEKAAPEVLTILLQILDDGRVTSSQGKLVNCSNSIIIMTSNIGAEYINASKGPTIDDTTKGLVMDAVRANFRPEFLNRISSTVIFNRLSKKAISKIVKIRLKEIQERFAANGKALALEVDDAALEYLCNKGYSPDLGARPLNRLIQSEILNRLAVLLLKGQIKDKEVARVTLGPKGLEVLPNHEAEDEDMADVQVDDWKDSEDEDDYLDSTPLD

SEQ ID NO: 33678 - DNA, 2406 bp, Debaryomyces hansenii CBS767
  CDS (1)..(2406)
atgttacgtacgagattaatcattcaaaatgtcagaagtagagccatttctcaagcatcacggaatattaatacggttagttctctaagtaccagacaaattcatgtacctgctatacaactgaaactgaattttggtatgaaaaatgggcttcaaggaatgaaatacaaacataatagctttggattgaatcatgttaaatttatgcattcaagtggcatcagaaaactccagatgtctatggataaggaaggtcaagatactaggccagcattggagaaatatggtacagatttgactcaattggcaaaggatggtaaactagatccagtgattggacgtgatgaagaaatacgtcgtacagttcaaattttatccagaagaacaaagaacaatcctgtgttgattggtaatgctggtacgggtaaaacggcagtaatggaaggtttggcacagagaatattgaagaatgaggttccagacagtatgaaagacaagcagataataacgttagacctatctggtatcattgcaggtgccaagtatagaggtgattttgaaggcaaattaaaacagatattaaaagaagttgaagagaaacaagggaaagtcatattattcatagatgaattgcatattttaatggggttaggtaaggctgaaggttcaattgatgcatcgaatttattgaaacctgctttggcaaggggaaagctttctctttgtggtgctacaaccattgaagaataccgcaagtatgttgaaaaggatgcagctcttgcaagaagattttctgctgttactgttaatgagccaacggttcaagacactatttcgatattacgtggtttgaaggaacgttatgaggtacatcatggtgtccgtatcactgatggtgcattagtgacctctgcactctattcgagtcgttatataactgaccgttttttgccagataaggctattgatttagttgatgaagcatgttctacattgagattgcaacatgaatctaagccggatgcgattgctcagttagaccgtcaaattatgactattcagattgaattagaatctttgagaaaagaagacgatcagttatcgttagatcgtaagactaaattggaagaagaattgaatgttaaaagtgctgaattgaaagactttactgaaaaatgggaatcagagaaaaagctgatagatgatgtcaagaatgcaaaaactgatttggaacaagctaaatttgatttagaacaatgccaaagagaaggcaattatggtaaggcttctgaattgcaatatgccaccatacccaaattagaggaacaattgaaggaattaactgataacgaaaagtctgttgaaggatctacattattgcatgattctgttacttctgatgacattgcaaatgtgatttctaaaatgacaggtatcccattgagtaacttaatgaaaggtgagaaggataagttattggatatggaagctacattgaaggataaagtcattggtcaggatgaagcaataaatgcagttgctgatgctgtgagattacagagagcaggtttaaccagtgacaagagaccgattgcttcatttatattcttgggaccaactggtactggtaagacagaattaacgaaatccttggcagaatttctatttcatgacaaatcgtcagttattaggtttgatatgtcagaattccaagaaaaacatacgatctctagattaatcggatcacctcctggttatgttggttatgaagaaagtggtgagttaacggaggcagtaagaagaaagccatattcagttatattgtttgatgagtttgagaaagcacacagtgatgtatccaaattattattacaagtccttgatgagggttcattaactgattcccatggtaagcatattgatttccgtaataccataatagtaatgacctcaaatattggtcaagagatattactaaatgataaggatacaagcgatgatggccacattagtgaaagtactaagacacaagttagtgacatgttaaagcattattatcctcctgaattcttaaatcgtctcgatgatgtcttaattttcaacagattgtctaagcaatctttgaaaaatattttgactatccgtttgaaagaaatcgatgaaagattggctgatagaagaatcaatttgtctttatctaatgaatccaaagacaagctttgcgaattaggttatgacccggtgtatggtgcaaggcctttaaatagagttttgcaaaagaaggtcttgaaccccctttccaaattgatgataaaaggacaaataagagaaggtgagacgatacttgttgatttaaaagacgatgaaatatatgttacaccaaatcacgaagaggatcatccttga

SEQ ID NO: 33679 - protein, 801 aa, Debaryomyces hansenii CBS767
MLRTRLIIQNVRSRAISQASRNINTVSSLSTRQIHVPAIQLKLNFGMKNGLQGMKYKHNSFGLNHVKFMHSSGIRKLQMSMDKEGQDTRPALEKYGTDLTQLAKDGKLDPVIGRDEEIRRTVQILSRRTKNNPVLIGNAGTGKTAVMEGLAQRILKNEVPDSMKDKQIITLDLSGIIAGAKYRGDFEGKLKQILKEVEEKQGKVILFIDELHILMGLGKAEGSIDASNLLKPALARGKLSLCGATTIEEYRKYVEKDAALARRFSAVTVNEPTVQDTISILRGLKERYEVHHGVRITDGALVTSALYSSRYITDRFLPDKAIDLVDEACSTLRLQHESKPDAIAQLDRQIMTIQIELESLRKEDDQLSLDRKTKLEEELNVKSAELKDFTEKWESEKKLIDDVKNAKTDLEQAKFDLEQCQREGNYGKASELQYATIPKLEEQLKELTDNEKSVEGSTLLHDSVTSDDIANVISKMTGIPLSNLMKGEKDKLLDMEATLKDKVIGQDEAINAVADAVRLQRAGLTSDKRPIASFIFLGPTGTGKTELTKSLAEFLFHDKSSVIRFDMSEFQEKHTISRLIGSPPGYVGYEESGELTEAVRRKPYSVILFDEFEKAHSDVSKLLLQVLDEGSLTDSHGKHIDFRNTIIVMTSNIGQEILLNDKDTSDDGHISESTKTQVSDMLKHYYPPEFLNRLDDVLIFNRLSKQSLKNILTIRLKEIDERLADRRINLSLSNESKDKLCELGYDPVYGARPLNRVLQKKVLNPLSKLMIKGQIREGETILVDLKDDEIYVTPNHEEDHP

SEQ ID NO: 33680 - DNA, 2664 bp, Yarrowia lipolytica CLIB122
  CDS (1)..(2664)
atgaacgaatcagaattcactgacagagctaacaagatcctcaaaacttccgtcgagctggcccagcagcaccagcagggcactctccagccaatccatcttctggctgccatgttcgatgcagaggacgatgcctctgatccttacatcaaggccgtcgtagagcgaggcaagtacgattgggaccagttcaagcgagccgtcaacaaggcacttgttcgactgcccagccaaagccctcctcccgacgagttgtcccagagccccgccttctccaaggtgctgcagaatgccatcaagtacaagcagcgacaaaaggacgagtacgtgggccaggaccacattctcatggcccttctcgatgactcctctattgagagcattctcaaggagtgcggtattaagaaggacgtcatggaggccaacatcacagccgtgcgaggaaagcgacgaattgactcgcgaaccgctgacggagccgacgagttcgagttcctcaacaagtatgccattgacatgaccaaacaggctcgagagggtaagattgaccctgtcattggccgagaggaggagatccgacgatgtatccgagtgctggcacgacgaaccaagtccaacccttgtctgattggtgatcccggtgtgggtaagacctcaattgtcgagggtgtcgcgcagcgaatcatcgacggcgatgtccccaacgttctggctaactgccagctcttctctctcgatctgggagctctcaaggctggtgccaagtaccagggagactttgaggagcgaatcaagggtgttctcaaggagattgaggactccaaggacatgatcatcctgttcatcgatgagatccatatgctcatgggtgatggaaagggtgatgctgccaacctgctcaagcccatgcttgctcgaggttccctccactgtatcggtgccaccaccaacgaagagtaccgaaagcacgttgagaaggatgccgcctttgagcgacgattccagaagatcgacgtgcgagagcctactattcgagagaccgtcgccattctgcgaggtatccagaacaagtacgagctgcatcacggagtccgaattctggactctgccctggtttctgctgctcagctggcttcccgatacctcacctaccgaaagctgcccgattcggccgtcgatctggtcgatgaggctgcagccgctgttgctgttgctcgagactctcgacccgagcatctggactccctggagcgagagcttgatctgctcatgatcgaggtcaaggctctggagcgagaccagcacgccgaccagggtaccaaggagcgtcttgatgccgcgaagcaccgagtggctgacattgaggaggagctcggacctctgcgagagacctttgagcgagagcgagcaggtcacgttgagcttaacaacctcaagcacaaggttgatgagctcgagaccaaggctctcgacgccgagcgacgacgagacacttccactgctgctgatctgcgatactttgccattccggatctgaagaagcgaattgttgagcttgaagaggagaatgccgctaaggagaagtccatgatcaaggacgttgttggcgccgaccaggtagctgagactgcggctcgactgactggtatccctgtcaccaagctgacccaggccgagaacaccaagctcatcaacatggagaaggtgctttctcgagaagttgttggccaacccgaggctgtcaaggccgtttccaacgcgatcagactgtctcgatcgggtcttgccaaccccaacgcccccgcttctttccttttccttggtctctccggttccggtaagactgagcttgccaagaagctggcaggtttcctgtttgctgacgagcaggccatgatccgaatcgactgttccgagctcatggacaagcactccggctccaagctgattggtgctgctcccggatacgttggatacgaggagggtggtattcttaccgaggccctgatccgaaagccctactccgttgtgttgttcgatgaggttgagaaggctgctcccgaggtgctcactgttcttctgcaggttcttgatgatggtcgagtgcgatcttccgccggaaaggtggtcaacgcatccaactgtatcattatcatgacttccaacctgggtgcggagttcatcaaccgatcgacctcgactaccattgaccagtccactcgagacctggtcatggaggctgtcaagggccacttccgacccgagtttctcaaccgaatcaccgctatggttgtcttcaaccggctgtctaagaagtccattcgacgaatcatcaacattcgtctccatgagatttcgaagcgattcgagcacaacaaccgaaacctcaaacttcatctcgatgaggacgccatggactacctggtggagaacggttacagccccgacctcggtgctcgacctctcaaccgactcatccagaacgaggttctcaacaagcttgctgtcatgcttctgaagcaccagattaaggacggcgaggaggtccgaatcatccgaggagacaagggtctggagattctgcccaaccatgacggcgagacggacatggagctggctgaagattcctacgatgactttgacgacgagatggatctcgactaa

SEQ ID NO: 33681 - protein, 887 aa, Yarrowia lipolytica CLIB122
MNESEFTDRANKILKTSVELAQQHQQGTLQPIHLLAAMFDAEDDASDPYIKAVVERGKYDWDQFKRAVNKALVRLPSQSPPPDELSQSPAFSKVLQNAIKYKQRQKDEYVGQDHILMALLDDSSIESILKECGIKKDVMEANITAVRGKRRIDSRTADGADEFEFLNKYAIDMTKQAREGKIDPVIGREEEIRRCIRVLARRTKSNPCLIGDPGVGKTSIVEGVAQRIIDGDVPNVLANCQLFSLDLGALKAGAKYQGDFEERIKGVLKEIEDSKDMIILFIDEIHMLMGDGKGDAANLLKPMLARGSLHCIGATTNEEYRKHVEKDAAFERRFQKIDVREPTIRETVAILRGIQNKYELHHGVRILDSALVSAAQLASRYLTYRKLPDSAVDLVDEAAAAVAVARDSRPEHLDSLERELDLLMIEVKALERDQHADQGTKERLDAAKHRVADIEEELGPLRETFERERAGHVELNNLKHKVDELETKALDAERRRDTSTAADLRYFAIPDLKKRIVELEEENAAKEKSMIKDVVGADQVAETAARLTGIPVTKLTQAENTKLINMEKVLSREVVGQPEAVKAVSNAIRLSRSGLANPNAPASFLFLGLSGSGKTELAKKLAGFLFADEQAMIRIDCSELMDKHSGSKLIGAAPGYVGYEEGGILTEALIRKPYSVVLFDEVEKAAPEVLTVLLQVLDDGRVRSSAGKVVNASNCIIIMTSNLGAEFINRSTSTTIDQSTRDLVMEAVKGHFRPEFLNRITAMVVFNRLSKKSIRRIINIRLHEISKRFEHNNRNLKLHLDEDAMDYLVENGYSPDLGARPLNRLIQNEVLNKLAVMLLKHQIKDGEEVRIIRGDKGLEILPNHDGETDMELAEDSYDDFDDEMDLD

SEQ ID NO: 33682 - DNA, 2349 bp, Yarrowia lipolytica CLIB122
  CDS (1)..(2349)
atgtttcgagtgaacgcaaagaacgtgcagcgattgagggcgcgacctctcgctcacgccagcacaaggacccaggtccagaccagagctttgagtactgctgttcgacctacgacctccgctactaccagctgctctacatggggcaccatcagaaccccgacgatgattcgggctccaggaagcctcggatcgccgagattcatcactatgacccagaaccccggtggcgaaaagtcgtacctggagtcgtacggagtggatctgtgcgaaaaggccaaggagggcaagctagatccggtgattggtcgagacgaggagatcaagcgaacgatccagattctgtctcgacgaacgaaaaacaaccccgcgctgattggtctggccggaaccggtaagaccgccatcatggagggtctggcccagcgaatcgtcaacggcgaggtgcccgagtccatgaagggcaagcgggtgatagctctggacgtggggggactcatttccggcgccaagtaccggggcgagttcgaggaacgtctcaagggcattctggaggagattgacaaggctgagggcgaggtgattctctttgtcgacgagttgcatctgctgctgggcctaggaaagggcgagggctcggttgacgcctccaacctgctcaagcccgctctgtcgcgaggtaagctgcagtgctgtggagccaccaccattgacgagtaccgaaagtacattgagaaggatgcggccctggctcgacgattccagtcggtcatggtcaacgagccctccgtggaagacgccatttccattctgcgaggtctcaaggagcggtacgaggtgcaccacggagtgcgactgaccgacgctgctctggtgactgccgccgtctactccaaccggtacatttccgaccggttcctccccgacaaggccattgatctggttgacgaggcttgttcggccctgcgacttcagcacgagtccaagcccgacgagctgcaggagctggagcgccagacggtgactctggagattgagctggagtcgctgcgagaggaggaggaccctctgtcggtggagcgacgaaagaaggtggaggagaagctcgaattcaagaagggcgagattgagcggctcaccaaggtgtgggaggacgaaaagcgggccattgaccagatcaaggagacccaaaagacccttgatggcgcccgaaccgatctcgacaccgccagacgaaccggcgactttgccgccgcctccaagatccagtaccaggacattcccgagctggagcggattctcaaggacgccgagtcctccgacgccggctcttcgtctcttttgcacgactctgtgacccccaatgacattgccaaggttgtttctcgaatgaccggcatccctacatcgtccatgatgaagggcgagaaggacaagctgctagatatggaggtgtgcatgaagtcacgtgttgtgggccaggacgaggccgtggacgctgtggctgacgcagtgcgactccaccgagccggtctcaccaaccagaagcgtccagtagcctcgttcatcttcctgggacccaccggtaccggtaagaccgagctgaccaagggtctggccgagtttctgtttgacgacgagaatgccatcattcggttcgatatgtccgagttccaggagcgacactccattgctcgactcattggttctccccccggctacgttggctacgaagagtctggagagctgaccgaaaaggtgcgacgaaagccctacgccgtggttctgtttgacgagtttgagaaggcccaccctgatgtgtccaagctgctgttgcaggtgctggatgagggtacgctgaccgactcgcagggccgaaaggtggactttaccaacaccattctggtcatgacctccaacattggccaggagtatctgatttcggactctcccgactccaagaagaaggtgattgaggcgctcaagtcgcactacgcccccgagttcatcaaccgaatcgacgagactctggtgttcaaccgactgaccaaggaggcgctgaccgagattatcgacatccggctgctcgaggtccaggctcgactcgaggacaagcgaatcacgctctttgtcgacgacgaggccaagcagttcctcgtcgaccacggctacgaccccatgtacggcgcccgacctctcaaccgactcatccagaagaaggtgctcaacccactggctctccatctgatccagggccgaacccgaaccggcgagaatgtgcacgtgactgttaaggacggcgacatttacgttcctgccaaccacgagactggagagattgaggagtga

SEQ ID NO: 33683 - protein, 782 aa, Yarrowia lipolytica CLIB122
MFRVNAKNVQRLRARPLAHASTRTQVQTRALSTAVRPTTSATTSCSTWGTIRTPTMIRAPGSLGSPRFITMTQNPGGEKSYLESYGVDLCEKAKEGKLDPVIGRDEEIKRTIQILSRRTKNNPALIGLAGTGKTAIMEGLAQRIVNGEVPESMKGKRVIALDVGGLISGAKYRGEFEERLKGILEEIDKAEGEVILFVDELHLLLGLGKGEGSVDASNLLKPALSRGKLQCCGATTIDEYRKYIEKDAALARRFQSVMVNEPSVEDAISILRGLKERYEVHHGVRLTDAALVTAAVYSNRYISDRFLPDKAIDLVDEACSALRLQHESKPDELQELERQTVTLEIELESLREEEDPLSVERRKKVEEKLEFKKGEIERLTKVWEDEKRAIDQIKETQKTLDGARTDLDTARRTGDFAAASKIQYQDIPELERILKDAESSDAGSSSLLHDSVTPNDIAKVVSRMTGIPTSSMMKGEKDKLLDMEVCMKSRVVGQDEAVDAVADAVRLHRAGLTNQKRPVASFIFLGPTGTGKTELTKGLAEFLFDDENAIIRFDMSEFQERHSIARLIGSPPGYVGYEESGELTEKVRRKPYAVVLFDEFEKAHPDVSKLLLQVLDEGTLTDSQGRKVDFTNTILVMTSNIGQEYLISDSPDSKKKVIEALKSHYAPEFINRIDETLVFNRLTKEALTEIIDIRLLEVQARLEDKRITLFVDDEAKQFLVDHGYDPMYGARPLNRLIQKKVLNPLALHLIQGRTRTGENVHVTVKDGDIYVPANHETGEIEE

SEQ ID NO: 33684 - DNA, 2784 bp, Aspergillus nidulans FGSC A4
  CDS (1)..(2784)
atgaacaccgacaagtacacagacaaggccaacaaggccttacaagatgcgctagaactcaccatcgaacactcgaacgccgaactataccctgttcacctcgcagttgctctccttgacccctcacaaaacgaagatgacgggccatcgctccacccctctcacggagattccacctctctcttccgccaagtcgttgaacgcgcgcatggtgacgttcagctcctccaccgtggtcttatgaaacggctcgtcaagcttccgagccaagaccctccgccagagactcgtagcatctctgcgcccttccgaaaagttctcacagctgcggccgatttgtccaaaacgcagaaggacagctacatcgccgtggatcatctgatccaagctgtatgccaggattcaaccgttcaagctgctctcaaagacgccaatgttccgaacgtcaagttgattgataatgctatccagcaaattcgaggtacaaggcgggtagattcgaagacggcagatgctgagagcgaaaatgaaaacctcaagaaattcacaatcgacatgacggcgctggcccgagagggtaaaattgatcctgttattggccgagaagaggagattcgtcgtgtgatccgtattctcagtcggcgaaccaagaacaacccggtactgatcggcgagcctggtgttggtaaaacaacaattgttgaaggactcgctcgtcggattgtcaatgcagacattccagctagtttgtctcagtgcaaacttctttctctcgatgtcggctcactggttgctggaagcaagtaccgcggcgaattcgaagagagattgaagggtgtcctcaaagagatcgaggagtccaaagaaacgatcgttctttttgtcgacgaaatccatcttctcatgggtgcaggcgctagcggcgagggtggaatggatgctgccaatttgttgaaacctatgcttgctcgcggacagctgcactgtattggagcaacgacgcttggtgaataccgaaagtacatcgagaaggatgccgcattcgaacgacgattccagcaagtgctcgttaaggagcccactgtctctgagaccatctcgattcttcgtggtttaaaggagaaatacgaggtccaccacggaagcgtgcgaattctcgatgccgctatcgtcaccgcagctacccttgctgcacggtatctcacggcccgtcgactgcctgattcggcggtcgatctcattgatgaggctgctgctgccgtcagggtagcccgcgaatccgaaccggaggctcttgataaccttgagcgtaagcatcgacagctccagatcgagattcatgctctcaagcgtgaaaaagatgaggcttccaaagcccgtcttcaggctgccgagcaggaagcggccaatgttattgaagagctgcggcctatgcgtcagaagtacgaaagtgaaaagcaacgtaacaaggccatccaggatgccaagactaaattggacaacctgaagaacaagcaagaggaagccgagcgatccggtgacaccgaaaccgcagcagatctgaaatattacgctattcctgagacccagcaacacattgaaatgctggagaagcaacgggctgaagctgatgaggagcgccgcaaccgtcagggcgatgctggagagccgctgctagctgatgaagtcggtcctgatcagattaacgagattgtcgctaggtggaccggaattcctgtgacaagactcaaaacctcagagaaggacaaactattggagatggaaaagcacctaggcaagatagttgttggccaaagggaggctgtgaagtctatctccgacgccattcgtctccaacggtctggcctcagcaaccctaattctcctccaagcttcctattctgcggtccgtccggtacgggtaaaacgctgcttaccaaagctttggcggagttcctctttgatgaccccaagtccatgatccggttcgatatgtccgagtatcaggagcggcactctcttagtcgcatgatcggcgcaccccctggctatgtcggccatgatgcaggcggccagctgactgagtcacttcgccgccgaccattctccatcctcctgttcgacgaggtcgaaaaggcagccaaggaggtgcttactgttctcctccagctcatggacgacggccgcatcactgacggccaaggcagagtcgtcgacgcccgcaactgcattgttgtgatgacatctaatctcggcgccgaatacctagcccgcccaacgaccaaggacggtaagatcgaccctcagacacgcgaactggtcatgggcgctctccgcaactacttcctccccgaatttctcaaccgtatctccagcatcgtcattttcaaccgcctcaccaagaaggaaatccgcaaaattgttgacctccggctcgatgaggtccagcgccgcctcgagcaaaatggccgcaacgtcgtcattgagtgtactgaagaggttaaggactatctcggccagtcaggctactcgccagcttatggtgcccgtccgctaggacgcatcatcgagcgcgaggtcctcaaccgcctcgccgtcctaattctgcgtggaagtatccaagacggtgaggttgctcgcgtagttatgcgcgatggccggattgacgttattcccaaccatgaaatggccattgatgaagaccaggacatgacagatgaggacgacttcgatgccatggccgaaatggaagacaacggcggagatatggatttgtacgagtaa

SEQ ID NO: 33685 - protein, 927 aa, Aspergillus nidulans FGSC A4
MNTDKYTDKANKALQDALELTIEHSNAELYPVHLAVALLDPSQNEDDGPSLHPSHGDSTSLFRQVVERAHGDVQLLHRGLMKRLVKLPSQDPPPETRSISAPFRKVLTAAADLSKTQKDSYIAVDHLIQAVCQDSTVQAALKDANVPNVKLIDNAIQQIRGTRRVDSKTADAESENENLKKFTIDMTALAREGKIDPVIGREEEIRRVIRILSRRTKNNPVLIGEPGVGKTTIVEGLARRIVNADIPASLSQCKLLSLDVGSLVAGSKYRGEFEERLKGVLKEIEESKETIVLFVDEIHLLMGAGASGEGGMDAANLLKPMLARGQLHCIGATTLGEYRKYIEKDAAFERRFQQVLVKEPTVSETISILRGLKEKYEVHHGSVRILDAAIVTAATLAARYLTARRLPDSAVDLIDEAAAAVRVARESEPEALDNLERKHRQLQIEIHALKREKDEASKARLQAAEQEAANVIEELRPMRQKYESEKQRNKAIQDAKTKLDNLKNKQEEAERSGDTETAADLKYYAIPETQQHIEMLEKQRAEADEERRNRQGDAGEPLLADEVGPDQINEIVARWTGIPVTRLKTSEKDKLLEMEKHLGKIVVGQREAVKSISDAIRLQRSGLSNPNSPPSFLFCGPSGTGKTLLTKALAEFLFDDPKSMIRFDMSEYQERHSLSRMIGAPPGYVGHDAGGQLTESLRRRPFSILLFDEVEKAAKEVLTVLLQLMDDGRITDGQGRVVDARNCIVVMTSNLGAEYLARPTTKDGKIDPQTRELVMGALRNYFLPEFLNRISSIVIFNRLTKKEIRKIVDLRLDEVQRRLEQNGRNVVIECTEEVKDYLGQSGYSPAYGARPLGRIIEREVLNRLAVLILRGSIQDGEVARVVMRDGRIDVIPNHEMAIDEDQDMTDEDDFDAMAEMEDNGGDMDLYE

SEQ ID NO: 33686 - DNA, 2403 bp, Aspergillus nidulans FGSC A4
  CDS (1)..(2403)
atggcgtcaaggctgcagttaagccgtagtcgattgctgcgcccatcaaacctcacgtacacaccttcgaaccgattagtgcgaccatgtccatcgttacgcatcctccctcgcgcgcggttaccctcactctcaacgaatattgccgcccctctatccagctctagcatcagaaactatgctagtggtcgaccgcaccctcccggtgggacgcatcggatgaatctgggcggcgagccggagaaggcagcattggaacagtatggcgtcgacttgacggccaaagccaaagccggcaagttggacccagtcatcggaagagactcagagattcatcggacaatccaagtgctatcgcggcggaccaagaacaatcctgtcctcatcggtgccgctggtactggaaaaaccgctgttttggaagggttggcgcaaagaatcgtgcaaggcgatgttccggagagcatcaaaggcaagcgcgtcattgctcttgaccttggatcacttattgctggagcaaaatttagaggtgactttgaagaacgattgaagtccgtcctcaaagaagttgaggaagctcaaggcggcgtcatcctgttcattgacgaacttcacactcttctcggacttgggaaagcagaaggaagtattgatgcgagcaatctgctgaagccagcactctcgcgtggcgaacttcaatgctgtggtgccaccaccttaaatgaataccgattgattgaaaaagacgttgctttggcaaggcggttccagcctattcaagtcggcgagccttctgtcgccgctactatctccattttacgtggtatcaaggacaaatacgaggtacaccatggtgtacgtattacggatggtgccttggttgctgctgcaacttatagcaaccggtacattaccgaccgattcctgcctgacaaggccatcgacctagtagacgaagccgcgtctgctttgcgtctgcagcaggagtctaagccagatatcatccgagagttggaccgtgatatcaccaccattcaaattgagctcgaatctcttcgcaaagaaacggacatcagcagtcgcgagagacgcgagaaacttgaagaagacctgaaagctaaacgggaggagtccagaaaattgacagaaatttgggaaaaggagaaggcggaaatcgagagtctcaaacgtactaaagaagagctagaacgcacccggtttgaactggagcaagcgcaaagagaaggaaactttgctaaggcaggagaactacgatactccaagatcccatcccttgaagcaaaactgccaaaggaaggagatgagcaaaaggatccacagtcaactcttatccatgactcggtcaccgctgatgacattggtgccgttgtttcacgaacaactggtatcccagtcagcaagctgatggctggagaagttgagaaactgatacacatggaagatacccttcggcagtctgttcgcggtcaggacgaagcgctgtcggctgtcgctaacgcagtccgtatgcaaagagcaggacttagtggcgaaaaccggccgctcgcgtctttcatgtttcttggtcctaccggtgttggtaagactgagctttgcaagaaaatggccgagttccttttctcgacggagaccgccgttgtacgattcgacatgagcgagtttcaagagaaacataccatcagccgcttaattggctctcctgctggatatgtcggctacgacgacgctggtcagctcactgaagctgtcagacggaagccgtatgccgttcttttgtttgacgaattcgagaaggctcatcgggatatctccgctctattgcttcaggttctagatgaaggcttcctcacagacgcgcagggtcacaaagtcgatttccggaatactcttattgttcttacgtctaaccttggcgccgaccttcttattggcgctgatcccattcattcgtccaaggcctcgactgatggggaaatcactccggagcttaaaaaggccgtcatggatgtcgttcagcaagcctatccgcctgagtttcttaaccgcatcgatgaattcattgttttcaagagactttcacgggaggctctgagggatattgttgatatcagaatcaaagagcttcagtcaagattggatgaccggcgtatgaccctccaagttgacgatgagatcaaggactggctctgcgaaaagggctacgaccctaaattcggtgcccggccgcttaaccgcttgatatcgaaagaaattggcaaccgcctggccgataaaatcatccgtggcgaggtcacatccggacagatggctcgtgtcgcattcaatgccaataacgatgggcttgaagttacagcggtcgcccagggcgaggaacaagcttaa

SEQ ID NO: 33687 - protein, 800 aa, Aspergillus nidulans FGSC A4
MASRLQLSRSRLLRPSNLTYTPSNRLVRPCPSLRILPRARLPSLSTNIAAPLSSSSIRNYASGRPHPPGGTHRMNLGGEPEKAALEQYGVDLTAKAKAGKLDPVIGRDSEIHRTIQVLSRRTKNNPVLIGAAGTGKTAVLEGLAQRIVQGDVPESIKGKRVIALDLGSLIAGAKFRGDFEERLKSVLKEVEEAQGGVILFIDELHTLLGLGKAEGSIDASNLLKPALSRGELQCCGATTLNEYRLIEKDVALARRFQPIQVGEPSVAATISILRGIKDKYEVHHGVRITDGALVAAATYSNRYITDRFLPDKAIDLVDEAASALRLQQESKPDIIRELDRDITTIQIELESLRKETDISSRERREKLEEDLKAKREESRKLTEIWEKEKAEIESLKRTKEELERTRFELEQAQREGNFAKAGELRYSKIPSLEAKLPKEGDEQKDPQSTLIHDSVTADDIGAVVSRTTGIPVSKLMAGEVEKLIHMEDTLRQSVRGQDEALSAVANAVRMQRAGLSGENRPLASFMFLGPTGVGKTELCKKMAEFLFSTETAVVRFDMSEFQEKHTISRLIGSPAGYVGYDDAGQLTEAVRRKPYAVLLFDEFEKAHRDISALLLQVLDEGFLTDAQGHKVDFRNTLIVLTSNLGADLLIGADPIHSSKASTDGEITPELKKAVMDVVQQAYPPEFLNRIDEFIVFKRLSREALRDIVDIRIKELQSRLDDRRMTLQVDDEIKDWLCEKGYDPKFGARPLNRLISKEIGNRLADKIIRGEVTSGQMARVAFNANNDGLEVTAVAQGEEQA

SEQ ID NO: 33688 - DNA, 2700 bp, Candida albicans SC5314
  CDS (1)..(2700): transl_table=12
atggaagattttacagataacgctatcaagattatcaataatgctactgaattggcaaaacaacaggccaattcgcaattgttaccccttcattttcttgctgcatttatcccatcagatgatactgaaggctcaacacagtatttgaaaacgttggtcaagagagcaagatacgaatggggcgatttcgaaagaatcgtgaacagacatttggttaaaataccatctcagaacccccctccagatgaaatacgaccaagctatcaagcaggccaggtgttaacgaaggccaacaaaatcaaacaacaacaaaaggactcatatgttgctcaggaccatattttgttggcgctcttggaggaccaatcaattaaagatattttcaaagaagctggtatgagtgttgacacaataaagacacaagctattgaattgagagggtcccaaaggattgactccagacaagctgattcgtcttcatcttatgaatttttgaacaagtattgtgaagattttaccgaaaaggctagggaaggtaagattgatcctgtaattggtagagaggaagaaattcgaagagtcatcagagttttggcaagaagaagcaaatcgaactcggtgttgattggtgatgctggtgttggtaagacttctattgttgaaggtgttgcacaaagaatagttgatggggacgttccaaatgttttggctggctcaagattatttgctcttgatttgggtgcattgactgcaggtgcaaaatacaagggtgagtttgaggaaagattgaaaggtgttttgaatgaaattgaaaaatccaaagagtttatcatcttgttcattgatgaaatccacatgttgatgggtgatggtaaatcagatgctgctaatttgttgaagccaatgttggccagaggtgcattacattgtattggtgctactacctttgctgaatacagaaagttcatttccaaagatggtgcatttgaaagaagattccaaaaaatcgatgttcctgccgccaccgtgcaagaaactgttgccattttaagaggtatccagcctaaatatgaaattcaccatggggtccgtatattggatagtgcattggtcactgctgctcagttggcttcaagatacttgacatacagagcattacctgattcagctgttgatcttgttgatgagagtgctgctgctgttgctgtggctagagactctaagccagaagagttggacactttggaaagacaattgcatttggtagatgtcgaaatcaatgcattagaaagagacaaagatgcagactctgcttccaaggaacgtttgaatttggccaaaaagaagaaagcagaattggaagaaaaaattggaccattgaacgagagatacagacaagaacgtgctagtcatgaacaattgactgctgccaaaagaaaattggatgaacttgagatcaaagctcaagatgctgaaagaagatacgatactgctactgctgctgacttgagatactttgctatcccagatatccagaagcaaattgaagagttagaagtcaaagttgctgaagaggaagcttctaatttggacagcttgttgaagaatgcagttggaccagaacaaatatgtgaaaccgctgctagattgactggtatccctgtcacgaaattgtcgcaagcagaaaacaataaattgatcaatatggaagcagaattgtcgaaagaagttgttggacaatcggaagctgtgaaggcagtctccaatgccatcagattaagaagatcgggtttggctaatcctaaccaaccaccatcctttttgtttttgggtctttctggttcgggtaagactgaattggctaagaagcttgctggttttctctttgcagacgaaaaggcaattattagaattgactgctctgaattgggagacaaatggtctgcttcaaaattgttgggtgctgctccaggttatgttggatatgaagaaggtggtatcttgactgagccattaatcagacggccatactctgtggtcttgttggatgaagttgaaaaagctgctcctgaagtgttgactgtgttgttacagattttggatgacggcagagttacctcttctcaaggtaagcttgttaactgctcgaatgccattttcataatgacgtctaatttgggtgcaaactacatcaatgccgccaagggaagcaagattgatgccaacacaaaggaacatgtaatggatgctgtgagagcacatttcagacctgaatttatcaaccgtatttccagtattgttgtgtttaacagattgtcgagaaaagccatttccaagattgtcaagatcaggttgtccgaaattgaaaacagattcactgctaatggtaaggctatacaattgaagctagatgatgatgccatggagtacttgtgcaagaatggatggtcacctgacttgggtgcaagaccattgaaccgcttgatccaaaacgagattttgaacaggttggctgtaatgttgttgaaagggcaaatccaagataaagaaactgctagagttgttcttggcgaaaaaggtttggagattttacctaaccatgaaccagaagatgtggaaatgaatgatgttgataactggcaagactcagaggatgaagatgatgacgaagccagattcacctcacctggacttgactaa

SEQ ID NO: 33689 - protein, 899 aa, Candida albicans SC5314
MEDFTDNAIKIINNATELAKQQANSQLLPLHFLAAFIPSDDTEGSTQYLKTLVKRARYEWGDFERIVNRHLVKIPSQNPPPDEIRPSYQAGQVLTKANKIKQQQKDSYVAQDHILLALLEDQSIKDIFKEAGMSVDTIKTQAIELRGSQRIDSRQADSSSSYEFLNKYCEDFTEKAREGKIDPVIGREEEIRRVIRVLARRSKSNSVLIGDAGVGKTSIVEGVAQRIVDGDVPNVLAGSRLFALDLGALTAGAKYKGEFEERLKGVLNEIEKSKEFIILFIDEIHMLMGDGKSDAANLLKPMLARGALHCIGATTFAEYRKFISKDGAFERRFQKIDVPAATVQETVAILRGIQPKYEIHHGVRILDSALVTAAQLASRYLTYRALPDSAVDLVDESAAAVAVARDSKPEELDTLERQLHLVDVEINALERDKDADSASKERLNLAKKKKAELEEKIGPLNERYRQERASHEQLTAAKRKLDELEIKAQDAERRYDTATAADLRYFAIPDIQKQIEELEVKVAEEEASNLDSLLKNAVGPEQICETAARLTGIPVTKLSQAENNKLINMEAELSKEVVGQSEAVKAVSNAIRLRRSGLANPNQPPSFLFLGLSGSGKTELAKKLAGFLFADEKAIIRIDCSELGDKWSASKLLGAAPGYVGYEEGGILTEPLIRRPYSVVLLDEVEKAAPEVLTVLLQILDDGRVTSSQGKLVNCSNAIFIMTSNLGANYINAAKGSKIDANTKEHVMDAVRAHFRPEFINRISSIVVFNRLSRKAISKIVKIRLSEIENRFTANGKAIQLKLDDDAMEYLCKNGWSPDLGARPLNRLIQNEILNRLAVMLLKGQIQDKETARVVLGEKGLEILPNHEPEDVEMNDVDNWQDSEDEDDDEARFTSPGLD

SEQ ID NO: 33690 - DNA, 2757 bp, Ustilago maydis 521
  CDS (1)..(2757)
atgtcgttcgagttcacagatcgcgcacagtcgtcggtctcggcagcgcttcagctcgccaaggaccactcgcatccacaagtgagccctgtgcatatcgccttggcactcttgaccgatgacacctctaactcgcaaggtgtccaatcgaccaacgaatcgagccagtcactcttcaagagcatctgctccaaggcaggtgtcgacatcaagatctttgaagacaagctccgcaccgcagttcgcaagattccgtcccaatccccacctcccgatgatattagcctctccaatcccgcgctcaaggtcctcaaagaagccgaaagccagaagagcacgcagcgagacgcgtacatcgcgcaagatcacatccttctagggctcatccaagacaacaccatcaagcaactgctcaaggaagcaggtctcgacaacgaacagcttatcaagaccgccatcactcaggcaagaggcggtcggcacattgatagcaagaacgcggaagcaggatatgacgctcttgcgaagtactgcaccgacctcacgcagctcgcagcagagggctctcttgatcccgtcatcggtcgtgatcaggagattcgacgagccgtccgagtgctctccaggaggacgaagaacaatgccgtgctcatcggcagtcctggtgttggtaagaccgccattgtcgaaggtcttgctcagcgtgtcgtcgaccgtgatgttccacccaaccttctgggtaaaatcctcagtctcgatgtcggcggcctcatggccggggccaagtaccgcggcgagtacgaggagcgtgtcaagtcggtgctcgccgacatcgaaaagatgaccgccgacggaaccccctgcattctctttatcgacgagatgcatcttctcatggctggccagggtagctcgggtggaggcatggacgctgccaatctactcaagcccatgcttgctcgtggtaagctccgcgtcattggctgcaccaccgccaacgagtacaggcagtacatcgagaaggatgcagccctagagcgacgattccaatcgatcctcgtcaacgaacctaccgtcgaggactgcatcgccattctccgtggtatccgcgacaagtatgaggtgcaccacggcgtccgcatccttgattccgccatcgtctctgccgcacagcttgccaagcgctacctcaccgatcgacgcctgcctgactcggccatcgacttggtcgacgaggcgtgtgccgatgtcagggtttcgagagaaacagtccctgaagaggtcgataagctcgagcgaaagcgtctccagctcgagatcgccgtacacgcactttcgcgagagaaggacgcgcaatccaagcagtcgctcgaggagaccaagaagcagatccaggccatcgacgacgagctcgctcccatcaaggcggctttcgaagcgcagaaggccaagggtgaagagatcaacacggttcgacgcaagatggaggaggtgcgtgccaagattgccgaagctgagcgtcgctacgatctcgccaccgcctctgatctcaagttttacgcgctgcccgatctcgaggccaagctgaatcagctgcaggctgccgaacgtaagcgcgaggaggaaggtctcaactcggacaataacgctgtcaccgccgactcgatcgccgcgattgtctcgcgctggacaggcatccccgtgtcgcgcatgctcgagtccgaaaagaacaagttgctgcgtctcgaacgcacgctcgccaaggaggtcattggtcaggacgaggcagtcaagagcgttgcgcaggccatccgactgtcgcgctccggtcttgctgacgccaatcgtcctatcgcctcgttcctctttgctggatcttccggttccggcaagacgctgctgagccgtacgcttgccaagtgcatgttcgactcggccgacgccatggtgaggatcgactgcagcgagttttccgagaagcactcgatctcacgtctgatcggtgcgccgcctggctacgtgggacacgaagaaggtggcgtgctgacggaagcggtacgtcgcaagccgttcagcattgtgctactggatgagatcgaaaaggcagcgcgcgagttcattcagctcttcctcggtgtgctcgacgagggtcgtttgcaggacagccagggccggcaggtgtcgttccgcaacacgattatcatcatgacgtccaaccttggctcggcgtacatcaacgagtcggaggtcgaagagatgacagatgctacgcgccaactggtgatgaacagcatcaaagctgcgatgccgaccgagtttgtcaaccgaatcgacagcatcgtggtgttcagcaagctttcgcgtcgcaacgttaagtcgatcgtcgatgttcgactgcgcgagatcgagcagcgcatccaggcgaacggaggcaagtccaagttggtgctcgacgatgcggccaaggactttttggtctcgatcggcttttcgcctaccatgggcgctcgtccgctcaaccgtgcgattcagcaggagctgctctcgcctctgtcgatcctgatcctgtccggcaggatcaacattaaagacgatgccgagatccgcgttcagttcgatccgcacaggaacgggttggtcgtgctgcctaaccacgagggcaatgcgaatggtgtcgaggacgagcccatgtcggacgacgacgatgacctcgatgactatgggcatgccaagatcgaagaagatccgctcgactga

SEQ ID NO: 33691 - protein, 918 aa, Ustilago maydis 521
MSFEFTDRAQSSVSAALQLAKDHSHPQVSPVHIALALLTDDTSNSQGVQSTNESSQSLFKSICSKAGVDIKIFEDKLRTAVRKIPSQSPPPDDISLSNPALKVLKEAESQKSTQRDAYIAQDHILLGLIQDNTIKQLLKEAGLDNEQLIKTAITQARGGRHIDSKNAEAGYDALAKYCTDLTQLAAEGSLDPVIGRDQEIRRAVRVLSRRTKNNAVLIGSPGVGKTAIVEGLAQRVVDRDVPPNLLGKILSLDVGGLMAGAKYRGEYEERVKSVLADIEKMTADGTPCILFIDEMHLLMAGQGSSGGGMDAANLLKPMLARGKLRVIGCTTANEYRQYIEKDAALERRFQSILVNEPTVEDCIAILRGIRDKYEVHHGVRILDSAIVSAAQLAKRYLTDRRLPDSAIDLVDEACADVRVSRETVPEEVDKLERKRLQLEIAVHALSREKDAQSKQSLEETKKQIQAIDDELAPIKAAFEAQKAKGEEINTVRRKMEEVRAKIAEAERRYDLATASDLKFYALPDLEAKLNQLQAAERKREEEGLNSDNNAVTADSIAAIVSRWTGIPVSRMLESEKNKLLRLERTLAKEVIGQDEAVKSVAQAIRLSRSGLADANRPIASFLFAGSSGSGKTLLSRTLAKCMFDSADAMVRIDCSEFSEKHSISRLIGAPPGYVGHEEGGVLTEAVRRKPFSIVLLDEIEKAAREFIQLFLGVLDEGRLQDSQGRQVSFRNTIIIMTSNLGSAYINESEVEEMTDATRQLVMNSIKAAMPTEFVNRIDSIVVFSKLSRRNVKSIVDVRLREIEQRIQANGGKSKLVLDDAAKDFLVSIGFSPTMGARPLNRAIQQELLSPLSILILSGRINIKDDAEIRVQFDPHRNGLVVLPNHEGNANGVEDEPMSDDDDDLDDYGHAKIEEDPLD

SEQ ID NO: 33692 - DNA, 2505 bp, Cryptococcus neoformans var. neoformans B-3501A
  CDS (1)..(2505)
atgctcgcacgaaaacatctcataagaacagcacgcctatctatcccacgcccttcagtcgccacccgcgccgtcgctttaggatttgtccgtacctatgcccaaggtcctccacgtcctccgcccggcggcccaggtggtccacccggtggcggctttggcggaatgcgctttcccgggggaggcatgatgggccagcaacctgaaaagggcgagacactgaagcagttctccatcgaccttactaagctggcaagggatggcaaactcgaccctaccattggaagagacgaggagattagaaggactatccagattttgagtaggagaactaaaagtaacccggtattgcttggtcttcccggtgttggaaagactgcgatcttggaaggactggctacgcggattgtgaataaggaggtgccagagtcattacatggcaaacgtctattaactctcgacttgtcatcacttatggccggtaccggcgttcgaggagaatttgaatctcgatttaagtcactcctcaaagatattgaggaagaagagggcaacgttattgtctttatcgacgagctccatacacttctcaaccttggtaaagctgaaggctctcttgatgctggtaacatgatcaagcctgccctcgcccgtggtcttcagcttgttggcgccactacacttgacgagtaccgcaagtctattgaaaaggacgcagctcttcaacgacgtttccaacccatcatgattaacgagcctagtgttgagtcgaccatttcaattctgcgaggtttaaagtcaagatttgaagtacactttggtgtgcagatagccgactctgccttagttactgccgccgtctattcagacagatatatctctgatagattccttccagataaggccattgaccttgtcgatgaagcctcatctgccctcaaactcgcccaagaatcacgacctaccgaacttgaaaagctcgatcgagaaattgtcactcttgagattgagagagaatccctcaagaatgaagaggaccctttttcagtcagtcggatggagaaagtagaaaaggaattggaggagaagaagcaagaacaacgacgtctggcggatctttgggctcaggaaagagaacgtgtagcggagatcaagggaattaaggaacagattgagcaggccaacgttgatttggaaaatgcgcagagaaatggggagtttgaaaaggcgtccaaattgagattctcgacaattccccagctgcaggccaagttacccaaggctcaggcagagttgaaatcggaaaatgaagaagaacctggtatggccgtccgtgatagggtgacaagtgaggatatcgcagttgtggttgccaagtcgactggtattcctgttgccaatctcctcaagggcgagcgtgaacgtcttgtacatatggaagaatctctcaaacaacgcgtcgttggccaagatcaggtcattcacgccgtggctgatgccgtccgactttctcgagcgggtcttcaagcgcctacccgacctcttgcttcattcttgttcctcggtcctactggtgtaggtaagactgaacttacgaagagtcttgccgagtttttatttgccgatgaaaagagggctttgatccaactcaacatgtctgaattccacgataaacacactgtatcccggcttatcggtgcgactgccgggtttgtcggctatgaagaaggtggtcagttgactgaagccgtccgccgtcgaccatacgctgtcgtagtatttgacgagattgaaaaggcacaccctgatgttgccaacattctcctgcagatccttgatgaaggttgtttgaccgacggtcagggtagactggtcaatttcaagaacacgattatctgtttgacttccaatcttggatcagaagcgctctatgagcctgacgcgactcatcccgatgggtccattaccgaagccacccgggcctctattctctcccatgttggtcgcttcttccgtcctgagctggtcaatcgtctcgacgaacttctcatcttcaacaagcttccgccttccgtcatccttgatattgtttctcttcgactcagtgagcttcagtctagacttgatggacgacgtatcactttggaagtaagtgatgacgcgagagcttggctggcgaagaagggattctctgaagaatatggcgcgcgggctgttggaagggttgtaagagatcaagtgatcagcaaggtggctggcagattgttggatggtacgatcaaggatggagacattattaatattaggttggaaggggagagactggaaatctcgagtgcgcctaatcccaacattcctcatccctctcaagaaggtggcgatcatattagtccgtctgccagaggagcgtctacagaggcagagtctaggccattgaatatcctcgaggacggggtggaggaggaaggggatgaagatatcccgagaaggacggtttattactaa

SEQ ID NO: 33693 - protein, 834 aa, Cryptococcus neoformans var. neoformans B-3501A
MLARKHLIRTARLSIPRPSVATRAVALGFVRTYAQGPPRPPPGGPGGPPGGGFGGMRFPGGGMMGQQPEKGETLKQFSIDLTKLARDGKLDPTIGRDEEIRRTIQILSRRTKSNPVLLGLPGVGKTAILEGLATRIVNKEVPESLHGKRLLTLDLSSLMAGTGVRGEFESRFKSLLKDIEEEEGNVIVFIDELHTLLNLGKAEGSLDAGNMIKPALARGLQLVGATTLDEYRKSIEKDAALQRRFQPIMINEPSVESTISILRGLKSRFEVHFGVQIADSALVTAAVYSDRYISDRFLPDKAIDLVDEASSALKLAQESRPTELEKLDREIVTLEIERESLKNEEDPFSVSRMEKVEKELEEKKQEQRRLADLWAQERERVAEIKGIKEQIEQANVDLENAQRNGEFEKASKLRFSTIPQLQAKLPKAQAELKSENEEEPGMAVRDRVTSEDIAVVVAKSTGIPVANLLKGERERLVHMEESLKQRVVGQDQVIHAVADAVRLSRAGLQAPTRPLASFLFLGPTGVGKTELTKSLAEFLFADEKRALIQLNMSEFHDKHTVSRLIGATAGFVGYEEGGQLTEAVRRRPYAVVVFDEIEKAHPDVANILLQILDEGCLTDGQGRLVNFKNTIICLTSNLGSEALYEPDATHPDGSITEATRASILSHVGRFFRPELVNRLDELLIFNKLPPSVILDIVSLRLSELQSRLDGRRITLEVSDDARAWLAKKGFSEEYGARAVGRVVRDQVISKVAGRLLDGTIKDGDIINIRLEGERLEISSAPNPNIPHPSQEGGDHISPSARGASTEAESRPLNILEDGVEEEGDEDIPRRTVYY

SEQ ID NO: 33694 - DNA, 2697 bp, Cryptococcus neoformans var. neoformans B-3501A
  CDS (1)..(2697)
atggacaactttacagacaagtcctcagaggtcttgaaggccgccctcgacaaagcggcggagatggcgaacgctcaagttcacccattacatcttatatccgtcctctgggaggaaccaaaccagccttctagtggccctgaccagcccactttactcaaagccgctcttgaacatgttggcggtaatcccacccttttcaaccgtgctctcatgcacaagataaaccgattacccgttgtcgaccctcctccatcaccccctctgccccttgccaactccttcaatgctgttatacgggaagctcagaaattgcagaaggaccaaaatgaccagtttgtcgctgtcgaccaccttctcctcgcgttgcttcgcaccgatgcctccgatatgaaggagttgttgagaggtacgggtgctgagccgagagccctggaagcagagatcaagagaaaaagaggtggaaggaaggtcgacagcaaaggtgctgagggacagttcgatgctcttaataaatactgcgtggatcttaccgctctagcagagcaaggtaagcttgaccctgtgatcggtcgagacaacgaaatccgccgtgttattcgaattctctccaggcgcaccaagggtaaccctgtcctcattggggagcctggtgtgggtaagacggccattgccgaaggtcttgcccagcgaattgtcgaccgagatgtcccggcaagcttgatcagtcgtctacttgcccttgacatgggtgctctgatggctggcgccaagtacaagggcgaatacgaggagcgtgtcaaggccgttctcagcgaggttgaaaagtctggggatgaaggcacgcagattatcctctttattgatgaaattcacctgattatggccgggaaagattcaagcggcggtatggacgctgccaacttactcaaaccaatgttggctcgagggaagctcaaggtcattggtgctactactctgaacgagtaccgagaatacatcgagaaggattctgcctttgagcgtcgattcgctcaagtcatagttgacgaaccttctgttccagacaccgttgcaattatgcgtggtattcgcgaaaaatatgaaacacatcatggtgtccgtatcatggactctgcccttgtccttgctgcccaacttgccaaacaatatcttacagcacgacgcttgccagactctgccatcgatcttctcgacgaagcagccagtgctgtcaaggttgcccgcgaaacccgcccggaagccattgacgagcttgaacgcaaaaagcttggtttagaggtcgagatccatgcccttgagcgagagaaggacgaggcctccaaggaaagattggaagtagctaaaaaggctatcgccgacttggaagacaagctggggcctttgaaacgggaatatgagaacgacaagcatctgggagatcagattcatgagctgaggaggaagattgatgagctgcgaaccaaggctgatgaggcagaaagaaggtacgaccttgctacagctgccgacattcgataccactctattccccaacgtgaacaaaagcttcaagagttggagcagaaagaagctgagaagggttcgggtcagcaagtcgctccagagatgattgctgaggttgtggctcggtggactggagttcccgtgtcccgattggtcgaaaccgaaaaggccaaactcctccgccttgagaaattgatctccaaaaaggtcattggtcaaccagaggcggtcaagtctgtcgctaacgccattcggctcaatcgatccggccttggtaatcagaatcgccccattgcctcattcttgctagttggtccatctggtaccggcaaaacattgcttgccaagacattggcgggtgttatgttcaacagcgaggatgcaatggttcgtatcgatgcttccgagtactctgagaagcatgccatctcgcgtctcattggtgccggtcctggatacgtcgggcatgaggctggtggccagctgactgaggctgtcaggcgcaagccgtactccctcatcctcattgacgagatcgaaaaggcagcgcgcgaattccaccagctcttcctgcaagttctcgatgatggtcgtcttaccgatggcaaaggccgggtagttgacttccgcaacactatcgtcatgatgacttccaatgtcggctctatgtatctcaatgagcacccctcggagggagcagtcgatcctgctgttcgtgccaaggtcaatggggctatcgctaagactttccctccggagttcatcaacagaattgacgacatcattctataccgatcattgagcagagcggacattaggaaggtcgttgatgttagattgaaggaaattcagcaaaggttgttggataacaacaggaaaatcaagcttgatgtcgatgatccttcctgcgagtggttggctcaagctggatactctccgacgtacggtgctcgacccatggctcgtcttatccagaccgaaattctcaatcctctctcgcgactcttgctccaagggcgtgtgcgagacggtgaagttgcccacatcacggtcgaccttcggaagaacaggttggttgtgattcccaaccatgaacccgacgttatccagccggatgatagtgaagatgaggatgattcaatggatattgaggtggaagaaatggattaa

SEQ ID NO: 33695 - protein, 898 aa, Cryptococcus neoformans var. neoformans B-3501A
MDNFTDKSSEVLKAALDKAAEMANAQVHPLHLISVLWEEPNQPSSGPDQPTLLKAALEHVGGNPTLFNRALMHKINRLPVVDPPPSPPLPLANSFNAVIREAQKLQKDQNDQFVAVDHLLLALLRTDASDMKELLRGTGAEPRALEAEIKRKRGGRKVDSKGAEGQFDALNKYCVDLTALAEQGKLDPVIGRDNEIRRVIRILSRRTKGNPVLIGEPGVGKTAIAEGLAQRIVDRDVPASLISRLLALDMGALMAGAKYKGEYEERVKAVLSEVEKSGDEGTQIILFIDEIHLIMAGKDSSGGMDAANLLKPMLARGKLKVIGATTLNEYREYIEKDSAFERRFAQVIVDEPSVPDTVAIMRGIREKYETHHGVRIMDSALVLAAQLAKQYLTARRLPDSAIDLLDEAASAVKVARETRPEAIDELERKKLGLEVEIHALEREKDEASKERLEVAKKAIADLEDKLGPLKREYENDKHLGDQIHELRRKIDELRTKADEAERRYDLATAADIRYHSIPQREQKLQELEQKEAEKGSGQQVAPEMIAEVVARWTGVPVSRLVETEKAKLLRLEKLISKKVIGQPEAVKSVANAIRLNRSGLGNQNRPIASFLLVGPSGTGKTLLAKTLAGVMFNSEDAMVRIDASEYSEKHAISRLIGAGPGYVGHEAGGQLTEAVRRKPYSLILIDEIEKAAREFHQLFLQVLDDGRLTDGKGRVVDFRNTIVMMTSNVGSMYLNEHPSEGAVDPAVRAKVNGAIAKTFPPEFINRIDDIILYRSLSRADIRKVVDVRLKEIQQRLLDNNRKIKLDVDDPSCEWLAQAGYSPTYGARPMARLIQTEILNPLSRLLLQGRVRDGEVAHITVDLRKNRLVVIPNHEPDVIQPDDSEDEDDSMDIEVEEMD

SEQ ID NO: 33696 - DNA, 2592 bp, Prochlorococcus marinus str. MIT 9303
  CDS (1)..(2592): transl_table=11
atgcaacctacggcggatcaatttaccgaaaaaggctgggcagcaatcgttttggcccaacaacttgcccagcaacgcaagcaccagcaactggaaacagagcatttgttgttgtcactgctagagcaaaatgctttggcaggaagaatcctagaaaaagcaggtgtgtcgatcggcaacttgcaaacagccgtggaggcacacctgcatgaacagcccactctgcaggcagcgccagactctgtctatctgggcaaaggagtcaatgatctgctcgatcaagctgataaacataagcaagcttttggcgatggtttcatctcaattgaacatctgttacttgcattggccggggacaatcgttgcggccgcaagctgctcaatcaagcgggcgtggatgcgggcaaactaaaggttgcaattgacgcggtacgcggaaaccagaaggtgaccgatcagaacccagaaggaacttacgaatctctcgaaaaatatggcagagacctgactgctgctgctcgcgaaggcaaactcgaccctgtcatcggaagggacgatgagattcgacgcacgattcagattcttagtaggcgcaccaaaaacaaccctgtcctcattggggagccaggggtgggaaaaaccgcaattgttgaaggcctcgcacaacggattgttaatggcgatgtacctgcagcccttcagaacagacagttaatcgcccttgatatgggtgctttgattgcaggggcaaaatatcgaggtgaattcgaagagcgactcaaggcagtgctcaaagaagttaccgcctctgaaggacaaatcgtactttttattgatgaaatccataccgttgtaggagctggagctaccggtggggcaatggatgccagcaatctgcttaagccaatgctggctcgaggggaactgcgctgcattggtgcaacgaccctcgatgagcaccgacagcacatcgaaaaagaccccgctttagaaagaagattccagcaagtgcttgtggatcaacccaccgtgcaagacacgatctccatcctgcgtggtctcaaagaacgctacgaagtgcatcatggtgtgcgcattgctgataacgccctggttgctgcagctgtgctcagtagccgatatattgccgatcgttttttgccagataaagccatcgatttgatggatgaatctgctgcacgactaaaaatggaaatcacctccaagccggaggaaatcgatgaaatcgatcgcaagattgtgcagctcgagatggagaagctttccttaggacgtgagtccgactccgttagtaaggaaagattggaaaaactagaacgcgagcttgctgaattagcagagcaacaaagtgcgctcaatgcacagtggcaacaagaaaaaggtgcgattgacgacctttcttcgctcaaagaagaaatcgaaagggtgcaattgcaagttgagcaagccaagcgcagctacgacctcaacaaagcagctgaactggagtacggaactctggcgggattgcagaaacaactcagcgagaaagaaactgccctggcccaagatggagaggcaggcgataaatcactgctgcgagaggaggttacggaagacgatattgctgatgtcatcgctaaatggaccgggattcctgtcgccaagcttgtgcagtcggaaatggaaaagctgctgggacttgaagcagaactccaccaacgtgtgattggccaagaacaggctgtgcaagctgttgcggatgcgattcagcgttctagggcaggtttaagtgatcccaaccgcccgatcgcaagttttttatttctaggccccactggtgtaggtaaaacggagctatccaaggcattggcctctcaactgtttgacagcgaggcggctttggtgcgaatcgatatgtctgagtatatggagaagcacagtgtaagcagactgatcggggcacccccgggttatgtcggctatgaggctggtggacagctcaccgaagccgtacgcagacgcccttatgcggtaatcctgttcgatgaagtggagaaggcacacccagatgtgttcaatgtgatgttacagatcctcgatgatggacgtgttaccgatggtcagggtcgcacagttgattttacaaatacggtgctaattcttaccagtaatattggcagccagtcgattctcgacttgggaggcgatgatagtcaatacggggaaatggagcgtcgagttcatgatgctttgcacgctcattttaggcctgagtttctcaaccgcctggatgaaacaatcatctttcatagcctcaggcgcgaggaactgcgtcagatcgttgcccttcaggtcaatcggctgcgtgagcgtcttggcgatcgcaagcttggcctagagatcagtgatacagcagctgattggctcgctaatgctggctatgaccctgtttatggggccagacccctcaagcgagcgatccaacgcgagcttgaaactccaatagccaaaagtatcctggctggcttttatggagatagtcagattgtgcatgtggatgtggacgaggagcgtctgagctttcgataa

SEQ ID NO: 33697 - protein, 863 aa, Prochlorococcus marinus str. MIT 9303
MQPTADQFTEKGWAAIVLAQQLAQQRKHQQLETEHLLLSLLEQNALAGRILEKAGVSIGNLQTAVEAHLHEQPTLQAAPDSVYLGKGVNDLLDQADKHKQAFGDGFISIEHLLLALAGDNRCGRKLLNQAGVDAGKLKVAIDAVRGNQKVTDQNPEGTYESLEKYGRDLTAAAREGKLDPVIGRDDEIRRTIQILSRRTKNNPVLIGEPGVGKTAIVEGLAQRIVNGDVPAALQNRQLIALDMGALIAGAKYRGEFEERLKAVLKEVTASEGQIVLFIDEIHTVVGAGATGGAMDASNLLKPMLARGELRCIGATTLDEHRQHIEKDPALERRFQQVLVDQPTVQDTISILRGLKERYEVHHGVRIADNALVAAAVLSSRYIADRFLPDKAIDLMDESAARLKMEITSKPEEIDEIDRKIVQLEMEKLSLGRESDSVSKERLEKLERELAELAEQQSALNAQWQQEKGAIDDLSSLKEEIERVQLQVEQAKRSYDLNKAAELEYGTLAGLQKQLSEKETALAQDGEAGDKSLLREEVTEDDIADVIAKWTGIPVAKLVQSEMEKLLGLEAELHQRVIGQEQAVQAVADAIQRSRAGLSDPNRPIASFLFLGPTGVGKTELSKALASQLFDSEAALVRIDMSEYMEKHSVSRLIGAPPGYVGYEAGGQLTEAVRRRPYAVILFDEVEKAHPDVFNVMLQILDDGRVTDGQGRTVDFTNTVLILTSNIGSQSILDLGGDDSQYGEMERRVHDALHAHFRPEFLNRLDETIIFHSLRREELRQIVALQVNRLRERLGDRKLGLEISDTAADWLANAGYDPVYGARPLKRAIQRELETPIAKSILAGFYGDSQIVHVDVDEERLSFR

SEQ ID NO: 33698 - DNA, 2583 bp, Herminiimonas arsenicoxydans
  CDS (1)..(2583): transl_table=11
atgcgtctcgataaattgaccaccaagttgcaagaagccctcgccgatgcccagagccatgcagtcggcaacgataaccaatacatagaaccagtccacgtacttgtcgcactgctgagccaggacgacagcagcacgcgctcgttgctgcaacgcgcgggggccaacatcaatggcatggtgacagcgctgaaaagtgcactggagcgcctgcccaaagtctcaggcactggtggccaggtgcagatcagccgtgatctgactgcgctcctgaatctggcggacaaagaatcgcagatgcacggcgacgagttcatcgccacggaaatgcttttgctggcactgaccgaagacaagtccgaggccggcaagatcgcgcgcgagaacggtttgacgcgcaaggcgctgcaagccgcgatcaaggcggtgcgcggcagctcgaaagtcgattccgccgaaggcgaaggccagcgcgaagcgctcaaaaaatacacgatggacctgaccgagcgcgcacgtatcggcaagctcgatccggtcatcggccgcgatgatgaaatccgccgcaccatccagatcctgcaacgtcgctccaaaaacaatccggtattgatcggtgaaccaggcgtgggcaaaaccgccatcgttgaaggtttggcacaacgcatcgtcaacggcgaagtgcctgaaagcctcaagggaaaacgcgtgctgtcgcttgacatggcatcgctgctggcgggcgccaaatatcgcggcgagtttgaagaacgcctgaaagcggtgttgaccgaacttgcggaggacgaaggccagaccattgtcttcatcgacgaaatgcatacgctggtgggagccggcaaggcagaaggcgcaatggatgccggcaatatgctcaagccggcattggcgcgtggcgaactgcactgcgtcggcgcgaccacgctggacgaataccgcaaatacatcgagaaagatgccgcgctggaacgccgctttcaaaaagtgctcgtggatgagccaacggtggaagcgactatcgccatcctgcgcggcctgcaggaaaaatacgaagtccatcatggtgtcgacatcacggatccggccatcgtcgctgccgcagaactgtcgcatcgctacattaccgaccgctttctgcctgacaaggcgattgacctgatcgatgaagcggcggccaagatcaagatcgagatcgattccaagccggaagtcatggatcggctggatagacgcgtcattcaactgaagatagaacgcgaagcgatcaggaaagagaaagacgaagcatcgcaaaaacgtctggccctgattgaagaggaaatcgaaaaactcgggcgtgaatatgccgatctggaagaaatctggaaagccgagaaatccgctgcgcaaggcagccagcacatcaaggaagcgatagagaaagcccgtctgcagatggaagaagccacgcgtcaaagcgactggcagcgtgtgtctgaactgcagtacaaaacactgccggaactggaagcgcaactgaagaatgctgtcactggcgaagccagcgcaggcaaaccgcaactcgtacgcacccaggtcggtgcggaagaaatcgccgaagttgtttcgcgcgcaaccggtattcctgtttcgcgcatgatgcagggcgaacgcgagaagctgctgcagatggaagacgcattgcacaagcgcgtggtcggtcagcatgaagcaattgttgccgtgtcggatgcgattcgtcgttcgcgcgcgggtctcggcgatccggatcgtccttacggctccttcatgttcctcggcccaaccggtgtcggtaaaaccgagttgtgcaaggcgctggcttccttcctgttcgatacagaagattcgctggtccgcatcgacatgagcgaattcatggagaagcattcggtggcccgcctgatcggtgcgccgccgggttatgtcggctatgaagaaggcggctatctgaccgaagccgtgcggcgcaaaccgtactgcgtgatcctgctcgacgaaatcgagaaggcgcatcccgatgtgttcaacgtcctgctgcaagtgctggacgatggccgcatgacggatggacaaggccgtaccgtcgacttcaagaacaccgtcatcgtgatgacatcgaatctgggttcgcacaagattcaggcgatggaaggcaacgagccggcattgatcaagatggcggtgatggcggaagtgcagtcgcatttccgtcccgaattcatcaaccgtatcgacgagatcgtggtgttccacgcgcttgatgagaaaaacatcggcgcgattgccaagatccagctgcacacgctggaacaacgtctggcacgtatggatatgtctatggatgtatcggaagatgcattgcagaaaatcgcagaagccggcttcgatcctgtgtatggcgcacgtccgttgaagcgtgcgattcagcagcagattgaaaatcccttgtccaaggcgatcctggaaggaaagttcgggcccaaggatgtgatttcggttgatgtgaaaaatggcgaactggagttcgccaaagcgcagtaa

SEQ ID NO: 33699 - protein, 860 aa, Herminiimonas arsenicoxydans
MRLDKLTTKLQEALADAQSHAVGNDNQYIEPVHVLVALLSQDDSSTRSLLQRAGANINGMVTALKSALERLPKVSGTGGQVQISRDLTALLNLADKESQMHGDEFIATEMLLLALTEDKSEAGKIARENGLTRKALQAAIKAVRGSSKVDSAEGEGQREALKKYTMDLTERARIGKLDPVIGRDDEIRRTIQILQRRSKNNPVLIGEPGVGKTAIVEGLAQRIVNGEVPESLKGKRVLSLDMASLLAGAKYRGEFEERLKAVLTELAEDEGQTIVFIDEMHTLVGAGKAEGAMDAGNMLKPALARGELHCVGATTLDEYRKYIEKDAALERRFQKVLVDEPTVEATIAILRGLQEKYEVHHGVDITDPAIVAAAELSHRYITDRFLPDKAIDLIDEAAAKIKIEIDSKPEVMDRLDRRVIQLKIEREAIRKEKDEASQKRLALIEEEIEKLGREYADLEEIWKAEKSAAQGSQHIKEAIEKARLQMEEATRQSDWQRVSELQYKTLPELEAQLKNAVTGEASAGKPQLVRTQVGAEEIAEVVSRATGIPVSRMMQGEREKLLQMEDALHKRVVGQHEAIVAVSDAIRRSRAGLGDPDRPYGSFMFLGPTGVGKTELCKALASFLFDTEDSLVRIDMSEFMEKHSVARLIGAPPGYVGYEEGGYLTEAVRRKPYCVILLDEIEKAHPDVFNVLLQVLDDGRMTDGQGRTVDFKNTVIVMTSNLGSHKIQAMEGNEPALIKMAVMAEVQSHFRPEFINRIDEIVVFHALDEKNIGAIAKIQLHTLEQRLARMDMSMDVSEDALQKIAEAGFDPVYGARPLKRAIQQQIENPLSKAILEGKFGPKDVISVDVKNGELEFAKAQ

SEQ ID NO: 33700 - DNA, 2580 bp, Acinetobacter sp. ADP1
  CDS (1)..(2580): transl_table=11
atgcgttttgaaaaatttacaaatcggttgcaacaggtgctatctgatgcacaatcacttgcaacaggcaaagatcatactgcgattgatggtctacatattcttgcaaccatgctcgaagagccatctaacttaagtttattgcaacaagctggtgcacgtttaccagagttgaaacagaagcttgaacaagcgctcaaagatgcaccgactattactaatccgacaggtgatgtcaatctaaatcctgaagcggtaaaagtattaaatctggcggatcgccatgctcaaaaggcaggggatgaatttttgtctacagattgggtactgttggcattaaccgaaacaggtagtaccaaaagtttattaaatagcgtaggtgtaactacagataccttgcgcaaagtcattgaatctattcgaggcaacgataaagttatgagtaataatcacgaagatcaacgtgactcattaaacaaatataccatcgatctgactgagcgagctttggcaggtaaacttgatcctgtgattgggcgtgatgatgagattcgccgtaccattcaggtactttcacgtcgtaccaagaataaccctgttctgataggtgagcctggggttggtaaaaccgcgattgtagaaggcttggcacagcgtattgtgaatggtgaggtgccagaaagcttaaaaaataaacgcgtattgtcactcgatttaggttcactacttgcaggtgcaaaatatcgcggtgagtttgaagagcgtttaaaagcagtactcaatgatttggccaaacaagatggtcaggtaattttatttattgatgagttacatactttagttggtgcaggtaaatccgatggtgccatggatgcaggtaacatgctcaaacctgctttggcacgtggtgagttgcgttgtgtcggggcgacaactttagatgagtatcgccaatatattgaaaaagatgctgcgttagaacgtcgtttccagaaagtattggttgatgagccaagtgtagaagataccatcgctattttgcgtggtttgaaagaacgttacgaagtgcatcatggtgtaaaaattctcgactctgcgattattgctgctgcgaaaatgtcgcaccgctatattacagatcgtcagttgccagataaagccattgatttgattgatgaggcggcttcacgtatcaagatggagctagattcaaaaccagaagcactggatcgtttggagcgaagaatcattcagctcaaaatgcagcttgaagcagttaaaaaagatgaagatctaggaagtaaagccgaggttaaacatctggaagagcagatttctatcgttcaaaaagaatataacgatatggaagaggtctggcgtgcagaaaaggccttggttgaaggcacgaaagacgcacaggtcaagctcgatcaagcccgtattgcatttgaaaaagcgcaacgtgaaggtgatttggcagaggctgcacgtttacaatatggtgtgattcctgagttacaaaagcagcttgagcaagatgaagtggctgaagaaaatgaagagccaaaactattgcgaaataaagtcacagataatgaaattgctgaagtggtgagtgctgcgacagggattccagtggctaaaatgttgcagggtgaacgtgaaaaacttttacaaatggaaagctttttgcataaccgtgtagttggacaagatgaggctgtcattgcggtttcgaatgctgtgcgtcgttctcgtgcgggcttgtcggatccaaatcgtccaagtggttcattcttattccttgggccaacaggtgtcggtaaaactgaattaaccaaagcactggcaaacttcttgtttgatagtgacgatgccatgattcggattgacatgagtgaatttatggaaaaacactcggtgagtcgcttggtgggtgcacctccaggttatgtgggctatgaagaaggtggtgtgttaaccgaagcggtacgccgtaaaccatatagcgtggtactatttgatgaggttgaaaaagcgcatcccgatgtttttaacattttactacaggtgctcgatgatggtcgtctgactgattcacaaggtcgggtcattgactttaaaaatactgtgattgtgatgacctcaaacctcggatcacaagatgtacgtgagctgggtgaaggtgcgactgatgatgaggtacgtgcagtggtgatgtctgcggtgagtcaacatttccgtccagagtttatcaatcgaattgatgaactggtagtattccactcgttacaaaaatcgcaaattcgtggtatcgccgatattcaattggatcgtttacgttcacgtttggccgagcgtgacattggtttgaatattgatgatagtgcctttgatattctgattgatgctggtttcgatcctgtctatggtgcacgtcctttgaaacgcgcaatccagcaacaggttgaaaatacattagcccagaaaattctggcaggtgatttccagccaggagataacatcatcatcaaaggtgatcatggtgacttggtgtttgataaattaaaactgagttaa

SEQ ID NO: 33701 - protein, 859 aa, Acinetobacter sp. ADP1
MRFEKFTNRLQQVLSDAQSLATGKDHTAIDGLHILATMLEEPSNLSLLQQAGARLPELKQKLEQALKDAPTITNPTGDVNLNPEAVKVLNLADRHAQKAGDEFLSTDWVLLALTETGSTKSLLNSVGVTTDTLRKVIESIRGNDKVMSNNHEDQRDSLNKYTIDLTERALAGKLDPVIGRDDEIRRTIQVLSRRTKNNPVLIGEPGVGKTAIVEGLAQRIVNGEVPESLKNKRVLSLDLGSLLAGAKYRGEFEERLKAVLNDLAKQDGQVILFIDELHTLVGAGKSDGAMDAGNMLKPALARGELRCVGATTLDEYRQYIEKDAALERRFQKVLVDEPSVEDTIAILRGLKERYEVHHGVKILDSAIIAAAKMSHRYITDRQLPDKAIDLIDEAASRIKMELDSKPEALDRLERRIIQLKMQLEAVKKDEDLGSKAEVKHLEEQISIVQKEYNDMEEVWRAEKALVEGTKDAQVKLDQARIAFEKAQREGDLAEAARLQYGVIPELQKQLEQDEVAEENEEPKLLRNKVTDNEIAEVVSAATGIPVAKMLQGEREKLLQMESFLHNRVVGQDEAVIAVSNAVRRSRAGLSDPNRPSGSFLFLGPTGVGKTELTKALANFLFDSDDAMIRIDMSEFMEKHSVSRLVGAPPGYVGYEEGGVLTEAVRRKPYSVVLFDEVEKAHPDVFNILLQVLDDGRLTDSQGRVIDFKNTVIVMTSNLGSQDVRELGEGATDDEVRAVVMSAVSQHFRPEFINRIDELVVFHSLQKSQIRGIADIQLDRLRSRLAERDIGLNIDDSAFDILIDAGFDPVYGARPLKRAIQQQVENTLAQKILAGDFQPGDNIIIKGDHGDLVFDKLKLS

SEQ ID NO: 33702 - DNA, 2577 bp, Erwinia carotovora subsp. atroseptica SCRI1043
  CDS (1)..(2577): transl_table=11
atgcgtctggatcgtcttaccaacaaattccaacttgctcttgctgatgcccagtctctttcccttgggcgtgatcaccagtttattgaaccacttcatttgatgagcgctttgcttcatcaggccggaggaactgttggtccacttctgactgtcgcaggagccaatcttaatcacctgaaagccgaaatcgaccaagcaatcacgcgtttgcctcaggttgaaggtaccgatggtgatgtccaaccttcgaacgagttagtccgcgcattgaatatgtgcgacaaactcgcgcaaaagcgtggtgatacctttatttcctcagaacttttcgtgcttgctgctttggagtctcgcggcacgctgggggatatattgaaaaaggcgggtgtcacgcagcaaggtgtaacaaacgcgattgatcaagtgagaggaggagatcaagtgaacgatcagggggctgaagatcagcgccaggcattaaaaaaattcacaattgacctcacggaacgtgcggaacaaggcaagctcgacccggttatcgggcgtgatgaagagattcgccgtactattcaggtcctacaacgtcggaccaaaaataacccggtattaattggtgagcccggcgtggggaaaaccgcgatagtagaagggttagcccagcgcatcgttaatggcgaagtgcctgaaggcctgaaaaacaagcgcgtactttcgctggatatgggggcactggtggctggtgccaaatatcgtggtgagtttgaagaacgtttgaaaggtgtactcaacgatctgtctaaacaggaaggtaatgtcattctgtttattgatgagctccatacgatggtgggagcgggtaaagccgatggcgcgatggatgccggcaatatgctaaaacccgcgctggctcgcggtgaactgcattgcgttggggcgacgacgctggatgaatatcgtcaatatattgaaaaggacgccgcgcttgagcgtcgtttccagaaagtgtttgtcgcggaaccgaccgttgaagacacgattgcgattctgcgtgggctgaaagagcgttatgaattgcatcatcatgtgcaaattactgacccggcgattgttgcggcggcaatgttgtcccatcggtatatttcggatcgtaagctaccggataaagccattgacctgattgatgaggcggcatccagtattcgtattcagattgattcaaaaccagagcctctcgatcggcttgagcgccgaatcatccagttaaagctggagcaacaggctctgaagaaagaatctgatgaagccagtcaaaagcggcttgagttactaagtacggaacttgaccaaaaagagcgtgaatattcccgacaagacgaagagtggaaagcggaaaaagcgtcactcacgggaacgcagaatattaaggcctctttagagcaagcgaaaatttcgttggaacaggctcgacgtcagggagacctggggagaatgtctgagttgcaatacggcaaaatccccgagttagagaagcagttggcagctgcaacgcagcaggaaggaaaaacggtgcatttgctgcgtaatcgagtcacagatgttgaaatcgctgatgtgctggcacgctggactggaattcctgtttctcgcatgctggagggcgagaaagaaaaattattgcgaatggaggatgaactgcatcagcgagtgatcgggcagaacgaagccgttgaggcggtagcgaattctattcgtcgcagccgggcagggttatccgatcctaatcgtccgattggttcgttcctgttccttggaccaacgggtgtggggaaaactgaactctgcaaaacgctggcaacttttctcttcgacagtgacgacgctatggtgcgtattgatatgtccgaatttatggagaaacactcggtttcacgtctggtcggtgcgcctcctggatatgtcggttacgaagaagggggatatctgactgaagcggtacgccgtcgcccttattcggtcattttgctagatgagatcgaaaaggcacaccctgatgtgttcaatattctgcttcaggtattggatgatggtcgccttactgatggtcaggggagaacggtcgacttccgcaatacagtggtcatcatgacgtcaaacttgggatctgaccttattcaggaacgttttggtgagcgtagctataccgaaatgagagatatggttcttgacgtcgttagccatagcttccgtcctgaatttattaatcgtatcgatgaagtcgtcgtattccatcccctgggaagggcgcatattacgtcgatcgcacaaattcagcttcagagactgtacaagcgtcttgaagagcgtggatatagtgtcacgatcacggatgccgctttagatatgctcggagaggtcggattcgatcctgtctatggtgctcgtccgcttaaaagggcgatacagcaactgatagagaatccactcgctcagcagatattagggggggaactgatacccggtaagcggatcacattagatgttgaaggtgaacagatagtcgcacggcaagaataa

SEQ ID NO: 33703 - protein, 858 aa, Erwinia carotovora subsp. atroseptica SCRI1043
MRLDRLTNKFQLALADAQSLSLGRDHQFIEPLHLMSALLHQAGGTVGPLLTVAGANLNHLKAEIDQAITRLPQVEGTDGDVQPSNELVRALNMCDKLAQKRGDTFISSELFVLAALESRGTLGDILKKAGVTQQGVTNAIDQVRGGDQVNDQGAEDQRQALKKFTIDLTERAEQGKLDPVIGRDEEIRRTIQVLQRRTKNNPVLIGEPGVGKTAIVEGLAQRIVNGEVPEGLKNKRVLSLDMGALVAGAKYRGEFEERLKGVLNDLSKQEGNVILFIDELHTMVGAGKADGAMDAGNMLKPALARGELHCVGATTLDEYRQYIEKDAALERRFQKVFVAEPTVEDTIAILRGLKERYELHHHVQITDPAIVAAAMLSHRYISDRKLPDKAIDLIDEAASSIRIQIDSKPEPLDRLERRIIQLKLEQQALKKESDEASQKRLELLSTELDQKEREYSRQDEEWKAEKASLTGTQNIKASLEQAKISLEQARRQGDLGRMSELQYGKIPELEKQLAAATQQEGKTVHLLRNRVTDVEIADVLARWTGIPVSRMLEGEKEKLLRMEDELHQRVIGQNEAVEAVANSIRRSRAGLSDPNRPIGSFLFLGPTGVGKTELCKTLATFLFDSDDAMVRIDMSEFMEKHSVSRLVGAPPGYVGYEEGGYLTEAVRRRPYSVILLDEIEKAHPDVFNILLQVLDDGRLTDGQGRTVDFRNTVVIMTSNLGSDLIQERFGERSYTEMRDMVLDVVSHSFRPEFINRIDEVVVFHPLGRAHITSIAQIQLQRLYKRLEERGYSVTITDAALDMLGEVGFDPVYGARPLKRAIQQLIENPLAQQILGGELIPGKRITLDVEGEQIVARQE

SEQ ID NO: 33704 - DNA, 2577 bp, Legionella pneumophila subsp. pneumophila str. Philadelphia 1
  CDS (1)..(2577): transl_table=11
atgcgaatggacaaactaacatcaaagtttcaaatggcacttgcagatgcccaatccctggctttaggtagagacaatggatttatagaaccagaacatttaatgaaggccttgcttgatcagcaaggtggaagttgcagacctcttctcagtaaagcgggtgttaatataccactattaagaactttaattgaccaagctctggataaactacctaaagtatcaggcaccggaggagatattcacatatctaatgcattgaatagactacttaacctgactgacaaattatcgcaacaaagaaaagataactttatttcaagcgagctttttatattagcagcgataaatgaggatagtaaccttgcaaaaatacttaaacaagccgggggtgacaacaaagcaattgaaaaagcaattgatgagttaagaggtggagaaacggttaatgatccaaatgcagaggaacagcgacaagcccttgaaaaatatacactggatctgactgaacgtgccgagcaaggaaaattggatccagttattggacgagatgatgaaatcagacgcaccatccaggtattgcaaagaagaactaaaaataaccctgtattaataggtgaacctggtgttggtaaaacagccatagtagaaggtttggcacaacgaattattaatggtgaagtacctgaaggattaaagaataaacgcttactggcgctggacatgggtgccttgatcgcaggtgcaaaatatcgtggagagtttgaagaacgcttaaaaggggtgcttaatgatttggcaaaacaagagggtcaaatcatattatttattgatgaattacacactatggttggcgctggcaaggctgaaggagctatggatgccgggaatatgctcaagccagcattagctagaggtgaattgcattgcattggggctacgacattagacgaataccgacaatacattgaaaaggatgctgcccttgaacgacgttttcaaaaagtactggtcgatgaacccagtgtggaagacactatcgctatattaaggggacttaaggaacgttatgaagttcaccatggagttgaaattacagatcccgctttggttgctgcagcaacgctatcccatcgttacatcagcgaccgtcaactacctgataaagccattgatttaattgacgaggccgccagcttaatccggatggaaattgattcaaaaccagaaagtatggataaactggaacgacgcttgattcagctaaaaatcgagcgtgaagcattgaaaaaggaaaatgacgaagcatctaaaaaaagacttgttgatttacaaaaaagtatcgatgaattagagcaaaattattcagacttagaagaaatttggaaagctgaaaaagcgaccatgcaagggtccactcaaatcaaagaggcacttgagcaagccaaactggaaatggaaactgcaaggagagcaggagatttaagtcgtatgtccgaattacaatatggacgtatacccgagttggaaaaaagattaagccaagtctcttccgttgatgctatggaaacaaagttggtacgcaataaagtcaccgaagatgagatcgcagaagttgtttcaaaatggacaggaatcccagtatctaaaatgatggaaggagaaaaggaaaaactgctgaaaatggaagaagctttgcacagtagactcattggccagaatgaagcggtggatgctgtttctaatgccataagacggtcacgcgcaggcctgtctgatcctaatcgtccaattggttcatttctttttctggggccaactggtgtgggaaaaactgaactatgtaaagcacttgcttcttttctttttgatacggaagaggcgatggtgcgcattgatatgtctgaatttatggaaaaacactctgttgcgcgcttaatcggagcgcctcctggctatgtaggatatgaggagggtggctatttaactgaagcagtcagacgcagaccctattctgttatcttacttgatgaagtagaaaaagctcatacagatgtatttaatattctgcttcaagtgatggatgatggccgtctaacagatggtcagggacgtactgttgactttaggaataccgttattgttatgacctctaatctgggatctcaactcattcaggaaatgagcagcaaatttaattacgatgagattaaggctgcggtaatggatttagtcagccaacatttcaggcctgaatttatcaacagaattgatgaatcggtggtattccattccctgacaaaagaacaaattgcaaaaattgcagcaatccagattaactatttacatcatcggctgaaacaacaaaatatcactattgaagtcacaagtgaggctttatctcatttggctgaagcaggttttgacccggtctatggtgcccgccccctaaaacgtactattcagcaaaaattagagaatccactagctcaatcattattgactggaaaatttaaatccggggataccattattgtatcttataaagatggagtaatggaattttacaagcaatga

SEQ ID NO: 33705 - protein, 858 aa, Legionella pneumophila subsp. pneumophila str. Philadelphia 1
MRMDKLTSKFQMALADAQSLALGRDNGFIEPEHLMKALLDQQGGSCRPLLSKAGVNIPLLRTLIDQALDKLPKVSGTGGDIHISNALNRLLNLTDKLSQQRKDNFISSELFILAAINEDSNLAKILKQAGGDNKAIEKAIDELRGGETVNDPNAEEQRQALEKYTLDLTERAEQGKLDPVIGRDDEIRRTIQVLQRRTKNNPVLIGEPGVGKTAIVEGLAQRIINGEVPEGLKNKRLLALDMGALIAGAKYRGEFEERLKGVLNDLAKQEGQIILFIDELHTMVGAGKAEGAMDAGNMLKPALARGELHCIGATTLDEYRQYIEKDAALERRFQKVLVDEPSVEDTIAILRGLKERYEVHHGVEITDPALVAAATLSHRYISDRQLPDKAIDLIDEAASLIRMEIDSKPESMDKLERRLIQLKIEREALKKENDEASKKRLVDLQKSIDELEQNYSDLEEIWKAEKATMQGSTQIKEALEQAKLEMETARRAGDLSRMSELQYGRIPELEKRLSQVSSVDAMETKLVRNKVTEDEIAEVVSKWTGIPVSKMMEGEKEKLLKMEEALHSRLIGQNEAVDAVSNAIRRSRAGLSDPNRPIGSFLFLGPTGVGKTELCKALASFLFDTEEAMVRIDMSEFMEKHSVARLIGAPPGYVGYEEGGYLTEAVRRRPYSVILLDEVEKAHTDVFNILLQVMDDGRLTDGQGRTVDFRNTVIVMTSNLGSQLIQEMSSKFNYDEIKAAVMDLVSQHFRPEFINRIDESVVFHSLTKEQIAKIAAIQINYLHHRLKQQNITIEVTSEALSHLAEAGFDPVYGARPLKRTIQQKLENPLAQSLLTGKFKSGDTIIVSYKDGVMEFYKQ

SEQ ID NO: 33706 - DNA, 2598 bp, Burkholderia mallei ATCC 23344
  CDS (1)..(2598): transl_table=11
atgagaatcgacaagctcaccaccaaattccaagaggcgctctcggatgcgcagagtttcgccgccgggcgcgacaaccagtacatcgaacccgtccacgtgctggccgcgctcgtcgcgcagcaggacggctccgcgcgctcgctgctgtcgcgtgcgggcgtgcacatccaggcgttgcaaggcgcgctcaacgaagcgatctcgcgcctgccgcaggtgacgggcacgggcggcgacatccaggtcggccgtgaactcgcgggcctgctgaaccaggccgacaaggaagcgcagaaactgaacgacacgttcgtcgcgagcgagatgttcctgctcgcggtggccgacgacaagggcgaagccggcaagctcgcgcgccagcacggcctcacgcgccgcgcgctcgaatccgcgatcgccgcggtgcgcggcggctcgcaggtgcacagccaggatgccgagagccagcgcgaggcgctgaagaaatacacggtcgatctgaccgagcgcgcgcgcgcgggcaagctcgatccggtgatcggccgcgacgacgagattcgccgctcgatccagatcctgcagcgccgcacgaagaacaatccggtgctgatcggtgagccgggcgtcggcaagaccgcgatcgtcgaagggctcgcgcagcggatcgtcaacggcgaggtgcccgagacgctgaagaacaagcgcgtgctgtcgctcgacatggcggcgctgctcgccggcgcgaagtatcgcggcgagttcgaggagcgtctgaaggcggtgctcaacgacatcgcgaaggacgagggccgcacgatcgtcttcatcgacgagatccatacgatggtcggtgcgggcaaggccgaaggcgcgatggacgcgggcaacatgctcaagcccgcgctgtcgcgcggcgagctgcactgcatcggcgcgacgacgctcgacgaataccgcaagtacatcgagaaggatgccgcgctcgagcgccgcttccagaaggtgctcgtcgacgagccgagcgtcgaggcgacgatcgcgatcctgcgcgggctgcaggagaagtacgaactgcatcacggcgtcgagatcaccgatccggcgatcgtcgccgcggcggaactctcgcaccgctacatcaccgaccgcttcctgcccgacaaggcaatcgatctgattgacgaggccgcgtcgaggatcaagatggaaatcgactcgaagcccgaagaaatggacaagctcgatcgccgtctgatccagttgaagatcgagcgcgaagcggtgaagaaggagccggacgaagcgtcgcagaagcgtcttgcgctgatcgaggaggaaatcgagcggctcgggcgcgaatacgcggatctcgacgagatctggacggccgagaaggcagccgtgcagggcagtgcgcaactgaaggaagagatcgacaaggtgcgtgccgacattgcgcgcctgcagcgcgaaggcaagctcgagaaggtcgccgagctgcagtacggcaagctgccgcaactcgaggcgcggctcaagcaggtcacgcaggccgaggagagcgagcagcacaatccgacgcggccgcgcctgctgcgcacgcaggtcggcgcggaggaaattgccgaggtcgtctcgcgcgcgacgggcattccggtgtcgcggatgatgcagggcgagcgcgagaagctgctgcacatcgaagagaagctgcatgagcgcgtggtcggccagaacgaggcgatcgacgcggtcgccgacgcgatccgccgctcgcgcgcgggcctcgccgatccgaaccgtccgtacggctcgttcctgttcctcggcccgacgggcgtgggcaagaccgagctgtgcaaggcgctcgccggcttcctgttcgattcggaagagcatctgatccgcatcgacatgagcgagttcatggagaagcacagcgtcgcgcggctgatcggcgcgccgcccggctacgtcggctacgaggaaggcggctatctgaccgaagccgtgcgtcgcaagccgtacagcgtgatcctgctcgacgagatcgagaaggcgcacccggacgtgttcaacgtgctgctgcaggtgctcgacgacggccggatgacggacgggcaggggcgcaccgtcgacttcaagaacaccgtgatcgtgatgacgtcgaatctcggctcgcagctgatccagtcgatgtcgggctcgtcgcaggaagagatcaaggatgcggtgtgggtcgaggtcaagcagcacttccgccccgagttcctgaaccggatcgacgacgtcgtcgtgttccactcgctcgaccgcggcaacatccaggcgatcgcgaagattcagctcgcgcgtctgcacgaccggctcgcgaagctcgacatggcgctcgacgtgtcggaggccgcgctcgagcagatcggcaaggtcggctacgatccgctgttcggtgcgcggccgctcaagcgcgcgatccagcaggagatcgagaatccggtcgcgaagctgatcctcgcgggccgcttcgggccgaaggacgtgattccggtcgacatgcaggacggcaggttcgtgttcgagcgcgtcgtgcattga

SEQ ID NO: 33707 - protein, 865 aa, Burkholderia mallei ATCC 23344
MRIDKLTTKFQEALSDAQSFAAGRDNQYIEPVHVLAALVAQQDGSARSLLSRAGVHIQALQGALNEAISRLPQVTGTGGDIQVGRELAGLLNQADKEAQKLNDTFVASEMFLLAVADDKGEAGKLARQHGLTRRALESAIAAVRGGSQVHSQDAESQREALKKYTVDLTERARAGKLDPVIGRDDEIRRSIQILQRRTKNNPVLIGEPGVGKTAIVEGLAQRIVNGEVPETLKNKRVLSLDMAALLAGAKYRGEFEERLKAVLNDIAKDEGRTIVFIDEIHTMVGAGKAEGAMDAGNMLKPALSRGELHCIGATTLDEYRKYIEKDAALERRFQKVLVDEPSVEATIAILRGLQEKYELHHGVEITDPAIVAAAELSHRYITDRFLPDKAIDLIDEAASRIKMEIDSKPEEMDKLDRRLIQLKIEREAVKKEPDEASQKRLALIEEEIERLGREYADLDEIWTAEKAAVQGSAQLKEEIDKVRADIARLQREGKLEKVAELQYGKLPQLEARLKQVTQAEESEQHNPTRPRLLRTQVGAEEIAEVVSRATGIPVSRMMQGEREKLLHIEEKLHERVVGQNEAIDAVADAIRRSRAGLADPNRPYGSFLFLGPTGVGKTELCKALAGFLFDSEEHLIRIDMSEFMEKHSVARLIGAPPGYVGYEEGGYLTEAVRRKPYSVILLDEIEKAHPDVFNVLLQVLDDGRMTDGQGRTVDFKNTVIVMTSNLGSQLIQSMSGSSQEEIKDAVWVEVKQHFRPEFLNRIDDVVVFHSLDRGNIQAIAKIQLARLHDRLAKLDMALDVSEAALEQIGKVGYDPLFGARPLKRAIQQEIENPVAKLILAGRFGPKDVIPVDMQDGRFVFERVVH

SEQ ID NO: 33708 - DNA, 2580 bp, Methylococcus capsulatus str. Bath
  CDS (1)..(2580): transl_table=11
atgcgaatggacaaactgaccagcaaatttcaggcggccctcgccgatgcccagagcctggcgctcggacgtgatcatcagttcatcgaagcggtgcacgtgatgtcggcgctgctcgatcaggaaggcagtacggtgcggccgctgctgattcaggccggagccgacgtgccccaactgcagcaggccttgggtgcggcgctggagcgtctgccggtggtggaaggcgtcggcggggacgtgcagatttcggccgagctgtcgcgggtgctgaacctgaccgacaaactcgcccagaaacgcggtgaccagttcatcaccagcgagatgttcgtgctggcggcgctggaatcgcgcggcgaacttgccgagctcctgcgcaaggccggcttgaccaaggaagccttggaacacgcgatccaggcgatgcgtggcggccaggcggcggatgatccgaacgtggaggaccagcgtcaggccttacagaaatacactatcgatctgaccgagcgtgccgaacgcggcaagctcgatccggtgatcggccgggacgacgaaatccgcaggaccattcaggtgctgcagcggcgcaccaagaacaatccggtgctgatcggcgaaccgggcgtgggcaagacggccatcgtcgagggattggcccagcgcatcgtcaacggtgaagtgccggaaggcgtcaagggcaagcgcctgctggctctggacatggcggggctgatcgccggggcgaagttccgtggtgagttcgaggagcggctgaagggcgtcctcaatgacatcgccaagcaggaaggccgcgtcatcctgttcatcgacgagttgcatacgatggtcggcgccggcaaggcggaaggggccatggatgccggcaacatgctcaagccggcactggcgcgcggggaattgcactgcatcggggccaccacgctggacgaataccgcaaatacatagaaaaggatgcggcgctggaacggcgcttccagaaggtgctggtggatgagccgaccgtcgaggacaccattgccattctgcggggcctgaaagaacgctacgaggtccatcacggcgtcaccatcaccgatccggcgatcgtggccgccgccacgctgtcgcaccgttacatcaccgaccgccagttgccggataaggccatcgacctggtggacgaggccgccagccgcatccgcatggagatcgattccaagccggaggaaatggaccggctcgaccgccgtctgatccagctccggatcgaacgcgaagctttgaagaaagagaccgacgaggcatcgaagaagcggctggaggcactggaaggcgagatcggcaagctggaaaaggaatacgccgatctggaggagatctggaagagcgaaaaggcccggctctccggcgccgccagcatcaaggaggaactggaaaaggcccggctcgacctggacaacgccaagcgcagcggcgatctgacccgcgccggccagatccagtatgaacggatcccggctttggaaaaacggctggccgtggccgaagccggtgaggatagcgagttccgcctgctgcgcaacaaggtcaccgacgaggaaatcgccgaggtcgtttccaaatggaccggaattccggtggcgaagatgctcgagggtgagcgtgagaaacttttgcacatggaggagaacctgagccggcgggtggttggccaacaggaggcgattaccgcagtggccaacgccatacgccggtcccgcgcgggtctggccgatcccaaccggccgaatggatcattcctgttcctggggccgaccggcgtgggcaagaccgaattgtgcaaggcgctggccgaattcctgttcgacaccgacgaggcgatggtacgcatcgacatgtcggaattcatggaaaagcattcggtcgcccgcctgatcggggcaccgcccggctatgtcgggtacgaagagggcggttatctcaccgaggccgtgcggcgcaagccctattccgtgatcctgctggacgaagtcgaaaaggcccatccggacgtcttcaacgtcttgctgcaggtgctggacgatggccgcctcaccgatggccatggccgtactgtggatttccgcaatgcggtggtggtgatgacctccaacctgggctccaatcgcatccaggagttggcgggggaggcgcattacgccgagatgaaggccgaggtcatggaaatcgtgggtcagtatttccggccggagttcatcaaccgcatcgacgaggcggtggtgttccatcccttggggcgggagcagatccgcgccatcgcccggctccaggtccgccatctccaggaacgcctggaggcgcgcgaactgtccctcgtggtatcggatgctgcgctggacctgctcggcgaggccggattcgacccggtctatggggcgaggccgctgaagcggaccattcagcaggaactggaaaatcctctggcgctggacatactcgccggccgcttcgcagccggcgacgtgatcggggtggatgtcgagaacggaaagctgcaattctcccggatgggctga

SEQ ID NO: 33709 - protein, 859 aa, Methylococcus capsulatus str. Bath
MRMDKLTSKFQAALADAQSLALGRDHQFIEAVHVMSALLDQEGSTVRPLLIQAGADVPQLQQALGAALERLPVVEGVGGDVQISAELSRVLNLTDKLAQKRGDQFITSEMFVLAALESRGELAELLRKAGLTKEALEHAIQAMRGGQAADDPNVEDQRQALQKYTIDLTERAERGKLDPVIGRDDEIRRTIQVLQRRTKNNPVLIGEPGVGKTAIVEGLAQRIVNGEVPEGVKGKRLLALDMAGLIAGAKFRGEFEERLKGVLNDIAKQEGRVILFIDELHTMVGAGKAEGAMDAGNMLKPALARGELHCIGATTLDEYRKYIEKDAALERRFQKVLVDEPTVEDTIAILRGLKERYEVHHGVTITDPAIVAAATLSHRYITDRQLPDKAIDLVDEAASRIRMEIDSKPEEMDRLDRRLIQLRIEREALKKETDEASKKRLEALEGEIGKLEKEYADLEEIWKSEKARLSGAASIKEELEKARLDLDNAKRSGDLTRAGQIQYERIPALEKRLAVAEAGEDSEFRLLRNKVTDEEIAEVVSKWTGIPVAKMLEGEREKLLHMEENLSRRVVGQQEAITAVANAIRRSRAGLADPNRPNGSFLFLGPTGVGKTELCKALAEFLFDTDEAMVRIDMSEFMEKHSVARLIGAPPGYVGYEEGGYLTEAVRRKPYSVILLDEVEKAHPDVFNVLLQVLDDGRLTDGHGRTVDFRNAVVVMTSNLGSNRIQELAGEAHYAEMKAEVMEIVGQYFRPEFINRIDEAVVFHPLGREQIRAIARLQVRHLQERLEARELSLVVSDAALDLLGEAGFDPVYGARPLKRTIQQELENPLALDILAGRFAAGDVIGVDVENGKLQFSRMG

SEQ ID NO: 33710 - DNA, 2619 bp, Anaplasma marginale str. St. Maries
  CDS (1)..(2619): transl_table=11
atggatctaaacaagttcaccgaaaaggcaaagggtttcataatgaacgcgcaaatgttcgcggtatcctccgggcaccagtctttgcttccagagcatctactaaatgtaatgctggaagaggaaaatgacatggtcggcaacttaatatcctcatgtggggccgaggtgagcaagatcactggcgctctgtcaaccatgctgagtaagctgccggtagtaagtggctcaggaagcgggcatttaagcctctccagagagatggcaaagattttagacgaagcagcgagtttggcaaagcgcaaccaagatgtgtacgtaacggcagagcggcttctgcaggctcttgttgttgtggaaagcagcgtgtcaagaatgctgctaaatgagggagtaacaacgcagaagcttaacgccttaatcgaaagaatgcgcgacggagtgagggccgaaagcgaaaacgcggaacagcaatttgacgcattgaggaagtatacccaagatctgaccgaactggccgcaaaaggtaagatggatccagtaattggcaggagtgacgaaactaggcggctgattcaagtcttatcccgcaggactaaaaacaacccagcattgatcggagaacccggggtgggaaagagcgcaatcgtagaggggctagtccaggctatgatttccggcaacgttcctatgtggctgcgtgacgcgaaagttctcgccttggatttagcttcactcatagccggaacgaagtacagaggggagtttgaagagaggttgaaggccgtaataacaaaaatagtcgcctcaaacggcaaaatcatactattcattgatgagttgcacatgctagtaggggcgggagcaacaggcggttctatggatgcatctaacatattaaagcctgttcttgccagaggggaaatacgctgtattggcgcaaccacgctggatgagtatcgcgaacatatagaaaaagaccccgcactcgcgcgaagatttcagcccgtattcgtcgcagaaccaaccactggtgatacaatttccatactaaggggcctaaaggagaaatatgagctccatcatggtataagaatcaccgacagcgcaatcgttgctgccgcaacactgtctaaccgttacattactgacaggttcctgccagacaaagccatagatttaatagatgaggccgcaagccgcgcaagaatcgaaatagatagtaaacccgaaattatagacagcatagaccgaaggataatgcaactcaagatagagtcagaagttttgaaaaacgaaaaaaacgaggcgtctcagcagcgtcttgcggttattaatgcggagctcaatgagctgagttcagaagctgcagatttaaacagcaagtggcaggctgaaaagatcaaaatctcaaaaatgcaagagctgactgagaagctcgacggggcgcgtatcgagctcgaacaggcccaaaggtctggcaacctatctcgggctggggagctaatgtatggagtaataccatcgctagagcaggaattgaaacagcatgaagaagtagctggcactatgctgaggaaggaaataggagtaaacgacattgcggcaatagtttcacggtggaccggcattcccgtagaaaacgtgatgaatagcgaaaaagaaaagctgctcaatatggaggcagaaataggtaaaagcgttatagggcaggaaagcgcggtcagggcggtgagtaacgcggttagaagatctagagcgggagtgcaagatgcacagaaacccatggggtcatttttattcctaggcccaacaggtgtcgggaagaccgagctcaccaaggcgctaagcgagtttttgtttgactccaggtctgcattgctgcggtttgatatgtctgagttcatggaaaagcattcggtcgcaaagctgataggcgcgccaccaggatatgtggggtatgagcagggtggaatgctgacagaagcagtaaggcgaaggccgtatcaggtggtgttgtttgacgagatagagaaggcgcacccagacatctttaacatattgctgcaagtccttgatgagggcagactaacagacagcaagggcaagttggtagacttcaaaaatacgatattggtgttaacatcaaacattggacaggaaattctggtaaatggtgccacaggcgaaagcgcagaagtcacgcgccagaaggtgcttgaggtgctaaacatgcatttccgcccagagtttttgaataggcttgatgatatcatcatattcaacaggctagccaaagaacatatagggcgcatagtcgacgttcagatgtcctacctgcaaaaaataattagtgacaagggcctcaccataactcttctgccagaggcgaaatcctggatagcagagcgcggttatgatgtaacctacggagcgcgccctctcaagcgtctcatacaacacaatatacaagaccagctggcagagttgctgctctccggcaaagtaagcgctggggatagcttagagggatttgtgttggatggggccctagcgatacggcggaaggaaacgcccaccacgcgcgcagaatccggagcaaacagttacagcccgtag

SEQ ID NO: 33711 - protein, 872 aa, Anaplasma marginale str. St. Maries
MDLNKFTEKAKGFIMNAQMFAVSSGHQSLLPEHLLNVMLEEENDMVGNLISSCGAEVSKITGALSTMLSKLPVVSGSGSGHLSLSREMAKILDEAASLAKRNQDVYVTAERLLQALVVVESSVSRMLLNEGVTTQKLNALIERMRDGVRAESENAEQQFDALRKYTQDLTELAAKGKMDPVIGRSDETRRLIQVLSRRTKNNPALIGEPGVGKSAIVEGLVQAMISGNVPMWLRDAKVLALDLASLIAGTKYRGEFEERLKAVITKIVASNGKIILFIDELHMLVGAGATGGSMDASNILKPVLARGEIRCIGATTLDEYREHIEKDPALARRFQPVFVAEPTTGDTISILRGLKEKYELHHGIRITDSAIVAAATLSNRYITDRFLPDKAIDLIDEAASRARIEIDSKPEIIDSIDRRIMQLKIESEVLKNEKNEASQQRLAVINAELNELSSEAADLNSKWQAEKIKISKMQELTEKLDGARIELEQAQRSGNLSRAGELMYGVIPSLEQELKQHEEVAGTMLRKEIGVNDIAAIVSRWTGIPVENVMNSEKEKLLNMEAEIGKSVIGQESAVRAVSNAVRRSRAGVQDAQKPMGSFLFLGPTGVGKTELTKALSEFLFDSRSALLRFDMSEFMEKHSVAKLIGAPPGYVGYEQGGMLTEAVRRRPYQVVLFDEIEKAHPDIFNILLQVLDEGRLTDSKGKLVDFKNTILVLTSNIGQEILVNGATGESAEVTRQKVLEVLNMHFRPEFLNRLDDIIIFNRLAKEHIGRIVDVQMSYLQKIISDKGLTITLLPEAKSWIAERGYDVTYGARPLKRLIQHNIQDQLAELLLSGKVSAGDSLEGFVLDGALAIRRKETPTTRAESGANSYSP

SEQ ID NO: 33712 - DNA, 2619 bp, Silicibacter pomeroyi DSS-3
  CDS (1)..(2619): transl_table=11
atggacttgtctaagttcaccgagcgggcacgtggattcgtgcaggcggcgcagaccattgctctgcgcgaagggcatcagcggctggcgcccgaacatattctcaaggcattgatggatgacgatcaggggcttgcaagcaacctgattgcgcgcgcgggcggcgcatccaaacgggtggtcgaggcgctggacgtggcgttgtccaagatcccaaaggtcagcggcgacgcggcccaggtctatctggacggccagaccgtcaaggtgctggacgaggccgagaaggtcgccaagaaggcaggcgacagttttgtcccggtcgagcgcgtgctgatggcgctttgcatggtgaaatccaaggccaaagaggcgctggatgccggcgaggtgactgcgcagaagctgaacgaagcgatcaacgatatccgcaagggccgcaccgccgactccgcgagcgccgaagagggctatgacgcgctcaagaaatacgcgcgcgacctgaccgaggccgcagccgaaggtaagatcgacccgatcatcgggcgtgacgaggaaatccgccgctcgatgcaggtgctgagccgccggaccaagaacaacccggtgctgatcggtgaacccggcgtgggtaagaccgctatcgccgaaggcatggcgctgcgcatcgtcaatggcgatgtgcccgaatccttgcgcgacaagaagctccttgcgctcgacatgggcgcgctgattgccggtgcgaaatatcgcggtgagttcgaagagcggctcaaggccgtgctgaccgaggtcaccgaggccgcgggcgagatcatccttttcatcgacgagatgcacacgcttgtgggtgccggtaaatccgacggagcgatggacgcggccaacctgatcaaaccggcgctggcgcggggcgagctgcactgcatcggcgccaccacgctggatgaataccgcaaatacgtggaaaaggacgcggccctggcccgccggttccagccggttctggtcgaagagccgaccgtcgaggacacgatcagtatcctgcgcggtatcaaggagaaatacgagctgcaccacggcgtcgatatttctgactcagccctggtggctgcggcgacgctgtcgcatcgctatatcaccgaccggttcctgccagacaaggccatcgacctgatggacgaggcagccagccgtttgcggatggaggtcgacagcaagcccgaggcgctggaccagctggaccgtcagatcctgcaattgcagatcgaggaagaggcgctgaagaaagagaacgacgccgcctcgcaggaccggcttgccacgctgcaaaaggaccttgccgagttgcaggagaaatccgccgagatgaccgctcagtggcaggcatcgcgggacaagatgaacgcggcgcaatccgtcaaggaacagctcgaacgcgcccgtgccgaactggagattgccaagcgcgaaggcaacctggcccgagctggtgaactcagctacggcatcatccccgagcttgaaaaacagcgggaagaagccgaagccggagaggataccggtctcaaggccgaagaggtcgtgcgccccgaacagatcgcggcggtggtcgaacgctggaccggcatcccgacctcgaagatgcttgaaggcgagcgcgagaaactgctgcggatggaggacgagctgcacaagcgcgtcatcggtcagggtacggcggtgacggcagttgccaatgcggtgcgccgggcgcgcgcgggtctgaatgacgagaaccgcccgctgggctcgttcctgttccttggccccaccggcgtcggtaagaccgagctgaccaaggcggtggccaactatctctttgacgacgacaatgcgatggtgcgcatcgacatgtccgagttcatggagaaacacgcggttgcccgtctgatcggcgcgcctccgggctatgtcggttatgacgagggcggggtgctgaccgaggcggtccgccgccgtccctatcaggtggtgctgttcgacgaggtcgaaaaggcgcatccggatgtgttcaacgtgctgttgcaggtgctggacgatggtgtgctgaccgatggtcagggccgcaccgtcgacttcaagcagacgctgatcgtgctgacctcgaaccttgggtcccaggcgctcagccaattgcccgaaggcgccgacagcgcccaggcccggcgcgatgtgatggatgcggtcagggcccatttccggcccgagttcctgaaccggcttgacgagacgatcatctttgaccggctcaagcgggccgatatggacgggatcgtgacgatccagctgggtcgtctggccaagcgcctggcgcagcgcaagatcgtgctggagctcgacgagcccgcgcgcaaatggctggccgatgcggggtacgatccggtctatggcgcccgcccgctgaagcgcgttatccagcgcgacctgcaaaacccgctggccgaaaagctgctggccggcgagatcaaggacggcgacacggtggcgatcaccgcgcgcgaagaaggactggtcatcggcgaccgtgtcgtcagttcgagccggccgcgcccggatgatgctgtcgtgcattga

SEQ ID NO: 33713 - protein, 872 aa, Silicibacter pomeroyi DSS-3
MDLSKFTERARGFVQAAQTIALREGHQRLAPEHILKALMDDDQGLASNLIARAGGASKRVVEALDVALSKIPKVSGDAAQVYLDGQTVKVLDEAEKVAKKAGDSFVPVERVLMALCMVKSKAKEALDAGEVTAQKLNEAINDIRKGRTADSASAEEGYDALKKYARDLTEAAAEGKIDPIIGRDEEIRRSMQVLSRRTKNNPVLIGEPGVGKTAIAEGMALRIVNGDVPESLRDKKLLALDMGALIAGAKYRGEFEERLKAVLTEVTEAAGEIILFIDEMHTLVGAGKSDGAMDAANLIKPALARGELHCIGATTLDEYRKYVEKDAALARRFQPVLVEEPTVEDTISILRGIKEKYELHHGVDISDSALVAAATLSHRYITDRFLPDKAIDLMDEAASRLRMEVDSKPEALDQLDRQILQLQIEEEALKKENDAASQDRLATLQKDLAELQEKSAEMTAQWQASRDKMNAAQSVKEQLERARAELEIAKREGNLARAGELSYGIIPELEKQREEAEAGEDTGLKAEEVVRPEQIAAVVERWTGIPTSKMLEGEREKLLRMEDELHKRVIGQGTAVTAVANAVRRARAGLNDENRPLGSFLFLGPTGVGKTELTKAVANYLFDDDNAMVRIDMSEFMEKHAVARLIGAPPGYVGYDEGGVLTEAVRRRPYQVVLFDEVEKAHPDVFNVLLQVLDDGVLTDGQGRTVDFKQTLIVLTSNLGSQALSQLPEGADSAQARRDVMDAVRAHFRPEFLNRLDETIIFDRLKRADMDGIVTIQLGRLAKRLAQRKIVLELDEPARKWLADAGYDPVYGARPLKRVIQRDLQNPLAEKLLAGEIKDGDTVAITAREEGLVIGDRVVSSSRPRPDDAVVH

SEQ ID NO: 33714 - DNA, 2574 bp, Campylobacter jejuni RM1221
  CDS (1)..(2574): transl_table=11
atggcaaatatacaagattttttaactgataatatgctttcaaaccttgaaagtgcagcatctttagctatacattctaaaaatactgaagtcgtacctttgcaccttttatgggctttaagcgtagatagtacaagtattttaaatcaaattttaaataaattaaatatttctaaagaagccttagaacttgaaattaaaagcagaatttcaaaacttgcaacgagttcaaatgtaaaccgtgaaaatatacgcttttccaatgaacttataaattcattagaaaatgctaaaggattaatgagtgctaatggagatagttatttaagtgtggatacttggcttataagtgaaagtcaaaaaagtcctattaaagaaattttggcgcaatttttagatttaagagaatttcaaaaagagcttgaaagtctaagagcgggacgaaaaatggatagcaaaacaagcgatgaaactttagatagcttaaataaatttggtatagatttaaccttaaaggcaagcgagggtaaacttgatcctgttataggcagagaagaagaaatcgaacgtttgatgcaaattttaatacgcaaaaccaaaaacaaccctatacttttaggtgaaccaggcgtaggaaaaacagctatagtagaagctttagcacaaagaattattaaaaaagatgttccaaaatctttgcaaaataaaaaagtcatcgctcttgatatgagtgctttaattgcaggtgcaaaatacagaggagaatttgaagatagattaaaagctgtggttaatgaagtgataaaaagtgaaaatatcattctttttatcgatgaaattcacactatagtaggagctggagcgagtgaaggcagcatggatgcggcaaatattttaaaacctgctcttgcaagaggtgaactccataccataggcgcaactactttaaaagaatatcgtaaatattttgaaaaagatgcagccttgcaacgccgttttcaacctgtaaatgtaggtgagccaagtgttaatgaggctttggctatgttaaggggtataaaagaaaagcttgaaattcatcataatgtaaccataaatgatagtgctttagtagccgcagctaaactttcaaagcgttatataacagatcgttttttacctgataaggccattgatttaatcgatgaagctgcagctgaactaaaaatgcaaattgaaagcgaaccaagttctttaagaaaagtacgcaaagatatagaaactttagaagttgaaaatgaagctttaaaaatggaaaatgatgaaaaaaatcaaaaaagactcgatgaaatcgcaaaagaactagctaatttaaaagaaaaacaaaatgccctaaattcacagtttgaaaatgaaaaaagtgtttttgatggcataagtgctaagaaaaaagaaattgatctgcttaaaaatgaagcttctttggctaaagctagaggtgaatttcaaaaagcagccgagctagagtatggaaaaattccaagtcttgaaaaagaagtagaaattttagaagataaatggaaaaaaatgagtgaaaatggagttttacttaaaaatcaagtggatgaggatttggttgctggaattttaagcaaatggacgggtattagcgtgcaaaaaatgttaacttctgaaaaacaaaaattcttagaagtggaaaaacatttaaaagaaagtgtcataggacaagataaggccttaagtgctttagctagagccattaaacgtaataaagcggggcttaatgcggacaataaacctataggaagctttttatttttagggccaacaggggtaggaaaaacacaatcggctaaagctttggcaaaatttttatttgatgatgaaaaagcaatgattcgctttgatatgagtgaatttatggaaaaacatagtgtttcaagactcttaggtgcgcctccaggatatataggacatgaagaaggtggagagcttactgaagccgtacgaagaaaaccttatagcgtgcttttgtttgatgaagttgaaaaagcacataaagatgtatttaatgtgcttttagggattttagatgatagtagagcaaccgatagtaaaggtgtaacagtggattttaaaaataccattatcattttaacttctaatatcgcctcaagcgccattatgaatttaagcggaaaagaacaagaagatgcggtaaaaaatgagttaaaaaatttctttaaacctgagtttttaaaccgtttagatgatattatcacctttaatccacttggaaaagatgaagcttatgaaatagtcaagcttttatttaaagatttacaaatgagcttagaaaacaagggaataaaagcaagtttaagcgaaaatgcagcccttttaatcgctaaagatggttttgaccctgattttggtgctagacctttaagaagagctatttatgatcttatagaagataaattaagcgatatgatacttgctgatgaacttcatgaaaatgatagcattatcattgatgcaaaagatgatgaaataatcatcaaaaaagcttaa

SEQ ID NO: 33715 - protein, 857 aa, Campylobacter jejuni RM1221
MANIQDFLTDNMLSNLESAASLAIHSKNTEVVPLHLLWALSVDSTSILNQILNKLNISKEALELEIKSRISKLATSSNVNRENIRFSNELINSLENAKGLMSANGDSYLSVDTWLISESQKSPIKEILAQFLDLREFQKELESLRAGRKMDSKTSDETLDSLNKFGIDLTLKASEGKLDPVIGREEEIERLMQILIRKTKNNPILLGEPGVGKTAIVEALAQRIIKKDVPKSLQNKKVIALDMSALIAGAKYRGEFEDRLKAVVNEVIKSENIILFIDEIHTIVGAGASEGSMDAANILKPALARGELHTIGATTLKEYRKYFEKDAALQRRFQPVNVGEPSVNEALAMLRGIKEKLEIHHNVTINDSALVAAAKLSKRYITDRFLPDKAIDLIDEAAAELKMQIESEPSSLRKVRKDIETLEVENEALKMENDEKNQKRLDEIAKELANLKEKQNALNSQFENEKSVFDGISAKKKEIDLLKNEASLAKARGEFQKAAELEYGKIPSLEKEVEILEDKWKKMSENGVLLKNQVDEDLVAGILSKWTGISVQKMLTSEKQKFLEVEKHLKESVIGQDKALSALARAIKRNKAGLNADNKPIGSFLFLGPTGVGKTQSAKALAKFLFDDEKAMIRFDMSEFMEKHSVSRLLGAPPGYIGHEEGGELTEAVRRKPYSVLLFDEVEKAHKDVFNVLLGILDDSRATDSKGVTVDFKNTIIILTSNIASSAIMNLSGKEQEDAVKNELKNFFKPEFLNRLDDIITFNPLGKDEAYEIVKLLFKDLQMSLENKGIKASLSENAALLIAKDGFDPDFGARPLRRAIYDLIEDKLSDMILADELHENDSIIIDAKDDEIIIKKA

SEQ ID NO: 33716 - DNA, 2580 bp, Neisseria gonorrhoeae FA 1090
  CDS (1)..(2580): transl_table=11
atgcgatacgacaaattaaccgccaaattccaacaagcccttgcagaagctcagagtttggcgttggctgcggacagcagctatctggaagcaggtttcgtactgaaagccctgcttgacgaccaaaacagcggagctgccgcgctcttggctcatgcgggcgtgaacgtgccgcaggttaaacagcgtttgcagcagcatttgaacagcctgccgaaagtgtccggacaaggtggtgagattctgcccagccgcgaattgcaggcggtgttgaacctgatggacaaagcggcaaccaaacgcggcgatgcctatatcgccagcgaacttttcctgctcgccttggtgcagcagaacgatgcggccggcaaaatcttgaaagaagccggtgcgaccgaacaaaatatcaatgccgcgatcgatgcggtacgaggcggacaaaacgtgaacgatgcgaatgccgaagaccaacgcgatgctttgaaaaaatacacgctcgatctgacccaacgcgcccgagacggtaagctcgaccccgttatcggtcgtgatgatgaaatccgtcgcgcgattcaggtgctgcaacgccgcaccaaaaacaaccccgtgctgattggcgaacccggtgtgggtaaaaccgccatcgtcgaaggtttggcgcaacgcatcgtcaacggcgaagtacctgaatccctgcgtaacaaacgcctgctggttttggatttggcggctttgattgccggtgcgaaataccgtggcgaatttgaagaacgcttgaaaggcgtattgaacgatttggcgaaagacgacggcaacaccctgattttcatcgatgaaatccatactttggtcggcgcgggcaaaaccgacggcgcgatggacgcgggcaatatgttgaaaccggccttggcgcggggcgaactgcactgtatcggtgcgactactttggacgaataccgccaatacatcgaaaaagacgcggcactcgaacgccgtttccaaaaagtattggttggcgaacccagcgtggaagacaccatcgctatcctgcgcggtttgcaggaacgttacgaaatccaccacggcatcgatattaccgaccctgctatcgttgccgcagcggagttgagcgaccgctacattaccgaccgcttcctgcccgacaaggcgattgatttgattgacgaagctgccagccgtgtcaagatggaaaaagaaaccaaaccggaagctatggacaaaatcgaccgccgtttgattcagcttcggatggaaaaggcgcacgttgaaaaagaaaaagacgatgccagcaaaaaacgtttggaactgatagacgaggaaatcgacggcttgcaaaaagaatacgccgatttggacgaaatctggaaagccgaaaaagcgatttcagacggtgctgccaatattaagaaacaaattgacgaagtcaaaattaaaatcgaacaggcaaaacggcaaggcgatttggcactggcttcaaaattgatgtatgaagatttggagcatttggaaaaacagcgtgcagccgccgaacgggcagatacggacagcacaaaaccggcaaacaaactcttgcgtaataatgtcggcgcggaggaaatcgcagaagtggtttcccgtatgaccggcatccccgtgtcaaaaatgatggaaggcgaacgcgacaaactgctaaagatggaagaagtattgcaccgccgcgtagtcggtcaaaacgaagccgtgcgcgccgtgtccgatgccatccgccgcagccgctccggccttgccgatccgaacaaaccttacggcagcttcctgttcttaggcccgaccggtgtgggtaagaccgagttgtgcaaagctttggcaggcttcctgttcgacagcgaagaccacctcatccgcatcgacatgtccgaatacatggaaaaacacgccgttgcccgcttaatcggcgcgcctccgggttatgtcggatacgaagagggcggctacctgaccgaacaagtccgccgcaaaccgtacagcgtgattcttttggacgaagtggaaaaagcccatcccgacgtattcaacatcctgctgcaagtattggatgacggtcgtttgaccgacggacaaggcaggacggtagattttaaaaataccgtgattgtgatgacttccaacatcggcagccagcacatccaacaaatgggcacgcaggactacgaagcggtgaaagaagttgtgatggaggatgtgaaagaacatttccgtccggaaatgatcaaccgcatcgacgaagtggtcgtgttccatggcttggatcaggccaatatccgcagtattgcgaaaatccagctcaaaggtttggaaaaacgtttggaaaaacaaaacctgcgcctgactgtttccgatgccgctctggacatcatcgccaaagccggtttcgacccgatttacggcgcacgtccgctcaaacgcgcgatccaatcggaaatcgaaaacccgctggccaaagccctgcttgccggaaactatgcgcccgaaagcgaaatcaaggtagaagccgacggcgacagactgaaatttgcctga

SEQ ID NO: 33717 - protein, 859 aa, Neisseria gonorrhoeae FA 1090
MRYDKLTAKFQQALAEAQSLALAADSSYLEAGFVLKALLDDQNSGAAALLAHAGVNVPQVKQRLQQHLNSLPKVSGQGGEILPSRELQAVLNLMDKAATKRGDAYIASELFLLALVQQNDAAGKILKEAGATEQNINAAIDAVRGGQNVNDANAEDQRDALKKYTLDLTQRARDGKLDPVIGRDDEIRRAIQVLQRRTKNNPVLIGEPGVGKTAIVEGLAQRIVNGEVPESLRNKRLLVLDLAALIAGAKYRGEFEERLKGVLNDLAKDDGNTLIFIDEIHTLVGAGKTDGAMDAGNMLKPALARGELHCIGATTLDEYRQYIEKDAALERRFQKVLVGEPSVEDTIAILRGLQERYEIHHGIDITDPAIVAAAELSDRYITDRFLPDKAIDLIDEAASRVKMEKETKPEAMDKIDRRLIQLRMEKAHVEKEKDDASKKRLELIDEEIDGLQKEYADLDEIWKAEKAISDGAANIKKQIDEVKIKIEQAKRQGDLALASKLMYEDLEHLEKQRAAAERADTDSTKPANKLLRNNVGAEEIAEVVSRMTGIPVSKMMEGERDKLLKMEEVLHRRVVGQNEAVRAVSDAIRRSRSGLADPNKPYGSFLFLGPTGVGKTELCKALAGFLFDSEDHLIRIDMSEYMEKHAVARLIGAPPGYVGYEEGGYLTEQVRRKPYSVILLDEVEKAHPDVFNILLQVLDDGRLTDGQGRTVDFKNTVIVMTSNIGSQHIQQMGTQDYEAVKEVVMEDVKEHFRPEMINRIDEVVVFHGLDQANIRSIAKIQLKGLEKRLEKQNLRLTVSDAALDIIAKAGFDPIYGARPLKRAIQSEIENPLAKALLAGNYAPESEIKVEADGDRLKFA

SEQ ID NO: 33718 - DNA, 2589 bp, Bacteroides fragilis NCTC 9343
  CDS (1)..(2589): transl_table=11
atgaactttaacaattttaccattaaatctcaggaagctgtacaagaggctattaacctggcacaaagtcgggggcaacaagccatcgaaacggctcatatcctgtatggagtgatgaaggtaggcgaaaatgtgactaactttatctttcagaagttaggactgaacggacaacaaatctccctcgtactcgataagcagatcgactctttcccaaaagtttccggcggagaaccttacttgagtagggaagcgaacgaagtctttcaaaaagcaacgcagtactccaaggagatgggcgatgagtttgtttcattggaacatcttttgctggctttactgacagtaaagagcacggtatctaccatcctgaaagatgcaggaatgaccgaaaaagaattgcgtggtgccatcagtgaattgagaaaaggagaaaaggtgacctctcagtccagtgaagataattaccagtcactggaaaaatatgccattaacttaaatgaagcagcccgtagcggtaaactcgaccctgtgatcggacgtgatgaagaaatccgacgggtacttcagattttaagtcgacgtacaaaaaacaatcctatactaataggtgaaccgggtaccggtaaaacagctattgttgagggattggcacaccgtattcttcggggtgatgttcctgaaaacctgaaaaataaacaggtatactcacttgatatgggcgcactcgttgcaggagctaaatataaaggagaatttgaggaacgactgaaatcggtagtgaatgaggtgaagaaatcagaaggtaatatcatattattcattgatgaaatccatactttggtaggggcaggaaaaggagaaggtgctatggacgcagctaatattctgaaacctgcacttgcccgtggagaactacgctctatcggtgctaccactctcgacgaatatcagaaatattttgaaaaagataaagctttggaacgtcgtttccaaatagtacaggtagatgaaccagacaatctgagcacaatatctatcttacgtggattaaaagaacggtatgaaaatcaccatcacgtacgtatcaaagatgatgcaatcattgctgccgtagaattaagcagccggtacatcactgaccgttttttacccgataaagcaattgacctgatggacgaagctgccgcaaaacttcgcatggaggtggattctgtccctgaaggattagatgaaatctcacgaaagattaaacagctggagattgagcgagaagctataaaacgggaaaatgatgaaccgaaattacagacaatcggcaaagaattggctgaattgaaagaacaggaaaagtcatataaagcaaaatggcaaagcgagaaaagcctgatggatataatccagcagaacaaagttgaaatagaaaatcttaaattcgaagctgacaaggcagaacgtgagggaaactatggcaaagttgcagagattcgctatggcaaattgcaggaactgcataaggaaattgaagatacccagaaaaaattgcacgaaatgcaaggggatacagccatgataaaagaagaggtggatgctgaagacatcgctgacgtagtatcccgctggaccggaattcctgtaagcaaaatgatgcagagtgaaaaggacaaattgctccaccttgaagaagaattacatcagcgtgttatcggacaagacgaggctatcgcagctgtgtctgatgctgtacgccgcagccgtgcaggcttacaggatcccaaacgacctattggttccttcatcttcctgggcactacaggagttggtaaaaccgaacttgccaaagcgcttgccgaatttctgtttgacgatgaaacgatgatgacccgtatcgacatgagcgaataccaggagaagcacagcgtttcgcgtttagttggagcgcctccgggatatgtaggatatgacgaaggcggacaattgacagaggcgatccgtcgcaaaccctattctgtagtattgtttgatgaaatcgagaaagcacatccggatgtatttaatatcttgttgcaggtactcgatgacggacggttgacagataacaaaggccgtgtggtaaactttaaaaatacaatcatcattatgacctctaatatgggtagcagctacatacagagccagatggaaaaactgaacggcgccaacaacgaggaagtagtggaagaaaccaagaaagaggtaatgaacatgttaaagaaaaccatccgtccggaattcctaaaccgtatcgatgagactatcatgttcctgccattaacagaaaaagacataaaacagattgtcttgttacagattaagagcgtacaaaagatgcttgccggtaatggaatagaactagaactgacagatgcggctttggatttcctctcacaggtcggctatgatccggaattcggtgcacgtcctgtaaaaagggctattcagagatatttactcaacgatctatcgaaaaaattattggcacaggaagtagaccgtagtaaagcaatcattgtagatgcacaaggagacggattagttttccgtaactaa

SEQ ID NO: 33719 - protein, 862 aa, Bacteroides fragilis NCTC 9343
MNFNNFTIKSQEAVQEAINLAQSRGQQAIETAHILYGVMKVGENVTNFIFQKLGLNGQQISLVLDKQIDSFPKVSGGEPYLSREANEVFQKATQYSKEMGDEFVSLEHLLLALLTVKSTVSTILKDAGMTEKELRGAISELRKGEKVTSQSSEDNYQSLEKYAINLNEAARSGKLDPVIGRDEEIRRVLQILSRRTKNNPILIGEPGTGKTAIVEGLAHRILRGDVPENLKNKQVYSLDMGALVAGAKYKGEFEERLKSVVNEVKKSEGNIILFIDEIHTLVGAGKGEGAMDAANILKPALARGELRSIGATTLDEYQKYFEKDKALERRFQIVQVDEPDNLSTISILRGLKERYENHHHVRIKDDAIIAAVELSSRYITDRFLPDKAIDLMDEAAAKLRMEVDSVPEGLDEISRKIKQLEIEREAIKRENDEPKLQTIGKELAELKEQEKSYKAKWQSEKSLMDIIQQNKVEIENLKFEADKAEREGNYGKVAEIRYGKLQELHKEIEDTQKKLHEMQGDTAMIKEEVDAEDIADVVSRWTGIPVSKMMQSEKDKLLHLEEELHQRVIGQDEAIAAVSDAVRRSRAGLQDPKRPIGSFIFLGTTGVGKTELAKALAEFLFDDETMMTRIDMSEYQEKHSVSRLVGAPPGYVGYDEGGQLTEAIRRKPYSVVLFDEIEKAHPDVFNILLQVLDDGRLTDNKGRVVNFKNTIIIMTSNMGSSYIQSQMEKLNGANNEEVVEETKKEVMNMLKKTIRPEFLNRIDETIMFLPLTEKDIKQIVLLQIKSVQKMLAGNGIELELTDAALDFLSQVGYDPEFGARPVKRAIQRYLLNDLSKKLLAQEVDRSKAIIVDAQGDGLVFRN

SEQ ID NO: 33720 - DNA, 2565 bp, Pseudomonas syringae pv. syringae B728a
  CDS (1)..(2565): transl_table=11
atgcgtatcgacagattgaccagtaaattacagttagcgttatccgattcacagtcgctggccgttggcctcgaccatcccgccatcgaacctgcgcacttgatgcaggcgctgcttgagcagcagggcggttccatcaagcctctgctgttgcaggtaggcttcgacatcaacagcctgcgcaaggaactgagcgcagagctggaccgcctgccaaaaatccagaacccgaccggcgacgtcaacatgtcgcaggatctggcgcgcctgctcaaccaggctgaccgtctggcgcagcagaaaggcgaccagttcatttccagcgagctggtgctgctcgcggcaatggacgagaacagcaagctcggcaaattgttgctggggcagggcgtcagcaagaaggccctggaaaacgccatcaacaacctgcgcggcgaaggtgccgtgaatgacccgaacgtcgaagagtcgcgtcaggcgctggacaaatacaccgtcgacctgaccaagcgtgccgaagagggcaaactcgacccggtgatcggacgtgatgacgagattcgtcgcaccattcaggtcctgcagcggcgcaccaagaacaacccggtgttgatcggcgaacctggtgtgggcaagaccgccattgccgagggcctggcgcagcgcatcatcaatggcgaagtgccggatggcctgcgcggcaagcgcttgctgtcgctggacatgggcgcgttgattgccggtgccaagtaccgtggcgagttcgaagagcgcctcaaatcgctgctcaacgaactgtccaagcaggaaggccagatcatcctgttcatcgacgagttgcacaccatggtcggcgccggcaagggcgaaggctcgatggacgctggcaacatgctcaaacctgcgctggcgcgcggcgagctgcattgtgtgggggctaccacgctcaacgagtaccgccaatatatagagaaggatgcggcgcttgagcgtcgattccagaaagtcctggtcgacgagccaagtgaagaagacaccatcgcgatcctgcgtggcctcaaagagcgctacgaagtgcaccacaaggttgccatcaccgacggcgcgatcatcgcggcggccaagctgagccatcgctatatcaccgaccgccagttgccggacaaggccatcgacctgatcgacgaagcggccagccgtattcgcatggagatcgactccaagcctgaagtgctcgaccgccttgaacgtcgcctgatccagctgaaagtagaagctcaggcgctcaagaaggaaaaggacgaggcggcgatcaagcgtctggaaaaactccagggtgaaatcgagcgtcttgagcttgagtacgcggatcttgaagagatctggacctcggaaaaagccgaggtcaccggctcggcacagatccagcagaaaatcgaacagtctcgtcaggagctggaagccgctcgccgccgtggcgatctgaaccgcatggcggagttgcagtacgggatcattcccgacctggaacgcagcctgcaaatggtcgaccagcacggcaagccggaaaaccagttgctgcgcagcaaggtgaccgaggaagaaattgccgaggtcgtgtcgaagtggaccggtatcccggtgtcgaagatgctcgaaggcgagcgcgacaagctgttgcgcatggaaaccctgctgcacaaccgggtgatcggccaggaagaagcggtggtcgcggtctccaatgccgtgcgtcgttcgcgtgccgggctttccgaccctaatcgtccgagcggatcgttcatgttcctcggcccgaccggcgtgggcaagaccgagctgtgcaaggcgctggccgagttcctgttcgacaccgaagaggcaatggtgcgtatcgacatgtccgagttcatggagaaacattccgtggctcgcctgatcggtgcgccgccaggctacgtcggttacgaagagggcggctacctgaccgaagccgtgcgtcgcaaaccgtattcgctgattctgctcgacgaagtcgagaaggcgcattccgacgtgttcaacatcctcttgcaggtgcttgaagacggacgcttgactgacagccacgggcgtacggtggacttccgcaataccgtgatcgtcatgacctccaacctgggctcggcgcagatccaggaactggtcggtgatcgtgaggcgcagcgtgctgcggtaatggatgcggtcggtacgcacttccgtccggagttcgttaaccggatcgacgaagtggtgatcttcgaaccgctggcgcgtgaccagattgccggtatcaccgacatccagctgggccgcctgcgcaagcgtctggccgagcgcgagctgtcgatgaccctgagccccgaagcgctggacaagctgatcgcggttggttacgacccggtctatggcgcacggccgctgaagcgggcgattcagcgctggatcgagaacccgctggcgcagatgatcctctcgggcagcttcatgcccggcacgaccattaccggcaaggtggtcgacgacgagatcacgtttgtctga

SEQ ID NO: 33721 - protein, 854 aa, Pseudomonas syringae pv. syringae B728a
MRIDRLTSKLQLALSDSQSLAVGLDHPAIEPAHLMQALLEQQGGSIKPLLLQVGFDINSLRKELSAELDRLPKIQNPTGDVNMSQDLARLLNQADRLAQQKGDQFISSELVLLAAMDENSKLGKLLLGQGVSKKALENAINNLRGEGAVNDPNVEESRQALDKYTVDLTKRAEEGKLDPVIGRDDEIRRTIQVLQRRTKNNPVLIGEPGVGKTAIAEGLAQRIINGEVPDGLRGKRLLSLDMGALIAGAKYRGEFEERLKSLLNELSKQEGQIILFIDELHTMVGAGKGEGSMDAGNMLKPALARGELHCVGATTLNEYRQYIEKDAALERRFQKVLVDEPSEEDTIAILRGLKERYEVHHKVAITDGAIIAAAKLSHRYITDRQLPDKAIDLIDEAASRIRMEIDSKPEVLDRLERRLIQLKVEAQALKKEKDEAAIKRLEKLQGEIERLELEYADLEEIWTSEKAEVTGSAQIQQKIEQSRQELEAARRRGDLNRMAELQYGIIPDLERSLQMVDQHGKPENQLLRSKVTEEEIAEVVSKWTGIPVSKMLEGERDKLLRMETLLHNRVIGQEEAVVAVSNAVRRSRAGLSDPNRPSGSFMFLGPTGVGKTELCKALAEFLFDTEEAMVRIDMSEFMEKHSVARLIGAPPGYVGYEEGGYLTEAVRRKPYSLILLDEVEKAHSDVFNILLQVLEDGRLTDSHGRTVDFRNTVIVMTSNLGSAQIQELVGDREAQRAAVMDAVGTHFRPEFVNRIDEVVIFEPLARDQIAGITDIQLGRLRKRLAERELSMTLSPEALDKLIAVGYDPVYGARPLKRAIQRWIENPLAQMILSGSFMPGTTITGKVVDDEITFV

SEQ ID NO: 33722 - DNA, 2565 bp, Pseudomonas fluorescens Pf-5
  CDS (1)..(2565): transl_table=11
atgcgtatagaccgattaaccagcaaattgcagctggccttatccgattctcaatctctggcggttggcctcgatcatccggccattgaaccggcgcacctgatgcaggcgctgctggaacagcagggcggctcgatcaagcctctgctgatgcaggtgggcttcgacgtcaacagcctgcgcaaggaactgagcaaagagctcgaccaactgccgaaaatccagaaccccactggcgacgtcaacatgtcccaggatctggcgcgcctgctcaaccaggccgaccgcctggcgcagcagaaaggcgaccagttcatctccagcgagctggtgctactggccgccatggatgagaacagcaaactcggcaaattgttgctgggccagggcgtgagcaagaaagccctggagaacgctatcaacaacctgcgtggcggtgaggcggtgaatgacgccaacgtcgaagagtcgcgccaggccctggacaagtacaccgtcgacctgaccaagcgcgccgaagacggcaagcttgatccggtaatcggccgtgacgacgaaattcgccggaccatccaggtgctgcaacgccggaccaagaacaacccggtgctgattggtgaaccaggcgtgggtaagaccgccatcgccgaaggcctggcccagcggatcatcaacggcgaagtgcccgatggcctcaaaggcaagcgcttgctgtccctggacatgggcgccttgatcgccggtgccaaataccgtggcgagttcgaagaacgcctgaagtctttgcttaatgaactgtcgaagcaggaagggcagatcatcctgttcatcgatgagctgcacaccatggtcggcgctggtaaaggcgaaggctcgatggatgcgggcaatatgctcaagccggccctggcccgtggcgagctgcactgcgtgggcgccaccacgctcaacgaataccgccaatatatagagaaggacgcagccctcgagcggcgcttccagaaagtgttggtggatgagccgagcgaggaagacaccattgctatcctgcgcggcctgaaagagcgctatgaggtgcaccacaaggtggcgatcaccgacggcgcgatcattgccgcggccaagctcagccatcgttacatcactgaccggcaactgccggacaaggccatcgacctgatcgacgaggccgccagccgcatccgcatggagatcgactctaagccggaagtgctggaccgtctggagcggcgcctgattcagctcaaggttgaatcccaggccctgaagaaagaagacgacgaggccgcgatcaagcgcctggaaaaactccaggaagagattgtccgcctggagcgtgaatacgctgacctggaagaagtctggacctcggagaaagccgaagtgcagggttctgcgcagatccagcagaagatcgagcagtcgcgccaggaactggaagcggcgcgtcgtaaaggcgatctcaatcgtatggccgagctgcagtacggggtgatcccggacctggagcgcagcctgcagatggtcgaccagcacggccacagcgagaaccagttgctgcgcagcaaggttaccgaggaagagattgccgaagtggtgtccaagtggaccggcattccagtgtcgaaaatgcttgaaggcgagcgcgacaagctgctgaagatggaaagcctgctgcacgagcgggtgattggccagaacgaagccgtggtggcggtggccaacgctgtgcgccgttcccgagccgggttgtccgacccgaaccggcccagcggttcgttcatgttcctcggcccgaccggcgtgggtaagaccgaactgtgcaaggccctggcggaattcctcttcgataccgaagaggccatggtgcggatcgacatgtccgagttcatggagaaacattccgtggctcgcctgatcggtgcgccaccaggctatgtcggttatgaagagggcggttacctgaccgaagccgtgcgtcgcaagccgtactcggtgattctgctggacgaagtcgagaaggcgcacccggatgtgttcaacatcctgctgcaggtcctggaagatggccgtctgacggacagccacgggcgtaccgtggattttcgcaatacggtgatcgtcatgacctccaacctggggtcggcgcagatccaggaactggtaggggatcgcgaggcacaacgtgcggcggtgatggacgcggtgtccacccacttccggccggagttcatcaaccgggtcgacgaagtggtgatcttcgagcctctggcacgtgatcagatcgccggcatcacgcagatccagttgggtcgcctgcgcagtcgcctggcggagcgcgagctgagcctggaactgagcgacgaggccttggacaagctgatcgctgtgggttacgacccggtgtatggcgcacggccgctgaaacgggcgatccagcgctggatcgagaacccgttggcgcagttgatcctctccggcggtttcctgccgggagccacggttaccgcctcggtgcaggacgacgaaatcgtcttcgcctga

SEQ ID NO: 33723 - protein, 854 aa, Pseudomonas fluorescens Pf-5
MRIDRLTSKLQLALSDSQSLAVGLDHPAIEPAHLMQALLEQQGGSIKPLLMQVGFDVNSLRKELSKELDQLPKIQNPTGDVNMSQDLARLLNQADRLAQQKGDQFISSELVLLAAMDENSKLGKLLLGQGVSKKALENAINNLRGGEAVNDANVEESRQALDKYTVDLTKRAEDGKLDPVIGRDDEIRRTIQVLQRRTKNNPVLIGEPGVGKTAIAEGLAQRIINGEVPDGLKGKRLLSLDMGALIAGAKYRGEFEERLKSLLNELSKQEGQIILFIDELHTMVGAGKGEGSMDAGNMLKPALARGELHCVGATTLNEYRQYIEKDAALERRFQKVLVDEPSEEDTIAILRGLKERYEVHHKVAITDGAIIAAAKLSHRYITDRQLPDKAIDLIDEAASRIRMEIDSKPEVLDRLERRLIQLKVESQALKKEDDEAAIKRLEKLQEEIVRLEREYADLEEVWTSEKAEVQGSAQIQQKIEQSRQELEAARRKGDLNRMAELQYGVIPDLERSLQMVDQHGHSENQLLRSKVTEEEIAEVVSKWTGIPVSKMLEGERDKLLKMESLLHERVIGQNEAVVAVANAVRRSRAGLSDPNRPSGSFMFLGPTGVGKTELCKALAEFLFDTEEAMVRIDMSEFMEKHSVARLIGAPPGYVGYEEGGYLTEAVRRKPYSVILLDEVEKAHPDVFNILLQVLEDGRLTDSHGRTVDFRNTVIVMTSNLGSAQIQELVGDREAQRAAVMDAVSTHFRPEFINRVDEVVIFEPLARDQIAGITQIQLGRLRSRLAERELSLELSDEALDKLIAVGYDPVYGARPLKRAIQRWIENPLAQLILSGGFLPGATVTASVQDDEIVFA

SEQ ID NO: 33724 - DNA, 2598 bp, Psychrobacter arcticus 273-4
  CDS (1)..(2598): transl_table=11
atgagatttgaaaagtttactcaaaaactgcaatctgcgatacaagaggcacaaagtctggcgttagggcgtgaccataccggtattgatccggtgcacctgcttgcagtcttgctgcaagatgagtctaacttgtctatctgccaacaagcaggcgcgtctattcctgcgttaaaaaatggcgtggcaaaggcattagataaccaagcaacgatttcggagccgacaggtgatgtcaatcttaatccaaactcggttaagattttgaatttggcagatcgccaagcgcaaaaagaaggcgatgattttatcgcgactgaatgggtgatgttggcacttgctgagcaaggcgataccaaaaaaatatttgaaagtgctggcgttacagccaataaattaaaagcggtgattgagcaattgcgcggcgatgatactgtgaataatcaaaatgcagaagatcagcgtgatgcccttaataaatacaccattaacttaactgagcaagcagagcttggtaagcttgatccggtgattggtcgtgacgaagagattcgacgtactatccaagtgttgtcacgccgtaccaaaaacaatcctgtgctcatcggtgagccaggtgttggtaaaacggctattgtagaaggcttggcacaaaaaatcatcaatggtgatgtaccagaaggtttacgtcgtaaagaagtgctgtcgttggacttaggtgctttgattgctggtgcaaaattccgtggtgagtttgaagagcgtctcaaagcggtactcagtgacttatcgaagcaagaaggtaacgttatcttatttatcgatgagctacatacgctagttggggcaggtaaggcggatggtgcgatggacgccggtaatatgctaaaaccagcgcttgcacgtggtgagctgcattgcgtcggtgcgactactttagatgaatatcgtaagtatattgaaaaagatgcggcgcttgagcgtcgtttccaaaaagtattggttgatgagccgacggttgaagataccattgcgattttacgtggactaaaagagcgttatgagctgcatcatggggtcgatatccaagacagcgccatcattgcggctgctcgtatgagtcatcgttatatcactgatcgcaagctgccggataaagccattgacttgattgatgaagctgcgagtcgcttacgtatggagatggacagcaaacctgagtcactaggtaagctcgatagtcgtttgatacagctaaaaatgcagcgtgaagtgctcaaaaatgaagaagacgcgggcgcgcaagcagagcgtaaagtgcttgatgcacaaattgaagagctggaaaaagagtacgccgatcttaacgagatttggcaagcagaaaaagctttggttaaaggcagtcagcagttaaaagacgagctggacaaagcccgtattgcttatgataaagccagccgcgaaggcgattatgagaccatgagcaagctgcagtatgagacgataccgcagttagagcgccgtatccatgaatctgatttggcagagcaaaaagagcagactggtgaaaatagtggtgtaaaactgctgcgtaacaaagtcacggacaatgaaatcgccgaagtcgttgctgcagcgacgggtattccagttagtaaaatgctgcaaggcgaacgtgacaagatgctggcgatggaagaaaacctccatgagcgcgtcatcggtcaagatgaagcggtcgaagcagtagccaatgcagtacgccgtagccgtgctggcttgtctgatccaaaccgtccttcaggctcgttcttgtttttagggcctacgggtgtcggtaaaacagagctgaccaaatcgttggcgaacttcttgtttgattcagaagatgctatcgtccgtatcgatatgagtgagtacatggagaagcatagcgtcagccgtttggtgggcgcgcctccaggttatgtgggctatgaagaaggtggtgctttgacggaggcggtacgccgtaagccttatagtgtgattttgtttgatgaagttgaaaaagcgcatcctgatgtgtttaatatcttgctacaagtattggacgatggtcgcttgacggattcacaaggtcgcgtggtagacttcaaaaacaccgtcattattatgaccagtaacttgggttcgcacaaaatccaagaaatggttggcgagagctatgaagatatcaaagctgaggtgatggattcggttggacagcatttccgcccagagtttgtcaaccgtatcgatgagatcgtggtattccatccgctaggtatgtcacagatggctggtattgctgcgattcagttgaaccgcttgcgtcagcgtctatatgagcgtgagttggatatcgagttatcggcagatgcgatgaacaaactggttgcagttggctatgatcctgtttatggtgcgcgtccacttaaacgtgcgatccaacaagagattgaaaacccattatcattgaaattgctggcaggtgattttgtcgctggtgatatcatcaaagtcgatgtcggtgctgatgacaaactgacctttgataagcttagaatgagctaa

SEQ ID NO: 33725 - protein, 865 aa, Psychrobacter arcticus 273-4
MRFEKFTQKLQSAIQEAQSLALGRDHTGIDPVHLLAVLLQDESNLSICQQAGASIPALKNGVAKALDNQATISEPTGDVNLNPNSVKILNLADRQAQKEGDDFIATEWVMLALAEQGDTKKIFESAGVTANKLKAVIEQLRGDDTVNNQNAEDQRDALNKYTINLTEQAELGKLDPVIGRDEEIRRTIQVLSRRTKNNPVLIGEPGVGKTAIVEGLAQKIINGDVPEGLRRKEVLSLDLGALIAGAKFRGEFEERLKAVLSDLSKQEGNVILFIDELHTLVGAGKADGAMDAGNMLKPALARGELHCVGATTLDEYRKYIEKDAALERRFQKVLVDEPTVEDTIAILRGLKERYELHHGVDIQDSAIIAAARMSHRYITDRKLPDKAIDLIDEAASRLRMEMDSKPESLGKLDSRLIQLKMQREVLKNEEDAGAQAERKVLDAQIEELEKEYADLNEIWQAEKALVKGSQQLKDELDKARIAYDKASREGDYETMSKLQYETIPQLERRIHESDLAEQKEQTGENSGVKLLRNKVTDNEIAEVVAAATGIPVSKMLQGERDKMLAMEENLHERVIGQDEAVEAVANAVRRSRAGLSDPNRPSGSFLFLGPTGVGKTELTKSLANFLFDSEDAIVRIDMSEYMEKHSVSRLVGAPPGYVGYEEGGALTEAVRRKPYSVILFDEVEKAHPDVFNILLQVLDDGRLTDSQGRVVDFKNTVIIMTSNLGSHKIQEMVGESYEDIKAEVMDSVGQHFRPEFVNRIDEIVVFHPLGMSQMAGIAAIQLNRLRQRLYERELDIELSADAMNKLVAVGYDPVYGARPLKRAIQQEIENPLSLKLLAGDFVAGDIIKVDVGADDKLTFDKLRMS

SEQ ID NO: 33726 - DNA, 2565 bp, Pseudomonas syringae pv. phaseolicola 1448A
  CDS (1)..(2565): transl_table=11
atgcgtatcgacagattgaccagtaaattacagttagcgttatccgattcccagtcgctggccgttggcctcgaccatcccgccatcgaacctgcgcacttgatgcaggcgctgcttgagcagcagggcggttccatcaagcctctgctgttgcaggtaggcttcgacatcaacagcttgcgcaaggaactgagcgcagagctggaccgactgccaaaaatccagaaccccactggcgacgtcaacatgtcgcaggatcttgcgcgcctgcttaaccaggccgaccgtctggcacagcagaaaggcgatcaattcatttccagcgagctggtgctgctcgcggcaatggacgagaacagcaagctcggcaaattgttgctggggcagggcgtcagcaagaaagctctggaaaatgccatcaacaacctgcgcggcgaaggtgccgtgaatgaccctaacgtcgaagagtcgcgtcaggcgttggacaagtacaccgtcgacctgaccaagcgtgccgaagagggcaagctcgacccggtgatcggtcgtgatgacgagattcgtcgcaccattcaggtcctgcaacgccgtaccaagaacaacccggtgctgatcggtgagcctggcgtgggtaaaaccgctatcgccgaaggcctggcgcaacgcatcatcaacggcgaagtgccggatggcctgcgcggcaaacgcttgctgtcgctggacatgggcgcattgattgcaggtgccaagtaccgtggtgagttcgaagagcgcctgaaatcgctgctcaacgaactgtccaagcaggaaggccagatcatcctgttcatcgacgaactgcacaccatggtcggcgccggcaaaggcgaaggctcgatggacgctggcaatatgctcaagcctgcgctggctcgcggcgagctgcattgtgtcggtgccaccacgctcaacgagtaccgccaatatatagagaaggacgctgcgcttgagcgtcgtttccagaaagtgctggtggacgagccgagcgaagaagacaccatcgcaatcctgcgtggcctgaaagagcgctatgaagtgcaccacaaggtcgccattactgacggtgcgatcatcgccgcggccaagctgagccatcgctatatcaccgatcgccagttgcccgacaaggccatcgacctgatcgacgaagcggccagccgcattcgtatggagatcgattccaagcctgaagtgcttgatcgtcttgagcgtcgcctgatccagctgaaagtggaagctcaggcgctcaagaaggaaaaggatgaagcggctatcaagcgcttggaaaaactccaggaagaagtggtgcgccttgagaaggaatacgccgatctcgaagaaatctggacctcggaaaaagctgaagtaacgggctctgcacagatccagcagaaaatagagcagtcccgtcaggaactggaagcggcgcgtcgtcgtggcgacctgaaccgcatggccgagttgcagtacgggatcattccggacctggaacgcagcctgcaaatggtcgatcagcacggcaaacccgagaaccaattgctgcgcagcaaagtgaccgaggaagaaattgccgaagtcgtgtcaaagtggaccggtattcccgtgtcgaaaatgctggaaggcgagcgcgagaagctgttgcgcatggaaaccctgctgcacaaccgggtaatcggtcaggaagaagcggtggtcgcggtctccaatgccgtacgtcgttcgcgtgcagggctttccgacccgaatcgtccaagcggttcgttcatgttcctcggtccgaccggtgtgggtaagaccgaactctgcaaggcgcttgccgaattcctgttcgataccgaagaggcgatggtgcgtatcgatatgtccgagttcatggagaaacattccgtggctcgtctgatcggcgcaccaccgggctatgtcggttacgaagagggcggctacctgaccgaagctgtgcgtcgcaagccgtactcgctgatcctgctcgatgaggtcgagaaggcacattccgacgtgttcaacatcctgttgcaggtgcttgaagacgggcgcctgactgacagccacgggcggacggtggacttccgcaataccgtgatcgtcatgacctccaacctgggctcggcccagatccaggaactggtcggtgatcgtgaggcgcaacgtgctgcggtgatggatgcggtgggtacgcacttccgtccggaatttgtgaaccggattgacgaagtggtgatcttcgaaccgctggcgcgtgaccagatcgccggtatcaccgatatccagctgggccgcctgcgcaagcgtctggctgagcgcgagctggcgctgaccctgagccccgaggcgctggacaagctgattgccgtcggttacgacccggtctatggagcacggccgctgaagcgggcgatccagcgctggatcgagaacccgctggcacagatgatcctctcgggcagcttcatgcccggtaccaccatcaccggcaaggtggtcgacgacgagatcgtgtttgcctga

SEQ ID NO: 33727 - protein, 854 aa, Pseudomonas syringae pv. phaseolicola 1448A
MRIDRLTSKLQLALSDSQSLAVGLDHPAIEPAHLMQALLEQQGGSIKPLLLQVGFDINSLRKELSAELDRLPKIQNPTGDVNMSQDLARLLNQADRLAQQKGDQFISSELVLLAAMDENSKLGKLLLGQGVSKKALENAINNLRGEGAVNDPNVEESRQALDKYTVDLTKRAEEGKLDPVIGRDDEIRRTIQVLQRRTKNNPVLIGEPGVGKTAIAEGLAQRIINGEVPDGLRGKRLLSLDMGALIAGAKYRGEFEERLKSLLNELSKQEGQIILFIDELHTMVGAGKGEGSMDAGNMLKPALARGELHCVGATTLNEYRQYIEKDAALERRFQKVLVDEPSEEDTIAILRGLKERYEVHHKVAITDGAIIAAAKLSHRYITDRQLPDKAIDLIDEAASRIRMEIDSKPEVLDRLERRLIQLKVEAQALKKEKDEAAIKRLEKLQEEVVRLEKEYADLEEIWTSEKAEVTGSAQIQQKIEQSRQELEAARRRGDLNRMAELQYGIIPDLERSLQMVDQHGKPENQLLRSKVTEEEIAEVVSKWTGIPVSKMLEGEREKLLRMETLLHNRVIGQEEAVVAVSNAVRRSRAGLSDPNRPSGSFMFLGPTGVGKTELCKALAEFLFDTEEAMVRIDMSEFMEKHSVARLIGAPPGYVGYEEGGYLTEAVRRKPYSLILLDEVEKAHSDVFNILLQVLEDGRLTDSHGRTVDFRNTVIVMTSNLGSAQIQELVGDREAQRAAVMDAVGTHFRPEFVNRIDEVVIFEPLARDQIAGITDIQLGRLRKRLAERELALTLSPEALDKLIAVGYDPVYGARPLKRAIQRWIENPLAQMILSGSFMPGTTITGKVVDDEIVFA

SEQ ID NO: 33728 - DNA, 2580 bp, Thiobacillus denitrificans ATCC 25259
  CDS (1)..(2580): transl_table=11
atgcgttttgacaagctcaccacccagttccagcaggcgctttccgacgcgcaaagcctggccgtcggcggcgaccacgcctacatcgagccgcagcacctgctgctcgccctgctcaaccaggagggcggcggcgcggggtcgatcctcggccgcgccggcgtccaggtcccggcgctcaaggccgcgttgacccaggcattgacgcgcctgcccaaggtgcaggggcagggcggcgaggtcagcatctcgcgcgacctcaacaacctgctcaacctgaccgacaaggaggcgatgaagcgcaacgacgcctacatcgcatcggagcttttcctgctcgccgcgctcgacgacaaaggcgagaccgggcgcctgctgaaacagcacggcgcgcagaagaccgcgctggaacaggccatccaggccgtgcgcggcggcgagaacgtgcagtcgcaggaagccgaaggccagcgcgaagcgctcgccaaatacaccctcgacctcacgcagcgcgcgcgtgacggcaagctcgacccggtcatcgggcgcgacgacgagattcgccgctcgatccagatcctgcagcgccgcaccaagaacaaccccgtgctgatcggcgaacccggcgtcggcaagaccgcgatcgtcgaaggtctcgcgcagcgcatcgtcaacgacgaggtgccggaaacgctcaagggcaagaaggtgctggtgctcgacctcgccgcgctgctcgccggcgcgaaataccgcggcgaattcgaggagcgcctgaaggccgtgctcaaggagctcgcgatggaccccggccgctacatcgtcttcctcgacgaaatccacacgctcgtcggggccggcaaggccgaaggcgcgatcgacgccggcaacatgctgaagcccgcgctcgcgcggggcgaactgcacctgatcggcgcgaccacgctcgacgaataccgcaagtacatcgagaaggacgccgcgctcgagcgccgcttccagaaggtcatggtcgacgagcccagcgtcgaatcgacgatcgcgatcctgcgcggcctgcaggagcgctacgaactgcaccacggcgtcgacatcaccgacccggcgatcgtcgccgcggccgaactctcgcatcgctacatcaccgaccgtttcctgcccgacaaggcgatcgacctgatcgacgaggccgccgcgcggatcaagatggaaatcgactccaagcccgaggtcatggacaaactcgaccgccgcatcatccagctcaagatcgagcgcgaggcggtcaagaaggagaccgacgaggcctcgaaaaagcggctcggcctgctcgaagacgagatcgacaagctcggccgcgaatacgccgacctcgaagaggtgtggaagtcggagaaggcccaggtccagggctccgcgcatctcaaggaagagatcgacaagctgcgcggcgagatggccgacctgcagcgccagggcaagctcgacaaggtcgccgagatccagtacggcaagctgccgcagctcgaggcgcagctcaagcacgccgaagccagcggcgagaagcctgtgttcaagctcctgcgcaccgaggtcggcgccgaagagatcgccgaggtcgtctcccgcgcgaccggcatcccggtctcgaagatgatgcagggcgagcgcgacaagctcatgcacatggaagaccacctgcacggccgcgtcgtcggccaggacgaagccgtggccgtcgtctccgacgcgatccgccgttcacgcgcggggctttccgaccccaaccggccgctcggctcctttctgttcctgggccccacgggcgtcggcaagaccgagttgtgcaagacgctcgccgaatacctgttcgattccgccgagcacatggtgcgcatcgacatgagcgaattcatggagaagcactcggtcgcgcgcctgatcggcgcgccgcccggctacgtcggctacgaagagggcggctacctgaccgaagccgtgcgccgcaagccgtacagcgtgatcctcatggacgaaatcgagaaggcccaccccgacgtcttcaacgtgctcctgcaggtgctcgacgacggccggctcaccgacggccagggccgcaccgtcgacttccgcaacaccgtgatcgtcatgacgtccaacctcggcagccagatgatccagcagatgtcgggcgacgactaccaggtcgtcaagctcgccgtactcggcgaagtgaagtcctacttccgccccgagttcatcaaccgcatcgatgaggtcgtcgtcttccacgcgctctcggagtcgaacatcgcgagcatcgcgcgcatccagctcaaggcgctcgaagcgcgcctcgccgcgatggagatgaagctcgacgtcaccgacgccgcgctcgccgaaatcgccaaggccggcttcgaccccgtctacggcgcgcggccgctcaagcgtgcgatccagagcgagctcgaaaacgcgctggctaaggaaatcctgtccggacgcttcgcggccaaggacacgatccgggtcgacgcggtggatgggaagttcagctttgagaaggcggcgtaa

SEQ ID NO: 33729 - protein, 859 aa, Thiobacillus denitrificans ATCC 25259
MRFDKLTTQFQQALSDAQSLAVGGDHAYIEPQHLLLALLNQEGGGAGSILGRAGVQVPALKAALTQALTRLPKVQGQGGEVSISRDLNNLLNLTDKEAMKRNDAYIASELFLLAALDDKGETGRLLKQHGAQKTALEQAIQAVRGGENVQSQEAEGQREALAKYTLDLTQRARDGKLDPVIGRDDEIRRSIQILQRRTKNNPVLIGEPGVGKTAIVEGLAQRIVNDEVPETLKGKKVLVLDLAALLAGAKYRGEFEERLKAVLKELAMDPGRYIVFLDEIHTLVGAGKAEGAIDAGNMLKPALARGELHLIGATTLDEYRKYIEKDAALERRFQKVMVDEPSVESTIAILRGLQERYELHHGVDITDPAIVAAAELSHRYITDRFLPDKAIDLIDEAAARIKMEIDSKPEVMDKLDRRIIQLKIEREAVKKETDEASKKRLGLLEDEIDKLGREYADLEEVWKSEKAQVQGSAHLKEEIDKLRGEMADLQRQGKLDKVAEIQYGKLPQLEAQLKHAEASGEKPVFKLLRTEVGAEEIAEVVSRATGIPVSKMMQGERDKLMHMEDHLHGRVVGQDEAVAVVSDAIRRSRAGLSDPNRPLGSFLFLGPTGVGKTELCKTLAEYLFDSAEHMVRIDMSEFMEKHSVARLIGAPPGYVGYEEGGYLTEAVRRKPYSVILMDEIEKAHPDVFNVLLQVLDDGRLTDGQGRTVDFRNTVIVMTSNLGSQMIQQMSGDDYQVVKLAVLGEVKSYFRPEFINRIDEVVVFHALSESNIASIARIQLKALEARLAAMEMKLDVTDAALAEIAKAGFDPVYGARPLKRAIQSELENALAKEILSGRFAAKDTIRVDAVDGKFSFEKAA

SEQ ID NO: 33730 - DNA, 2622 bp, Anabaena variabilis ATCC 29413
  CDS (1)..(2622): transl_table=11
atgcaaccaaccaatcccgagcaatttaccgaaaaagcctgggaagcccttgttcgtactcccgaaattgccaagcagtttcagcatcagcagattgagagcgaacatttgatgctagcgctactggaacaggaaggactcgccagttctattttcaacaaagccggggtaaatgttcaaaaactacacgagcgcactatcgacttcatcaaccgtcagcccaaagtatcgggggctagcagtggttcggtatacatcggacacagtttagagaggctgctcgatcgcgccgaacaataccgcaaagagtttggtgatgaatatatttctattgaacatttaatacttgcctttgccaaagacgatcgctttggtaaagggttgtttcaagaatttggactggatgaaaaaaaactccgcaacatcattcaacagattcgagggagtcaaaaagtgacagatcaaaacccagaagttaaatatgaagcgctagaaaaatacggacgcaatttaacccaattggcacgtgaaggcatactcgacccagtgattggacgagatgaagaaattcgccgcacgattcaaatcctttctcgtcggactaaaaataatcccgtgctgattggtgaacccggtgtcggtaaaacagcaattgtagaaggattagcgcagcgcattgtcagtggtgatgtcccggaatcattgcgcgatcgcaaactaatagctttagacatgggtgcgttaattgccggagccaaataccggggagaatttgaagaacgcctgaaagctgtcttaaaagaaatccaagaagcacagggacaaatcgtcttgttcattgacgaaattcacactgtagttggtgcgggtgcaacgcaaggatcgatggatgctagcaacttgctcaagccgatgctcgctcgcggcgaattgcgctgtattggtgccaccacgctagatgaataccgcaagtacattgaaaaagatgcggctttggaacgtcgttttcagcaggtgtatgtcgatcagcccagtgtggaagataccatctcaattctgcgcggtttgaaagagcgctacgagttacaccacggcgtgaagatttctgatagtgcgttagttgcggcagctactctgtctgcgagatatattagcgatcgcttcctacccgacaaagctattgatttggtggatgaagctgcggctaaactaaaaatggaaattacttctaaaccagaagaattagacgaaattgatcgcaaaattctgcaactggaaatggagcggctgtcactgcaaaaagaaacagacagtgcttccagagagcgtttagaacggctggagagagaacttgcagagttaaaagaacgccaagatgccctcaatgctcaatggcaagcagagaagcaaatcatcgatcgcattcgccaaattagacaagagattgagcgtgtcaacgtagaaattcagcaagccgaacgcgattacgacctcaaccgggcagcagaactgaaatacagcaaactcactgagctgcaacgacaactagaagaagccgaagcgcgactagctcaaatccagactagcggtaaatctctgttgcgcgaagaagtcaccgaagctgacattgacgaaattatctccaagtggacgggtattccggtgagcagactggttgaatcggaaatgcaaaaacttttgcatctggaagaagagctacataaacgtgtgattggtcaggacgaagctgtaagagctgttgctgatgcaattcaacgttcccgtgctgggttggcagacccgaatcgtcccattgctagctttattttcttaggcccgaccggggtgggaaaaacagaactggcaaaagctttagcggtatatctgtttgataccgaagatgcactggtgcggatcgatatgtccgaatacatggagaaacacactgttgcccgtctcatcggtgcgcctccaggttacgtgggctatgaagaaggcggacaactcaccgaagcgattcgccgccgaccttattctgtaattctgtttgacgaaattgagaaagctcatcctgatgtattcaacgtcctgctgcaaatcctggatgatggtcgcctaactgattctcagggacgcacagtagattttaaaaatacgatcgcgattatgaccagcaatattggttcaatatacattttggatgtggcaggagacgatagcaagtacgaacaaatgcgcgatcgcgtcatggaagcagtgcgagaaagtttccgccccgaattcctcaaccgcattgatgaaatcattatcttccatagcttgcggaaggacgagttgcgcgaaattgtcaaactacaagtgcagcgtttagaggagcgactgcgcgagcgtaaactctcgctcaaaatctccgacgaggctctcaattggattgttcaggtcggttatgacccagtttacggtgctcgtcccctgaagcgggcgattcagcgagaactagaaactccgattgccaaagcgattctacgcggcgagttccacgaaggcgacacaatctacgtccatgtggaacacgaacgactggtgttgaagcgcttatcacctgaactggtcaatgcttag

SEQ ID NO: 33731 - protein, 873 aa, Anabaena variabilis ATCC 29413
MQPTNPEQFTEKAWEALVRTPEIAKQFQHQQIESEHLMLALLEQEGLASSIFNKAGVNVQKLHERTIDFINRQPKVSGASSGSVYIGHSLERLLDRAEQYRKEFGDEYISIEHLILAFAKDDRFGKGLFQEFGLDEKKLRNIIQQIRGSQKVTDQNPEVKYEALEKYGRNLTQLAREGILDPVIGRDEEIRRTIQILSRRTKNNPVLIGEPGVGKTAIVEGLAQRIVSGDVPESLRDRKLIALDMGALIAGAKYRGEFEERLKAVLKEIQEAQGQIVLFIDEIHTVVGAGATQGSMDASNLLKPMLARGELRCIGATTLDEYRKYIEKDAALERRFQQVYVDQPSVEDTISILRGLKERYELHHGVKISDSALVAAATLSARYISDRFLPDKAIDLVDEAAAKLKMEITSKPEELDEIDRKILQLEMERLSLQKETDSASRERLERLERELAELKERQDALNAQWQAEKQIIDRIRQIRQEIERVNVEIQQAERDYDLNRAAELKYSKLTELQRQLEEAEARLAQIQTSGKSLLREEVTEADIDEIISKWTGIPVSRLVESEMQKLLHLEEELHKRVIGQDEAVRAVADAIQRSRAGLADPNRPIASFIFLGPTGVGKTELAKALAVYLFDTEDALVRIDMSEYMEKHTVARLIGAPPGYVGYEEGGQLTEAIRRRPYSVILFDEIEKAHPDVFNVLLQILDDGRLTDSQGRTVDFKNTIAIMTSNIGSIYILDVAGDDSKYEQMRDRVMEAVRESFRPEFLNRIDEIIIFHSLRKDELREIVKLQVQRLEERLRERKLSLKISDEALNWIVQVGYDPVYGARPLKRAIQRELETPIAKAILRGEFHEGDTIYVHVEHERLVLKRLSPELVNA

SEQ ID NO: 33732 - DNA, 2565 bp, Pseudomonas fluorescens PfO-1
  CDS (1)..(2565): transl_table=11
atgcgtatagaccgtttaaccagcaaattgcagttggcgttgtccgatgcccaatccctggctgttggccacgatcatcctgccatcgagccggcgcatttgatgcaggccatgcttgaacagcagggtggttcgatcaaacccctgttgatgcaggtgggcttcgacgtcaacagcttgcgtaaagagctgaccaaagagctcgatcaattaccgaaaatccagaatccgaccggcgacgtcaacatgtcgcaggatctggcgcgtctgctcaaccaggccgatcgtctggcccagcagaagggcgatcagttcatttccagcgagctggtgctgctcgccgcgatggacgagaacagcaagctcgggaagttgctgctcggccagggcgtgagcaaaaaggctctggaaaatgcaatcaacaacctgcgcggtggcgaggcggtcaacgacgccaaccacgaagagtcgcgtcaggcactggataagtacaccgtcgacctgaccaaacgcgccgaagaaggcaagcttgacccggtgatcggccgtgacgacgagatccgtcgcaccattcaggtgctgcaacgccgtaccaagaacaacccggtgctgatcggcgagcctggcgtgggtaaaaccgcgattgccgaaggtctggcccagcgcatcatcaatggtgaagtgccggacggcctgcgcggcaagcgtctgctgtccctcgatatgggggcgctgattgccggtgccaagtatcgcggcgagtttgaagagcgcctgaaagcgctgctcaacgagctgtcgaagcaggaagggcagatcattctgttcatcgacgaactgcacaccatggtcggcgccggcaagggcgaaggctcgatggacgccggcaacatgcttaaaccggccctggcccgtggtgagctgcattgcgtcggcgcgaccacgctcaacgagtaccgccaatatatagagaaggacgcggccctcgagcgacgcttccagaaagtgctggtggacgagccgagcgaagaggacaccatcgcgatcctgcgtggcctcaaggagcgttacgaggttcaccacaaggtggcgatcaccgacggcgcgatcatcgcggcggccaagctcagccatcgctacatcactgaccggcagctgccggacaaggcgatcgacctgatcgacgaggcggccagccgcatccgcatggagatcgactccaagccggaagtgctggatcgtcttgagcggcgcctgattcaactgaaggtggaatctcaggcactgaagaaagaaagtgacgacgcggcgaagaaacgtctggagaaactccaggaagaaatcgatcgccacgagcgtgagtactccgatctggaagaaatctggaactcggaaaaagccgaggtgcagggctctgcgcagattcagcagaagatcgaacagtcccgtcaggagctggaagccgcgcgccgtaaaggcgacctgaaccgcatggccgagttgcagtatggggtgatcccggatctggaacgcagcctgcaaatggtcgaccagcacggcaagagcgaaaaccagttgctgcgcagcaaggtgaccgaagaggaaatcgccgaagtcgtttcgaagtggaccggtattccggtgtcgaaaatgctcgaaggcgaacgcgacaagctgatgaagatggaaagcctgttgcatcaacgcgtgatcggccaggacgaagcggtggtggcagtagccaacgcggtgcggcgttcccgtgccgggttgtccgacccgaaccgcccgagcggctcgttcatgttcctcggcccgaccggtgtcggtaaaaccgagctgtgcaaggcgctggccgaattcctcttcgatacggaagaggcgatggtgcgaatcgacatgtccgagttcatggagaaacattccgtggcacggttgatcggggcaccaccgggctacgtcggctacgaagagggtggttacctgaccgaagcggtacggcgcaagccttactcggtgatcctgctggacgaagtcgagaaggcgcatccggacgtgttcaacatcctgctgcaagtgctggaggacggacgtctgaccgacagccatggccgcacggtggacttccgcaataccgtgatcgtcatgacctccaatctcggttcgatgcagatccaggaactggtcggtgatcgtgaagcacaacgggcagcggtgatggatgcgatttccacccacttccgtccggagttcatcaaccgcgttgacgaagtggtgatcttcgagccattggcgcgggatcagatcgcgggcatcaccgagatccagctgggccgtctgcgcaaccgtctggccgagcgcgagctgaagctggaactgagccctgaggcgatggacaagctgattgccgtcggttacgacccggtctatggcgcacggccgctgaagcgggcgatccagcgctggatcgagaacccgttggcgcagttgatcctgtcgggacgcttcatgccgggcgagaccgcaaccggtgtggtggagaacgacgagatcacgttcaactga

SEQ ID NO: 33733 - protein, 854 aa, Pseudomonas fluorescens PfO-1
MRIDRLTSKLQLALSDAQSLAVGHDHPAIEPAHLMQAMLEQQGGSIKPLLMQVGFDVNSLRKELTKELDQLPKIQNPTGDVNMSQDLARLLNQADRLAQQKGDQFISSELVLLAAMDENSKLGKLLLGQGVSKKALENAINNLRGGEAVNDANHEESRQALDKYTVDLTKRAEEGKLDPVIGRDDEIRRTIQVLQRRTKNNPVLIGEPGVGKTAIAEGLAQRIINGEVPDGLRGKRLLSLDMGALIAGAKYRGEFEERLKALLNELSKQEGQIILFIDELHTMVGAGKGEGSMDAGNMLKPALARGELHCVGATTLNEYRQYIEKDAALERRFQKVLVDEPSEEDTIAILRGLKERYEVHHKVAITDGAIIAAAKLSHRYITDRQLPDKAIDLIDEAASRIRMEIDSKPEVLDRLERRLIQLKVESQALKKESDDAAKKRLEKLQEEIDRHEREYSDLEEIWNSEKAEVQGSAQIQQKIEQSRQELEAARRKGDLNRMAELQYGVIPDLERSLQMVDQHGKSENQLLRSKVTEEEIAEVVSKWTGIPVSKMLEGERDKLMKMESLLHQRVIGQDEAVVAVANAVRRSRAGLSDPNRPSGSFMFLGPTGVGKTELCKALAEFLFDTEEAMVRIDMSEFMEKHSVARLIGAPPGYVGYEEGGYLTEAVRRKPYSVILLDEVEKAHPDVFNILLQVLEDGRLTDSHGRTVDFRNTVIVMTSNLGSMQIQELVGDREAQRAAVMDAISTHFRPEFINRVDEVVIFEPLARDQIAGITEIQLGRLRNRLAERELKLELSPEAMDKLIAVGYDPVYGARPLKRAIQRWIENPLAQLILSGRFMPGETATGVVENDEITFN

SEQ ID NO: 33734 - DNA, 2613 bp, Rhodobacter sphaeroides 2.4.1
  CDS (1)..(2613): transl_table=11
atgaacctcgagaagttcacggagcggtcgcgcgggttccttcaggccgcgcagacgatcgcgatgcgggaaagccaccagcggctggcgtccgaacatctgctgaaggccctgatggacgacgatcaggggctggcctcgaacctgatccgccgatcgggcggcgagcctgcgcgcgtggccgagacggtcgagctgaccatcgccaagctgcccaaggtgtcgggcgatgcgcagcccttcatggacccgggcctcgtccgcgtgctggacgaggcggagaagctcgcgaagaaggcgggcgacagtttcgtgccggtggagcgcatcctgatggcgctggccatggtcgcgtcgaaggccaaggacgcgctggatgcgggtgcggtgacggcgcagaagctgaatgccgcgatcaacgacatccgcaaggggcgcaccgccgacacggcctcggccgaggaaggctatgacgccctgaagaaatatgcccgcgacctgacgcaggccgcgcgggacggcaagatcgacccgatcatcggccgcgacgacgagatccggcgcgccatgcaggtgctgagccggcgcaccaagaacaacccggtgttgatcggcgagcccggcgtcggcaagaccgccatcgccgagggcctcgccctgcgcatcgtgaatggcgacgtgcccgagagcctgaagaacaagcgcctgctgtcgctcgacatgggggcgctgatcgcgggcgcgaaataccgcggcgagttcgaggagcggctgaaggccgtgctgaacgaggtgacctcggctgcgggcgagatcatcctctttatcgacgagatgcacacgctggtaggcgcgggcaaatccgaaggcgcgatggatgcggccaacctcatcaagccggcgctggcgcggggcgagctgcactgcatcggcgctacgacgctggatgagtatcgcaagcatgtggagaaggacgcggcgctggcgcggcgcttccagcccttgatggtcgaggagccgacggtcgaggatacgatctcgatcctgcgcggcatcaaggagaagtacgagctgcaccacggggtgaagatcgcagacgccgctctcgtggccgcggcgacgctctcgcaccgctacatcaccgaccgcttcctgcccgacaaggccatcgacctcgtggacgaggcggcgagccgcctgcggatggaggtcgattcgaagcccgaggaactcgacgcgctggatcggcagatcctgcaagcgcagatcgaggcggaggcgctgaagaaggaggacgacgcggcgtcgaaggaccggctggcgaagctcgagaaggaactctcgggcatgaccgaacgcgccgccgagatgacggcgcagtggcaggccgagcgcgacaagctcgaggccgcacgcgatctgaaggagcagctggaccgggcccgggccgagctcgagcaggtcaagcgcgagggcaacctcgcccgcgcaggcgagctgtcctacggggtcattcctcagatcgagaagaagctcgaggaagccgaagcgcgcgagggcgatctcctcgtctcggaagccgtgcggccggagcagatcgccgaggtcgtggagcgctggaccggcatcccgacctcgaagatgctcgagggcgagcgcgagaaacttctcaagatggaggaggagctcggccgccgggtgatcgggcagcgcgccgcgctgcgggcggtggccaatgccgtgcggcgggcgcgcgcggggctgaacgacgagcggcggcctctgggcagcttcctcttccttggcccgacgggcgtcggcaagaccgagctgacgaaggcggtggccgaatatctcttcgacgacgaccaggcgatggtccgcatcgacatgtcggagttcatggagaagcactcggtcgcccggctgatcggcgcgcctccgggctatgtgggctacgatgagggcggggtgctgaccgaggccgtgcggcgccgtccctatcaggtcgtgctgttcgacgaggtcgagaaggctcacccggaggtgttcaacgtgctcctgcaggtgctcgacgacggggtcctgaccgacgggcagggccggacggtggacttcaagcagacgctcatcatcctgacctcgaacctcggggcctacgccttgagccagctgccggaaggggccgatcccgcgcctgcccgcgcggcggtgatggaggcggtgcgcggacatttccggcccgagttcctgaaccggctcgacgagatggtgatcttcgaccgcctgtcgcgagacgacatgggccagatcgtcgagatccagctcgggctcctcggcaagcggctggccacccgcaagatcgggctcgagctcgatgcggcggcgaaacagtggctcgccgacgagggctacgatccggtctatggcgcgcgtccgctgaagcgcgtgatccagcgccatctgcaggatccgctggccgagatgatcctcgcgggcgacgtgctcgacgggtcggtcgtgcaggtcagtgccggtgccgacgggctcatcatcggcgaccgggtctcctcgtcgcggcgcgagcggccgcaggacgccgtggtccactga

SEQ ID NO: 33735 - protein, 870 aa, Rhodobacter sphaeroides 2.4.1
MNLEKFTERSRGFLQAAQTIAMRESHQRLASEHLLKALMDDDQGLASNLIRRSGGEPARVAETVELTIAKLPKVSGDAQPFMDPGLVRVLDEAEKLAKKAGDSFVPVERILMALAMVASKAKDALDAGAVTAQKLNAAINDIRKGRTADTASAEEGYDALKKYARDLTQAARDGKIDPIIGRDDEIRRAMQVLSRRTKNNPVLIGEPGVGKTAIAEGLALRIVNGDVPESLKNKRLLSLDMGALIAGAKYRGEFEERLKAVLNEVTSAAGEIILFIDEMHTLVGAGKSEGAMDAANLIKPALARGELHCIGATTLDEYRKHVEKDAALARRFQPLMVEEPTVEDTISILRGIKEKYELHHGVKIADAALVAAATLSHRYITDRFLPDKAIDLVDEAASRLRMEVDSKPEELDALDRQILQAQIEAEALKKEDDAASKDRLAKLEKELSGMTERAAEMTAQWQAERDKLEAARDLKEQLDRARAELEQVKREGNLARAGELSYGVIPQIEKKLEEAEAREGDLLVSEAVRPEQIAEVVERWTGIPTSKMLEGEREKLLKMEEELGRRVIGQRAALRAVANAVRRARAGLNDERRPLGSFLFLGPTGVGKTELTKAVAEYLFDDDQAMVRIDMSEFMEKHSVARLIGAPPGYVGYDEGGVLTEAVRRRPYQVVLFDEVEKAHPEVFNVLLQVLDDGVLTDGQGRTVDFKQTLIILTSNLGAYALSQLPEGADPAPARAAVMEAVRGHFRPEFLNRLDEMVIFDRLSRDDMGQIVEIQLGLLGKRLATRKIGLELDAAAKQWLADEGYDPVYGARPLKRVIQRHLQDPLAEMILAGDVLDGSVVQVSAGADGLIIGDRVSSSRRERPQDAVVH

SEQ ID NO: 33736 - DNA, 2613 bp, Rhodospirillum rubrum ATCC 11170
  CDS (1)..(2613): transl_table=11
atggatcccgaaaaactgacggatcggtcgaagggctttctgcaggcggctcagaccatcgccctgcgcgaaacccaccagcaggtgacgcccgagcatctgctcaaggccctgcttgatgataaagaaggattggcggccaatttgattcgcgccgctggcggtgacccgctgcgcgcccaggaggcggtcaaccgcgaagtcgacaaactgcccaaggtgcaaggcgcccagcagatgtattgggcccagtcgctggcccgggtgatcgatcaggcgacgcgcatggccgaaaaggccggcgatagcttcgtgaccgtggagcgcttgctgatcgccctggcgatggccgccgagaccccggccaagcgcatcctcgccgaggccggcgccacgccccagggcctcaacaaggcggtcgaagacctgcgcaagggccgcaaggccgatagcgccggggcggaatcccaatatgacgccctgaagaaatacgcccgcgacctgaccgaggcggcgcgcgagggcaagcttgacccggtgatcggccgcgacgaggaaatccgccgcaccatccaggtgctcagccgccgcaccaagaacaacccggtgctgatcggcgagcccggtgtcggcaagacggcgatcatcgagggtctggccctgcgcatcgtcaatggcgacgttcccgaaagcctgcagaacaagaagctgatggcccttgaccttggcgccatggtcgccggcgccaagttccgtggcgagttcgaggaacgcctgaaggcgatgctgaccgaggtgtcggcggccgagggcgagatcatcttgttcatcgacgagatgcacaccctgatcggcgccggggccggggagggggcgatggacgcctcgaacctgctcaagccggccttggcgcgcggcgatctgcattgcgttggcgcgaccacgctcaatgaataccgcaagcatgtggaaaaggacgcggccctggcccggcgtttccagccggttttcgtctccgagccgggtgtggccgataccatttcgatcctgcgcggcatcaaggagaagtacgagctgcaccacggggtgcgcatcgccgataacgccctggtcgccgccgccaccttgtccaaccgctatatcaccgaccgcttcctgcccgataaggccatcgacctgatggacgaggcggcaagccgcctgcgcatggaggtcgacagcaagcccgaggccctggacgagcttgatcgccgcatcatccagctgaaaatcgagcgcgaggccctgcgcaaggaaaaggacatcgcctcggaggcccgtcttagcgatctggaaaaggaactggccgatctggaaagccagtcggcgaccctgaccgaggactggaagcgcgaaaaggaaggtctggccggatcgacgcgcatcaaggagcaattggagcaggcgcgcggtgatcttgatatcgccaaacgccaagccaattgggcgcgggcgggcgagttggaatatggcgtcatccccgatctcgaacgccgtttgggcgaggtcgaatccggtgatggcctcgcccatcgccagggtggcaagctggtcaacgaggtggtgaccgccgagaccatcgcttcggtggtgtcgcgctggaccggcattcccgttgacaagatgctggcgggcgaacgcgaaaagctgctgggcatggaaaaggttctggcttcaagggtggtcggccagcgcgaggcggtggtggccgtttccaacgccgtccgccgctcgcgggccggcttgcaagatcccaaccggccgatggggtcgttcctgttcctcggccccaccggcgtgggcaagaccgaactgaccaaggccctggccgccttcctgttcgacgacgagcaggcgatggtgcgcatcgacatgtccgaatacatggaaaagcacgcggtttcccggctgatcggcgcgcctccgggctatgtcggctatgacgagggcggggctttgaccgaggcggtgcggcgccggccctatcaggtgatcttgtttgacgaggtcgagaaggcccatcccgatgtgttcaacgtgcttctgcaggtgcttgacgacggccgcttgaccgatggccagggccgcaccgtcgatttccgcaataccctgatcgtgctgacctcgaacctgggggccgatatcctggccaaccagcccgagggcgatgattcaggcgcggtgcgcggcgcggtgatggagatggtgcgcgccgccttccgccccgagttcctgaaccgccttgacgagatcttgctgttccatcgcctgttccgcgagaacatggccgggatcgtgtcgatccagcttggccgtttggccgaccggctgcgcgatcgcaagatgacccttgatctggacgacgcggcgcgcgactggctggccgagcgcggctatgacccggtctatggcgcccggccgcttaagcgggtgatccagcgctctttggaaaatccgctggccaccctggtgcttgatggccggatcaaggatggcgatgtcatccgcattaccgttgaaggaggcaaactggtggtcaatggcgaagcgttgtctttggacaccgccgcatga

SEQ ID NO: 33737 - protein, 870 aa, Rhodospirillum rubrum ATCC 11170
MDPEKLTDRSKGFLQAAQTIALRETHQQVTPEHLLKALLDDKEGLAANLIRAAGGDPLRAQEAVNREVDKLPKVQGAQQMYWAQSLARVIDQATRMAEKAGDSFVTVERLLIALAMAAETPAKRILAEAGATPQGLNKAVEDLRKGRKADSAGAESQYDALKKYARDLTEAAREGKLDPVIGRDEEIRRTIQVLSRRTKNNPVLIGEPGVGKTAIIEGLALRIVNGDVPESLQNKKLMALDLGAMVAGAKFRGEFEERLKAMLTEVSAAEGEIILFIDEMHTLIGAGAGEGAMDASNLLKPALARGDLHCVGATTLNEYRKHVEKDAALARRFQPVFVSEPGVADTISILRGIKEKYELHHGVRIADNALVAAATLSNRYITDRFLPDKAIDLMDEAASRLRMEVDSKPEALDELDRRIIQLKIEREALRKEKDIASEARLSDLEKELADLESQSATLTEDWKREKEGLAGSTRIKEQLEQARGDLDIAKRQANWARAGELEYGVIPDLERRLGEVESGDGLAHRQGGKLVNEVVTAETIASVVSRWTGIPVDKMLAGEREKLLGMEKVLASRVVGQREAVVAVSNAVRRSRAGLQDPNRPMGSFLFLGPTGVGKTELTKALAAFLFDDEQAMVRIDMSEYMEKHAVSRLIGAPPGYVGYDEGGALTEAVRRRPYQVILFDEVEKAHPDVFNVLLQVLDDGRLTDGQGRTVDFRNTLIVLTSNLGADILANQPEGDDSGAVRGAVMEMVRAAFRPEFLNRLDEILLFHRLFRENMAGIVSIQLGRLADRLRDRKMTLDLDDAARDWLAERGYDPVYGARPLKRVIQRSLENPLATLVLDGRIKDGDVIRITVEGGKLVVNGEALSLDTAA

SEQ ID NO: 33738 - DNA, 2625 bp, Syntrophus aciditrophicus SB
  CDS (1)..(2625): transl_table=11
atgattatgaggaatcaacgcggaggagaaattatgcgttttgacaaatttaccttgaaagtactggaaggccttcaggaagcccagaccctggccggaaactacggtcatcatggcatcgatgttgagcatctcctgctggcttttatcgcccagccggaaggcattgtgggcaatatcctgaaaaaactgggcacggagccggcacagatagaaaaggaaattaaaaaagttgtggagcggctgccccgtatttcgggtccgattcagtcttatatcacccccagactgaataaaatcctggataacgccatgacggaagcagcccatctcaacgatgagtatgtcagcgccgaacatgtgctgatagccatggccaacgaaaaggaaggggaggcctcgcgcatcctccgctctgccggagtgacgcgggacaatatcttcaaggttctcgtggaaatccggggaacccagaggatcacggatcccaatcccgaagaaaaatatgaggccttgaagcggtatgccaaagatttcaatgaacttgcccgcaaaggggcgtttgaccccgtcatcggcaggaacgatgaaattcggagaatcatgcaggttctttcccggcggaccaagaacaatcccgttctcatcggtgaacccggtgttggaaagacggcgatcgttgaagggctcgcccagcgcatcgtaaatggcgatgtcccggaaagcctgaagaacaaacgggtcatcggtctggatatcggagcactggtagccggagccaagtatcgcggcgaattcgaggaccgtctcaaggctgtcctgaaggaagtcaccgacgcgcagggcgagatcatcctcttcatcgatgaaatccatacggtcgtcggcgccggagcagcggaagggtccgtggatgcatccaacatgctgaagccggccctcgctcgaggcgagttacgctgtgtcggggcgacaaccctgaacgaatacagaaagcatatagaaaaagatcccgcgctggaacggcgctttcagcccatactggtcagggagcccaccgtggaagacaccatcgccatcctccggggattgaaggaacggtatgaaatccatcacggcgtccggatcaaggattccgccatcgtcgcggcggcaacgctctctaatcgctacatcagtgatcgttttcttcccgacaaggctgtggacctggtggatgaggcggcatcccgcctgaggatcgaactggacagcctgccggcggaaatcgatgttctggagagaaaggctattcaactggagatcgagcgtcagtccctgaaaaatgaaacggaccggacatcccttgaaaggagagagaagatcgaacgggaacttgccgatctgcgggaatccatgaacagcatgaaactccactggtctgaggaaaaggaggtcataaaaagaatccagacgatcaagagtgatctcgaaaacttcaagaatgaagaacaaaatgccatgcgggaaggcaatctggcccgggctgcggaaatccgctacgggaaactggtggaattgaaccgggcgcttgaagaagaacagaatcgacttaaagaaatccagaaggacagcaagatgctgaaagaagaagtggatgccgaggatgtagcggaagtcgtcgccaactggaccggcattcccgtcgcccggatgatggaaagcgacatccagaagctgattcacatggaagaccggctcaagcagcgtgtgatcggacaggatgaaggcattcacgcggtttccgccgccctgcgtcgggcacgttccgggctccaggatcccaaccggcctatcggctcctttattttccttggccccaccggcgtgggcaagaccgagctggccagggcgctcgcggaattcatgttcgataatgaacaggccatgatccgcatcgatatgtcggaatacatggaaaagcattccgtcgcccgcctgatcggcgcgcctcccggatacgttggttatgacgaaggcggctatctcacggaagctgtccgccgtcgaccctatgcggttctgctgttcgacgaaatcgaaaaggcccatcccgatgtcttcaacatcctgctgcagatccttgacgacggccgcctgacggatggccacgggagaacggtcgatttcaagaacacgatcgtgattctgacttcaaacgttggaagccagtggattcaggacattaccctgacagctgaggagaagcgcctgaggaccatggaaattctgcgggccactttcaagcctgaatttctgaatcgaatcgatgacatcatcatcttccgctcactgaccatgacggatctcgaacggattatcgcgattcagatcggtctgattcagaaacggcttatggatcggaagctcttccttgaattgacagaaaaggccaaaaattatatatcccaggaaggttacagcccggtgtacggcgcgagaccgttgaagcgggccctccaaaagatgcttctcgacaatctctccatgaaaattctggaaggcgcctttgttgaaggagatcatattctcgcggacatcgatgaccggggcgaaatcaattttacaaagaaaagcggaagctaa

SEQ ID NO: 33739 - protein, 874 aa, Syntrophus aciditrophicus SB
MIMRNQRGGEIMRFDKFTLKVLEGLQEAQTLAGNYGHHGIDVEHLLLAFIAQPEGIVGNILKKLGTEPAQIEKEIKKVVERLPRISGPIQSYITPRLNKILDNAMTEAAHLNDEYVSAEHVLIAMANEKEGEASRILRSAGVTRDNIFKVLVEIRGTQRITDPNPEEKYEALKRYAKDFNELARKGAFDPVIGRNDEIRRIMQVLSRRTKNNPVLIGEPGVGKTAIVEGLAQRIVNGDVPESLKNKRVIGLDIGALVAGAKYRGEFEDRLKAVLKEVTDAQGEIILFIDEIHTVVGAGAAEGSVDASNMLKPALARGELRCVGATTLNEYRKHIEKDPALERRFQPILVREPTVEDTIAILRGLKERYEIHHGVRIKDSAIVAAATLSNRYISDRFLPDKAVDLVDEAASRLRIELDSLPAEIDVLERKAIQLEIERQSLKNETDRTSLERREKIERELADLRESMNSMKLHWSEEKEVIKRIQTIKSDLENFKNEEQNAMREGNLARAAEIRYGKLVELNRALEEEQNRLKEIQKDSKMLKEEVDAEDVAEVVANWTGIPVARMMESDIQKLIHMEDRLKQRVIGQDEGIHAVSAALRRARSGLQDPNRPIGSFIFLGPTGVGKTELARALAEFMFDNEQAMIRIDMSEYMEKHSVARLIGAPPGYVGYDEGGYLTEAVRRRPYAVLLFDEIEKAHPDVFNILLQILDDGRLTDGHGRTVDFKNTIVILTSNVGSQWIQDITLTAEEKRLRTMEILRATFKPEFLNRIDDIIIFRSLTMTDLERIIAIQIGLIQKRLMDRKLFLELTEKAKNYISQEGYSPVYGARPLKRALQKMLLDNLSMKILEGAFVEGDHILADIDDRGEINFTKKSGS

SEQ ID NO: 33740 - DNA, 2610 bp, Frankia sp. CcI3
  CDS (1)..(2610): transl_table=11
atgaacgctgaacgcctcaccgcccggtcgcaggaggcactctccgcagcgatcagtcgagccaccgccgacgggtcacccctcgtcgaccccctccacctgctcaacgccctgctcgaagcgtccgacggggtcggcgcggcactgctggcgtccgcgggcacctcggtcgacacggtgcgctcccgagccgaggccgcggtgacgcggctgccccgcgcgacgggcctgagcgtgtccccgccgcagctgtcccgccagctcatcgcggtgctgaacaacgccgagcggcaggccggtcagctgggtgacgaatacacttcggtcgagcatctggtcgtggcactcgccgaggaggggggcgaggccgggcggatcctcacctccgccggcgccacgcccgacgcgctgcgcggcgccttcgagaaggtgcgcggcggcgcccggcgggtgaccagccgggacccggagggctcctaccgcgcgttggagaagtactccatcgacctcaccgagcgtgcgcagcagggcaagctggacccggtgatcggccgcgacgccgagatccgccgcgtcatccaggtgctgtcgcggcggacgaagaacaacccggtcctcatcggcgagcccggggtcggcaagacggccatcgtcgaagggctcgcgctgcgggtcgtcgcgggtgacgtgcccgagtcgctgcgcggccggcgcatcgtctcgctcgacctcggttcgatggttgccggctccaagctgcgcggcgagttcgaggagcggctgacctctgtcctcaacgagatccgcgaggccgagggtcagatcatcaccttcatcgacgagctgcacaccgtcgtcggcgccggtgcggcggaaggagcgatggacgccggcaacatgctcaagccgatgctcgcccgcggcgagctgcgcatgatcggcgccaccaccctggaggagtaccgcacccggatcgagaaggacccggcgctggagcgtcgcttccagccggtcctcgtcggcgagccgacggtcgaggacaccatcggcatcctgcgcgggctcaaggaacgctacgaggtgcaccacggcgtgcgcatcaccgacaccgcgctggtcgccgcggccaccctgtccgaccgctacgtcaccgcgcgcttcctgccggacaaggcgatcgacctggtcgacgaggccgcgtcccggctccgcatggagatcgacagccggccggtggcgatcgacgaactcgaacgcgccgtgcgccgcctggagatcgaggacatggcgctgtccaaggagaacgacgaggcctcccgcgagcggcgggggcgcctgcagcgcgagctcgccgaccggcgtgaggagctgtcgagcctgacggcccgctggcaccgggagaaggattcgatctccgaggttcagaagatcaaggaggagctggagaacgcgcggcgcgccgtggagctcgccgagcgcgacctcgacctcgccaaggccggggagctgcggtacggcaccatcccgacgttggagaagcggctgtcggcggcaaccgacgcgctggccggcgcggactcccccggtggggcgatgctcaacgaggaggtcggcccggacgacgtcgccgaggtcgtcgccgcctggaccgggatcccggccggtcgcctcctcgaaggcgagacggcgaagctgctgcgtatggagtccgcgctgcacgcgcgggtcatcggccaggacgacgcggtgcgggccgtctccgacgcggtccgccgggccagggccgggatcgccgacccggaccggccgaccggctccttcctcttcctcgggcccaccggggtcgggaagaccgagctcgcgaaggcgctcgccgatttcctcttcgacgacgagcgggcgatcgtgcgcatcgacatgagcgagtatgccgagaagcactcggtggcccgtctgatcggcgccccacccgggtacgtcgggttcgagtccggcggtcagctcaccgaggcgatccgccgccggccatacagtgtcatcctgttggacgaggtcgagaaggcccatccggacgtctttgacgtcctgctgcaggttctcgacgacgggcggctcaccgacggccagggccgcacggtggacttccgcaacacgatcctcatcctgacctcgaacctcgggtcgcagttcatcgcggaccccacgctcagcccgcaggtgcgccgcgagtcggtgatggtcgccgtgcgcgacgccttcaagccggagttcctcaaccgcctcgacgacgtcctcgtcttcgaccagctgggccgggacgagctgacccgcatcgtcgatctccagctcgatcggctgcgggcccggctgctcgaccggaggatcaccctcaacgtcaccgacgccgccaagggatggctctccgacgtcggctacgacccggtgttcggggcccgtccgctgcggcggctggtccagacggcgatcggcgaccagctcgccaaggaactgctcggcgggcagatccgggacggcgacgaggtgctcgtcaacaccgcgccggaccgctcgggtctgacggtcaaggccgccaccgtcaagtccctctga

SEQ ID NO: 33741 - protein, 869 aa, Frankia sp. CcI3
MNAERLTARSQEALSAAISRATADGSPLVDPLHLLNALLEASDGVGAALLASAGTSVDTVRSRAEAAVTRLPRATGLSVSPPQLSRQLIAVLNNAERQAGQLGDEYTSVEHLVVALAEEGGEAGRILTSAGATPDALRGAFEKVRGGARRVTSRDPEGSYRALEKYSIDLTERAQQGKLDPVIGRDAEIRRVIQVLSRRTKNNPVLIGEPGVGKTAIVEGLALRVVAGDVPESLRGRRIVSLDLGSMVAGSKLRGEFEERLTSVLNEIREAEGQIITFIDELHTVVGAGAAEGAMDAGNMLKPMLARGELRMIGATTLEEYRTRIEKDPALERRFQPVLVGEPTVEDTIGILRGLKERYEVHHGVRITDTALVAAATLSDRYVTARFLPDKAIDLVDEAASRLRMEIDSRPVAIDELERAVRRLEIEDMALSKENDEASRERRGRLQRELADRREELSSLTARWHREKDSISEVQKIKEELENARRAVELAERDLDLAKAGELRYGTIPTLEKRLSAATDALAGADSPGGAMLNEEVGPDDVAEVVAAWTGIPAGRLLEGETAKLLRMESALHARVIGQDDAVRAVSDAVRRARAGIADPDRPTGSFLFLGPTGVGKTELAKALADFLFDDERAIVRIDMSEYAEKHSVARLIGAPPGYVGFESGGQLTEAIRRRPYSVILLDEVEKAHPDVFDVLLQVLDDGRLTDGQGRTVDFRNTILILTSNLGSQFIADPTLSPQVRRESVMVAVRDAFKPEFLNRLDDVLVFDQLGRDELTRIVDLQLDRLRARLLDRRITLNVTDAAKGWLSDVGYDPVFGARPLRRLVQTAIGDQLAKELLGGQIRDGDEVLVNTAPDRSGLTVKAATVKSL

SEQ ID NO: 33742 - DNA, 2610 bp, Staphylococcus aureus subsp. aureus NCTC 8325
  CDS (1)..(2610): transl_table=11
atggatataaataaaatgacatatgctgttcaaagtgctttacaacaagcagttgaactgagtcagcaacataaattacaaaatatagaaattgaggcaattttaagcgctgccttaaatgaaagtgaaagcttatataaaagtattttagaacgagtaaatattgaggtagatcaattaaacaaagcttatgaagacaaactaaacacgtatgcatctgtagaaggtgacaatatacaatatggtcaatatattagccaacaagcaaaccaattgataactaaggctgaatcatacatgaaagaatatgaagatgaatatatttcaatggagcatattttacgttcggcaatggacattgatcaaacaacaaaacattatataaataataaagtagaagttatcaaagaaattattaaaaaagtaagagggggaaatcacgtgacatcacaaaatccagaagttaattacgaagcattagctaaatatggccgcgacttagtagaagaagttagacaaggtaaaatggatcctgttataggaagagatgaagaaattcgaaatacgattcgtattttaagtcgtaaaactaaaaacaaccctgtgctcattggtgaaccaggtgttggtaaaactgcaattgttgaaggattagcgcaacgtatagttaagaaagatgtgccagaatcattattagataaaactgtttttgagttagatttaagcgcattagtagcgggcgctaaatatcgtggtgaatttgaagagagattaaaagcagtcctaaaagaagttaaagagtctgatggtagaattatattatttattgatgaaatccatatgcttgtaggtgctggtaaaacagatggtgccatggatgcaggcaacatgctaaaaccaatgttagcacgaggagagttacattgtattggtgcaacaactttaaatgaatatcgagaatatattgaaaaagattcggcattagagcgtcgtttccaaaaagtagcagttagtgagcctgatgttgaagatacaatttcaattttacgtggtttaaaagaacgatatgaagtgtatcatggtgtgcgtattcaagatagagccttagttgctgccgctgaattgtctgatcgttacatcactgatcgttttttaccagataaagcgattgatttagttgaccaagcatgtgcaacaattcgtacggaaatgggatcaaatccaactgaattggatcaagttaatagacgtgtcatgcaattagaaattgaagaaagcgcacttaaaaatgaatctgacaatgcgagcaaacagagattacaagaactacaagaagagcttgccaatgaaaaagagaaacaagcagcacttcaatctcgtgtagaatcagaaaaagaaaaaatagcaaatttacaagaaaaacgtgcgcaactagatgaaagtagacaagcgttggaagatgcacaaacaaataacaatttagaaaaagctgctgaactacaatatggaacaattcctcaattggaaaaagaacttagagaattagaggataatttccaagatgagcaaggtgaagatacagatcgaatgattcgtgaagttgtaacagacgaagaaattggcgatattgtcagccaatggacaggcataccagtttcaaaattagttgaaacagaacgtgaaaaattacttcacttaagtgacatcttgcataaacgtgttgtaggtcaagataaagcggttgacctggtttcagatgcagtagttagagcaagagcaggtattaaagatccaaacagacctattggtagtttcttattcctaggtccaactggagtaggtaaaactgaattagctaaatcattagctgcatcattatttgattctgaaaaacatatgattcgtattgatatgagtgaatatatggaaaaacatgcagtatcaagattgataggggcacctccaggatatattggacatgatgaagggggtcaattaactgaagcggttcgtcgtaatccatactcagttattttattagatgaggttgaaaaagcgcatactgacgtctttaatgtattattgcaaattttagatgaaggccgtttaactgattctaaaggacgtagcgttgattttaaaaatactattattattatgacaagtaatattggatctcaagttttattagaaaacgtaaaagagactggtgaaattacagaatcaacagaaaaagctgttatgacaagtttaaatgcatatttcaaaccagaaattttgaatcgtatggatgatatcgtattatttaaaccattatctattgatgacatgagtatgattgtagataaaatcttaacgcaattaaatataagattattagaacaacgaatctcaattgaagtttctgatgatgctaaagcttggctaggtcaagaagcttatgaacctcaatacggtgcaagaccattaaaacgttttgtacaacgccaaattgaaacaccattagcacgtatgatgattaaagagggattcccagaaggtacaacgattaaagttaatttaaattcagacaataacttaacgtttaatgttgaaaaaattcatgaataa

SEQ ID NO: 33743 - protein, 869 aa, Staphylococcus aureus subsp. aureus NCTC 8325
MDINKMTYAVQSALQQAVELSQQHKLQNIEIEAILSAALNESESLYKSILERVNIEVDQLNKAYEDKLNTYASVEGDNIQYGQYISQQANQLITKAESYMKEYEDEYISMEHILRSAMDIDQTTKHYINNKVEVIKEIIKKVRGGNHVTSQNPEVNYEALAKYGRDLVEEVRQGKMDPVIGRDEEIRNTIRILSRKTKNNPVLIGEPGVGKTAIVEGLAQRIVKKDVPESLLDKTVFELDLSALVAGAKYRGEFEERLKAVLKEVKESDGRIILFIDEIHMLVGAGKTDGAMDAGNMLKPMLARGELHCIGATTLNEYREYIEKDSALERRFQKVAVSEPDVEDTISILRGLKERYEVYHGVRIQDRALVAAAELSDRYITDRFLPDKAIDLVDQACATIRTEMGSNPTELDQVNRRVMQLEIEESALKNESDNASKQRLQELQEELANEKEKQAALQSRVESEKEKIANLQEKRAQLDESRQALEDAQTNNNLEKAAELQYGTIPQLEKELRELEDNFQDEQGEDTDRMIREVVTDEEIGDIVSQWTGIPVSKLVETEREKLLHLSDILHKRVVGQDKAVDLVSDAVVRARAGIKDPNRPIGSFLFLGPTGVGKTELAKSLAASLFDSEKHMIRIDMSEYMEKHAVSRLIGAPPGYIGHDEGGQLTEAVRRNPYSVILLDEVEKAHTDVFNVLLQILDEGRLTDSKGRSVDFKNTIIIMTSNIGSQVLLENVKETGEITESTEKAVMTSLNAYFKPEILNRMDDIVLFKPLSIDDMSMIVDKILTQLNIRLLEQRISIEVSDDAKAWLGQEAYEPQYGARPLKRFVQRQIETPLARMMIKEGFPEGTTIKVNLNSDNNLTFNVEKIHE

SEQ ID NO: 33744 - DNA, 2574 bp, Ehrlichia chaffeensis str. Arkansas
  CDS (1)..(2574): transl_table=11
atggatctcaatcaatttactgatatgtcaaagaatttaataatgcaggcgcaaactacagcaattgcatcagggcatcaatctttgataccagagcatttacttaaagtaatgttagatactaaagatgagcttattgagctgttgctgacttcatgtggatgtgatattgataagatatacagtgatataaaactctccttaagtaaattacctgttgtaagtggaagtggtagtggtcatatacatttatcaaaagaaatggctcaggttttagaagaagctattagtttagcaaaaaggaatcaggatacttatgtaactgtggagagattattacaagctcttgcagttgttaaagacactagtgtttacaagatactacttgcacatggagtaactcctgttaagttagaatcactaatacttaatatgcgtaatggatctaaggctgatactattaatgctgaacataaatttaatgctctgaaaaaatatgctaaagatattacagaatctgccatggctgggaaacttgatccagttattggaagagatgaagagattagacgtacaatgcaagttttatcacgcagaacaaagaataatcctgtattaattggagaacctggagttggtaagacagcaattattgaaggattggcacagcgtattgtggtaggtgatgttcctgttggactaagaaatgcaaaaataatggcactggatcttggaatgcttgttgctggaacaaaatatagaggggaatttgaggaaagattaaaatatgtaattaatgaaatagtggcgtcaaatggtgcggttatattgtttattgatgaattacacacattagttggagctggtgctacagatggtgcaatggatgcatcgaacttgttaaaacctgctttagcaaggggtgaaatacattgtataggagcaacaacattggatgaatataggcaacacatagaaaaagatgctgcattggctagaaggtttcaacctgtgtttgtttctgaatctactgttaatgatactatctctattttgcgtggattgaaagaaaaatatgaagtacaccatggtattaggattatggatagtgcgattattgctgcttcaactttgtcaaatcgttatattacagataggtttttaccagataaagctatagatctaattgatgaagcagcaagtcgtgtaagaatagagattgatagtaaacctgaggtaattgacgaattagatagaaaaattattcaattgaagattgaggctggagttttagaaaaagaaaatactgaatcttcaaaacagcgtttagcccaattaagtgaagaattgaataaattaagtattcaagcaacagaattaaatagtaagtggcaggctgagaaaatgaagatattaaaaatgcaagaatgtgtggaaaagttagataatgcaagaaatgatttagaaaaagctcaaaggtctggtaatttggcaaaagctggcgaattgatgtatggaattatcccagaacttgaaaaagagttaaaaaaatgtgaaaaacctagtagtaacatgttgaaaagggaagtgactgaaagtgatatagcaagtattgtatcacggtggacaggtattcctattgaaaacatgatgagcagtgaaaaagaaaaattgctgcgtatggaagaagagatagggaaaacagtcattggtcaagaaagtgctattaaagcagtaagtgatgctgttagaagatcgcgtgcaggagtacaagatgccaataaaccattaggatcttttttattccttggacctactggagtaggaaaaacagaattagtaaaaacattagctgaatttttattttgtgataaatctgctttattgaggtttgatatgtctgagtttatggaaaagcatgctgtatctcggttaataggtgctcctccaggatatgtaggatatgatcaaggtggtatgttgactgaatctgtgaggaggagaccttatcaagttatactttttgatgaaatagagaaagcacatggagatatttttaatattttattgcaagtattagatgagggacggttaactgataaccatggtaaattggttgattttcgtaatacaatactggttttaacatcaaacttaggacaagaaatactgattaataataaggaagatgttgatggagagtcagtaaaaaaatctataactagtgtgttacaacatcattttcggccagaatttttaaacagattagatgaaattattgtatttcatagattaactaaggaacatatagagaaaattatagatgtacaattttctctgttacagaaaattgttgctcaaaaagagttagagattagtttatcttcggaggcaaaatcttggttgatgaataatggctatgattcgttatatggggcaagacctttgaaaagattaatacaacaaaaaatacaaaatagtttagcaaagttaatacttgcaaatcaagttagtaagggagataagctagaagtagttttgttgaatgacgatttaattattaataagttatag

SEQ ID NO: 33745 - protein, 857 aa, Ehrlichia chaffeensis str. Arkansas
MDLNQFTDMSKNLIMQAQTTAIASGHQSLIPEHLLKVMLDTKDELIELLLTSCGCDIDKIYSDIKLSLSKLPVVSGSGSGHIHLSKEMAQVLEEAISLAKRNQDTYVTVERLLQALAVVKDTSVYKILLAHGVTPVKLESLILNMRNGSKADTINAEHKFNALKKYAKDITESAMAGKLDPVIGRDEEIRRTMQVLSRRTKNNPVLIGEPGVGKTAIIEGLAQRIVVGDVPVGLRNAKIMALDLGMLVAGTKYRGEFEERLKYVINEIVASNGAVILFIDELHTLVGAGATDGAMDASNLLKPALARGEIHCIGATTLDEYRQHIEKDAALARRFQPVFVSESTVNDTISILRGLKEKYEVHHGIRIMDSAIIAASTLSNRYITDRFLPDKAIDLIDEAASRVRIEIDSKPEVIDELDRKIIQLKIEAGVLEKENTESSKQRLAQLSEELNKLSIQATELNSKWQAEKMKILKMQECVEKLDNARNDLEKAQRSGNLAKAGELMYGIIPELEKELKKCEKPSSNMLKREVTESDIASIVSRWTGIPIENMMSSEKEKLLRMEEEIGKTVIGQESAIKAVSDAVRRSRAGVQDANKPLGSFLFLGPTGVGKTELVKTLAEFLFCDKSALLRFDMSEFMEKHAVSRLIGAPPGYVGYDQGGMLTESVRRRPYQVILFDEIEKAHGDIFNILLQVLDEGRLTDNHGKLVDFRNTILVLTSNLGQEILINNKEDVDGESVKKSITSVLQHHFRPEFLNRLDEIIVFHRLTKEHIEKIIDVQFSLLQKIVAQKELEISLSSEAKSWLMNNGYDSLYGARPLKRLIQQKIQNSLAKLILANQVSKGDKLEVVLLNDDLIINKL

SEQ ID NO: 33746 - DNA, 2580 bp, Francisella tularensis subsp. holarctica
  CDS (1)..(2580): transl_table=11
atggatataaataaatttacaataaaactacaagaagctctagctgaggctcaatcttatgcttttcaacaaaaagcaactgagtttacatcagcacatatactaaaagctcttttggagcaaaatgatagtgttgctatatctatattaagcgtttgtggtgttaatatacaaaactttataaaagctgtaaatgatatggttgatagtgttgcggtattatctggagaaggtaaccctcaagtaacaccatctagagatttaatagctacattacataaaatgcaagggcttgctaataaaaatgatgatgagtttatctcgagtgaggttttcttattagcctctttagaagataaaagtttaactggactgtataacaaattcggtattacaaaagaaaaattaacaaaagcagtcaatgattatcgcggaggggagaaagtgagtagtcaaaatcaagaagatatgaaaggtgcattagataaatacacggtagatctaactgatctagcgagaaaaggaaaaattgatccaataatcggtagagatagtgagatccgtagaactattcaagtattacaaagaagaactaagaacaaccctgtgcttataggtgagcctggtgttggtaaaactgctattgttgagggcttagctcaacgaatagttaatgatgaagtaccagaaggtgtcaaaggtaaaaaagtactatcattagatatgggtgcactgctagctggtgctaaatttagaggagattttgaagagcgtctaaaatctgtattaaaagagctatcaaaacaagaaggtaatgtaattctctttatagatgaattacatactatggtaggtgctggtaaagcagaaggatctatggatgctggtaacatgcttaaacctgctctagctagaggagagctaaagtgtgttggtgcaacaactttagatgagtatcgtgagtatgttgaaaaagatccggcacttgagcgaagattccagaaagtgctagttgatgaacctactgtagaagatactatcgctatacttagaggcctaaaagaaagatatgagctacatcatggtgtaaatatcacagattcagctattgtaagtgcagcaactttgtcacataggtatatcacagatagacagctacctgataaagctatagatctagtagatgaagcagcaagccaaattcgtatggaaatagactctaaacctgaaaaaatggaaagcttatatcgtagaatcatccagctgaaaatgcaacgcgaacagctaaagaaagagaaagatgatgctactaaaaaacgtttagagatacttgagcaagaaataaaagggctagactccgagtataaaggactagaagagctttggaaagctgaaaaacttaagatgcaaggtacaagtaaactaaaagaagagcttgagaaagccaagtttgaacttgaaaagtaccaaagagtgggtgatttgagcaaaatggcagaattacaatacggtaaaatacctgagctagaagcacaaattaaacaaatagaagaaactgaagcagaaccttctgaaaacaaattagtaagaacatctgttacagaaaatgagattgctgatgtagtttcaaaagctactggaatacctgtgtctaagatgatggaaggcgaaaaagacaagcttctaaatatggaaagtttcttacataaaagagtaatcggacaagatcaagctataaaagcagtatcaaatgctgtaagaagatctcgttctggattatcagatccaaatagacctataggctcattcatgttcttaggtccaactggtgtcggtaaaactgagcttacaaaagctttagcagagtttttgtttgatgatgaagatgccatgcttagagtagatatgtctgagtttatggagaaacattctgtagctagactaataggcgcacctcctggatacgtaggttatgaacaaggcggctatctaactgaacatgttagaagaaaaccttattctgtaatcttacttgatgaggttgaaaaagctcatgctgatatatttaacatcttactacaagtgcttgacgatggtcgcctaacagatgggcaaggcagaacagtagactttaaaaatactgtaatagttatgacttctaaccttggttcacatcgaatccaagaaatgcaaggtcaggattatgaaacagtaaaatctgctgtaatggaaatggtacttagccactttagacctgaatttgtaaatagagttgatgatgcaattgtctttgaacctctaaacaaagagatgataactgaaatagctaaaatacaaatcaaacgcttagaaaaacgtctagcagatctaagtataggattagaagtcacaactgaagctatggataaactagctgatgctggctttgatcctgtgtttggtgctagaccgcttaagcgcgctattcaaaacaacttagaaaaccctctggctctaaaacttctagatggtgagtttaaagctgaagataaaatagttgtcgatattgacgctaataacaatattacattctctaaataa

SEQ ID NO: 33747 - protein, 859 aa, Francisella tularensis subsp. holarctica
MDINKFTIKLQEALAEAQSYAFQQKATEFTSAHILKALLEQNDSVAISILSVCGVNIQNFIKAVNDMVDSVAVLSGEGNPQVTPSRDLIATLHKMQGLANKNDDEFISSEVFLLASLEDKSLTGLYNKFGITKEKLTKAVNDYRGGEKVSSQNQEDMKGALDKYTVDLTDLARKGKIDPIIGRDSEIRRTIQVLQRRTKNNPVLIGEPGVGKTAIVEGLAQRIVNDEVPEGVKGKKVLSLDMGALLAGAKFRGDFEERLKSVLKELSKQEGNVILFIDELHTMVGAGKAEGSMDAGNMLKPALARGELKCVGATTLDEYREYVEKDPALERRFQKVLVDEPTVEDTIAILRGLKERYELHHGVNITDSAIVSAATLSHRYITDRQLPDKAIDLVDEAASQIRMEIDSKPEKMESLYRRIIQLKMQREQLKKEKDDATKKRLEILEQEIKGLDSEYKGLEELWKAEKLKMQGTSKLKEELEKAKFELEKYQRVGDLSKMAELQYGKIPELEAQIKQIEETEAEPSENKLVRTSVTENEIADVVSKATGIPVSKMMEGEKDKLLNMESFLHKRVIGQDQAIKAVSNAVRRSRSGLSDPNRPIGSFMFLGPTGVGKTELTKALAEFLFDDEDAMLRVDMSEFMEKHSVARLIGAPPGYVGYEQGGYLTEHVRRKPYSVILLDEVEKAHADIFNILLQVLDDGRLTDGQGRTVDFKNTVIVMTSNLGSHRIQEMQGQDYETVKSAVMEMVLSHFRPEFVNRVDDAIVFEPLNKEMITEIAKIQIKRLEKRLADLSIGLEVTTEAMDKLADAGFDPVFGARPLKRAIQNNLENPLALKLLDGEFKAEDKIVVDIDANNNITFSK

SEQ ID NO: 33748 - DNA, 2595 bp, Desulfitobacterium hafniense Y51
  CDS (1)..(2595): transl_table=11
atgtcttttgatacgaaccgctttacccaaaaatctcaggaggccattattcaagcgcaaacgatggcggagcgtaatggcaacagccaagtggagcctgagcacttgcttttagctctcctggaacagggagagggggtcgttccccaagtcctgaccaagcttgatatcccggtgggggctttggttcaaaaagtacgccaggaggtcaaccgcctcccgcgcatgatgggagctaatgttcagctgaccatctccccccgtctgcggacggtgttggtctcggctcatgatgagatggagacctttaaggatgactatgtaagcaccgagcatcttttgctggcgactctcagtcaaggcgggggagcagcggagaaaatcttaaaacaagagggtctgaatcgcgagaagcttctgcaggctttgcgtgaggtgagagggactcagcgggtgacgagccagacgccggaagggaccttccgggcccttgaacaatatggacgcaatcttgtcgaacaagcccgccggggaaagctggatccggtcatcggccgggacgaggaaattcgccgggttatccagattctctcccgcaagaccaagaacaaccctgttctgatcggggagcccggtgtgggaaaaaccgccattgtggaaggtttggcccagcggatcgtccgcggtgatgttcccgaatcggtgaaagataagaagatcattgccttggatatgggttccttgatcgccggagcgaaataccggggagaatttgaggaacggcttaaagctgtgcttaaggaagttcaggaacgggaagacatcatcctgtttatcgatgaactgcacacggtggtgggagcgggggcagcagaaggggccatggatgccggcaatatgcttaaacccatgctggcccggggtgagctgcatatggtgggagccacaaccctggatgaataccgcaagtatattgaaaaggatgccgctttggaacggcgctttcagccggttacagtgggggctcccagtgttgaggataccatctccattttgcgggggctcaaagaacgctatgaaacccatcatggggtaagaattaccgatggagcgattatcgccgccgccgttctttctgaccgctatatcagcgatcgtttcctgccggataaagccatcgacctcattgatgaggccgctgcccgcatgcgtatggagatcaccagtgacccctatgaattggatcagatcaagcgccggattctgcagctggagattgagcgggaggctttaaagaaggaaaaagacgaaggcagcaaagaacgcctggaaaagattgaagaagatctggctaacctcaaagaagaacgcagtgccctggaagcccagctgcaaggggaaagagaagttctggccagaatcaactccctcaaagaagacatcgatcagaaccgcctgaaaatggagcaagcccagcaggccttcgactataacaaggcagctgagctgcaatacggcatattgccaaagctggagaaggagctcaacgctttggaagagcagcttcgcaaccggaagaacaccttgctcaagcaggaagtaggggaagaggacattgccgaagtggtggccaaatggacccaggttcctgttgctaaacttttggaaagcgaaatggaaaaactggttcatatggaagcgcgcatccatcagcgggtgatcggacaggaggaggctgtgaaagcggtagctgatgctgtccgcagatcccgggccggcctgcaggaccctaaccggcccttaggttcgttcctgtttcttggtcccacaggagtaggaaagacggagctggccaaagccttggctgaatttctctttgatgatgaccaaggaatcgtgcgcatcgacatgtccgaatatatggaaaagcataccgtttcccgcctgatcggtgctccgccggggtatgtaggctatgaagaggggggccagctgacggaagcagtaaggcgcaaaccctatagtgtggtcctctttgatgaagtggaaaaagctcatggggatgtcttcaatgtgttgctccagctcctcgatgacggccgcttaaccgatgggcagggacgggtggttaattttaagaatacagtggtcattctgaccagcaatatcgccagtcccttgattcaggaattgacggcctcaggagcggcccaggaagtgttgcgttcccgggttaccgaggaactcaggctgcatttccggccggagtttttgaaccggttggatgaaatcatcgttttccaccctcttggtcaggagcatattggttccatcgtgcagatacagatcaacaagctgcgtgattatctggctccccgcaaaatgactctggagctctcccaggcagcgttaaataaaatcattcaacaaggttatgatccgatctatggagcaagacccctgaaaagggtgatccagcaaaacctccaaaatcctttggccatgaaaatcctgcagggagccctttacgaaggggatcatgtcctggtcgaccttgatcctcagggccagcttctgtttaaaaagtcggaataa

SEQ ID NO: 33749 - protein, 864 aa, Desulfitobacterium hafniense Y51
MSFDTNRFTQKSQEAIIQAQTMAERNGNSQVEPEHLLLALLEQGEGVVPQVLTKLDIPVGALVQKVRQEVNRLPRMMGANVQLTISPRLRTVLVSAHDEMETFKDDYVSTEHLLLATLSQGGGAAEKILKQEGLNREKLLQALREVRGTQRVTSQTPEGTFRALEQYGRNLVEQARRGKLDPVIGRDEEIRRVIQILSRKTKNNPVLIGEPGVGKTAIVEGLAQRIVRGDVPESVKDKKIIALDMGSLIAGAKYRGEFEERLKAVLKEVQEREDIILFIDELHTVVGAGAAEGAMDAGNMLKPMLARGELHMVGATTLDEYRKYIEKDAALERRFQPVTVGAPSVEDTISILRGLKERYETHHGVRITDGAIIAAAVLSDRYISDRFLPDKAIDLIDEAAARMRMEITSDPYELDQIKRRILQLEIEREALKKEKDEGSKERLEKIEEDLANLKEERSALEAQLQGEREVLARINSLKEDIDQNRLKMEQAQQAFDYNKAAELQYGILPKLEKELNALEEQLRNRKNTLLKQEVGEEDIAEVVAKWTQVPVAKLLESEMEKLVHMEARIHQRVIGQEEAVKAVADAVRRSRAGLQDPNRPLGSFLFLGPTGVGKTELAKALAEFLFDDDQGIVRIDMSEYMEKHTVSRLIGAPPGYVGYEEGGQLTEAVRRKPYSVVLFDEVEKAHGDVFNVLLQLLDDGRLTDGQGRVVNFKNTVVILTSNIASPLIQELTASGAAQEVLRSRVTEELRLHFRPEFLNRLDEIIVFHPLGQEHIGSIVQIQINKLRDYLAPRKMTLELSQAALNKIIQQGYDPIYGARPLKRVIQQNLQNPLAMKILQGALYEGDHVLVDLDPQGQLLFKKSE

SEQ ID NO: 33750 - DNA, 2631 bp, Saccharophagus degradans 2-40
  CDS (1)..(2631): transl_table=11
atgagaattgatcgattaactaaccaacttcaagttgccttgtcggatgctcaatctctggccgttggccgcgatcattcgcaaattgaatccatacaccttatgcaggccatgctagaccagcaaggtggtgcagtgcggccgctattagctcgcgcgggttttgatgtgcccggtttgcgcaacgaattaaccaagcagctagaagcgctggcaaccgtaactaatccaaccggcgatgtgaacatgtcgcaggagttggggcgcttactaaaccttgcagacaaatacgcgcagaaagtgggcgataaatttatctctagcgaagcggtgttgtttgccggcatttcagataaagccagcaacttaggtaaattacttaatacatacggccagccagacaggttaaagcaagctatagccgccgtacgcggcggtgaaaccgtggacgaccccgaggccgaaggtaaccgtcaagctttagagaaattcacagtggaccttactgcgcgtgcagaggccggtaagctcgaccccgttattggtagagacgatgaaatccgtcgcacaattcaagtgttgcagcgccgcaccaaaaataaccctgtgctaataggtgagcccggtgtaggtaaaaccgccattgtagaaggcttggcgcaacgcattattaatggcgaggtgccagaaggcctaaaaaataaacgtttattatcgttagatttaggctcgctgttggcgggcgcaaaatttcgcggtgaatttgaagagcgtttaaaagctgtgcttaatgagctttccaagcaagaagggcgcattattttattcgtagatgagttgcacaccatggtgggggcgggtaaagccgacggcgctatggatgcaggtaatatgctaaaaccagcgctggcgcgtggtgagttacattgcgtgggcgcaacaacgctagatgaatatcgccaatatattgaaaaagatgctgcccttgagcgccgcttccaaaaagtacaagtggatgagccaaacgaagaagacaccatcgctattttgcgcgggttaaaagagcgctatgaggttcatcacggtgtaaatattacagattccgccattattgctgcggcgaaattgtcgcaacgctatatcaccgatagacaactgcccgataaagcaattgatttaattgatgaatccgctagccgtattcgcatggaaattgactccaaaccggaggaaatggacaagctagagcgccgcttaattcaattaaaaattgagcgcgaagcggttaaaaaagatgaagacatcgcctctaaagaacgactcaaaaaaatagacagtcaaattaatgaaatagaaaaatcgtttgcagatttagatgaaatttggcgggcagaaaaagccgcgctgcaggggtcgcaagaaattaaatcgcatttagaaaaggcgcgattagacctagaagccgcgcgtcgcgctggcgatttagggcgcatgtctgaattgcagtacggcattattccagatttagaaaaacaactagatatggccgcgcaagccgatatgcatgaaatgaaattattgcgcaacaaggttaccgaagaagaaattgcggaagtagtgtccaaatggacgggtattccggtttctaaaatgctagagggtgagcgcgataaactattgcgtatggaagacgatttgcacaagcgtgtaattggtcagcacgagtctgttgtggctgtctctaacgctgttcgccgttcgcgcgcaggcctttctgacccgaaccgccccaatggatcatttttgtttttaggccctacaggtgtaggtaaaaccgagttgtgcaaagcgttggcagagtttttattcgacagccaagatgccatggtacgcattgatatgtcggaatttatggagaaacactccgttgcccgtttaattggtgcgccccctgggtacgtaggttacgaagagggcggctacttaaccgaggcggtgcgccgcaagccctattcgctcgtattgctagatgaaattgaaaaagcgcatccagacgtattcaatattttgttgcaagtattagaagatggccgcttaacggatggccaaggtagaactgtcgacttccgcaacacggtggttgtaatgacgtcgaacctaggctccagtgccattcaagatattgcgcaaaataaatctttcgatacgatcagtttcgataacgaatctggtgccgaggagcagaaccaataccgttaccaagctatgaaagatgcggtaatggaggtggtaacaggtcacttccgcccagaatttatcaatcgtatcgatgaggctgtagtgttccacccattggcacagcagcaaatagcgggcattgccgatatacaactggaaacattacgcaagcgcttggcagaaagagatttacgcttgaacgtaacaccagaagtaatggcgaagctggcggaggcgggcttcgaccctgtatacggcgcaaggccgctaaaaagagctatacaacagttggtagaaaaccccttggcgcaacatatattgaaaggggagtttatcgctggtgacaccatcagcgccacgcttgaagaaggtgaaattacctttagaaagtaa

SEQ ID NO: 33751 - protein, 876 aa, Saccharophagus degradans 2-40
MRIDRLTNQLQVALSDAQSLAVGRDHSQIESIHLMQAMLDQQGGAVRPLLARAGFDVPGLRNELTKQLEALATVTNPTGDVNMSQELGRLLNLADKYAQKVGDKFISSEAVLFAGISDKASNLGKLLNTYGQPDRLKQAIAAVRGGETVDDPEAEGNRQALEKFTVDLTARAEAGKLDPVIGRDDEIRRTIQVLQRRTKNNPVLIGEPGVGKTAIVEGLAQRIINGEVPEGLKNKRLLSLDLGSLLAGAKFRGEFEERLKAVLNELSKQEGRIILFVDELHTMVGAGKADGAMDAGNMLKPALARGELHCVGATTLDEYRQYIEKDAALERRFQKVQVDEPNEEDTIAILRGLKERYEVHHGVNITDSAIIAAAKLSQRYITDRQLPDKAIDLIDESASRIRMEIDSKPEEMDKLERRLIQLKIEREAVKKDEDIASKERLKKIDSQINEIEKSFADLDEIWRAEKAALQGSQEIKSHLEKARLDLEAARRAGDLGRMSELQYGIIPDLEKQLDMAAQADMHEMKLLRNKVTEEEIAEVVSKWTGIPVSKMLEGERDKLLRMEDDLHKRVIGQHESVVAVSNAVRRSRAGLSDPNRPNGSFLFLGPTGVGKTELCKALAEFLFDSQDAMVRIDMSEFMEKHSVARLIGAPPGYVGYEEGGYLTEAVRRKPYSLVLLDEIEKAHPDVFNILLQVLEDGRLTDGQGRTVDFRNTVVVMTSNLGSSAIQDIAQNKSFDTISFDNESGAEEQNQYRYQAMKDAVMEVVTGHFRPEFINRIDEAVVFHPLAQQQIAGIADIQLETLRKRLAERDLRLNVTPEVMAKLAEAGFDPVYGARPLKRAIQQLVENPLAQHILKGEFIAGDTISATLEEGEITFRK

SEQ ID NO: 33752 - DNA, 2586 bp, Methylobacillus flagellatus KT
  CDS (1)..(2586): transl_table=11
atgcgtttcgataaactgactacaaaattccagcaagcgctggctgatgcgcaaagcattgcggttggcaacgacaatcccaatatagaagcatcacacctgttgctggccttgctcaatcaggaagatggcggcacggcatccctgcttgcccgtgccggggccaacctggcaccgctaagggccggattgcaagccgccatcgacaatctgcccaaggtgcagaacaatagcggcgaggtatcgatctcgcgtgagctcaacaacctcctgaacatcacggacaggaacgcccaaaaacgcaatgatgcctacatcgcgagtgagatgttcctgcttgcgctggctgacgacaagggcgagacgggtcgtttgctgaagacccacggcctgaccaaggctgcgctggaacaagcgatcaatgccgtacgcggcaatgagacggtcaatagccaggaagccgaaagcaatcgcgaggccctgaagaaattcaccatcgaccttaccgagcgtgcccgtttgggcaagctggatcctgttatcgggcgcgatgatgaaatccggcgcacgatccaagtcttacagcgccgtaccaagaacaacccagtattgatcggtgagcctggtgtgggcaagaccgcgatcgtggaaggcctggcccagcgcatcgtcaacggtgaggtgcctgaaaccctcaagaataagcgcgtgctggttcttgatatggccggcctgctggcgggcgccaagtaccgtggcgagttcgaggagcgcttgcaggccgtattgaaggagcttgcgcaggatgaaggcaaaaccattgtcttcattgatgagatccataccatggtgggcgcaggcaaggcggaaggcgccatggatgccggcaatatgctcaagccggcactggcgcgtggcgaattacactgtgtgggcgcgaccacgctggatgagtaccgcaagtacatcgagaaggatgcggcgctggagcgtcggttccagaaggtgctggtggatgaaccttctgttgaggcgaccatcgccatcctgcgcggattgcaggaaaaatacgaagtgcatcacggcgtggaaatcaccgatccggccattgtggctgccgcagagctgagccaccgttatattactgaccgcttcctgccagacaaggcaatcgacttgatcgatgaggcggcggcacgcatcaagatggaaatcgattccaagcccgaggcactggataagctggagcgtcgcctgatccagctcaagatcgagcgcgaggcggtgcatcgtgagaaggacgaagcttctcagaaacgcttgtcgctgatcgaggatgaaatcaggcgcctggaaaaagagtacgccgacctggaggagatctggaaggcggaaaaagcccaggtccaaggcagcaagcatctgaaggaagagatcgagaaggtcaagctgcagatcgaggaagccacacgcaagggtgaatggcagaaagtgtccgagctgcaatatggcaagctgccgcagctggaaacccagctcaagcaggctgccagcgcggaagaacaaggtggccagaagccacatcggctattgcgcacgcaagtcggcgcggaagagatcgccgaagtggtgtcgcgtgccactggcattcctgtttccaagatgctgcagggcgaacgtgacaaactcctgcatatggaggagaaactccatgaacgcgtggtcgggcaggatgaggctgtgcgccttgtcagtgacgcaatccgccgttcgcgctctggtctggctgacccgaaccggccgtatggctctttcctgttcctgggccctactggcgtaggcaaaaccgagctcaccaaggccttggcaggcttcctgttcgattcggaggaccacctgatccgcatcgatatgagcgagttcatggagaaacactccgtggcacgcctgatcggtgcgcctccaggctatgtgggctacgaggagggggggtatctcactgaagcagtgcgccgcaagccttactcggtgattctgctggatgagatcgagaaagcgcatcctgatgtgttcaatgtgctgctgcaggtgctggatgatgggcgtttgaccgatggtcaaggtcgtaccgtggacttcaagaatacggtgatcatcatgacttccaacctgggctcgcagatgattcagaacatgagcggcgacgaataccaggtcgtgaagctggcggtcatggccgaagtcaaggccaatttcaggccggaatttgtcaaccgtatcgatgaagtcgtggtgttccacgccctgggtgaatcccatgtgaagtcgatcgcccgcatccagttgcagaacctggccaagcgcctggcggcaatggagatgcaccttgatgtgagtgatgctgcattggcagaaatcgccaacgctggctttgatccggtatatggtgccagaccgctcaagcgggccatccagtccgagatcgagaatccgcttgcgaaggaaatcctcaatggcaactttgctgccaaggataccatccatgtggacttcaaaggcgggcgtatggtattcagtaaggcatga

SEQ ID NO: 33753 - protein, 861 aa, Methylobacillus flagellatus KT
MRFDKLTTKFQQALADAQSIAVGNDNPNIEASHLLLALLNQEDGGTASLLARAGANLAPLRAGLQAAIDNLPKVQNNSGEVSISRELNNLLNITDRNAQKRNDAYIASEMFLLALADDKGETGRLLKTHGLTKAALEQAINAVRGNETVNSQEAESNREALKKFTIDLTERARLGKLDPVIGRDDEIRRTIQVLQRRTKNNPVLIGEPGVGKTAIVEGLAQRIVNGEVPETLKNKRVLVLDMAGLLAGAKYRGEFEERLQAVLKELAQDEGKTIVFIDEIHTMVGAGKAEGAMDAGNMLKPALARGELHCVGATTLDEYRKYIEKDAALERRFQKVLVDEPSVEATIAILRGLQEKYEVHHGVEITDPAIVAAAELSHRYITDRFLPDKAIDLIDEAAARIKMEIDSKPEALDKLERRLIQLKIEREAVHREKDEASQKRLSLIEDEIRRLEKEYADLEEIWKAEKAQVQGSKHLKEEIEKVKLQIEEATRKGEWQKVSELQYGKLPQLETQLKQAASAEEQGGQKPHRLLRTQVGAEEIAEVVSRATGIPVSKMLQGERDKLLHMEEKLHERVVGQDEAVRLVSDAIRRSRSGLADPNRPYGSFLFLGPTGVGKTELTKALAGFLFDSEDHLIRIDMSEFMEKHSVARLIGAPPGYVGYEEGGYLTEAVRRKPYSVILLDEIEKAHPDVFNVLLQVLDDGRLTDGQGRTVDFKNTVIIMTSNLGSQMIQNMSGDEYQVVKLAVMAEVKANFRPEFVNRIDEVVVFHALGESHVKSIARIQLQNLAKRLAAMEMHLDVSDAALAEIANAGFDPVYGARPLKRAIQSEIENPLAKEILNGNFAAKDTIHVDFKGGRMVFSKA

SEQ ID NO: 33754 - DNA, 2637 bp, Acidobacteria bacterium Ellin345
  CDS (1)..(2637): transl_table=11
atggcaatacgttgggacaaattaactgtaaaggcgcaggaagcgtattcgcgcgccaacgatctcgcgtccgagcacggcaatcccgagctccgtcccgtccatgtgctggccgcactgttagaggaccgcgaaggcatcatcgttccactgctttcgaagatgggcgtgcggcccgaagcagtgacgcaggcaacggcgcgggaaatcgaacgcatgccgaaggtcagcggcagtgcgacccaggccacactctccaatgaagcgcaggagatgctcgagctggctttcaaacaagccgatcaattcaaggacgaatatgtttcgaccgaacatctgttgctcggaatcgcccagctcaagcgcgacgccgcgaaggacatcctcggctcaatgggcgcgacctacgaccgaatcttgagcgctctgaccggtatccgcggcaaccagaaggtgacagaccagaatcctgaggcgaagtaccaggcgctggagcgttacgctcgcgacctcacggatctcgcgcgtcggggcaaactcgatccggtgatcggccgcgatgacgaagtgcgtcgcgtggtgcaggtgctgtcgcggcgaacgaaaaataaccctgtgctcatcggcgagccgggcgttggtaagacggcgattgttgagggcttggcgcaacgcatcgtttccggcgatgtgccggagcaattgcgcaacaagcggctggtgtcgctggatctaggagcgatgctcgcgggcgcgaaatatcgcggcgagtttgaagatcgtcttaaggcggtgctgaaggaaatcgaggagagcgacggacgcatcatcctcttcatcgacgagctgcacacgttggttggtgcaggtgctgcggaaggggcgatcgacgccagcaatatgttgaagccggcattggcacgcggcgaactgcgcgcaattggcgccaccacgctgaatgagtaccgcaagtacatcgagaaggatgcggcgctggagcggcgcttccagatcgtgttcgtcgggcagccgacggtggaagacacgattgcgatcttgcgcggactgaaagagaaatacgaagtccatcacggcgtgcgcattaaggattcggcgatcgtcgcggcagcgacgctgtcgcaccgctacatcaccgatcgtttccttcccgataaagccatcgacctgatcgatgaagctgcagcctcgctgcgcattcagattgattcgctgccgacggaagtagacgaactcgagcgccgcatcacgcagcttgagatcgaacgacaagcgttgaagcgggaagaagacacaaactcgcgcgaacggctggccgtgattgaaaaagagctcgcagggctccgcgagcgttcgaacgcgttgaaggcgcgatggaaagacgagaagcagagcatcggtcggattcgcgagttgaaagagaagatcgaacagatcaagctccaggcgcagaccgcgagcaacaagggcgactacgaaaaagccgcgcagttgcagtatggcgagctgccgaagttgcaggcggaactcgacaacctcagcgcggagagcgacagcaagacatcgccacgcatgttgaaggaagaagtggacgaagaagacgtcgcgaagatcgtctcgaagtggacgggtattccggtgtcgaagatgctcgaaggcgaagtgaagaagctggtcgagatggaagaccggcttagtcagcgggtgatcgggcaagacgctgcgattgagcacgtggcgaacgcgattcggcgttcgcgtgctgggttgagtgatcccaaacgtccgatcggcagcttcatcttcctcggcccgacgggggtgggaaaaaccgagctggcgcgtgcgctggcggcgttcctgttcgacgacgagcatgcgatggtgcgcatcgacatgtcagagtatggcgagaagcattcggtttcgcgactgattggcgcacctccgggatacgttggctacgaagagggaggtcaattgacggaagcgattcgtcgccgactgtatgcggtgttgctcttcgacgaaattgagaaagccgctccagatgtgttcaatgtcttcctgcagatcatggacgacggtcagctcaccgacggcaaaggccgccgcgtggacttcaagaacacgatcatcatcatgacgtcgaacattggcgcgtcgttcatgaccggtgatgcgatccagagtcaagagaattacgaacgagcaagccgcctggtgatggacgcgctgcggcagcagttcaagccagagttcctgaaccgggtggacgacatcgtgctcttcaatccgctcgggaaggagcagctggcgaagatcgtcgagctgcaactggagtatgtgcgccggttgctggcggaccgccgcatcagcctcgaattgagcgacgccgcgaaagatgtgatcttcgcgcaagggtacgatccggcgtatggagcgcggccgttgaaacgtgcgatccagaagctggtgcaggacccgctggcgctgaagattctcgacggcgaggtattgcacggcgatcacgtggtggtgggcgtgagtggcgagggcaagttgacgttcaaggtgagccatcgcaccacggagcctgaaacggtgaagacgaagtaa

SEQ ID NO: 33755 - protein, 878 aa, Acidobacteria bacterium Ellin345
MAIRWDKLTVKAQEAYSRANDLASEHGNPELRPVHVLAALLEDREGIIVPLLSKMGVRPEAVTQATAREIERMPKVSGSATQATLSNEAQEMLELAFKQADQFKDEYVSTEHLLLGIAQLKRDAAKDILGSMGATYDRILSALTGIRGNQKVTDQNPEAKYQALERYARDLTDLARRGKLDPVIGRDDEVRRVVQVLSRRTKNNPVLIGEPGVGKTAIVEGLAQRIVSGDVPEQLRNKRLVSLDLGAMLAGAKYRGEFEDRLKAVLKEIEESDGRIILFIDELHTLVGAGAAEGAIDASNMLKPALARGELRAIGATTLNEYRKYIEKDAALERRFQIVFVGQPTVEDTIAILRGLKEKYEVHHGVRIKDSAIVAAATLSHRYITDRFLPDKAIDLIDEAAASLRIQIDSLPTEVDELERRITQLEIERQALKREEDTNSRERLAVIEKELAGLRERSNALKARWKDEKQSIGRIRELKEKIEQIKLQAQTASNKGDYEKAAQLQYGELPKLQAELDNLSAESDSKTSPRMLKEEVDEEDVAKIVSKWTGIPVSKMLEGEVKKLVEMEDRLSQRVIGQDAAIEHVANAIRRSRAGLSDPKRPIGSFIFLGPTGVGKTELARALAAFLFDDEHAMVRIDMSEYGEKHSVSRLIGAPPGYVGYEEGGQLTEAIRRRLYAVLLFDEIEKAAPDVFNVFLQIMDDGQLTDGKGRRVDFKNTIIIMTSNIGASFMTGDAIQSQENYERASRLVMDALRQQFKPEFLNRVDDIVLFNPLGKEQLAKIVELQLEYVRRLLADRRISLELSDAAKDVIFAQGYDPAYGARPLKRAIQKLVQDPLALKILDGEVLHGDHVVVGVSGEGKLTFKVSHRTTEPETVKTK

SEQ ID NO: 33756 - DNA, 2616 bp, Cytophaga hutchinsonii ATCC 33406
  CDS (1)..(2616): transl_table=11
atgaatattaataattacacgattaaagggcaggaggcatttcagaaagcgatggaaattgttgctgccaacgaacagcaatccattgaatctgttcacttattgaaaggaataatcgttgcggatgaaaacgtggttccttttttattcaaaaaaaataatatcaatccggttacgtttaatcagacattggatgccgtaattaaaacctacggtaaagtttccggaggcagtccgtatttgtcaaacgatgccacgcaggtattaaataaagctacggctttatcaaaagagtttggcgacgaatatatttcgatcgagcacatgttgcttgcattggtttcagggaaagataaggctgcaacgttattaaaagatgccggcctttcggaaaagggcttgcgcgctgcgatccaggagttacgtggtacaagtaaagtaaccgatcagcatgcggaaggtaaataccggtcgcttgaaaaatattctaaaaatttaaatgacctggctcgttccggaaaaattgatccggtgattggccgggatgaagagatccgcagagtactgcagatcttatccagacgtaccaaaaataatccgattttattgggcgagccgggcgttggtaaaacagctatcgctgaaggccttgcacagcgtattgtttcgggtgatgttcctgaaaatttaaaaagcaaacaattaatctctctggatatgggtttgctggttgcaggtgcaaagtataaaggtgaatttgaagagcggttgaaatcggtgatcaaagaagtgatcgattcagatggcgagattgtgttattcattgatgagatccatacgttaattggtgccggcggcggggaaggtgcgatggatgcggcaaacttgctgaaacctgcacttgcacgtggtgagctgcatgcaatcggtgcaacaaccttaaaagaatatcagaaatacattgaaaaagataaagcgctggaacgtcgtttccaagcggtaattgttgacgagccgaatacacaggatgcaatttctatccttcgcgggatcaaagaaaaatacgaagtgcatcacggaatccggattcaggatgatgccatcattgctgcagtagaactttctcaacgctatatcagtgatcgttatttgcccgataaagcgattgatttgatggatgaagcatctgctaaattgcgtatcgagcttgattctatgccgcaggagctggatgaaattcttcgccgtatcatgcagctggaaattgaacgtgaagcgatccgtagagaaaataataaagagaaggaaacgattctttcccgtgaacttgcagaactgaatgagcagaagagccagatcatggctaagtggcaggaggaaaaacgtgtgatcgatggcttgaagcaagccaaggaagatatcgaccggtacaaaatggaagccgagcaagccgaacgtaatggtgattacggtaaggttgcagagatccgttatggtaaaattcaggagtctgaaaagcaattggtcgaattcaacaagcagctgcaggagttgaaacaaacacttggttcttcgatgctgaaagaagaagtgacgccggaagatattgcagaagttgttgcgaaatggacaggcataccggtttcaaaaatgcttcagagtgagagagaaaagttgcttcacttagaagaagagttaggtaaacgtgtcgccggacaagcggaagcgatagaggccatatccgatgcggtccgtaggagcagagcaggcttacaggatccgaagcgtccgataggttcttttattttcttaggaacaacaggtgttggtaaaaccgaactggcaaaagcactggctgattatttattcaacgacgacaatgctatggtacgtattgatatgtctgaatatcaggaaagccatgctgtaagtcgcttggttggtgcacctccgggatacatcggatatgaagaagggggacaattaacggaagctgttcgacggaagccgtattcagtaattttattggatgagattgaaaaggcccatccggatgtatttaatatattgcttcaggtattggatgaagggcgcttgacagataataaaggccgtgtagcgaactttaaaaatgcaatcattatcatgacatccaatatgggtgcgcatgtgattcaggagaattttgataagctaactgctgcaaatgaagatcaggtagttgaggaaacaaaaaatgaagtaattgatttattacgtaaaacgattcggccggagttcttgaatcgtgtcgatgaaattataatgttcagaccgctgacccgaaaagagattcgtaagattgttggtatacagtttagcttgatccaaaaacgtctcgaagagaacggaatcaaagttgaggcaagtaccgaagtattggataaattgggagagttaggtttcgatccgcaattcggtgcacgtccgttgaaacgtgtcatgcagcgtttgatcctgaatgaattgtccaaagaaattctttccggaaacattcagaaagaaagtgttgtaggcattacgcttggtgaagatgggaatctgcagtttttgaacttggatagtgtaccgttgtaa

SEQ ID NO: 33757 - protein, 871 aa, Cytophaga hutchinsonii ATCC 33406
MNINNYTIKGQEAFQKAMEIVAANEQQSIESVHLLKGIIVADENVVPFLFKKNNINPVTFNQTLDAVIKTYGKVSGGSPYLSNDATQVLNKATALSKEFGDEYISIEHMLLALVSGKDKAATLLKDAGLSEKGLRAAIQELRGTSKVTDQHAEGKYRSLEKYSKNLNDLARSGKIDPVIGRDEEIRRVLQILSRRTKNNPILLGEPGVGKTAIAEGLAQRIVSGDVPENLKSKQLISLDMGLLVAGAKYKGEFEERLKSVIKEVIDSDGEIVLFIDEIHTLIGAGGGEGAMDAANLLKPALARGELHAIGATTLKEYQKYIEKDKALERRFQAVIVDEPNTQDAISILRGIKEKYEVHHGIRIQDDAIIAAVELSQRYISDRYLPDKAIDLMDEASAKLRIELDSMPQELDEILRRIMQLEIEREAIRRENNKEKETILSRELAELNEQKSQIMAKWQEEKRVIDGLKQAKEDIDRYKMEAEQAERNGDYGKVAEIRYGKIQESEKQLVEFNKQLQELKQTLGSSMLKEEVTPEDIAEVVAKWTGIPVSKMLQSEREKLLHLEEELGKRVAGQAEAIEAISDAVRRSRAGLQDPKRPIGSFIFLGTTGVGKTELAKALADYLFNDDNAMVRIDMSEYQESHAVSRLVGAPPGYIGYEEGGQLTEAVRRKPYSVILLDEIEKAHPDVFNILLQVLDEGRLTDNKGRVANFKNAIIIMTSNMGAHVIQENFDKLTAANEDQVVEETKNEVIDLLRKTIRPEFLNRVDEIIMFRPLTRKEIRKIVGIQFSLIQKRLEENGIKVEASTEVLDKLGELGFDPQFGARPLKRVMQRLILNELSKEILSGNIQKESVVGITLGEDGNLQFLNLDSVPL

SEQ ID NO: 33758 - DNA, 2613 bp, Trichodesmium erythraeum IMS101
  CDS (1)..(2613): transl_table=11
atgcagccaaataatcctaaccaatttacagaaaaagcttgggaggcaatatcccgtacccctgacattgctaaaacttctcaaaatcaacaaattgaagctgaacacctaatgaaagctttgttagaacaaaatggactggtagctagtctatttagcaaagtaggtgtttcaactaccaaaatacaagaatacacagattcatttattaagcgtcaacccaaagtcaaaaatatacccaataatatttacttaggtcgtagtctagatgccttattagataatgccgaaaaatatcgccaggaatacaaagatgaatatatatctattgaacatctgatactcgcttacctgaaagacgatcactttggcaaaaatctctataaagaattcaaattggatgaagtaaagctcaaaaaaacaatttcccaagttagaggtaagcaaaaagtaacagacaaaaatcctgaaggcaaatatgaagctctggaaaaatacggtcgcgacctgacagaatttgctcgtgaaggtaaacttgacccagttattgggcgtgacgacgaaattcgacgtactattcaaatactcagtcgtcgtactaaaaataacccagttttaataggtgaacctggagtcgggaaaactgcgatagctgaaggtctagcacaaaggatcatcactcttgatgttcctcagtctctaaaagaccgtaaacttatcgctctagatatgggtgccttaattgcgggtgctaaatttaggggtgaatttgaagaacgtctgaaagctgttctcaaagaagttactgactcagagggcaaaattatcttatttatagatgaaattcatactgttgttggagcaggtgcaacccaaggggcaatggatgcaggtaacttgctgaaacctatgttagctaggggggaactaaggtgtattggggcgacgactcttgatgagtatcgtaaatacattgaaaaagatgctgccttagaacgtcgtttccaacaagtttatgtcgatcaacctagtgtggaagatgcaatatcaattttacggggtctcaaagaacgctatgaggtacatcatggtgtaaaaatttctgatagttctttagttgctgctgctactttatctactagatatattagcgatcgcttcctcccagataaggccatcgacttggtggatgaagctgctgctaaacttaaaatggaaatcacttctaaacctgaggaacttgatgaaattgaccgcaaaattctccaactagaaatggagaagttatctttgcaaaaggaaagtgatactgcttctaaagaaaggttaggaaggctagaaaaagatttagcaaatttaaaagaggggcaacgggctcttaatgctcagtgggaatcagaaaaaggtatcattagtacaattcagactgtcaaggaagaaattgataaagttaatattgagattcagcaagcagaacgaaattatgaccttaaccgtgctgctgagttgaaatatggtagactgattaatttacagaaacaggtggaggaagcagaggctaaactggcaacaactcaaactagtggtcagactttgttacgagaagaggtgacagaagctgatattgctgagattatttctaagtggactggtattcctatcagtaaattagtagagtcagaaaaagaaaaactgctacatcttgaaggggagttgcataagcgagttattgggcagaatgaagctgtgagtgctgtttctgatgctattcagcgatcgcgtgcaggtttggctgacccgaaccgtccagttgctagttttattttcctgggtccgactggtgtgggtaaaacagagttaggaaaggcattggcagcatatttatttgacactgaagatgcgatggtgcgtatagatatgtctgagtatatggagaaacattctgtgtctcgtttaattggggcacctcctggatatgtgggttatgatgaaggtggtcagttaactgaagctattcgccgtcgcccatatacggtgattttgtttgatgaaattgaaaaagcacatccggatgtgtttaatattatgctgcaaattttggatgatgggcgggttactgatagtcaaggtcacaaggttgattttaagaatagtgtgattattatgacaagtaatattggttctcagtatattttagatgttactgatgattatgagcaaatgcagggtcgggtaatggaggcgttgcgtgctgctttccgcccagaatttctcaaccgtattgatgagacgattatttttcatgggttgcagaaagagcagttacgagaaattgtgcagttgcaggttgtgcgtttagagaaaaggttggctgaacgtaagatgtcattgaagcttactgatgctgctattaattttttggcagatgttgggtatgatccggtgtatggggctcgacctttaaagcgggcaattcagcgagagttggaaacgcaaattgctaaaagtattttgcgtagtgaatttaatgatggtgatactatttttgtagatattgaaaatgagcgactttcgttgaaacggttgcctatggagttggtgacagctaaatga

SEQ ID NO: 33759 - protein, 870 aa, Trichodesmium erythraeum IMS101
MQPNNPNQFTEKAWEAISRTPDIAKTSQNQQIEAEHLMKALLEQNGLVASLFSKVGVSTTKIQEYTDSFIKRQPKVKNIPNNIYLGRSLDALLDNAEKYRQEYKDEYISIEHLILAYLKDDHFGKNLYKEFKLDEVKLKKTISQVRGKQKVTDKNPEGKYEALEKYGRDLTEFAREGKLDPVIGRDDEIRRTIQILSRRTKNNPVLIGEPGVGKTAIAEGLAQRIITLDVPQSLKDRKLIALDMGALIAGAKFRGEFEERLKAVLKEVTDSEGKIILFIDEIHTVVGAGATQGAMDAGNLLKPMLARGELRCIGATTLDEYRKYIEKDAALERRFQQVYVDQPSVEDAISILRGLKERYEVHHGVKISDSSLVAAATLSTRYISDRFLPDKAIDLVDEAAAKLKMEITSKPEELDEIDRKILQLEMEKLSLQKESDTASKERLGRLEKDLANLKEGQRALNAQWESEKGIISTIQTVKEEIDKVNIEIQQAERNYDLNRAAELKYGRLINLQKQVEEAEAKLATTQTSGQTLLREEVTEADIAEIISKWTGIPISKLVESEKEKLLHLEGELHKRVIGQNEAVSAVSDAIQRSRAGLADPNRPVASFIFLGPTGVGKTELGKALAAYLFDTEDAMVRIDMSEYMEKHSVSRLIGAPPGYVGYDEGGQLTEAIRRRPYTVILFDEIEKAHPDVFNIMLQILDDGRVTDSQGHKVDFKNSVIIMTSNIGSQYILDVTDDYEQMQGRVMEALRAAFRPEFLNRIDETIIFHGLQKEQLREIVQLQVVRLEKRLAERKMSLKLTDAAINFLADVGYDPVYGARPLKRAIQRELETQIAKSILRSEFNDGDTIFVDIENERLSLKRLPMELVTAK

SEQ ID NO: 33760 - DNA, 2574 bp, Shewanella sp. MR-4
  CDS (1)..(2574): transl_table=11
atgcgactcgatcgtatgaccaataaatttcagcttgccatctcagatgcccagtcgctcgcgctcgggcgtgatcatcagtttatcgaaccgttacatttgatgatggcgctgctgaaccaggattctggttctatccatcctttattaacccaagctggcattcgggtgagtgcgctgcgctcgctgttgagccaagagcttgaacgtctcccgcaggtcgaaggcactggtggcgatgtacaattatcccaaggtttaattcgcctattaaacctgtgcgacaagttggcgcaaaagcgcaaagacaaatatatctccagtgagttgtttgtcttagcggcactcgaaggcagcgatgccttggcgcaatgcttaaagaaatcaggcgccaccaaagagctgctcgagcaaaccattgagcaagtgcgcggcggtcagaatgtggatgatcctaacgcggaagatcaacgccaagcgctgaaaaagtttaccgtcgatctcactgagcgtgccgagcaaggcaaacttgaccctgtgattggtcgcgacgatgaaatccgtcgcaccattcaagtgctgcaacgccgtagtaaaaacaaccctgtgctgattggtgagcctggcgtgggtaaaaccgcgattgttgaaggcctcgcgcagcgaattgtgaacggtgaagtgcctgaagggattaaaaataaacgcgttttatccttagacatgggcgcactgattgcgggcgctaaatatcgtggcgagtttgaagagcgtttaaaagccgtgcttaacgagctggcgcaggaagaaggccaagtgatcctctttatcgacgagctgcacactatggtgggcgcgggtaaaggcgatggcgccatggatgcgggcaatatgttaaagcctgcactggcccgtggcgatcttcactgtgtgggcgcgaccactctggacgaatatcgtcaatatattgaaaaggatgccgcccttgagcgccgcttccaaaaagtattagtggatgagcctagcgttgaagataccatcgcgattttgcgtggtctcaaagagcgttacgagctgcatcaccatgtggaaattaccgatccggcgattgtggcggcggccaccatgtcgcaccgctatgtgtcggaccgtaaattacccgataaagccatcgacttgattgatgaggcggcgtcgagcatccgtatgcagatggattctaagcctgaatccctagacagattggagcgccgtgcaatccagttgaaactggaagagcaggcattagcaaaagaaaacgatgaggcgagccgccgtcgactcgaacatttacgtgtcgagttgcatgaagttgaggctaaggcgtcggagcttaatgaaatctggcgcaccgaaaaagcggcgcttgcagggactcagcatattaaagccgaccttgagcaggcgcggatggatttagaggtggcgcgccgcgcgggcgacttgacccgtatgtccgagctgcaatatggccgtattcccgagcttgaaaagcaactggacttagcttcgcaagccgagatgcaggacatgacgctgctacgcaataaagttactgacttagaaattgccgaagtgttatcaaaggcgacgggcattccggtttctaagatgcttgaaggcgagcgtgaaaagctgctgcaaatggaagtggcactgcatgagcgggtgattggccaaaacgaagccgtggatgcggtggccaatgcgattcgccgtagccgcgcaggacttgccgacccgaatcgtcctattggttcgttcctgttcttaggaccaaccggtgtgggtaaaactgagttgtgtaagtcgttggctaagttcctcttcgatacggaatcggccttagtgcgcatcgacatgtctgaatttatggagaaacacgcggtttcccgtttagtgggggcgcctccaggctatgtcggctatgaagagggcggttacttaaccgaagcggtacgccgtaagccttattcggtgatattgctcgatgaggtggaaaaggctcacccagacgtgttcaacattttactgcaggtgttagacgatggccgcttaaccgatggtcaaggccgtaccgtcgactttagaaatacggtgatcatcatgacctcaaacttaggctctgacattatccaagaaggattcggtcacctaagttatagcgaaatgaagagcgcggtgatgaatgtggttacccatagctttagacccgagtttctaaaccggatcgacgagtcagtggtattccatcccttggatgcggaaaatatcaagcatattgcatctatccaaattgcttcattacgtaagcgtttggcagagaaagactatacgctggagatcaccgacgaggcattatcgttaatcgccgaaattggtttcgacccagtctatggcgcaagaccgctgaaacgtgccttgcagcaagagatggaaaacccattagcgcaaaaattactgcgtggcgatttactgcccggcaaacctattaaggtcagttgcgccggtggtgagttggtattcgagcaataa

SEQ ID NO: 33761 - protein, 857 aa, Shewanella sp. MR-4
MRLDRMTNKFQLAISDAQSLALGRDHQFIEPLHLMMALLNQDSGSIHPLLTQAGIRVSALRSLLSQELERLPQVEGTGGDVQLSQGLIRLLNLCDKLAQKRKDKYISSELFVLAALEGSDALAQCLKKSGATKELLEQTIEQVRGGQNVDDPNAEDQRQALKKFTVDLTERAEQGKLDPVIGRDDEIRRTIQVLQRRSKNNPVLIGEPGVGKTAIVEGLAQRIVNGEVPEGIKNKRVLSLDMGALIAGAKYRGEFEERLKAVLNELAQEEGQVILFIDELHTMVGAGKGDGAMDAGNMLKPALARGDLHCVGATTLDEYRQYIEKDAALERRFQKVLVDEPSVEDTIAILRGLKERYELHHHVEITDPAIVAAATMSHRYVSDRKLPDKAIDLIDEAASSIRMQMDSKPESLDRLERRAIQLKLEEQALAKENDEASRRRLEHLRVELHEVEAKASELNEIWRTEKAALAGTQHIKADLEQARMDLEVARRAGDLTRMSELQYGRIPELEKQLDLASQAEMQDMTLLRNKVTDLEIAEVLSKATGIPVSKMLEGEREKLLQMEVALHERVIGQNEAVDAVANAIRRSRAGLADPNRPIGSFLFLGPTGVGKTELCKSLAKFLFDTESALVRIDMSEFMEKHAVSRLVGAPPGYVGYEEGGYLTEAVRRKPYSVILLDEVEKAHPDVFNILLQVLDDGRLTDGQGRTVDFRNTVIIMTSNLGSDIIQEGFGHLSYSEMKSAVMNVVTHSFRPEFLNRIDESVVFHPLDAENIKHIASIQIASLRKRLAEKDYTLEITDEALSLIAEIGFDPVYGARPLKRALQQEMENPLAQKLLRGDLLPGKPIKVSCAGGELVFEQ

SEQ ID NO: 33762 - DNA, 2619 bp, Hyphomonas neptunium ATCC 15444
  CDS (1)..(2619): transl_table=11
atgaaccttgagcaatacacagaacgcgcccgcgctatcatccagggcgcccagaccgcagccctggccgctggccatcaggtgctgaccccggcgcatatcctcaaaacgctgctggacgaccgcgaccagctggctgtgaacctcatccgcgcgaccggtggacggcctgaactggccgtgcagggcgttgacgccgcgctcggccgcgtgccgaaagtttccggcgccggggcaggcgggctgcgcctcgaacaggcgggcgccaaactcttccaggacgctgaagccggcgccaagaaggccggcgacgccttcgtcaccgctgagcggctgctgcttgccattgccgggctgtccggagatccggcggcggacgtgctgaagaacgccggcgtgacgcccaagacgctggaaggcgctattgcacagctgcgccagggccgcacggccgacagtcagaatgcggaagaaggctatgaagccctcaagaaatacgcccgcgacctgaccaaggacgcgcgcgaaggcaagctcgaccccgtgatcggccgtgacgaggaaatccgccgcgccatccaggtcctctcgcgccgttcaaaaaacaaccccgtgctgatcggggagccgggcgtgggcaagacggcgattgccgaaggtctcgccctgcgcatcgtcaatggcgacgtgccagaaagcctcaaagacaagaaactcctcgcgctcgatatgggcgcgctgatcgccggggcaaaattccgcggcgagttcgaggagcgcctgaaagcggtgttgaacgaagttcagcaggcagacggcggcatcatcctcttcattgacgagatgcacacgctcgtcggcgcgggaaaatccgaaggcgcgatggacgcgtccaatcttctgaagcccgcactggcgcgcggggagctgcactgtatcggcgccaccacgctggacgaataccgcaaatatgtcgaaggcgacgcggcgctggcccgtcgcttcatggcggtatttgtcgatgagcctacggtggaggacacgatctcgatcctccgggggctgaagggccgttacgaagcccatcacggcgtgcgaatttccgatgcggcgattgtggccgccgctacgctgtccaaccgctatatcaccgatcgtttcctgcccgacaaagccatcgacctgatggacgaggccggatcgcgcctgcgcatgcaggtcgattccaagcccgaggagctcgacgagatcgaccggcggatgctgcagctgaaaatcgaggccgaagctctcaagaaggagaaggacaccgcctcgcaggaccgtctgaaaacgctggaaggcgaaatcgccggtcttgaaacccgctcacgcgagctgaccaccgcctggagcgccgagaaggacaagctgaaaggcgcagcctccgctaaggagaagctcgaccgggccttctcggatatggctgaggcccagcgccagggcgatctggcccgtgcgtccgagcttaaattcgcgaccatcccgcagcttgaaaaactgatcgccgaagtcgaagccaagggcgacgccgaaggcgggctcgtttccgaagtcgtccgtccagaggatattgccggggtcgtttccaaatggaccggcattccggtcgacaagatgatggaaggcgagcgggagaagctgctgcgcatggaagattccctgcgcgggcgggttgttggccaggaagacgcgctgctcgcggtctccaatgccgtgcgccgcgcgcgcgccggtctgcaggacccgaaccgccccatcggctcgttcctgtttgtcggccccacgggtgttggcaagacagagctcaccaaggcgctcgccgaattcatgttcgatgatgacaccgcgatcctgcggctcgatatgtcggaattttccgagaagcattcggttgcccgcctgatcggcgcgccgccgggctatgtcggctatgatgaaggcggggttttgaccgaatccgtccgcaggcggccttatcaggtcgtgctgtttgacgaggtggagaaagcccacccggacctcttcaacacgctgctccaggtgctcgatgatggccgtctcaccgatggccagggccgcacggtggatttcaagaacacgatcatcatcatgacctcaaacctcggcgccgacgcgctggcgagcggggaagagggggaggtgtccgagcaggcccgcgagcatgtgatgggcgccatccgccggcatttccgcccggaattcatcaaccggatcgacgagatcgtcttcttcaaacggcttggccgcggcgagatcgaccatatcgtcgacatccagatgggccgcctcgagcagcttctgaaggaccggaagatgaagctcgacctcagcctcgacgcccgcaactggctcgcggcgcggggatacgatccggtctatggcgcgcgccccttgaagcgtgtcatccagaaagagctgcaggacccgctcgcccggctgctgctcgaaggccgcatccttgacggcgaaaccatccatgtcggcgtggagggcgatggcctcgccatcaacggcgtgcccaacgactttgccaaaggccgggctgcgctcaactga

SEQ ID NO: 33763 - protein, 872 aa, Hyphomonas neptunium ATCC 15444
MNLEQYTERARAIIQGAQTAALAAGHQVLTPAHILKTLLDDRDQLAVNLIRATGGRPELAVQGVDAALGRVPKVSGAGAGGLRLEQAGAKLFQDAEAGAKKAGDAFVTAERLLLAIAGLSGDPAADVLKNAGVTPKTLEGAIAQLRQGRTADSQNAEEGYEALKKYARDLTKDAREGKLDPVIGRDEEIRRAIQVLSRRSKNNPVLIGEPGVGKTAIAEGLALRIVNGDVPESLKDKKLLALDMGALIAGAKFRGEFEERLKAVLNEVQQADGGIILFIDEMHTLVGAGKSEGAMDASNLLKPALARGELHCIGATTLDEYRKYVEGDAALARRFMAVFVDEPTVEDTISILRGLKGRYEAHHGVRISDAAIVAAATLSNRYITDRFLPDKAIDLMDEAGSRLRMQVDSKPEELDEIDRRMLQLKIEAEALKKEKDTASQDRLKTLEGEIAGLETRSRELTTAWSAEKDKLKGAASAKEKLDRAFSDMAEAQRQGDLARASELKFATIPQLEKLIAEVEAKGDAEGGLVSEVVRPEDIAGVVSKWTGIPVDKMMEGEREKLLRMEDSLRGRVVGQEDALLAVSNAVRRARAGLQDPNRPIGSFLFVGPTGVGKTELTKALAEFMFDDDTAILRLDMSEFSEKHSVARLIGAPPGYVGYDEGGVLTESVRRRPYQVVLFDEVEKAHPDLFNTLLQVLDDGRLTDGQGRTVDFKNTIIIMTSNLGADALASGEEGEVSEQAREHVMGAIRRHFRPEFINRIDEIVFFKRLGRGEIDHIVDIQMGRLEQLLKDRKMKLDLSLDARNWLAARGYDPVYGARPLKRVIQKELQDPLARLLLEGRILDGETIHVGVEGDGLAINGVPNDFAKGRAALN

SEQ ID NO: 33764 - DNA, 2592 bp, Pediococcus pentosaceus ATCC 25745
  CDS (1)..(2592): transl_table=11
atgaatccagagaaaatgactacggcacttcaagaagcaattagcgaagcacagcagattgctgtaaatcgtcaacatcaagaaattggtgtgccagaattatttaaatttttaacacaaccagaccaactggtcgggacactattaacagacttaaagattgataacaaccttgtccaaaccgagttagaccaagaacttgaacaaattagcgtggttagtggtagccaggttagttacggtcaatcgatttcagcagaactaaatcaattattagttcaagcagaacaacagcgtaaaaaattacaggatgagtatgttgcaattgatactattttaattgctttatttaatttagatcagaatcagtttaaaaaattcctgaatcaacaaggtctaactcaaaaacaggttttagccaaagtagatgaatttcgtgggggtgaaagagtgacatcaaaggaacaagaaagtggatataaagcgctagaaaaatatgggacagatttagttaaaagggcccacagtgaaaacccagatccagttattggacgtgatgaagaaattttagaagttattcgaattttatcgcgaaaaacaaaaaataatccagtactaattggtgaacctggtgtaggaaaaacagccattgtagaaggtctagcgcaaagaattgctaaaggtgatgttcctagcaatttagttgataaaaccattgtttctctagatatgggctcattaattgccggggctaaatatcgaggcgattttgaagaacgacttaaagcagttttgaaggaagtatcaaagtcagatggtcaaattatcttattcattgatgaaattcacacgattgtaggagcgggtaagactgaaggtagtatggatgctggaaatcttttgaaacctatgctagctcgtggtgaactccatttgattggtgcaacaacattagatgaataccgcgaaaacattgaaaaagacaaggcacttgagcgccgtttccaacgggtgctggttaaggagcctagcattgaggatactatcagtattttaagaggtttaaaggaacgctttgaaattcatcatggcgttcgtatccatgataatgctcttgtggcagccgctaaactttctagtcgttatattacggatcgttatttaccagataaggcgattgatttaatcgatgaagcatctgcaaaaattaaagtggaaatgaattccaatcctactgaactcgatcaggtcaaacgacagttgatgcgtttgcaggttgaagaacgagcacttaaaaatgaaagtgatgcagagtcagttaaacgtttaaaggacttacagaaagaattatctgaaaccaaagaagaaaaagttaagctggaatcacgttggtcagcccaaaaagaagaaattaaaaagatcagtgataagaagaatgaattagataaggccaagcatgacttacaagaagctgaaagttcttatgatctcgatcaagcggctattttacaacatgggaccattccagctttggaaaaagaattggaacaattagaaaatcaatccgaaagtgatcatggggattggttggtagaagaatccgttacagataaagaaattgcccaaactattagtcaaatgacaggcattccagttgcacggttggtggaaggtgaacgagaaaaactgctacatttagctgataaattacacaatcgagtaattggtcaagatgaagccgttcaatccgtttcagatgcggttttacgttcccgtgcgggactccaggatcctaatcgtccgattggttcatttctcttccttggtccgacaggggttggtaagacagaattgtctaaagctttagcagaagcgttatttgattcggaagataatatggtccgaatcgatatgtctgaatacatggaaaaagaatcggtttcccgtttggttggagctgctccaggatatattggttacgaagagggaggccaattaaccgaagcggtccggcgaaacccatattccattgttctatttgatgaaattgaaaaagcacatccagaagtgttcaatattcttttacaagttctagatgatggtcgtttaacagatggacaaggacgtacggttaactttagaaatacaattttaattatgacttctaacttaggttcagatttattattgaagaatcaatcagaaaacaagattgatgataatatccgtaaccaagttcaagatgttttgcatggatactttagaccagaatttttaaatcggattgatgatatcattatgtttactccattaagtaaacaagatgtacgccaaattgtgattaaattaattcataatttatctatgcgtttgagcgaccaagaaataagtttaagtatttcggatgatgcacaagattatattgttgaacaggcatatgatccagcgtttggtgctcgaccattgcgccgctacattactaaaaatgttgaaactcctttggcaaaagaaattattagtgggcgtgtccgtcctaattcaacagtcaatatcgatgttttgaatgatcaattggttttccagaataaataa

SEQ ID NO: 33765 - protein, 863 aa, Pediococcus pentosaceus ATCC 25745
MNPEKMTTALQEAISEAQQIAVNRQHQEIGVPELFKFLTQPDQLVGTLLTDLKIDNNLVQTELDQELEQISVVSGSQVSYGQSISAELNQLLVQAEQQRKKLQDEYVAIDTILIALFNLDQNQFKKFLNQQGLTQKQVLAKVDEFRGGERVTSKEQESGYKALEKYGTDLVKRAHSENPDPVIGRDEEILEVIRILSRKTKNNPVLIGEPGVGKTAIVEGLAQRIAKGDVPSNLVDKTIVSLDMGSLIAGAKYRGDFEERLKAVLKEVSKSDGQIILFIDEIHTIVGAGKTEGSMDAGNLLKPMLARGELHLIGATTLDEYRENIEKDKALERRFQRVLVKEPSIEDTISILRGLKERFEIHHGVRIHDNALVAAAKLSSRYITDRYLPDKAIDLIDEASAKIKVEMNSNPTELDQVKRQLMRLQVEERALKNESDAESVKRLKDLQKELSETKEEKVKLESRWSAQKEEIKKISDKKNELDKAKHDLQEAESSYDLDQAAILQHGTIPALEKELEQLENQSESDHGDWLVEESVTDKEIAQTISQMTGIPVARLVEGEREKLLHLADKLHNRVIGQDEAVQSVSDAVLRSRAGLQDPNRPIGSFLFLGPTGVGKTELSKALAEALFDSEDNMVRIDMSEYMEKESVSRLVGAAPGYIGYEEGGQLTEAVRRNPYSIVLFDEIEKAHPEVFNILLQVLDDGRLTDGQGRTVNFRNTILIMTSNLGSDLLLKNQSENKIDDNIRNQVQDVLHGYFRPEFLNRIDDIIMFTPLSKQDVRQIVIKLIHNLSMRLSDQEISLSISDDAQDYIVEQAYDPAFGARPLRRYITKNVETPLAKEIISGRVRPNSTVNIDVLNDQLVFQNK

SEQ ID NO: 33766 - DNA, 2781 bp, Phaeodactylum tricornutum
  CDS (1)..(2781): transl_table=11
atgtttgagaaatttaccgaaggcgcaataaaagtaattatgttgtcgcaagaagaagctcgacgtatgggtcacaattttgttggaaccgagcaacttttattaggtgtaatcggacaaaggcatggaattggtgcaaaagcattaaaaaaattaaaggtaacgttaaaaaaggcgcgaaaagaaatagagttatacattggtcgtggtactggatttgtagcatcagagattccttttactcctagagcaaaaagagttttagaaatggctgtgcatgaagggaaagatttgggtcaaaattttgtcggtacagagcacatcttattagctcttattgcagaatctgatggtgtagctatgcgaactttagacaaattaaatgtagacattcataaattacgaaatctaattttaacgtatatagaagaaactcaagaagaaattttacgtcctttaactcaagctgaaaaatttttattagaacgtgaaaaaaaagggagtccaaccccaactttagatgagtatgctgaaaatattacaaaagaagcaattgacggaaatttagatccggtaattggtcgtgaaaaagaaattgatgatgtaattgccgttttggccagacgtacaaaaaataaccccgttttaattggtgaaccgggcgttggtaaaacagcggttgctgaagggttagcccaactaattttaacagaaaaagtgcctgactttcttgatgggagtttaattatggctctagatttagggtcaattttagcaggtacgaaatatcggggtgaatttgaggaacgattaaaacgaattgttgaagaagcacagaacgattcggcagttattatcgtaatcgatgaaattcatacattagttggggctggtgcagcagaaggtgctgtagatgcagcaaatattttaaaaccagctttagcgcgaggtaaatttagatgtattggagcaaccactaatgatgagtatcgaaaatacattgagcgcgatcctgcattagaaagacgttttcagccagtacacgtcgaagaacctagtgttggtactacaatcgaaattttaagaggcctacgatcaaaatttgaacaacatcatacgttaagttatcatgataaagctttagaacaagccgcaattctttcagataaatatgtagcagatcgctacttacctgataaagcaattgatgtcttagatgaagcaggtgctagggttcgtttagagaatcgacgtttgcctttaggactgagaagtttaatgcatgaattacaagaaactattaaagataaagaagattgtataaaagaacatgattttgaagcagcaaagcaattattagatcatgaaatggaggtacggactcatattcgtattatgaaacagtcagctttaacgagtgaagctcgtgggtttagccgtcgtgacgtagacatggtcacagaaactgatgtttcggatgtggtttctaattggactggtattccagtaacaaaaattacaggttctgaatccgctcgtttattaaaaatggaagacactatacatgaacgaattattggtcaaaagcatgcagttgttgctgtttcacgggctattcggagggcacgagtaggattacgaaatccaaatagaccaattgctagttttatttttgctgggccaactggggttggtaagactgagttaacaaaggctttatcagattatatgtttggtagtgaagagagtatgattcgtctagatatgtcagaatacatggaaaagcatacggtggctaaattaattggttcaccaccaggatatgttggatataatgagggtggtcaactaacagaagctgtgcgttcaaagccttattccgttgtacttttagatgaagttgaaaaaggacaccccgatgtttttaatttattattacaaattttagatgacggtcgattaacagattcaaaagggcgagttattgatttcacaaatacactaatcattatgactactaacttagggtcaaaaattattgagcgggaaagtggtattaaatcaaaaacggaacaaggggaaggtggtttcaaaattacaccagatgctgtaattggttgggaacccgcgccagagccaattaaagatccagaagtttttgaacgtgtaacaaagttagtaaatgatgaattaaaaaactttttccgtcccgaatttttgaatcgtattgatgaaattattgtttttaatcatttaactcgaattgatatttgggaaatttgtgaattaatgattaaatcagttcaaaatagattaaaagataaaggtattaacttaattgttgagttatctgttcaagcttttttaactgatgaaggttatgatccgatttatggcgctcgtccattacgtcgtgcgattatgaagtatttagaagacacattagctgaacaatgcttatcaaaaacattatatccaaatacaaaaattcatgttcgccggaaaaaagtcgaaggaactttaatgacttatacaaatgaattagaagttgaagttgattttagcgatgttgatccaagtttattagatgaagaagcaaatgaaacagcaatgtcaagtttagacaaatctaacaatgaaaaagaaaaggtaggttctattgtttcaaaagataattcttctggaataaatgaagatgagccaagtttcggattagggagtaatgattctaaaccaacaattgcaggtcgagcagcaaagtttttcaaaaaaaaaaattaa

SEQ ID NO: 33767 - protein, 926 aa, Phaeodactylum tricornutum
MFEKFTEGAIKVIMLSQEEARRMGHNFVGTEQLLLGVIGQRHGIGAKALKKLKVTLKKARKEIELYIGRGTGFVASEIPFTPRAKRVLEMAVHEGKDLGQNFVGTEHILLALIAESDGVAMRTLDKLNVDIHKLRNLILTYIEETQEEILRPLTQAEKFLLEREKKGSPTPTLDEYAENITKEAIDGNLDPVIGREKEIDDVIAVLARRTKNNPVLIGEPGVGKTAVAEGLAQLILTEKVPDFLDGSLIMALDLGSILAGTKYRGEFEERLKRIVEEAQNDSAVIIVIDEIHTLVGAGAAEGAVDAANILKPALARGKFRCIGATTNDEYRKYIERDPALERRFQPVHVEEPSVGTTIEILRGLRSKFEQHHTLSYHDKALEQAAILSDKYVADRYLPDKAIDVLDEAGARVRLENRRLPLGLRSLMHELQETIKDKEDCIKEHDFEAAKQLLDHEMEVRTHIRIMKQSALTSEARGFSRRDVDMVTETDVSDVVSNWTGIPVTKITGSESARLLKMEDTIHERIIGQKHAVVAVSRAIRRARVGLRNPNRPIASFIFAGPTGVGKTELTKALSDYMFGSEESMIRLDMSEYMEKHTVAKLIGSPPGYVGYNEGGQLTEAVRSKPYSVVLLDEVEKGHPDVFNLLLQILDDGRLTDSKGRVIDFTNTLIIMTTNLGSKIIERESGIKSKTEQGEGGFKITPDAVIGWEPAPEPIKDPEVFERVTKLVNDELKNFFRPEFLNRIDEIIVFNHLTRIDIWEICELMIKSVQNRLKDKGINLIVELSVQAFLTDEGYDPIYGARPLRRAIMKYLEDTLAEQCLSKTLYPNTKIHVRRKKVEGTLMTYTNELEVEVDFSDVDPSLLDEEANETAMSSLDKSNNEKEKVGSIVSKDNSSGINEDEPSFGLGSNDSKPTIAGRAAKFFKKKN

SEQ ID NO: 33768 - DNA, 2604 bp, Acidovorax sp. JS42
  CDS (1)..(2604): transl_table=11
atgcgtctcgataaattcaccacgaagttccaagaagcgctgtctgatgcacagtcgctggccctgggacatgacaacgcctacatagagcccgtgcacatgctggtggccatgctgcgccaggatgaaggcccgcgcgcgctgctgcagcgtgccggcgccaatgtgccgggcctgctggccgcggccgaggccgccgtcaagcgcctgccccaggtgcagggccaggaccaggtgcagggcagccccgagctgggccgtgtgctgcaggccaccgagaaggaggccatcaagcgcggcgaccagttcatcgccagtgagctgtttttgctggcgctggtcgacagcaagggcgaggccgcgcagctggccaaggacaacggcgtgacccgcaagagcctggaggcggccatcgatgccgtgcgcggcggccagaaggtggacagcgccgaagccgagggccagcgcgaggcgctgaagaaatacacgctggacctgaccgagcgcgcccgccagggcaagctggacccggtgatcggccgcgacgacgagatccgccgcgtcatccaggtgctgcagcggcgcagcaagaacaaccccgtgctgatcggcgagcccggcgtgggcaagaccgccatcgtcgaggggctggcccagcgcatcgtcgagggcgaggtgcccgagacgctgaagaacaagcgcgtgctggtgctggacatggccggcctgctggcgggtgccaagtaccgcggcgagttcgaggagcgtctgaagtccgtgctgaaggaagtggcgcacgaggaaggccgcatcatcctcttcatcgacgagatccacaccatggtcggcgccggcaaggccgaaggcgccatggacgcgggcaacatgctgaaacccgcactggcgcgcggcgagctgcactgcatcggcgcgaccacgctggacgagtaccgcaagtacatcgagaaggatgcggcgctggagcggcgctttcagaaggtgctggtggacgagcccagcgtagaagacaccatcgccatcctgcgcggcctgcaggtgcgctacgaggcgcaccacggcgtggacatcaccgacccggccatcgtggccgcggccgagctgtcgcaccgctacatcaccgaccgctttctgcccgacaaggccatcgatctgatcgacgaggccgcggccaagatcaagatcgagatcgactccaagcccgagtcgatggacaagctcgagcgccgcatgatccagctcaagatcgagcgcgaggcgatgaagaaagagaccgatgaggcctcgcaaaaacgcctgcagctcatcgaggaagagttgggcaatgtggagcgcgagtacgccgatctggaagaggtctggaaagccgagaaggccagcgcgcagggctccgaacagatccgcaaggacatcgatgccatccgcacgcagatcgacgacctgaagcgcaagggcgacttcaacaaggtcgccgagctgcagtacggcacgctgcccgagctggaaaagcgcctgaaggaagcgcaggacagcgaggccggcgggaccggcaccaagcacaagctgctgcgcacccaggtgggtgccgaggaaatcgccgaggtggtcagccgcgccaccggcattcccgtggccaagatgatgcagggcgagaaggacaagctgctgcacatggaggaaaagctgcacgagcgcgtggtgggccaggacgaggcgatctccgccgtggccaatgccatccgccgctcgcgctcgggcctatcagaccccaaccggccgctcggcagcttcctgttcctggggcccacgggcgtgggcaagaccgagctgtgcaaggcgctggccgggttcctcttcgacagtgaagagcatctggtgcgcatcgacatgagcgagttcatggaaaagcatagcgtcgcgcgcttgattggtgcgcctcccggctatgtgggctatgaagagggcggctacctgaccgaggccgtgcgccgcaagccctacagcgtactgctgctggatgaggtggaaaaggcccaccccgacgtgttcaacgtgctgcttcaggtgctggacgacggccgcctgaccgatggccaggggcgcaccgtggacttcaagaacacggtgatcgtgatgaccagcaacattggctcgcacctgatccaggccatggtgggccaggatgccgaggacatcaaggaagccgtgtggggggaactcaaaggccatttccgacccgaattcctcaaccgcatcgacgaaacggtggttttccacggcttggatgccaagcacatcgaagcgattgcacgcattcagttgcgtctgctggaggcgcggctggccaaaatggacctgaccctgcaggtgtcgccggccgcgatgggcgaactggccaaggtggggttcgacccggtgttcggggcgcgtccgctcaagcgggccatccagcagcgcatcgagaacccgctgtccaagctgctgctggagggccgctacccgcccaagagcgtgattccggtggatgtcgatcctgtgacagacccaggggtattccacttcggcgaggcccgccccgcggggtga

SEQ ID NO: 33769 - protein, 867 aa, Acidovorax sp. JS42
MRLDKFTTKFQEALSDAQSLALGHDNAYIEPVHMLVAMLRQDEGPRALLQRAGANVPGLLAAAEAAVKRLPQVQGQDQVQGSPELGRVLQATEKEAIKRGDQFIASELFLLALVDSKGEAAQLAKDNGVTRKSLEAAIDAVRGGQKVDSAEAEGQREALKKYTLDLTERARQGKLDPVIGRDDEIRRVIQVLQRRSKNNPVLIGEPGVGKTAIVEGLAQRIVEGEVPETLKNKRVLVLDMAGLLAGAKYRGEFEERLKSVLKEVAHEEGRIILFIDEIHTMVGAGKAEGAMDAGNMLKPALARGELHCIGATTLDEYRKYIEKDAALERRFQKVLVDEPSVEDTIAILRGLQVRYEAHHGVDITDPAIVAAAELSHRYITDRFLPDKAIDLIDEAAAKIKIEIDSKPESMDKLERRMIQLKIEREAMKKETDEASQKRLQLIEEELGNVEREYADLEEVWKAEKASAQGSEQIRKDIDAIRTQIDDLKRKGDFNKVAELQYGTLPELEKRLKEAQDSEAGGTGTKHKLLRTQVGAEEIAEVVSRATGIPVAKMMQGEKDKLLHMEEKLHERVVGQDEAISAVANAIRRSRSGLSDPNRPLGSFLFLGPTGVGKTELCKALAGFLFDSEEHLVRIDMSEFMEKHSVARLIGAPPGYVGYEEGGYLTEAVRRKPYSVLLLDEVEKAHPDVFNVLLQVLDDGRLTDGQGRTVDFKNTVIVMTSNIGSHLIQAMVGQDAEDIKEAVWGELKGHFRPEFLNRIDETVVFHGLDAKHIEAIARIQLRLLEARLAKMDLTLQVSPAAMGELAKVGFDPVFGARPLKRAIQQRIENPLSKLLLEGRYPPKSVIPVDVDPVTDPGVFHFGEARPAG

SEQ ID NO: 33770 - DNA, 2643 bp, Nostoc punctiforme PCC 73102
  CDS (1)..(2643): transl_table=11
atgcaaccaacaaatcccgagcaatttaccgaaaaagcctgggaagcccttgttcgtactcccgaaattgccaaacagtttcagcatcagcagattgagagcgaacatttgatgctagcgctactggaacaggaaggactcgccagttctattttcaacaaagccggggtaaatgttcaaaaactacacgagcgcactatcgacttcatcaaccgtcagcccaaagtatcgggggctagcagtggttcggtatacatcggacacagtttagagaggctgctcgatcgcgccgaacaataccgcaaagagtttggtgatgaatatatttctattgaacatttaatacttgcctttgccaaagacgatcgctttggtaaagggttgtttcaagaatttggactggatgaaaaaaaactccgcaacatcattcaacagattcgagggagtcaaaaagtgacagatcaaaacccggaagttaaatatgaagcgctagaaaaatacgggcgcgatttaacccaattggcacatgagggcatactcgacccagtgattggacgagatgaagaaattcgccgcacgattcaaatcctttctcgtcggactaaaaataaccccgtgctgattggtgaacccggtgtcggtaaaacggcaattgtagaaggattagcgcagcgcattgtcagtggtgatgtcccggaatcattgcgcgttggcatagccggccgtaggcatcgcaaactaatagctttagacatgggtgcgttaattgccggagccaaataccggggagaatttgaagaacgcctgaaagctgtcttaaaagaaatccaagaagcacagggacaaatcgtcttgttcattgacgaaattcacactgtagttggtgcgggtgcaacgcaaggatcgatggatgctagcaacttgctcaagccgatgctcgctcgcggcgaactgcgctgtattggtgccaccacgctagatgaataccgcaagtacattgaaaaagatgcggctttggaacgtcgttttcagcaggtatatgtcgatcagcccagtgtggaagataccatctcaattctgcgcggtttgaaagagcgctacgagttacaccacggcgtgaagatttctgatagtgcgttagttgcggcagctactctgtctgcgagatatattagcgatcgcttcctacccgacaaagctattgatttggtggatgaagctgcggctaaactaaaaatggaaattacttccaaaccagaagaattagacgaaatcgatcgcaaaattctgcaactggaaatggagcggctgtcactgcaaaaagaaacagacagtgcttccagagagcgtttagaacggctggagagagaacttgcagagttaaaagaacgccaagatgccctcaatgctcaatggcaagcagagaagcaaatcatcgatcgcattcgccaaattagacaagagattgagcgtgtcaatgtagaaattcagcaagccgaacgcgattacgacctcaaccgggcagcagaattgaaatacagcaaactcactgagctgcaacgacaactaaaagaagccgaagcgcgactagcccaaatccagactagcggtaaatctctgttgcgcgaagaagtcaccgaagctgacattgccgaaattatctccaagtggacgggtattccggtgagcagactggttgaatcggaaatgcaaaaactcttgcatctggaagaagagctacataaacgtgtgattggtcaggacgaagctgtaagagctgttgccgatgcaattcaacgttcccgtgctgggttggcagacccgaatcgtcccattgctagctttattttcttaggcccgaccggggtgggaaaaacagaactggcaaaagctttagcggaatatctgtttgataccgaagatgcactggtgcggatcgatatgtccgaatacatggagaaacacgctgttgcccgtctcatcggtgcgcctccaggttacgtgggctatgaagaaggcggacaactcaccgaagcgattcgccgccgaccttattctgtaattctgtttgacgaaattgagaaagctcatcctgatgtattcaacgtcctgctgcaaatcctggatgatggtcgcctaactgattctcagggacgcacagtagattttaaaaatacgatcgcgattatgaccagcaatattggttcaatatacattttggatgtggcaggagacgatagcaagtacgaacaaatgcgcgatcgcgtcatggaagcagtgcgagaaagtttccgccccgaattcctcaaccgcattgatgaaatcattattttccacagcttgcggaaggacgagttgcgcgaaattgtcaaactacaagtgcagcgtttagaggagcgactgcgcgagcgtaaactctcgctcaaaatctccgaccaggctctcgattggattgttcaggtcggttatgacccagtttacggtgctcgtcccctgaagcgggcgattcagcgagaactagaaactccgattgccaaagcgattctacgcggcgagttccacgaaggtgacacaatctacgtccatgtggaacacgaacgactggtgttgaagcgcttatcacctgaactggtcaatgcttag

SEQ ID NO: 33771 - protein, 880 aa, Nostoc punctiforme PCC 73102
MQPTNPEQFTEKAWEALVRTPEIAKQFQHQQIESEHLMLALLEQEGLASSIFNKAGVNVQKLHERTIDFINRQPKVSGASSGSVYIGHSLERLLDRAEQYRKEFGDEYISIEHLILAFAKDDRFGKGLFQEFGLDEKKLRNIIQQIRGSQKVTDQNPEVKYEALEKYGRDLTQLAHEGILDPVIGRDEEIRRTIQILSRRTKNNPVLIGEPGVGKTAIVEGLAQRIVSGDVPESLRVGIAGRRHRKLIALDMGALIAGAKYRGEFEERLKAVLKEIQEAQGQIVLFIDEIHTVVGAGATQGSMDASNLLKPMLARGELRCIGATTLDEYRKYIEKDAALERRFQQVYVDQPSVEDTISILRGLKERYELHHGVKISDSALVAAATLSARYISDRFLPDKAIDLVDEAAAKLKMEITSKPEELDEIDRKILQLEMERLSLQKETDSASRERLERLERELAELKERQDALNAQWQAEKQIIDRIRQIRQEIERVNVEIQQAERDYDLNRAAELKYSKLTELQRQLKEAEARLAQIQTSGKSLLREEVTEADIAEIISKWTGIPVSRLVESEMQKLLHLEEELHKRVIGQDEAVRAVADAIQRSRAGLADPNRPIASFIFLGPTGVGKTELAKALAEYLFDTEDALVRIDMSEYMEKHAVARLIGAPPGYVGYEEGGQLTEAIRRRPYSVILFDEIEKAHPDVFNVLLQILDDGRLTDSQGRTVDFKNTIAIMTSNIGSIYILDVAGDDSKYEQMRDRVMEAVRESFRPEFLNRIDEIIIFHSLRKDELREIVKLQVQRLEERLRERKLSLKISDQALDWIVQVGYDPVYGARPLKRAIQRELETPIAKAILRGEFHEGDTIYVHVEHERLVLKRLSPELVNA

SEQ ID NO: 33772 - DNA, 2574 bp, Rickettsia rickettsii
  CDS (1)..(2574): transl_table=11
atgaatattgataaatttactgcacatgctaaatcattgatagctagtagccaatcacttgctgctaaaaatgatcatcagcaaatattacctttgcatttattatctagtcttttaagtgaagaaacaggtataattcaaacccttattaataataccggcggtaatataaacttattaaaagatcaagttcagctagaactaaataaaatcccaaaagttcaggttgagggaggaggacaagtttattcttctgctgaagcttttaaagttttagaaaaagctagtagcattgctaaagacagtggggatagctttgtaaccatagagcgtatatttgaagcattaacttatgataatactatagccggtaaaattttaacgaataatggaattaataataaaaaaatagcaacagctattttacagtttcgtaaaggcaaaaaagcagataccgaatcggcagaaaatagttatgatgctttaaagaaatacggcagagacgtaacagagcttgccgaaagcggtaagcttgatccgatcatcggacgtgatgaagaaataagaagaacggtgcaggtactatcacgacgtatgaaaaataatcctgtattgattggagaacctggagttggtaaaactgctataatagaggggcttgcacaacgaatatttagtaaggacgtacctgaatcgcttattaattgccgtattattgagcttgatatgggagctttaatagcgggagctaagtatcgaggcgaatttgaagagcgtcttaaagcagtgcttagcgaaatcaaagaatcaagcggtgaaattattttatttatcgatgaattgcatctattagtcggtacgggaaaaaccgacggtgttatggatgcctcgaatttactaaagcctatgcttgctcgtggtgagctgcattgtatcggtgctactactctagatgaatatcgtaaatatatcgagaaagatgcggcacttgctcgtcgttttcagcctgtttacgtgagtgagccgacggttgaggatactatatcaatacttagaggaattaaagaaaaatatgagctgcatcatgcagtgcgaatttccgatagtgcaatagttgcagcagcgacgttatcaaaccgttatattaccgatcgttatttacctgataaagctattgatttgattgatgaagcttgtagccgtatgaaaatagagctatcaagtaaaccagaagagcttgatgagctggaccgtcgtattattcagataaaaatagagcttgcagcacttaaaaaagaaaatgacgagcattctaaaaagaaaatagagcatttaactaaagcattagaaaaattagagtctaaatcctatgatatgggagctaaatggcaagctgaaaagtctaaactacagcaaacacaaaagcttaaagaagaactagaccgtagccgaaacgagcttgaacgtgccgaacgtgatgctaatctcgctaaagctagtgagctaaaatacggaattatacctgagattatgaaaaagattcaggaagccgaaagtattgataataaagggctgttaaaagaaattgtatcggaaagtgatatagcaagtattatctctcgtattactggtattccaattgatacgatgctatcaagtgaacgtgagcgtctgcttgtgatggagcagaaattacgagaatcggtaataggccaggataaggcaattaaaggtgttagtgatgcggtaagaagatcacgtgcagggattcaagatattaaccgcccgcttggttcgttcttattcttaggaccgaccggagtcggtaaaaccgagcttaccaaagccttagctggttttctttttgatgaccgtaatgcaatacttcgtatagatatgtcggaatatatggagaagcatgctatttctcgcttgataggagctcctcccggctatatcggatatgatcaaggcggagtgttaacggaggcagtaagacgtcgtccttatcaggtaatattatttgatgaggttgaaaaagcccatcccgacatatttaatattatgctgcaaatacttgatgagggaagattaacagatagtcaaggtataacagttgattttaagaatactataatagttttaacgtctaatttaggtgctgagatactcgttaatcagaaaaaggacgaagatacatataaagtaaaggatgaggttatggaatatgtaaaagcagtatttaaacctgagtttttaaacagattagacgagattatattattccatcgcctaaatcgtaataatattcatgatatagttaagatacagcttgaaagtttaaagaaaattttactagcacaaaatattattcttgaatttgatgaatctgcattaaattatttagccgaaaaaggttatgatccaagctttggagcaagaccattaaaacgtcttatccagcgggaaatacaaaataatttagccaaaatgattttagcaggcgaaataagtagcggtaaaacggttaaaataaatgcaaaggataaagaattgaaggtaacaataagttga

SEQ ID NO: 33773 - protein, 857 aa, Rickettsia rickettsii
MNIDKFTAHAKSLIASSQSLAAKNDHQQILPLHLLSSLLSEETGIIQTLINNTGGNINLLKDQVQLELNKIPKVQVEGGGQVYSSAEAFKVLEKASSIAKDSGDSFVTIERIFEALTYDNTIAGKILTNNGINNKKIATAILQFRKGKKADTESAENSYDALKKYGRDVTELAESGKLDPIIGRDEEIRRTVQVLSRRMKNNPVLIGEPGVGKTAIIEGLAQRIFSKDVPESLINCRIIELDMGALIAGAKYRGEFEERLKAVLSEIKESSGEIILFIDELHLLVGTGKTDGVMDASNLLKPMLARGELHCIGATTLDEYRKYIEKDAALARRFQPVYVSEPTVEDTISILRGIKEKYELHHAVRISDSAIVAAATLSNRYITDRYLPDKAIDLIDEACSRMKIELSSKPEELDELDRRIIQIKIELAALKKENDEHSKKKIEHLTKALEKLESKSYDMGAKWQAEKSKLQQTQKLKEELDRSRNELERAERDANLAKASELKYGIIPEIMKKIQEAESIDNKGLLKEIVSESDIASIISRITGIPIDTMLSSERERLLVMEQKLRESVIGQDKAIKGVSDAVRRSRAGIQDINRPLGSFLFLGPTGVGKTELTKALAGFLFDDRNAILRIDMSEYMEKHAISRLIGAPPGYIGYDQGGVLTEAVRRRPYQVILFDEVEKAHPDIFNIMLQILDEGRLTDSQGITVDFKNTIIVLTSNLGAEILVNQKKDEDTYKVKDEVMEYVKAVFKPEFLNRLDEIILFHRLNRNNIHDIVKIQLESLKKILLAQNIILEFDESALNYLAEKGYDPSFGARPLKRLIQREIQNNLAKMILAGEISSGKTVKINAKDKELKVTIS

SEQ ID NO: 33774 - DNA, 2619 bp, Crocosphaera watsonii WH 8501
  CDS (1)..(2619): transl_table=11
atgcaacctaccaatcccaatcaatttacagaaaaagcctgggaggccatagtccgtacccctgatattgctaaacaaaatagtcaccaacaaattgaaagcgaacacttaatgaaagctctgagtgaggaagagggactagccacaagtatcttcaataaagctaaccttagtgttcccaaattgcgagaacaaacagaggcttttattcgtcgccaacctaaagtctccaatcctggggagtcggtttatttaggccgtagtttagatagtttacttgacagaagcgagggctttcggaaagaatttgaagatgactatatctctgtagaacatttactattagcctaccttaaagatgatcgttttggtaaaaatttgttcaaagagtttggtctgactgaaagaaattttaaagatattattaaacaagtaagaggcaatcaaaaagtgaccgatcaaaatcctgaaaataaatacgaagctttagaaaaatatggacgagatttaactcaattagccaaagaaggtaagctcgatcctgttattggccgagacgacgaaattcgtcgaaccattcaaattttatcccgtagaaccaaaaataatcctgttttgattggggaacctggggtcggaaaaacagctattgtagaagggttagcgcaacgaattattaatagggatgtccctgaatctttgcgagatagaacattaattgctttggatatgggttctttgattgctggggcaaaataccgaggagaatttgaagaaagattgaaagctgtcctaaaagaagtaaccgattctcagggcaatattatcctttttatcgatgaaattcataccgttgttggtgccggtgcaactcaaggggcgatggatgcaggaaaccttttaaaacccatgttagcacggggagaattgcgctgtatcggggcaacaaccctggatgaatatcgtaagtatatcgagaaagatgctgccttagaaagacgttttcaagaagtgttagtggatgaacccaatgtagtcgatacaatttctattttacggggactcaaagagcgttatgaagtccatcatggggtaaaaattgctgatacagctttggtagcagcagcgatgttatctaaccgttatattagcgatcgctttttaccagataaggccattgatctcgtggacgaatctgctgctaaattaaagatggaaattacctctaaaccagaagaattagacgaagcagatcgtaaaattctccaattagaaatggaacgactttctttacaaaaagaggtagatatagcctctcgggaacgtttacaaagattagaaaaagaattagctaatctcaaggaagaacaatcccaacttaatgcccagtggcaagcggaaaaagaagttattgatcagattcgccaactaaaagaaactatggatcaagttaacttagaaattcaacaagctgaacgggattatgacctaaataaagccgctgaattacgctatggcaaactcacagatttacagggacaagtcaaggaattggaaagtaaaattgaggaacgacaaaccacaggaaaaactttactaagggaggaagttatagagtcagatattgccgaaattatctctaaatggacgggaattcctattcttaaattagtggaatcagaaaaagaaaaactattacatttggaggatgaactacacgagaaagttattggacaagaagaagctgtaactgctgtatcagaagcaatacagcgttctcgtgcaggactttctgatcccgatcgtcccactgccagcttcatctttttgggaccaactggggtaggtaaaacagaattagctaaagccttagctaagaacctttttgataccgaagaagccatagttcgtatcgatatgtctgagtacatggagaaacatagcgtatctcgtttaattggtgcgcctcctggatatgtaggctacgatgaaggcggacaattaacggaagcaattcgtcgtcgtccctactcagtaattctctttgacgagatagaaaaagcacacggtgatgtcttcaacatcatgttacaaattctcgatgatggacgtttaacagactctcaaggtcgggtagtagatttcaaaaatactatcattattatgaccagtaatatcggttctcaatacattttagatgtggcaggagacgatactcgttatgatgaaatgcgttcccgtgttatggaagcgatgcgtaatagtttccgtcccgaatttctcaatcgtatcgatgaaattatcatcttccacagcttacaaaaagaacaattacgagaaattgtcaagctacaagttcaactcttaagaagtcgtttagaagaccaaaaaatgtctcttaaattagcagatatttccctagattttgtggccgatatcggttacgatcccgtctatggtgccagacctttaaaaagggcagttcaaaggtacttagaaactcctattgctaagtcaattttaagaggagaatttaaagcaggggatactatttttgtggatgttgaagatgaaagattgacctttaaacgtttgcaatctgaaatgttaaccgtttaa

SEQ ID NO: 33775 - protein, 872 aa, Crocosphaera watsonii WH 8501
MQPTNPNQFTEKAWEAIVRTPDIAKQNSHQQIESEHLMKALSEEEGLATSIFNKANLSVPKLREQTEAFIRRQPKVSNPGESVYLGRSLDSLLDRSEGFRKEFEDDYISVEHLLLAYLKDDRFGKNLFKEFGLTERNFKDIIKQVRGNQKVTDQNPENKYEALEKYGRDLTQLAKEGKLDPVIGRDDEIRRTIQILSRRTKNNPVLIGEPGVGKTAIVEGLAQRIINRDVPESLRDRTLIALDMGSLIAGAKYRGEFEERLKAVLKEVTDSQGNIILFIDEIHTVVGAGATQGAMDAGNLLKPMLARGELRCIGATTLDEYRKYIEKDAALERRFQEVLVDEPNVVDTISILRGLKERYEVHHGVKIADTALVAAAMLSNRYISDRFLPDKAIDLVDESAAKLKMEITSKPEELDEADRKILQLEMERLSLQKEVDIASRERLQRLEKELANLKEEQSQLNAQWQAEKEVIDQIRQLKETMDQVNLEIQQAERDYDLNKAAELRYGKLTDLQGQVKELESKIEERQTTGKTLLREEVIESDIAEIISKWTGIPILKLVESEKEKLLHLEDELHEKVIGQEEAVTAVSEAIQRSRAGLSDPDRPTASFIFLGPTGVGKTELAKALAKNLFDTEEAIVRIDMSEYMEKHSVSRLIGAPPGYVGYDEGGQLTEAIRRRPYSVILFDEIEKAHGDVFNIMLQILDDGRLTDSQGRVVDFKNTIIIMTSNIGSQYILDVAGDDTRYDEMRSRVMEAMRNSFRPEFLNRIDEIIIFHSLQKEQLREIVKLQVQLLRSRLEDQKMSLKLADISLDFVADIGYDPVYGARPLKRAVQRYLETPIAKSILRGEFKAGDTIFVDVEDERLTFKRLQSEMLTV

SEQ ID NO: 33776 - DNA, 2574 bp, Exiguobacterium sibiricum 255-15
  CDS (1)..(2574): transl_table=11
atggatttcgaaaaattaacggaccgggcacatgaagccatcgtatcggcacaagccattgccaaacagcgtcgacacagtgagattacagagtggcacttgttgctggctttgctttcacaagaagaaggcattgcacggattgtttttgagaaactcgatcaacggatcgaccagttggagacgggcgtcaatgaagcactcggacggttaccggcgctcggtcaatcttcgacgccgcgaatcagcaactccttattgcaggtgttgacggaagcagaaaccgaagcccgtttgatgcaagacgattacgtttctgtcgagcacttattgttaggtcttgtgaaacaatccagtccggcgacacaatatttgcggaacgagggagtaactgaacaggtcttacgggaagcaatcatcgaaatgcggggcaaccgcaaagtaacgactaaaaatccggaagcgactttcgacgtcttgaagaaatatggccgcgatcttgtcgcagacttccggtccgggaaaaccgatccggtcatcggacgagatgacgagatccgtcgtgtcatccggattctcagccggaaaacgaaaaataatccggtcttgatcggggaaccgggtgtcgggaaaaccgcaatcgtcgaaggtctggcgcaacggattgtccggggagatgtcccggaaagtctgaaaaacaaacagttgttcagtctcgatatgagtacgcttgtcgcgggtgcaaaataccgcggagagtttgaggaacgtcttcaggcggtcttaaatgaagttaaggaagcagaaggacagattctgttgttcatcgacgaattgcacacgattgtcggtgccgggaagaccgaaggcgcgatggatgccggaaacatgctgaaaccgatgcttgcccgcggagagctgcactgtatcggtgcgacgactttagatgaataccggaagtacatcgaaaaagatcctgcacttgaacgccgcttccaacaagtgctggtcgcggaaccagatgtcgaagatacgatttcgattttacgtggtctgaaagaacggtttgaaatccatcatggtgtccggattcatgataatgccctggttgcggcagccatcctgtcagaccggtacatcacggaccgtttcatgcccgataaagccattgatttagtcgatgaagcgtgtgcgatgattcggaccgatatggaatcgatgccggcggaactggattcactcgtccgccgtgtcatgcaacttgaaatcgaagaagccgcactgaaaaaagaaaccgatgaagcatcccggaaacgactcgagaccctgcaacaggaactcagttctgtccgggaagacgaaagtgcgctccggacacgatgggaacgcgagaaagacagttcccaaaatgtccagcagttgcgggcagatcttgaaaaagcaaaactggctcttcaggaagctgaaggacggtatgatttgaatacagcctcggaaatcaaatacggacagattccggcacttgaaaatcagttgaaagtggcggaagaatcagcggaacacgtcgcgcatgaactcgtccgggaagccgtgacggacgaagagatttccgatatcgtgtcgaagtggacgggaattcccgtcagccgtctcgcacaaggggaacgcgaaaagttactgtatttagaagatacgttgcatgaacgtgtttttggtcaggatgaagcagtccggctggtctcggatgctgtcatccgggcgcgtgcaggaatcaaagatccgaatcgtccaatcggttcgttcctgttccttggaccgacaggagtcgggaaaacggagcttgcgaaagctcttgcagccgccatgtttgacagtgaagaacacatcgtccggattgatatgtccgagtatatggagaaacacaacgtttcccgccttgtcggagcacctcccggttatgtcggttatgaagaaggcggtcaattaacagaagccgtccgtcggagtccgtattcggtgctgttgtttgacgaaatcgaaaaagcacacggggacgtcttcaatatcttacttcaagtactggacgacggccgtttgaccgatgcgcaaggacgggtggtcgatttcaagaacacgattgtcatcatgacatcgaacattggatcgcatattttactcgaagcagcaaaagacggtgatattgatgcggccgaagaagaagcggtccgccaagaactgaaaaagtatttccggccggaattcctgaaccggattgatgacacgattctgttccatcctctccaccgggcggaaatcgaacggatcatcgacaaggccgtcagcaagatggcagaacgtctgtcaggtcgtgaaattacgattgatgtcacagaagcggcgaaaacgttaattttcaatgaagcgtttgaaccacagtacggtgcccgtccgattaaccggtatatccagcggacgattgaaacgaaactggcacgggctctgattagtggatccatccaggatggttcgcatgtggcaatcgatacagacggtacagaactcgttatccgctaa

SEQ ID NO: 33777 - protein, 857 aa, Exiguobacterium sibiricum 255-15
MDFEKLTDRAHEAIVSAQAIAKQRRHSEITEWHLLLALLSQEEGIARIVFEKLDQRIDQLETGVNEALGRLPALGQSSTPRISNSLLQVLTEAETEARLMQDDYVSVEHLLLGLVKQSSPATQYLRNEGVTEQVLREAIIEMRGNRKVTTKNPEATFDVLKKYGRDLVADFRSGKTDPVIGRDDEIRRVIRILSRKTKNNPVLIGEPGVGKTAIVEGLAQRIVRGDVPESLKNKQLFSLDMSTLVAGAKYRGEFEERLQAVLNEVKEAEGQILLFIDELHTIVGAGKTEGAMDAGNMLKPMLARGELHCIGATTLDEYRKYIEKDPALERRFQQVLVAEPDVEDTISILRGLKERFEIHHGVRIHDNALVAAAILSDRYITDRFMPDKAIDLVDEACAMIRTDMESMPAELDSLVRRVMQLEIEEAALKKETDEASRKRLETLQQELSSVREDESALRTRWEREKDSSQNVQQLRADLEKAKLALQEAEGRYDLNTASEIKYGQIPALENQLKVAEESAEHVAHELVREAVTDEEISDIVSKWTGIPVSRLAQGEREKLLYLEDTLHERVFGQDEAVRLVSDAVIRARAGIKDPNRPIGSFLFLGPTGVGKTELAKALAAAMFDSEEHIVRIDMSEYMEKHNVSRLVGAPPGYVGYEEGGQLTEAVRRSPYSVLLFDEIEKAHGDVFNILLQVLDDGRLTDAQGRVVDFKNTIVIMTSNIGSHILLEAAKDGDIDAAEEEAVRQELKKYFRPEFLNRIDDTILFHPLHRAEIERIIDKAVSKMAERLSGREITIDVTEAAKTLIFNEAFEPQYGARPINRYIQRTIETKLARALISGSIQDGSHVAIDTDGTELVIR

SEQ ID NO: 33778 - DNA, 2586 bp, Xylella fastidiosa Ann-1
  CDS (1)..(2586): transl_table=11
atgcggatggataagcttacttcccgtttccagaatgcgttggctgatgcgcaatcgctggccgtcggtcgtgaccatactattattgagccggtgcatgttttttcggcattgcttgatcagcagggggggagtacacgtccgttgctcgtgcaggccggtgtcaatgtgccattgctgcgtgagcggttgaccgagatacttgaggcattgccgaaagtgagtggtcagacggttaatgtctcacccagcaatgaattgagtcgtttgtttcatcggactgataagttagcgcagcagcatggcgatcagtttatggccagtgagtggttcgtgttggctgtggtcgatgatagtggggggctgggccaggcgttgcgtgctgctggtgcggaaaaaaagaagattgaggctgcgattgataaattgcgtggcggtgaaactgtccagactgagaatgctgaggagcagcgtcaagcgttggaaaagtacacgattgatctgactgccagggctgagagtggcaagcttgatccggtgattggtcgtgatgaggaaattcgccgcacgatacaggtattgcagcggcgtacaaaaaataatcctgtgctgattggtgagccgggtgtgggtaaaactgccattgtagaaggtctggctcagcgcattgtcaatggtgaggttccggaagggttgcgcagtaagcgtctgctctcgctggatttgggggcgttgattgctggggccaagtttcgtggtgagttcgaggagcgcttgaagggggtgcttaacgatctcgctaagaatgaggggcgggtcattttgttcattgacgagctgcataccatggttggtgccggtaaagccgatggtgcgatggatgctggcaatatgctcaagccggcgttagcacgtggtgagttgcattgtatcggtgcgactacgttggatgagtatcgcaagtacattgagaaggatgcggcgttggaacgccgtttccagaaggtgtttgttggggagccgacggtggaggataccatcgcaattcttcgtggacttaaggaaaagtatgcgttgcaccacggtgtggaaatcactgatccggctattgttgctgcggctacgttgtctaatcgctacatcactgatcgtcagttaccagataaagcgattgacttgatggatgaggctgccagtcgtattcgtatggaaattgactccaagccggaagagcttgatcgtttggagcgtcggttgattcagttgaaaattcagcgtgagatgctgaagaaagaaaaggatgaggcgagcaagcagcgtttagccgatcttgagcgtgatattgaggttctggaccgtgaattttccgatctggaggaggtgtggagatcagaaaaagccgcgctacagggggcgactaagatcaaggagtcgatcgagcaggccaagcttgatttggaagccgcgcagcgccgtcaggactacgccaagatgagcgagattcagtatggtgtactccccgcgttggagaagcagctggtggcagcaagtcaggcggaacagcacgattttactttggtgcaggagaaagtgactgctgaggagattgccgaggtagttagtcgttggactggtattccagtgagcaagatgcttgagggcgagcgcgataagttgttgcgtatggaagctgatctaggtcgacgtgtggttggtcaagaggaggcgatcaaggtggtatcggatgcggtgcgccgttcgcgtactggtttgtctgatccaaatcgaccgagcggctcgttcctttttctgggtccgacgggtgttggtaagactgagttatgtaaggcgctggctgaatttttgttcgacagtcaagatgcaatggtccgcattgatatgagtgagttcatggaaaaacattctgtggcgcgcctgattggtgcgcctccgggctatgtgggttatgaggaaggaggttatcttactgaattggtgcgacgtcggccttactctctgattcttttggatgaagtggagaaggcgcatagtgatgtgttcaatattctgctgcaagtacttgatgatggacgcttgactgatggtcagggccgtactgttgattttcgcaatactgttattgtgatgacatcaaacttaggttcacatcagatccaagaactcagtggagacgattctccggaggtgtatacgcaaatgaaggcggcagtgatgggggtggtgcaggcgcattttcgcccagagttcattaacaggttggatgatattgttgttttccacccgttggacaaggcgcaaatcaagcagattgcgcggattcaactgcgggggctagagaagcgtctcgctgaatctgagttgaaactagatttggatgatcgtgcgctggaattgcttggtaatgtcggatttgatcccgtatatggtgcccgcccgctgaagagagcaatccaatctcagctggagaatcccttagcgcagcagatcttagctggagcgttcgtcagtggagatactgtgcaggtgggtgttgatggagggaagcttgtattcgctaaggtgtga

SEQ ID NO: 33779 - protein, 861 aa, Xylella fastidiosa Ann-1
MRMDKLTSRFQNALADAQSLAVGRDHTIIEPVHVFSALLDQQGGSTRPLLVQAGVNVPLLRERLTEILEALPKVSGQTVNVSPSNELSRLFHRTDKLAQQHGDQFMASEWFVLAVVDDSGGLGQALRAAGAEKKKIEAAIDKLRGGETVQTENAEEQRQALEKYTIDLTARAESGKLDPVIGRDEEIRRTIQVLQRRTKNNPVLIGEPGVGKTAIVEGLAQRIVNGEVPEGLRSKRLLSLDLGALIAGAKFRGEFEERLKGVLNDLAKNEGRVILFIDELHTMVGAGKADGAMDAGNMLKPALARGELHCIGATTLDEYRKYIEKDAALERRFQKVFVGEPTVEDTIAILRGLKEKYALHHGVEITDPAIVAAATLSNRYITDRQLPDKAIDLMDEAASRIRMEIDSKPEELDRLERRLIQLKIQREMLKKEKDEASKQRLADLERDIEVLDREFSDLEEVWRSEKAALQGATKIKESIEQAKLDLEAAQRRQDYAKMSEIQYGVLPALEKQLVAASQAEQHDFTLVQEKVTAEEIAEVVSRWTGIPVSKMLEGERDKLLRMEADLGRRVVGQEEAIKVVSDAVRRSRTGLSDPNRPSGSFLFLGPTGVGKTELCKALAEFLFDSQDAMVRIDMSEFMEKHSVARLIGAPPGYVGYEEGGYLTELVRRRPYSLILLDEVEKAHSDVFNILLQVLDDGRLTDGQGRTVDFRNTVIVMTSNLGSHQIQELSGDDSPEVYTQMKAAVMGVVQAHFRPEFINRLDDIVVFHPLDKAQIKQIARIQLRGLEKRLAESELKLDLDDRALELLGNVGFDPVYGARPLKRAIQSQLENPLAQQILAGAFVSGDTVQVGVDGGKLVFAKV

SEQ ID NO: 33780 - DNA, 2616 bp, Sulfitobacter sp. EE-36
  CDS (1)..(2616): transl_table=11
atggacttgagcaagttcacagaacggtcgcgcggctttattcatgctgcgcaaacaatcgcgacgcgtgaaagccaccaacggctgacgccggaacatttattgaaagcattgctggatgacgaccaagggctggcgagcaatctgattgctgctgccggtggcgatcctgcacgtgtgactgaaaccctgacgctgtctttgggcaagctgcccaaggtgtcgggcgacgccgcgcaggtataccttgataatgccaccgcaaaggtgctggccgaagcagagacgctggccaaaaaggcgggcgacagctttgtgccggtcgaacgcgtgctgatggcccttgcgatggtgaaatccggtgcgaaaaccgcgttggatgcgggtaaggtcaccgcacaggggttgaacgccgctatcaatgatatccggaaagggcgcacggctgatacggccagtgcggaagacgggtatgaggcgctcaagaagtacagccttgatctgacggaacgtgcccgcgaaggcaaaatcgacccgatcatcggtcgggacgaggaaattcgtcgggccatgcaggtgttgagccgccgtaccaagaacaacccggtgctgatcggtgagcccggcgtaggtaaaaccgcgattgccgaggggctcgccctgcggatcgtggatggcgatgtgcctgaatccctgcgcaacaaacgcttgctggcgctggacatgggcgcgctgattgccggcgcgaagtatcgtggcgagttcgaagaacggttgaaagccgtcttgaccgaggtcaccgaagctgcgggcgaggtgatcctgttcattgacgagatgcacacgctggtgggtgccggtaaggcggacggcgcgatggacgcggccaacctcatcaaaccggctttggcgcggggtgaattgcactgcgttggtgcgacgaccttggacgaataccgtaagtatgtcgaaaaagacgcagcacttgcccgtcgcttccagcctgtgatggtcagcgaacctacggtcgaggatacggtgtcgatcctgcgaggcattaaggagaagtacgagctgcaccatggtgtgcggatcagcgactctgcccttgtggcggcggcaaccctgtcgcaccgctatatcacggaccgtttcctgcccgacaaggcaatcgaccttgtggacgaggcagcgagccgtctgcggatggaagtcgacagcaaaccggaagagctggatgcgctggaccgtcagatcatgcagcttcagatcgaagccgaggcgttgaagaaagaggatgacgctgccagcaaggaccgcctggacaagttggagaaagagctgggggatctgcaggaaaaggccgatgccatgactgcgcagtggcagggcgaacgtgatcgccttgagggcgcgcgcgagctgaaagagcagctggaccgtgcccgcgccgagcttgagatcgccaagcgcgaaggcaacctcgccaaagcgggggagctttcctatggcgtgatcccgcagcttgaacgcaaactgggcgaggccgaagagaacgaagccgacgtgatggtcgaagaggccgtgcgcccggatcagatcgccagcgtcgtcgaacgttggacgggtatccccgcgggtcgtatgctggaaggcgagcgggacaagttgctgcgcatggaagaccagttgcacaaccgtgtcattggtcagaacctcgcggtcaaagctgtgtcgaacgcggtgcgccgtgcgcgtgctggcctgaatgacgaggcccgccccttgggcagcttcctgttcctcgggccgactggtgtcggtaagaccgagctgaccaaggccgtcgccgaattcctgttcgacgacgagaacgcgatggtgcggatcgacatgtctgagttcatggagaaacatgccgtggcccgtctgatcggcgcgcctcccgggtatgttggctatgacgaaggtggcgtattgaccgaagccgtgcggcgcagaccctatcaggtcgtgctgttcgacgaggtcgagaaggcgcaccccgacgtgttcaacgtgttgctgcaggtcttggatgatggcgtgctgacggatggtcagggccgtaaggtcgacttcaagcagacgctgatcgtgctgaccagcaaccttggggcgcaagcgctgagccagttgcccgaagggggcgacatggcgcaggcgaaacgggatgtgatggatgcggtgcgggctcacttccgccccgagttcctgaaccgactggatgaaacggtgatctttgaccgcttggcacgtgccgacatggcggggatcgtcgacattcaggtgaaccgtctgctgaagcgtctcgccggtcgcaagatcgggttggagttggacgaaggcgcgcgcaagtggctcgccgacgaaggctatgatccggtgttcggggcgcgtccgttgaagcgggtgatccagcgcgcattgcaagacccgctggccgagatgatcttggcaggtgacgtgctggatggggatcttatccccgtgcaggctggtgccgaagggctgatcattggcgaccgcgtggcccccagcaaccgcgccaaaccggacgaagcgaccgtccactag

SEQ ID NO: 33781 - protein, 871 aa, Sulfitobacter sp. EE-36
MDLSKFTERSRGFIHAAQTIATRESHQRLTPEHLLKALLDDDQGLASNLIAAAGGDPARVTETLTLSLGKLPKVSGDAAQVYLDNATAKVLAEAETLAKKAGDSFVPVERVLMALAMVKSGAKTALDAGKVTAQGLNAAINDIRKGRTADTASAEDGYEALKKYSLDLTERAREGKIDPIIGRDEEIRRAMQVLSRRTKNNPVLIGEPGVGKTAIAEGLALRIVDGDVPESLRNKRLLALDMGALIAGAKYRGEFEERLKAVLTEVTEAAGEVILFIDEMHTLVGAGKADGAMDAANLIKPALARGELHCVGATTLDEYRKYVEKDAALARRFQPVMVSEPTVEDTVSILRGIKEKYELHHGVRISDSALVAAATLSHRYITDRFLPDKAIDLVDEAASRLRMEVDSKPEELDALDRQIMQLQIEAEALKKEDDAASKDRLDKLEKELGDLQEKADAMTAQWQGERDRLEGARELKEQLDRARAELEIAKREGNLAKAGELSYGVIPQLERKLGEAEENEADVMVEEAVRPDQIASVVERWTGIPAGRMLEGERDKLLRMEDQLHNRVIGQNLAVKAVSNAVRRARAGLNDEARPLGSFLFLGPTGVGKTELTKAVAEFLFDDENAMVRIDMSEFMEKHAVARLIGAPPGYVGYDEGGVLTEAVRRRPYQVVLFDEVEKAHPDVFNVLLQVLDDGVLTDGQGRKVDFKQTLIVLTSNLGAQALSQLPEGGDMAQAKRDVMDAVRAHFRPEFLNRLDETVIFDRLARADMAGIVDIQVNRLLKRLAGRKIGLELDEGARKWLADEGYDPVFGARPLKRVIQRALQDPLAEMILAGDVLDGDLIPVQAGAEGLIIGDRVAPSNRAKPDEATVH

SEQ ID NO: 33782 - DNA, 2619 bp, Roseovarius nubinhibens ISM
  CDS (1)..(2619): transl_table=11
atggactttgaaaagttcaccgagcggtcgcgtggctttgttcaggcagcgcagacgatcgccatgcgggaaagccatcagaagctggcgcccgaacatatactgaaagcattgatggatgatgaccaggggcttgcgagcaacctgatcaaacgcgcgggcggcgagccggcacgggtggttcaggccttggatatcgccatctcgaaaatccctgtcgtcaccggcgacgcgggccagacctatatggatcagcagaccggcaaggtccttgccgaggccgaaaagctcgccaagaaggcgggtgacagtttcgtgccggtcgagcgcattctgacggcgcttgccatggtcaagagcccggcgaaagaggcgctcgaggccggcggcatcagcgcgcagaagctcaatgaagcgatcaatgatgtccgcaaggggcgcaccgccgacagtgccagcgccgaggacacctatgaggcgctcgagaaatatgcgcgcgacctgacgcgggccgccgacgagggcaagatcgatccgatcattggccgcgacgatgaaattcgccgcgccatgcaggttctgtcgcgccgcaccaagaacaacccggtgctcatcggcgagccgggggtcggcaagaccgccatcgccgaggggctggcgctgcgcatcgtcaatggcgatgtgcccgagagcctcgccgacaagcggctgttgtcgctcgacatgggggcgctcatcgctggggcgaaataccgtggcgaattcgaagagcggctcaaatccgtgctcaacgaggtgacggatgcggcgggcgagatcattctctttatcgacgagatgcacacgctcatcggggccgggaaatcggatggcgcgatggatgcggccaatctgatcaagccggcgctggcgcgcggcgagctgcattgtatcggggccaccacgctcgatgaatatcgcaagcatgtggagaaggacgcggcgctggcgcggcggttccagcccatcgtggtgcaggagccgacggtcgaggacacgatcagcatcctgcgcggcatcaaggagaaatacgagctgcaccatggggtgcggatttcggacagcgccctggtgaccgccgcgacgctcagccatcgctatatcaccgaccggttcctgccggacaaggcgatcgacctgatggacgaggccgccagccggttgcggatggaggtggacagcaagcccgaagagcttgacgcgctcgaccgtgagatcctgcaaaagcagatcgaagcggaggcgctcaagaaagaggatgatgtcgcgtcgaaggaccgtctcgagaagctcgagaaagagctgtcggatctgcaggagcgatcgcgcgagatgaccgcgcaatggcaggccgagcgggacaagctcgccggggcgcgggacctcaaggaacagctcgaccgggcgcggatagagctcgaccatgccaagcgcgagggtgatctcgccaaggcgggtgagctcagctatggcgtgattccggggctggaaaagcagctggcgcaggccgagagtgccgaggccgatggcgtcatggtcgaagaggcggtgcggcccgagcagatcgcgcaggtggtcgaacgctggaccgggattccgacggcaaagatgctcgagggcgagcgcgagaagcttctggggatggaagagaacctgcatcgtcgggtgatcggccagaaccaggcggtgaaggccgtggccaatgcggtgcgccgggcgcgcgccgggctcaatgacgagaaccggccgctgggctcgttcctgttcctcgggccgaccggtgtcggcaagaccgagctcaccaaggcggtggccgagttcctctttgacgacgacagcgccatggtgcgcatcgacatgtcggagttcatggagaaacattcggtggcccgtctgatcggcgcgcctccgggctatgtcggctatgacgagggcggtgtcctcaccgaggcggtgcggcgcagaccctatcaggtggtgctgttcgacgaggtggaaaaggcccacccggatgtgttcaacgtgctgttgcaagtgctcgatgatggcgtgctgaccgatggtcagggccgcaccgtggatttcaagcagacgctgatcatcctgacttcgaaccttggggcgcaggcgctgagccagctgcccgacggggccgatgccagcgacgccaagcgcgacgtgatggatgcggtgcgggcgcatttccggcccgagttcctcaaccggctcgacgagacgatcatctttgaccggctcaagcgcgaggatatggccgggatcgtcacgatccagatggggcgtctgctcaaacggctggcggcgcggaagatcacgctcgatctcgacgatgcggcgcgcaaatggctggccgatgagggctatgacccggtgttcggggcgcggcctctcaagcgggtgatccagcgtgcgctgcaggatccgctggccgaggccttgctggccggggatatcctcgacggcagcacggtgccggtgagcgccgggaccgagggcctgatcatcggcgatcgggtcggcagcaccaagcgccagccgcccgaggatgccgtggtgcattaa

SEQ ID NO: 33783 - protein, 872 aa, Roseovarius nubinhibens ISM
MDFEKFTERSRGFVQAAQTIAMRESHQKLAPEHILKALMDDDQGLASNLIKRAGGEPARVVQALDIAISKIPVVTGDAGQTYMDQQTGKVLAEAEKLAKKAGDSFVPVERILTALAMVKSPAKEALEAGGISAQKLNEAINDVRKGRTADSASAEDTYEALEKYARDLTRAADEGKIDPIIGRDDEIRRAMQVLSRRTKNNPVLIGEPGVGKTAIAEGLALRIVNGDVPESLADKRLLSLDMGALIAGAKYRGEFEERLKSVLNEVTDAAGEIILFIDEMHTLIGAGKSDGAMDAANLIKPALARGELHCIGATTLDEYRKHVEKDAALARRFQPIVVQEPTVEDTISILRGIKEKYELHHGVRISDSALVTAATLSHRYITDRFLPDKAIDLMDEAASRLRMEVDSKPEELDALDREILQKQIEAEALKKEDDVASKDRLEKLEKELSDLQERSREMTAQWQAERDKLAGARDLKEQLDRARIELDHAKREGDLAKAGELSYGVIPGLEKQLAQAESAEADGVMVEEAVRPEQIAQVVERWTGIPTAKMLEGEREKLLGMEENLHRRVIGQNQAVKAVANAVRRARAGLNDENRPLGSFLFLGPTGVGKTELTKAVAEFLFDDDSAMVRIDMSEFMEKHSVARLIGAPPGYVGYDEGGVLTEAVRRRPYQVVLFDEVEKAHPDVFNVLLQVLDDGVLTDGQGRTVDFKQTLIILTSNLGAQALSQLPDGADASDAKRDVMDAVRAHFRPEFLNRLDETIIFDRLKREDMAGIVTIQMGRLLKRLAARKITLDLDDAARKWLADEGYDPVFGARPLKRVIQRALQDPLAEALLAGDILDGSTVPVSAGTEGLIIGDRVGSTKRQPPEDAVVH

SEQ ID NO: 33784 - DNA, 2583 bp, Pseudoalteromonas tunicata D2
  CDS (1)..(2583): transl_table=11
atgcgattagatagactgacaagtaaattccaagctgcgatatccgatgctcaatctttagcgttgggtcgagatcaccaatttatagaaccggtgcatttaatgtatgcacttttacagcaaaccggttcaagtgtgcgagcattgttagcaaaagctggagtgaactcttctgagatgaatggcaaagtatcacaagccatggaaaagctatttaaagtagaaggcattggtggtgatgtacaattatcaccaaacatggttaatttactgaatttatgtgataaatacgcgcaaaaacgcaaagataaatttatctcaagtgagatttttattttagctgcctgtgaagataaagggcctttgggcgaaatatttaaaacctttggtttaaatgccactaaagtagaaaccgcaattcaagctattcgtggtggacaaaaagttgaagatgccagcgctgaagattctcgccaatcactcgaaaaatacacggttgatttaactgagcgggcagagctcggaaagcttgatcccgttattggtcgtgatgacgaaattcgccgcacgattcaagtattacaacgtcgtactaaaaataatccagtattaatcggtgaacccggtgtgggtaaaacagccatagctgaaggattagcacagcgaattattaatggtgaagtgcctgagggtttaaaagataagcgagtgctttcactcgatttaggtgcgcttgttgctggggctaaatatcgtggtgaatttgaagaacgattaaaagcagtgctgaatgagcttgccaaagaagaagggcgcgttattttatttattgatgaaattcataccattgtcggcgcaggtaaaagtgatggtgcgatggatgcgggtaatatgctcaaacctgcgttatcgcgcggagagctccattgtgtgggggcaaccactctagatgaataccgtcaatacatcgaaaaagatgcggcacttgagcgtcgctttcaaaaagtgctggttgaagagccgacagtcgaagacaccatcgcaattttacgtggtttaaaagagcgctatgaactacatcacagtgttgaaattaccgatccggccattgtggcggcagcaacgctatcacatcgttatataagtgaccgtcaactcccagacaaagcaattgatttaattgatgaagcaggctcatctttacggatgcaaatcgattcaaaaccagaagtgctagataaacttgagcgtaaaattattcaattaaaacttgaagataacgcgcttgccaaagaaaaagatgaagcgagcttgcagcgccagcaagatatcaaacaacaaattttagtattagataaacaatataatgagttagatgaagtttggattgcagaaaaagcctcgcttcaaggtacacaagttattaaaacagaattagaacaagcgcggttagatttagaaattgctcgccgagcgagcgatttacaacgcatgtcagagctacaatatggccgcattccagaactagagcgcaaacttgatttagcatcgcaagttgaaatgcaagatatgcgtttattgcgaaataaagtgggcgaaaatgaaattgctgaaattttatcgcgttggaccggtattccagtcaccaaaatgttacaaggtgaacgcagtaaattattaaaaatggaagaaaacctccacacccaagtgattggccaagatgaagctgtcacagctgtcgctaatgcaattcgccgctcgcgagctgggctttcagatccaaatcgtccgattggctctttcttatttttaggcccgaccggggtcggaaaaaccgaattaaccaaagcattggcaacgttcttatttgataccgaagatgccatggtacgtatcgatatgtcggagtttatggaaaagcactctgtggctcgattagtgggtgcgccgccaggttatgttggttatgaagaaggtggctatttaaccgaagctgttaggcgcaaaccttatagcgttattttgcttgatgaaatcgaaaaagcacatcccgatgtatttaatattttgttacaagtgcttgatgatggccgtttaacggacggacaagggcgcacggttgattttaaaaataccgtgatcattatgacatcaaacttaggttctgatgttattcaagagcatgcggttaacagtgattatgagcgtttaaaagctatgttaatggacgtgctcacaactcaatttaggccagagtttattaatcgaattgatgataccgtggtatttcatccactttcgaccgagcacattaaacatattgcggatattcagttagctaaattaaaacaacgtttagttgataatggatatacgatgcggttaaccgatgaagcgcttagccagttagcgcttgctggatttgatcctgtgtttggggcaagaccattaaaacgagctattcaacactatattgaaaatccattagcgcaaaaattactagaaggtgattatgctgctggtagttgctttgttattgctctggtcgatggacagtttagtattaccgttgatgctcaataa

SEQ ID NO: 33785 - protein, 860 aa, Pseudoalteromonas tunicata D2
MRLDRLTSKFQAAISDAQSLALGRDHQFIEPVHLMYALLQQTGSSVRALLAKAGVNSSEMNGKVSQAMEKLFKVEGIGGDVQLSPNMVNLLNLCDKYAQKRKDKFISSEIFILAACEDKGPLGEIFKTFGLNATKVETAIQAIRGGQKVEDASAEDSRQSLEKYTVDLTERAELGKLDPVIGRDDEIRRTIQVLQRRTKNNPVLIGEPGVGKTAIAEGLAQRIINGEVPEGLKDKRVLSLDLGALVAGAKYRGEFEERLKAVLNELAKEEGRVILFIDEIHTIVGAGKSDGAMDAGNMLKPALSRGELHCVGATTLDEYRQYIEKDAALERRFQKVLVEEPTVEDTIAILRGLKERYELHHSVEITDPAIVAAATLSHRYISDRQLPDKAIDLIDEAGSSLRMQIDSKPEVLDKLERKIIQLKLEDNALAKEKDEASLQRQQDIKQQILVLDKQYNELDEVWIAEKASLQGTQVIKTELEQARLDLEIARRASDLQRMSELQYGRIPELERKLDLASQVEMQDMRLLRNKVGENEIAEILSRWTGIPVTKMLQGERSKLLKMEENLHTQVIGQDEAVTAVANAIRRSRAGLSDPNRPIGSFLFLGPTGVGKTELTKALATFLFDTEDAMVRIDMSEFMEKHSVARLVGAPPGYVGYEEGGYLTEAVRRKPYSVILLDEIEKAHPDVFNILLQVLDDGRLTDGQGRTVDFKNTVIIMTSNLGSDVIQEHAVNSDYERLKAMLMDVLTTQFRPEFINRIDDTVVFHPLSTEHIKHIADIQLAKLKQRLVDNGYTMRLTDEALSQLALAGFDPVFGARPLKRAIQHYIENPLAQKLLEGDYAAGSCFVIALVDGQFSITVDAQ

SEQ ID NO: 33786 - DNA, 2577 bp, Photobacterium sp. SKA34
  CDS (1)..(2577): transl_table=11
atgcgtcttgaccgatttaccagcaaatttcaatcggcaatatctgatgctcagtcgctggctctaggacgagaccatcagtatatcgagcctgcacaccttatggtggctttgcttaatcaagatggtagcaccgtgcgtccgttgctcacccttttgaacatcgatattacccagttacgttcacgcttagctgagctattagatcgcatgcctaaagtaacgggtattggtggtgaagttcagctttcacatggtatgggcgtactgcttaatatgtgcgataagttggcacaaaagcggaaagataaattcatttcttcagagctatttattttagcggcggctgaagataaaggcccattgggtgagctatttaaagaattaggtttaacggcgaaaaatattgaacaagcgattgatcaagttcgtggtggacagaaagtcgatgatcctaatgccgaagaaaatcgtcaagcactggaaaaatatactgttgatttaaccgaacgtgctgagcagggcaagcttgatcctgttatcggtcgtgatgatgaaattcgccgtactattcaagtattgcaacgccgtaccaaaaataacccagtgatcattggtgaaccaggtgtgggtaaaaccgcgattgttgaagggttagcacaacgtattgttaatggtgaagtacctgaaggtttacgtgataagcgtgttctttctctcgacatgggctcattgattgcaggtgcaaaattccgtggtgaatttgaagagcgcttaaaagcggtacttaatgagttatcgcaagaagatggccgtgtaattttgttcatcgatgaaattcacaccatggttggtgcaggtaaaggcgaaggctcaatggatgccggtaatatgctaaaacctgcattggcacgtggtgagcttcattgtgtcggtgctacaacattagatgaataccgtcagtatattgagaaagatgcagcacttgaacgtcgtttccaaaaagtgctggtggatgaaccaagtgtggaagataccattgcgatccttcgtggtttgaaagagcgttacgagcttcatcaccatgtggaaattaccgatcctgcaattgtagctgctgcaacattgtcacatcgttacatttcagatcgccagttacctgataaagcaattgatcttatcgatgaagcggcatcaagcattcgtatgcaaattgattcaaagcctgaatcattagatcgtcttgagcgtcgtattattcaacttaagattgaacagcaagcgctagaaaaagaagatgatgctgcaagtaataaacgtctcagtgatctgcttgaagaacttgatctaaaagagcgcgaatatgcagagcttgaagaagtgtggaatgctgaaaaagcagcactgtcaggtactcaacatattaaagcagagcttgaacaagcgcgtactgatgtggaaattgctcgtcgtgctggcgatttaaaccgcatgtcagagctacaatacggtcgtattcctgagttagagaagcagttagatcttgctgcgcaagcagaaatgcaagaaatgaccttgttgaaaaacaaagtcactgataccgaaattgccgatgttttatcaaaagcgacaggtattccggtatcaaaaatgctcgaaggtgaacgtgataaattgcttcgtatggaagatgaattacaccatcgtgtcattggtcaagatgaagcggtcgtcgctgttgctaacgccattcgtcgtagccgtgcaggtcttgctgatccacaacgcccaattggctctttcttattcttaggcccaacaggtgtaggtaaaacagagctatgtaaatcactggctaactttatgtttgatagtgaagaagcaatggttcgaatcgacatgtccgaatttatggagaaacactcagtcgctcgtctagtgggtgcgcctccaggttacgtcggttatgaagaagggggttacctcacagaagcggttcgtcgtcgtccatattcagtagtattactagatgaagtagaaaaagcacaccctgatgtgttcaatatcttacttcaagtattagatgatggtcgtttaactgacggtcaaggtcgtacagtagatttccgtaatacggtgatcatcatgacatcgaacttgggctcagatcgtattcaagagcatttcggcaaccttgactatgaggggatcaaagcacttgtaatggacgttgttggacaacattttcgccctgagtttataaaccgtgttgatgaaaccgtcgtgttccacccgcttggtaaagaaaacatcaagaatattgcaagcattcagcttgaacgattgaaaaaacgcctcgctgaaaatgacttccgtctagatgttgaagacagtgcgttagatatgattgctgaagctggatttgatcctgtttatggtgcgcgtccattgaaacgtgctattcagcaatatattgaaaacccactagcgcaagacttgttatcaggtaaatttgttccgggtaaagtgataacactgtctgtgaaagatgatgtaattgttgctgagcaaatttaa

SEQ ID NO: 33787 - protein, 858 aa, Photobacterium sp. SKA34
MRLDRFTSKFQSAISDAQSLALGRDHQYIEPAHLMVALLNQDGSTVRPLLTLLNIDITQLRSRLAELLDRMPKVTGIGGEVQLSHGMGVLLNMCDKLAQKRKDKFISSELFILAAAEDKGPLGELFKELGLTAKNIEQAIDQVRGGQKVDDPNAEENRQALEKYTVDLTERAEQGKLDPVIGRDDEIRRTIQVLQRRTKNNPVIIGEPGVGKTAIVEGLAQRIVNGEVPEGLRDKRVLSLDMGSLIAGAKFRGEFEERLKAVLNELSQEDGRVILFIDEIHTMVGAGKGEGSMDAGNMLKPALARGELHCVGATTLDEYRQYIEKDAALERRFQKVLVDEPSVEDTIAILRGLKERYELHHHVEITDPAIVAAATLSHRYISDRQLPDKAIDLIDEAASSIRMQIDSKPESLDRLERRIIQLKIEQQALEKEDDAASNKRLSDLLEELDLKEREYAELEEVWNAEKAALSGTQHIKAELEQARTDVEIARRAGDLNRMSELQYGRIPELEKQLDLAAQAEMQEMTLLKNKVTDTEIADVLSKATGIPVSKMLEGERDKLLRMEDELHHRVIGQDEAVVAVANAIRRSRAGLADPQRPIGSFLFLGPTGVGKTELCKSLANFMFDSEEAMVRIDMSEFMEKHSVARLVGAPPGYVGYEEGGYLTEAVRRRPYSVVLLDEVEKAHPDVFNILLQVLDDGRLTDGQGRTVDFRNTVIIMTSNLGSDRIQEHFGNLDYEGIKALVMDVVGQHFRPEFINRVDETVVFHPLGKENIKNIASIQLERLKKRLAENDFRLDVEDSALDMIAEAGFDPVYGARPLKRAIQQYIENPLAQDLLSGKFVPGKVITLSVKDDVIVAEQI

SEQ ID NO: 33788 - DNA, 2580 bp, Oceanospirillum sp. MED92
  CDS (1)..(2580): transl_table=11
atgcgcccagataagtttactgcaaaactacaggaagcccttgcggatgctcaatcgctcgctgtgggcttagatcataactacattgaacctgttcatctattgagtgcactgctggatcaacagtcaggaagcagtgcgcaactgcttgtacaggcaggagctgatttaaaccgtctgaaacaggcaatccaagcagaattaaatggcatggccagggtcagcaatcccgatggcgaactgcgcttttcgcaagactgcgcccgtgttttcaacaaaactgacaagatcgcgcagcagaaaggtgaccagtttatcgccagtgaactgctgctaatagccttagtcgaagataaatcgtccgcgggtaagttattaagagatgctggcgttaccttacagcgtttggaacaagttattgatcgggttcgtggaggtgagtctgtgcaggatgctaatgctgaagagaaccgtcaggctttagataagtactgtattgatctgactgaacgagcagagtcagggaagttagaccctgttatcggtcgagatgatgagattcgcagaaccattcaggttcttcagcgcaggaccaagaacaatccggtgttgataggtgagccgggggttggtaagacggcgattgtcgaagggctagcgcagcgaatcgtcaacggtgaagtgcctgaaggcctgaagaataagttggtgctttcattggacatgggggctctgatcgcgggggcgaagttccgcggtgaattcgaagaacgccttaaagcggtgctcaatgaactctctaaacaggaaggacagatcatactgtttattgatgagctgcataccatggttggcgcaggtaaaggcgaaggggctatggatgcaggcaacatgctaaagcctgcgcttgcgcggggtgagctgcattgtgttggtgccacgacgcttgatgagtatcgccaatatgtggagaaggatgccgccttagagcgccgtttccagaaggttcaggtggatgaacccgatgaagagtcgaccatcgccatactgcgtgggctgaaggagcgttatgagattcatcacagtgttgatatcaccgactcagcgattatagccgctgccaagttgtctcaacgttacatcactgatcgacaactgcctgataaggcaatcgacctgattgatgaagctgcctcccggatacgtatggagatggattccaagccagaagatatggaccgcctggagcgccgtctcattcaactgaaaatggaaagagaggcgctgaaaaaggaaaaagatgcggctgcaaaacagaggcttgctgaacttgaaagtaccattcaaagcatcgagaaagagttttccgatctggatgaagtctggaaagcagaaaaagttgctctgcaagggtcgcagcagattaaggaagaactggatcttgcgcgaatagagctggaaaagttcactcgcgcgggcgacctgcagaagatgtctgaacttcagtacgggaaaattcctgagttggaaaagaaactcgcagcggcggctgaagcagaagagtcggggcagcaggagatgaaactgctccgtaataaagtaacggaggaagaggtcgctgaagttgtttctcgctggacgggcatcccggtaagcaaaatgctggagggcgagagagataaactcctgcgaatggaatctaccctgcataatcgggttgtgggtcaggaagaggcagtgacggctgtatccaatgctgttcgccgttcgcgagcgggattggctgatcctaatcggcctaatggttcgtttctgtttttaggccctaccggggtgggtaaaacagaactttgtaaagcattggcaagttttctgtttgatacagaagaggcgatggtgcggatcgatatgtctgaatttatggagaagcactctgttgctcgattgatcggcgcgcctccaggctatgtgggttatgaagagggtggttatctgaccgaagctgtacggagaaagccgtattctgtactgttgcttgatgaagtagagaaagctcacccggatgtattcaatattttactccaggttctcgaagatggccgtttaactgatggtcaggggcgtacggtcgatttccgaaatacgattgttgtgatgacgtcgaatctgggttcagatttgatccagaatttcagtgatgatgacgattatcagttaatgcataacgcggtaatggaagcggtaggtgtgcacttccgccctgaagttatcaaccgtatcgatgaggtggtggttttccacagtctgcagaaaagtcaggtggccggtattgccaaaattcagctacagcgcctgcaaagccgtttagctgaacgagagttgagcctaacattgacaagcactgcgatggacaagctagtcgacgtcggttttgaaccaatctatggtgcgcgtccattgaaacgagcgatacaacaatggattgaaaacccgctggctcaggaaattctcgcagggaagtatgcagctggaaccgagattgctgttgatgtggagcagggagaatttgtcttccgttaa

SEQ ID NO: 33789 - protein, 859 aa, Oceanospirillum sp. MED92
MRPDKFTAKLQEALADAQSLAVGLDHNYIEPVHLLSALLDQQSGSSAQLLVQAGADLNRLKQAIQAELNGMARVSNPDGELRFSQDCARVFNKTDKIAQQKGDQFIASELLLIALVEDKSSAGKLLRDAGVTLQRLEQVIDRVRGGESVQDANAEENRQALDKYCIDLTERAESGKLDPVIGRDDEIRRTIQVLQRRTKNNPVLIGEPGVGKTAIVEGLAQRIVNGEVPEGLKNKLVLSLDMGALIAGAKFRGEFEERLKAVLNELSKQEGQIILFIDELHTMVGAGKGEGAMDAGNMLKPALARGELHCVGATTLDEYRQYVEKDAALERRFQKVQVDEPDEESTIAILRGLKERYEIHHSVDITDSAIIAAAKLSQRYITDRQLPDKAIDLIDEAASRIRMEMDSKPEDMDRLERRLIQLKMEREALKKEKDAAAKQRLAELESTIQSIEKEFSDLDEVWKAEKVALQGSQQIKEELDLARIELEKFTRAGDLQKMSELQYGKIPELEKKLAAAAEAEESGQQEMKLLRNKVTEEEVAEVVSRWTGIPVSKMLEGERDKLLRMESTLHNRVVGQEEAVTAVSNAVRRSRAGLADPNRPNGSFLFLGPTGVGKTELCKALASFLFDTEEAMVRIDMSEFMEKHSVARLIGAPPGYVGYEEGGYLTEAVRRKPYSVLLLDEVEKAHPDVFNILLQVLEDGRLTDGQGRTVDFRNTIVVMTSNLGSDLIQNFSDDDDYQLMHNAVMEAVGVHFRPEVINRIDEVVVFHSLQKSQVAGIAKIQLQRLQSRLAERELSLTLTSTAMDKLVDVGFEPIYGARPLKRAIQQWIENPLAQEILAGKYAAGTEIAVDVEQGEFVFR

SEQ ID NO: 33790 - DNA, 2607 bp, Rickettsiella grylli
  CDS (1)..(2607): transl_table=11
atgagtcttaataaattaacaagtcaatttcagaatgcgttggccgaatcgcaatcaatcgcaatagggcatgataacgcgtttattgaacctattcatttgatgtctgctttattacgacaagaaaagggtacggtgaggcctctattaagtaaagcgaacgttaatttaaatcaattaacgaaaagtgtagatgaagcaatcgcacacttgccgagcgtagaaacttcaacaccaggtgaaatttatccttctaaagattttactcgtttattgaatataaccgataaatttgcacaacaaagacaggatgagtatctatccagtgaattatttgtattggccgcagtgggggataaaagtattttaggtgagttattaaggaaagcaggtgctgataaaacaatgattgaacaagcaataaaggatatacgaggtggcgagaccgtgaatgatcctgaagcggaaggtcgtcgaggggctttagaaaaatataccattgatttgacaacacaagcgtcacaaggaaaattagatccggtgattggtcgagatgatgtgatacgtcgaaccattcaagtgttacaacgacgaaccaaaaataatccggttcttattggtgaacctggagtgggtaaaacggctgtcgtggaagggcttgctcaacgtattgttaatcacgaagttccagaaggattaagaaataaacgtttactggctttagatatcggttcattgattgcgggggctaagtatcgtggtgaatttgaagagcgattaaaagcggtattaaatgaacttgcaaagcaagaagggcaaattattttatttattgatgagttgcataccatggtgggggcagggaaagcggaaggggctatggatgcggggaatatgctaaaacctgctttagcaagaggtcaattacactgtattggtgcaacgacattaaatgaataccgaaactatattgaaaaggatgctgcattagaacgtcgttttcaaaaaattctggttgatgagccgaatgttgaagatacgatcgctattttacggggtttaaagcaacgttatgaaattcatcatggcgtcgaaattatggattctgctattgttgcggccgcaacgttatcgcatcgttatatttcagatagaaatttaccggacaaagccattgatctgattgatgaagcggcgagtcggattcgaattgaaattgattctaaacccgaaaaattagatcgattagataggcgattaattcagttaaaaattgaacgagaagcactcaaaaaagaaaccgatgaatcctccaaaatcagattgaaaaatttagacaatgagattactgaactttcaaaaaaatatgccgatctgaatgagatttggaaagctgaaaaggcaaccttacaaggcgagcaaaaaattaaaagtgaactggaaaaggctcaatttgagttagaaaaagcacgccgttcgggcgatttgaatcgaatgtctgaactccaatatggccatattcctgctttagaaaaaaaattagtggccgctcaaaaaatagaaaaaaaagaacaacccgctttaatacgcaataaggtaagcgagaaagaaattgcagaaattgtttcacaatggaccggtatccctgttgcgaagatgctcgagggtgaacgagaaaaattattacagatggaagacgcactccataaacgggtggtgggtcaagatgaagcgatttctgtggtagccaatgccattcggcggtctcgcgcaggactttctgatccgaatcgtcccatcggatcatttattttttcaggacctacgggtgtgggtaaaactgaagtgtgcaaagctttagcaggatttttatttgattccgatgaggcgatggtgcgtttagacatgtccgaatttatggaaaaacattcggtcgcacggttaattggtgctcctccaggctatgtgggttacgaagaaggcggctatcttactgaagcagtgcgtcgaaagccttattctgtggtgcttttggatgaaattgaaaaagcacatgcggatgtattcaatattttattacaagtattagaagatggtcggttaaccgatagtcatggacgtaccgtcgactttcgaaatacagtgattgttatgacatcgaatttaggatcgcaaattattcaagaatttacttcaaagcaggactatgccgctttaaaaagtacattaatggatatcattgcgcaacattttcgacctgaatttattaatcgcgttgatgaagtggttgtatttcatgccttaaatgaaacacaaattcattcgattacaaaaattcaattacaacgcctccgtcaacgtcttggtgaacgagacttacacttagaagtgagcgaagctgccataaaccatattgctaaaatgggttacgatcctgtttatggcgcacgacctttaaaacggacgattcagcaagaattggaaaaccccattgccaaggaaatgcttgaagaaaaatttctgccgggggacaaaatttttgtggattatagtgacgataaaataaaattaaccgcaaaaaaacaacgtcaaaaaatgaggaaataa

SEQ ID NO: 33791 - protein, 868 aa, Rickettsiella grylli
MSLNKLTSQFQNALAESQSIAIGHDNAFIEPIHLMSALLRQEKGTVRPLLSKANVNLNQLTKSVDEAIAHLPSVETSTPGEIYPSKDFTRLLNITDKFAQQRQDEYLSSELFVLAAVGDKSILGELLRKAGADKTMIEQAIKDIRGGETVNDPEAEGRRGALEKYTIDLTTQASQGKLDPVIGRDDVIRRTIQVLQRRTKNNPVLIGEPGVGKTAVVEGLAQRIVNHEVPEGLRNKRLLALDIGSLIAGAKYRGEFEERLKAVLNELAKQEGQIILFIDELHTMVGAGKAEGAMDAGNMLKPALARGQLHCIGATTLNEYRNYIEKDAALERRFQKILVDEPNVEDTIAILRGLKQRYEIHHGVEIMDSAIVAAATLSHRYISDRNLPDKAIDLIDEAASRIRIEIDSKPEKLDRLDRRLIQLKIEREALKKETDESSKIRLKNLDNEITELSKKYADLNEIWKAEKATLQGEQKIKSELEKAQFELEKARRSGDLNRMSELQYGHIPALEKKLVAAQKIEKKEQPALIRNKVSEKEIAEIVSQWTGIPVAKMLEGEREKLLQMEDALHKRVVGQDEAISVVANAIRRSRAGLSDPNRPIGSFIFSGPTGVGKTEVCKALAGFLFDSDEAMVRLDMSEFMEKHSVARLIGAPPGYVGYEEGGYLTEAVRRKPYSVVLLDEIEKAHADVFNILLQVLEDGRLTDSHGRTVDFRNTVIVMTSNLGSQIIQEFTSKQDYAALKSTLMDIIAQHFRPEFINRVDEVVVFHALNETQIHSITKIQLQRLRQRLGERDLHLEVSEAAINHIAKMGYDPVYGARPLKRTIQQELENPIAKEMLEEKFLPGDKIFVDYSDDKIKLTAKKQRQKMRK

SEQ ID NO: 33792 - DNA, 2613 bp, Oceanobacter sp. RED65
  CDS (1)..(2613): transl_table=11
atggaaaagtttaccagtagcttacagcaagctttgtctgatgctcagtccctagcgttgggcaaagaccataatcaaattgaaacagcacacctgcttttagctttgttggagcaggcaccaggtggcattcgtcctttattgcaaggtttaggggttcaagctggttcgttgcgtcagaaattggaaggggtattgggtaacttacctgtcgttagtagccctgatggaaatctaagtgtttcttcagaacttggtcgagtactgaaccttacggatcgtttggcgcaaaagcgaggtgatcaatatatttcaagtgatcttgtgttattggccgctcttgaagagaaaggtgacacaggtaaagcgttgaacgacttgggcctaaataaagaaaaagtagagcgggctattgatactgtgcgccaaggtgaatcggttgatgaccctaacgcagaagataatcgtcaggcactcgataagtttaccgttgatctaacagcaagagctgaagagggtaagcttgatccggtgattggtcgtgatgatgagattcgccgcactattcaagtactacagcgtcgcacaaagaataacccagttttaattggagcgcctggtgttggtaaaaccgccattattgaaggcttagcgcagcgtattgtggatggagaggtgccagaaggtttgcgtaacaagcgcattttgtctttggatatgggctccctgttagcaggggctaaattccgaggagattttgaagagcggctgaaaaatgttttgaaagaagtcagtaaacaagaaggtaatatcgtcttgttcattgatgagattcatacaatggtaggcgctggtaaaactgacggcgctcttgatgctggcaacatgttgaagccagctttaagtcgcggcgaactgcattgcgttggtgctactacgcttgatgagtaccgtgaatatattgaaaaagacgcagcacttgagcgtcgtttccaaaaagtgttggtagacgagccatcagaagaagatactgtggccatattacgaggcttgaaagagcgctacgaggtacatcatggtgtgcaaattactgatggagccattattgcagcggccaagttatcaacgcgttacattaccgatcgtcaattgccggataaagccattgacctgattgatgaggccgcgtccattattcgaatggaaatagacagtaagccccaagaaatggatcgcttagagcgtcgtttgattcaactgaaaattgaacgagaagcgcttaataaggaaagtgatgaaggcagtaaaaaacgcctgaatgagatcaacggtgagattaacaagttaggccgagagtatgtcgaactagaagacgtttggaagcaagaaaagttgtctcttgaaggtagtaagcaggcaaaagaggcactggaagaagccaaggttgaaatggagcaagctcgacgggcaggtgatcttcagcggatgtcggaacttcaatacggcaaaattccagaattggaaaagcagattgaagcggccgaaaaagctgaaaaaggcagcaatgaatttaaactattgcgcaaccgcgttaccgatgaagaaatcgcggaagtggtttcgaagtggactggtgtgccggtggcaaaaatgcttgaaggcgagcgcgaaaagcttttacgtatggagcaggagctacacaaacatgttgtcgggcaagacgatgcgattacggctgtatctaatgcagtgcgtcgtagccgtgcgggtttaagcgacccacgtaagcccaatggtagttttctttttcttggtccaacaggtgttggtaagacggagctttgcaaagcattggctacctttatgttcgattctcaagacgccatggtgcgtattgatatgtcggaatttatggaaaagcatagcgttgcacgtttaattggtgcgcctccggggtatgtgggttacgaagaaggcggttacttaactgagcatgttcgtcgtaaaccgtatagcgttatcttgctcgatgaagtcgaaaaagcgcaccctgatgtgtttaatattttgcttcaggtcctagatgatgggcagttaacagacggtcaaggtcgcaccgttgattttaaaaatacggtattggttatgacctctaaccttggtagtgatgttattcaaaccatgagtcaccacaatcaaggggaagagcaaacggatacagaatacgaagaaatgaaatcggcagtgatggaaattgtgggtggtcatttccgtcctgaattcatcaatcgtattgatgaggtagttgtattccatccactacaaaaatcgcagatccaaggcattgcacaaatccagttgcaagagcttgagaagcgcttaaaagagcgtgagctaagtttgcaattgagtgatgaagcaatcaatcgcttggttgaggttggatatgatccggtatacggggctcgtccactgaagcgcagtattcaacgttggatcgaaaatccgttggcgcaagatattctgtctggtaagttcgtgcccggtgatcgtatcgttgcagaagtaagcggtgatcaattgtcgtttacggtggcgcaaacggttcactga

SEQ ID NO: 33793 - protein, 870 aa, Oceanobacter sp. RED65
MEKFTSSLQQALSDAQSLALGKDHNQIETAHLLLALLEQAPGGIRPLLQGLGVQAGSLRQKLEGVLGNLPVVSSPDGNLSVSSELGRVLNLTDRLAQKRGDQYISSDLVLLAALEEKGDTGKALNDLGLNKEKVERAIDTVRQGESVDDPNAEDNRQALDKFTVDLTARAEEGKLDPVIGRDDEIRRTIQVLQRRTKNNPVLIGAPGVGKTAIIEGLAQRIVDGEVPEGLRNKRILSLDMGSLLAGAKFRGDFEERLKNVLKEVSKQEGNIVLFIDEIHTMVGAGKTDGALDAGNMLKPALSRGELHCVGATTLDEYREYIEKDAALERRFQKVLVDEPSEEDTVAILRGLKERYEVHHGVQITDGAIIAAAKLSTRYITDRQLPDKAIDLIDEAASIIRMEIDSKPQEMDRLERRLIQLKIEREALNKESDEGSKKRLNEINGEINKLGREYVELEDVWKQEKLSLEGSKQAKEALEEAKVEMEQARRAGDLQRMSELQYGKIPELEKQIEAAEKAEKGSNEFKLLRNRVTDEEIAEVVSKWTGVPVAKMLEGEREKLLRMEQELHKHVVGQDDAITAVSNAVRRSRAGLSDPRKPNGSFLFLGPTGVGKTELCKALATFMFDSQDAMVRIDMSEFMEKHSVARLIGAPPGYVGYEEGGYLTEHVRRKPYSVILLDEVEKAHPDVFNILLQVLDDGQLTDGQGRTVDFKNTVLVMTSNLGSDVIQTMSHHNQGEEQTDTEYEEMKSAVMEIVGGHFRPEFINRIDEVVVFHPLQKSQIQGIAQIQLQELEKRLKERELSLQLSDEAINRLVEVGYDPVYGARPLKRSIQRWIENPLAQDILSGKFVPGDRIVAEVSGDQLSFTVAQTVH

SEQ ID NO: 33794 - DNA, 2583 bp, marine gamma proteobacterium HTCC2143
  CDS (1)..(2583): transl_table=11
atgcgtattgatcgatttactaaccagttgcaaaatgctttgtcagatgcccagtcgttagctgttggtaaagaccataattcgattgaccccctacatttgttgtctgccttgttagatcaggtgaatggttcagttcaaccattaatgcggcaggcgggaggcaatattccagctttaaaagatacgcttggtcaggctatgagtaacttaccaacagtgtcgggcacggttggtgacatccatatgtctaatgatttggcgcgggtattaaacttggctgataaacaatcccagcaaaataatgatgcctacctttcctgcgaagttgtcgcaatggcactgttagatgccaatattgctgttagcaagttactcactgactcgggagtgagcaagcaggctttagggagtgcgattgagagtgttcgcggcggtgaggcggttaacgatcccgccgctgaagaaaatcgtcaggctttggataaatacacaattgatttaacagagcgtgcagagcagggaaaacttgatccggtaataggtcgtgatgatgaaatacgccgaaccatccaagtgcttcaacgacgtactaaaaataacccagtattaattggtgagccaggggttggtaagacggctattgttgaaggtttggcgcagagaattgttaatggagaagtgccggaaggcttaaaagataaacgggtactatcattggatcttggctccctactggcaggagcgaagtttcgaggagagtttgaagagcgtctaaaagccgttcttaacgagttgagtaagcaagaaggacgaatcattctatttatcgatgagctccataccatggttggtgcgggtaaggctgaaggctcaatggatgcaggcaatatgttgaagccggcgctggccagaggggagctgcactgtgttggcgcaacaacgctgaatgagtatcgacaatatttagagaaagatgccgcgctcgaacgccgtttccaaaaggtattagtcgaagagcctagcgaagaagataccattgcaattttacgcggtctaaaagaacgctatgaaattcatcacggagtggatatcaccgattcggcaattattgcagccgctaaattatcccaacgttatattacggaccgacaattacctgacaaagccattgatctaatcgatgaggccggcagccgaattcgtatggaaattgattctaagccagagagtatggaccgtttggaacggcggctgattcagttaaaaatcgagagagaagccgtcaaaaaagatactgacagtgcggctaagaagcagttggtcatacttgataatgatatccttaaatctgagaaagaatatgccgacttagaagaagtttggatggctgaaaaatcgattttgcaggggtctcagcaaacgaaaagcgagcttgaaaaggcgagaatggatctcgaagcggcccatagggcaggcgatttaacccgcatgtcggaattacaatatggtgttattcccggtcttgaaaaaacgatggaaaccgccagtcaggctgaaacggttgagatgaccttgttgaggaacaaagtgaccgaggaggaagtggcagaagttgtctcgaaatggaccggtattcctgtatccaaaatgctggagggagagcgagacaaattattacgaatggaagagtcactacagaagcgggttattggtcaaagcgaagcagttatatcggtgtccaacgcggttcgacgttctcgcgcaggactttccgaccccaatcggcccaatggctcgttcctttttttggggcctaccggtgttggtaaaaccgagctatgtaaagcactggcaatgtttctttttgacagcgaagatgcgatggtccgtattgatatgtcagagtttatggaaaaacattcagtagcgcgtttgattggggcaccgccaggctatgttggctatgaagaggggggctatttaaccgaagcggtccgtcgccggccttattccgtgctattactggatgaagttgaaaaagcccattccgatgttttcaatgtgttgttgcaagtattggatgatggtcgtttgaccgatggacagggacgtactgtcgattttagaaataccgttatcgtgatgacctcgaacctcggttcagatctgattcagcaattatctgaagagaaaaattatgaggcgatgaagcgttcagttatggaggttgttggtggtcattttcggcctgaattcattaacagaattgacgaaaccgttgtctttcatccgctagatcaacaacagattcgtggtatcgccgctatccaaattgatttattacggtctcggttgcgcgatcgggaactggggctagaacttagcagtgcagcgatagacaagctggccaatgtgggttttgatcctgtttacggtgctcgccctttgaaaagagcggttcagcaatatgtggaaaacccactggctcaagatatcttacagggaaaatttgcaccgggtgatgtgattaaaggtgagttggatagtgctactggacagctaacatttagtcacgggtga

SEQ ID NO: 33795 - protein, 860 aa, marine gamma proteobacterium HTCC2143
MRIDRFTNQLQNALSDAQSLAVGKDHNSIDPLHLLSALLDQVNGSVQPLMRQAGGNIPALKDTLGQAMSNLPTVSGTVGDIHMSNDLARVLNLADKQSQQNNDAYLSCEVVAMALLDANIAVSKLLTDSGVSKQALGSAIESVRGGEAVNDPAAEENRQALDKYTIDLTERAEQGKLDPVIGRDDEIRRTIQVLQRRTKNNPVLIGEPGVGKTAIVEGLAQRIVNGEVPEGLKDKRVLSLDLGSLLAGAKFRGEFEERLKAVLNELSKQEGRIILFIDELHTMVGAGKAEGSMDAGNMLKPALARGELHCVGATTLNEYRQYLEKDAALERRFQKVLVEEPSEEDTIAILRGLKERYEIHHGVDITDSAIIAAAKLSQRYITDRQLPDKAIDLIDEAGSRIRMEIDSKPESMDRLERRLIQLKIEREAVKKDTDSAAKKQLVILDNDILKSEKEYADLEEVWMAEKSILQGSQQTKSELEKARMDLEAAHRAGDLTRMSELQYGVIPGLEKTMETASQAETVEMTLLRNKVTEEEVAEVVSKWTGIPVSKMLEGERDKLLRMEESLQKRVIGQSEAVISVSNAVRRSRAGLSDPNRPNGSFLFLGPTGVGKTELCKALAMFLFDSEDAMVRIDMSEFMEKHSVARLIGAPPGYVGYEEGGYLTEAVRRRPYSVLLLDEVEKAHSDVFNVLLQVLDDGRLTDGQGRTVDFRNTVIVMTSNLGSDLIQQLSEEKNYEAMKRSVMEVVGGHFRPEFINRIDETVVFHPLDQQQIRGIAAIQIDLLRSRLRDRELGLELSSAAIDKLANVGFDPVYGARPLKRAVQQYVENPLAQDILQGKFAPGDVIKGELDSATGQLTFSHG

SEQ ID NO: 33796 - DNA, 2580 bp, marine gamma proteobacterium HTCC2080
  CDS (1)..(2580): transl_table=11
atgcgtatggataagctaaccaatccgttacaaaacgtgctcgcagatgcgcagtcgctggctgtagggggcgatcagcagttcattgagccgatacatattttaaagtcattgcttaatcagaccggaggctctgccgttcctttattgcagaaagccggggctaatggttcacagttagccagtgccgtgagcgatgccttggcgaagttaccaaccgtaaatggcggcagcggagacgtacacttatctcaagaatccagccgtttgctcaatagagccgataaattggcgcaaaagcgcaatgatagttatttgtcttctgaactcgtattgctggcgatgattgatgcgagctcaccggtggcaaaacttcttacaaaatctggagctagccgctcgtcgctagagcaggcgattgaggatgtaagaggaggtgatggtgtgaattcgcccgaagccgaagcctctagacagtcgcttgaaaaatacacggtggatctcactgaacttgcaaaagtgggtaagctcgatcccgttattggcagggatgatgagatacgccgaaccattcaggtgttgcaacggagaactaaaaacaaccctgtattaattggtgagcccggtgttggcaagaccgcaatcattgagggtttggctcagcgcgtcatcaatggtgaagttccagaggggttaaaaaataagcgtattctttcgttggaccttggtgctctgctggctggcgcgaaatttcgcggcgactttgaagagcgcttaaaatcggttcttaatgagctttccaaagaagaagggcggattattttatttgtcgatgaactgcatacgatggtgggggctgggaaatctgagggctctatggacgctgggaacatgcttaagcctgcgcttgcaaggggcgaactgcactgcgttggcgcgacaaccctcaatgaatatcggcagtttgtagaaaaggatgcggcgttagagcgacgttttcaaaaagtgttggtcgacgagccttccgaggaggacacgattgccattctccgcggactgaaagagcgttatgaggtgcatcatggtgtcgccgttactgacagtgccatcatcgccgctgcgaaactcagtcaacgctacattactgatcgccagttacccgacaaagcgattgatctcattgacgaggccgccagtcgtattcgcatggagattgattcaaagccagaaagtatggatcgcttggaacgacgattgatacagctgaaaatcgagcgagaggccgtcaataaagatcaaaccgaagcagcgcagaagcaagtggcattacttgacgtgcaagttgcagagctcgatcaagagctgtctgatcttgatgagattttaaccgcggagaaggctgctgttcagggtgctgcgaaaatcaaagctgcgatagagcaagctaaattggatttggaaatggcgcagcgagcaggtgatttgacgcgaatgtcagagatccaatacggagagttgcctgagctcgacaaacagttgggtattgcggaacaggtggaacagggccccactcagcttttgcgaaatcgcgtgaccgaagaggaggttgctgaggttgtatcccggtggacaggaattcctatttctaaaatgcttgagggtgatcgcgaaaaattgcttcgcatggagtcagtgcttcatgagcgtgttgtgggtcaggatgaggctgtcattgccgttgccaacgcggtgagacgttctcgagcggggctaagcgaccctaaccgtcccaatggttcgtttttgtttcttggacctacgggagtcggtaaaactgagctctgtaaagctttggcaagttttgttttcgacagtgaccaggccatggtgcgcctcgatatgtcagagttcatggagaagcattcggttgctaggctcattggtgcacccccgggttatgtaggatatgaggcggggggctatctaacagaagcggtgcgacgacgcccttactccttattgctcctcgatgaagtagagaaggcgcacccagatgtatttaatatactgctccaagttttagaagatggtcgcctcacagacggtcagggacgcaccgttgatttcaaaaatacggttattgtgatgacgtctaatttgggctccgatctcattcaggagatggcgggcgatgagcgttacgacgccatgaaggccgctgtgatgggggttgtgggaaggcattttcgcccggagtttattaatcgtgtggatgaaacagtggtatttcatcctctggctgaggagcaaattcgaggtatcgcaaatattcaggttgaaagcctcaggcatcggctggctgagcgtgatctcgcattgcagttatcagatgaggtgctggaccaccttgctgaggctggatttgatcctgtttttggcgcccgacccctgaagagagccattcagcaattgctggaaaaccccttggcccagcaaattttacagggcgactatgcgcccggcgacacgatacaggcgctggtagaaggtcagaaaataatcttaagtcgacagcattaa

SEQ ID NO: 33797 - protein, 859 aa, marine gamma proteobacterium HTCC2080
MRMDKLTNPLQNVLADAQSLAVGGDQQFIEPIHILKSLLNQTGGSAVPLLQKAGANGSQLASAVSDALAKLPTVNGGSGDVHLSQESSRLLNRADKLAQKRNDSYLSSELVLLAMIDASSPVAKLLTKSGASRSSLEQAIEDVRGGDGVNSPEAEASRQSLEKYTVDLTELAKVGKLDPVIGRDDEIRRTIQVLQRRTKNNPVLIGEPGVGKTAIIEGLAQRVINGEVPEGLKNKRILSLDLGALLAGAKFRGDFEERLKSVLNELSKEEGRIILFVDELHTMVGAGKSEGSMDAGNMLKPALARGELHCVGATTLNEYRQFVEKDAALERRFQKVLVDEPSEEDTIAILRGLKERYEVHHGVAVTDSAIIAAAKLSQRYITDRQLPDKAIDLIDEAASRIRMEIDSKPESMDRLERRLIQLKIEREAVNKDQTEAAQKQVALLDVQVAELDQELSDLDEILTAEKAAVQGAAKIKAAIEQAKLDLEMAQRAGDLTRMSEIQYGELPELDKQLGIAEQVEQGPTQLLRNRVTEEEVAEVVSRWTGIPISKMLEGDREKLLRMESVLHERVVGQDEAVIAVANAVRRSRAGLSDPNRPNGSFLFLGPTGVGKTELCKALASFVFDSDQAMVRLDMSEFMEKHSVARLIGAPPGYVGYEAGGYLTEAVRRRPYSLLLLDEVEKAHPDVFNILLQVLEDGRLTDGQGRTVDFKNTVIVMTSNLGSDLIQEMAGDERYDAMKAAVMGVVGRHFRPEFINRVDETVVFHPLAEEQIRGIANIQVESLRHRLAERDLALQLSDEVLDHLAEAGFDPVFGARPLKRAIQQLLENPLAQQILQGDYAPGDTIQALVEGQKIILSRQH

SEQ ID NO: 33798 - DNA, 2598 bp, Pseudomonas putida GB-1
  CDS (1)..(2598): transl_table=11
gtgaacctgaagtctctgttcgccaagctaaacgaaaccagccgcacggccaccgaaagcgcggcggccctgtgcctgtcggagcatcactacgatgtcgaggttgagcacctgctgctgcaactgctcgacagcagtgacaatgacctggcaccgatcctgcgccactatgaggtcgtcaccgagcgcctgcaggcgcaactggtcaccgccctgggcaccttcaagaaaggcaatacccgtaccccagcgctgtcgccgcacatcacccgcatgatcgagcaggcctggttgctggcatcgatcgagtatggcgttggccaagtacgcagcggccacttgctgcaagccctgcttgatgatgccgaactgcgccgagtggtgatggcttcggcaccggagctggaaaagatcaatgccaatgacctgcgcctgaaccttgccgcactggtcgaaggtagcgccgagtcgcggcaggccagccccctggccagccccgcagcaccgattgccagcagcactaaagctgggggcaagaccccagcgctggaccagtacaccgtcaaccttacccaaagtgcccgcgaaggccgcattgacccagtcctgggccgcgagttcgaagtgcggcaaatggtcgacatcctcacccgtcgccggcaaaacaacccgattctcaccggtgaagccggggtcggcaaaaccgccgtggtcgagggcctggccctgagaatcgcccagggcgatgtaccagcggtgctcaaggatgtggccctgcacacccttgacctgggcctgctgcaggcgggcgccggggtaaagggcgagttcgaaaaccgcctgaaagcggtcatcgaagaggtcaagcgcagcctgcacccaatcatcctgttcatcgacgaagcccacaccctgatcggttctggcggccaggccgggcagaacgatgccgccaacctgctcaagccggcccttgcccgtggcgaactgcgcaccatcgccgccaccacctgggccgaatacaagaagtacttcgagaaagacgccgccctcgcccgccgctttcaggtagtaaaggtcgaagaacctgatgaagacaaagccattcacatgctgcgcgggctactgggcaagatgcgcgagcaccacaaggtggcggtgatggacgaagcgctggtacaagcggtgcgcctgtccaaccgctacatcaccggccgccagctgcccgacaaagccgttagcgtgctcgacaccgcctgcgcccgcatcgccctggcgcagtcgtcgcagccaggcttgctggaagactgccgtcggcagatcgacaacctgcaggcagaaatcgccgttcttggccacgaagcgggcaaaggccatgaccatgcccgtcgcctaggcgagctgcaggccgcgttgcagaccgaacagcagcgcgagcagcagctcatcgcgcagtggcaacaggagctggaactggtcgagcaactcaaggcactggatgccgccaacgacaccgacgccgagcagctcaataccctgcgcgccgaactggcccgtgtgcaaggtgaccagccactggtccacgccctggtcgacagcggcgccattgcccaggtcatcagcggctggaccggcatcccgctgggcaagatgctgcgcgacgaaatcgataccgtacagcgcctgccggccctgctgggcgagcgcgtactgggccaggaccatgccctgcaggaaatcggcaaacgcatcaagatttcccgtgcgcgcatggaagaccccaacaaacccatcggcgtgttcctgctgctcggccccagcggcgtcggcaagaccgaaactgccctggccctggccgatacgctgtacggcggcgagcgcaacctgatcaccatcaacatgtccgagtaccaggaggcccacaccgtgtcgagcctcaaaggctcgccccccggctacgtcggttacggcgaaggcggcgtgctgaccgaggcggtacgccgcaaaccctacagcgtggtgctgctggacgaggtggaaaaagcccaccccgacgtactcgaactgtttttccaggtcttcgacaagggcgtgctggacgacggtgaaggccgcgagatcaacttccgcaacacagtgatcatcctcacctccaacaccggcaccgaacgcatcatgcaaacctgcctgaatgccaccgagctgccaacgccagaggccatcgtcgaaggcctgcgcaacgagctcaaccaagtgttcaagccggcgtttctcggccgcctgaacatcgtgccgttctacccggtgcaggaccagatcctcgagcgcatcgtcgccctcaagctcgagcgtatcgccaagcgcttcgcccgcaaccaccaggccgagttgggctacgacgaggcgctggtcaaagccatcgccgcccgttgcaccgaggtcgacagcggcgcacgcaacatcgacaacatcctgtcgcaaaccctgatgcccgagctcgcccagcgtgtgctcgaacgcatggcccaggacacaccgatcgagcgccttgtgatcgaactgggcagcgatggcgatttcgcctatcgcctggcctga

SEQ ID NO: 33799 - protein, 865 aa, Pseudomonas putida GB-1
MNLKSLFAKLNETSRTATESAAALCLSEHHYDVEVEHLLLQLLDSSDNDLAPILRHYEVVTERLQAQLVTALGTFKKGNTRTPALSPHITRMIEQAWLLASIEYGVGQVRSGHLLQALLDDAELRRVVMASAPELEKINANDLRLNLAALVEGSAESRQASPLASPAAPIASSTKAGGKTPALDQYTVNLTQSAREGRIDPVLGREFEVRQMVDILTRRRQNNPILTGEAGVGKTAVVEGLALRIAQGDVPAVLKDVALHTLDLGLLQAGAGVKGEFENRLKAVIEEVKRSLHPIILFIDEAHTLIGSGGQAGQNDAANLLKPALARGELRTIAATTWAEYKKYFEKDAALARRFQVVKVEEPDEDKAIHMLRGLLGKMREHHKVAVMDEALVQAVRLSNRYITGRQLPDKAVSVLDTACARIALAQSSQPGLLEDCRRQIDNLQAEIAVLGHEAGKGHDHARRLGELQAALQTEQQREQQLIAQWQQELELVEQLKALDAANDTDAEQLNTLRAELARVQGDQPLVHALVDSGAIAQVISGWTGIPLGKMLRDEIDTVQRLPALLGERVLGQDHALQEIGKRIKISRARMEDPNKPIGVFLLLGPSGVGKTETALALADTLYGGERNLITINMSEYQEAHTVSSLKGSPPGYVGYGEGGVLTEAVRRKPYSVVLLDEVEKAHPDVLELFFQVFDKGVLDDGEGREINFRNTVIILTSNTGTERIMQTCLNATELPTPEAIVEGLRNELNQVFKPAFLGRLNIVPFYPVQDQILERIVALKLERIAKRFARNHQAELGYDEALVKAIAARCTEVDSGARNIDNILSQTLMPELAQRVLERMAQDTPIERLVIELGSDGDFAYRLA

SEQ ID NO: 33800 - DNA, 2565 bp, Pseudomonas putida GB-1
  CDS (1)..(2565): transl_table=11
atgcgaatagaccgtttgaccagcaagctgcaacttgcaatatccgatgcccagtccctggccgttggcatggaccaccctgccatcgagcccgtgcacctggtacaggcgctgcttgaacaacagggcggctccatcaagcctctgctgatgcaggtaggcttcgacatcaacagcctgcgccaagggctggtgaaagagctcgaccaactgccgaaaatccagaaccccaccggcgatgtgaacatgtcgcaggacctggcgcgcctgctcaaccaggccgaccgcctggcccagcagaagggtgaccagttcatttccagcgaactggtactgctggccgccatggacgagaacagcaaactcggcaaactgctgctgagccagggcgtgaccaagaaagccctggaaaacgccatcaacaacctgcgcggcggcgcggcagtgaatgacgccaacgccgaggaatcgcgccaggccctggacaagtacaccgtcgacctgaccaagcgtgccgaagaaggcaagctggacccggtgatcggccgtgacgatgaaatccgccgtaccgtgcaggtactgcaacgccgtaccaagaacaacccggtgctgatcggtgagcctggcgtgggtaaaaccgccatcgccgagggcctggcccagcgcatcatcaatggtgaagtgccagacggcctcaagggcaagcgcctgctggcgctggacatgggggcgctgattgccggtgccaaataccgcggcgagttcgaagagcgtctgaaaggcctgctgaacgagctgtccaagcaggaaggccagatcatcctgttcatcgacgaactgcacaccatggtcggcgctggcaaaggcgagggcgccatggacgccggcaacatgctcaagccggccctggcccgcggcgagttgcactgcgtcggtgccactacgctgaacgagtatcgccagttcatcgagaaggacgccgccctggagcgccgtttccagaaggtgctggtagaggagccgagcgaggaagacaccatcgccatcctgcgtggcctgaaagagcgctatgaagtgcaccacaaggtggccatcaccgacggtgcaattatcgctgcggccaagctcagccatcgctacatcactgaccgccagttgccggacaaggccattgacctgatcgacgaagcggccagccgtatccgtatggagatcgactccaagccggaagtgctcgaccgccttgatcgccgcctgatccagttgaaggtggagtcgcaggcgctgaagaaagaagaagacgaagcggcaaaaaaacgcctggagaagctgaccgaggaaatcgagcggctggagcgtgagtattccgacctggaggaaatctgggcctcggaaaaagccgaagtgcagggctcggcgcagatccagcaaaagatcgagcaggctcgccaggagctggaaaccgcccgtcgcaaaggcgacctgagccgcatggccgaactgcagtacggggtgatcccggacttggagcgcagcctgcagatggtcgaccagcacggcaagaccgagaaccagttgctgcgcaacaaggtgaccgaggaagaaattgccgaagtggtgtcgaagtggaccggtattcccgtggccaagatgctcgaaggcgagcgtgagaagctgctgaagatggaagcgttgctgcaccagcgcgtgatcggtcagggcgaggcggtaaccgccgtggcgaacgccgtgcgccgctcgcgtgccgggctgtccgacccgaaccggccaagtggttcgttcctgttcctcggccctaccggcgtgggcaagaccgaactgtgcaaggcgctggccgagttcctgttcgacaccgaagaggcgatggtgcgcatcgacatgtccgagttcatggagaagcactccgtggctcgcctgattggtgcaccgccaggctatgtaggttatgaagagggcggctacctgaccgaggctgtacggcgcaagccatactcggtggtgctgctggacgaggtggagaaggcccacccggatgtgttcaacgtactgctgcaggtgctggaagacggccgcctgactgacagtcatgggcgcaccgtggacttccgcaacaccgtgatcgtgatgacttccaacctgggctcggcgcagattcaggagctggtgggtgaccgcgaggcgcaacgtgcggcggtgatggatgcggtgggtgcgcacttccgtccggagttcatcaaccgcatcgacgaagtggtggtgtttgagccactgggccgtgagcagatcgccggcattaccgagattcagctgggccgcctgcgcagccgtctgctggagcgcgaactgtcgctgagcttgagcccggacgcgttggacaagctgattgccgtgggttacgaccctgtatacggcgcacggccgctgaagcgggcaatccagcgctggatcgaaaacccattggcgcagctgatcctggcaggcaagtttgtgccgggtgcggcgattaccgccaaggtggaaggcgacgaaatcgtctttggctaa

SEQ ID NO: 33801 - protein, 854 aa, Pseudomonas putida GB-1
MRIDRLTSKLQLAISDAQSLAVGMDHPAIEPVHLVQALLEQQGGSIKPLLMQVGFDINSLRQGLVKELDQLPKIQNPTGDVNMSQDLARLLNQADRLAQQKGDQFISSELVLLAAMDENSKLGKLLLSQGVTKKALENAINNLRGGAAVNDANAEESRQALDKYTVDLTKRAEEGKLDPVIGRDDEIRRTVQVLQRRTKNNPVLIGEPGVGKTAIAEGLAQRIINGEVPDGLKGKRLLALDMGALIAGAKYRGEFEERLKGLLNELSKQEGQIILFIDELHTMVGAGKGEGAMDAGNMLKPALARGELHCVGATTLNEYRQFIEKDAALERRFQKVLVEEPSEEDTIAILRGLKERYEVHHKVAITDGAIIAAAKLSHRYITDRQLPDKAIDLIDEAASRIRMEIDSKPEVLDRLDRRLIQLKVESQALKKEEDEAAKKRLEKLTEEIERLEREYSDLEEIWASEKAEVQGSAQIQQKIEQARQELETARRKGDLSRMAELQYGVIPDLERSLQMVDQHGKTENQLLRNKVTEEEIAEVVSKWTGIPVAKMLEGEREKLLKMEALLHQRVIGQGEAVTAVANAVRRSRAGLSDPNRPSGSFLFLGPTGVGKTELCKALAEFLFDTEEAMVRIDMSEFMEKHSVARLIGAPPGYVGYEEGGYLTEAVRRKPYSVVLLDEVEKAHPDVFNVLLQVLEDGRLTDSHGRTVDFRNTVIVMTSNLGSAQIQELVGDREAQRAAVMDAVGAHFRPEFINRIDEVVVFEPLGREQIAGITEIQLGRLRSRLLERELSLSLSPDALDKLIAVGYDPVYGARPLKRAIQRWIENPLAQLILAGKFVPGAAITAKVEGDEIVFG

SEQ ID NO: 33802 - DNA, 2271 bp, Pseudomonas putida GB-1
  CDS (1)..(2271): transl_table=11
atgttaaaccgcgagctcgaagtcaccctcaatctggccttcaaggaggcccgttcgaagcgtcatgagttcatgactgtcgaacatctgctgctggcactccttgacaatgaggctgctgcgaccgttctgcgcgcctgtggcgccaatctcgacaaactcaagcatgacctgcaagagttcatcgactccacaacgccgctgattcctgtcaacgacgaagaccgggaaacccagccgaccctgggcttccagcgtgtgctgcagcgtgccgtgttccacgtgcaaagctccggcaagcgcgaagtgactggcgccaatgtgctggtggcgatcttcagcgaacaggaaagccaggccgtgtttctgctcaagcagcagagcgtggcccgtatcgacgtggtcaactacatcgcccatggtatctccaaggtgccagggcatggttcgcagtctgaaagcgaccaggaaatgcaggacgaagagggcggtgaaacctcctcttcgagcaacccactggacgcctatgccagcaacctgaacgagctggcgcgtgccggccgcatcgacccactggtcggccgcgagcaggaagtggagcgggtggcgcaaatccttgcccgtcggcgcaagaacaacccgctgctggtgggtgaggcaggcgtgggcaagacggccatcgccgaaggcctggccaagcgcatcgtcgacggccaggtgcccgatctgctggcgcagagcgtggtgtattccctcgacctgggcgcgctgctggccggtaccaaataccgtggcgacttcgagaagcgtttcaaggcgctgctcggtgagctgcgcaagcgcccgcaggccatcctgttcatcgacgaaatccacaccatcatcggtgccggtgcagcgtcgggtggggtgatggatgcctccaacctgctcaagccgctgctgtcgtcgggtgaaatccgttgtatcggctcgaccaccttccaggagtttcgcggcatcttcgagaaggaccgtgcgctggcacggcgcttccagaaggtggacgtcagcgagccatcggtcgaagacaccgtgggcattctgcgcggcctgaaggggcgtttcgaaagccaccacaacatcgagtacagtgacgaagccctgcgcgccgccgctgaactggcctcgcgctacatcaatgaccggcacatgccggacaaggccatcgacgtaatcgacgaagccggcgcctaccagcgtctgcaaccggaggccaaccgcgtcaagcgcatcgatgtgccgcaagtcgaggatatcgtcgccaagatcgcgcggattccgccgaagcatgtcagcagttccgacaaggagctgctgcgtaaccttgagcgcgacctgaaactgaccgtgttcggccaggaccaggcaatcgactcgctgtctaccgcgatcaagctgtctcgtgccggcctcaagtcgccagacaaaccggttggttcgttcctgttcgctggccccactggtgtcggcaagaccgaagcggcgcggcagctggccaaggcgctgggcgtggaactggtgcgcttcgacatgtccgagtacatggagcgccacaccgtgtcgcgcctcatcggtgcgccgcctggttatgttggtttcgaccagggtggtttgctgaccgaggcgattaccaaacaaccgcactgcgtgttgctgctcgacgaaatcgagaaggctcacccggaagtcttcaacctgctgttgcaggtgatggaccacggtaccctgaccgacaacaacgggcgcaaagccgacttccgtaacgtgatcctgatcatgaccaccaacgccggtgccgaaaccgcggcgcgggcgtcgatcggcttcactcatcaggaccacgcgtccgatgccatggaagtgatccgcaagagcttcacgccagagttccgcaaccgcctggataccatcatccagtttggccgcctgagcacagagacgatcaaaagcatcgtcgacaagttccttatcgaactgcaggcgcagctggaagacaagcgtgtgctgctggaagtcagcgatgatgcgcgcggctggctggcggtttcggggtacgacgcgcagatgggtgcgcggccgatggcgcggctgatccaggacaagatcaagcggccgctggccgaggagatcttgtttggcgagctggccgagcatggcggcgtggtgcacgtcgacctgcgcgatggcgaactggtgttcgacttcgagaccacggctgaggtcgcgtga

SEQ ID NO: 33803 - protein, 756 aa, Pseudomonas putida GB-1
MLNRELEVTLNLAFKEARSKRHEFMTVEHLLLALLDNEAAATVLRACGANLDKLKHDLQEFIDSTTPLIPVNDEDRETQPTLGFQRVLQRAVFHVQSSGKREVTGANVLVAIFSEQESQAVFLLKQQSVARIDVVNYIAHGISKVPGHGSQSESDQEMQDEEGGETSSSSNPLDAYASNLNELARAGRIDPLVGREQEVERVAQILARRRKNNPLLVGEAGVGKTAIAEGLAKRIVDGQVPDLLAQSVVYSLDLGALLAGTKYRGDFEKRFKALLGELRKRPQAILFIDEIHTIIGAGAASGGVMDASNLLKPLLSSGEIRCIGSTTFQEFRGIFEKDRALARRFQKVDVSEPSVEDTVGILRGLKGRFESHHNIEYSDEALRAAAELASRYINDRHMPDKAIDVIDEAGAYQRLQPEANRVKRIDVPQVEDIVAKIARIPPKHVSSSDKELLRNLERDLKLTVFGQDQAIDSLSTAIKLSRAGLKSPDKPVGSFLFAGPTGVGKTEAARQLAKALGVELVRFDMSEYMERHTVSRLIGAPPGYVGFDQGGLLTEAITKQPHCVLLLDEIEKAHPEVFNLLLQVMDHGTLTDNNGRKADFRNVILIMTTNAGAETAARASIGFTHQDHASDAMEVIRKSFTPEFRNRLDTIIQFGRLSTETIKSIVDKFLIELQAQLEDKRVLLEVSDDARGWLAVSGYDAQMGARPMARLIQDKIKRPLAEEILFGELAEHGGVVHVDLRDGELVFDFETTAEVA

SEQ ID NO: 33804 - DNA, 2577 bp, Erythrobacter sp. SD-21
  CDS (1)..(2577): transl_table=11
atgaatctcgaaaagttcaccgaccgggccaagggcttcctgcaggcggcgcagaccgtcgccatccgcatgagccaccagcgcatcacgcccgcgcatttgctgaaagcgctgctcgatgacgagcagggcatggccgcgcagctgatccagcgtgcggggggcaatccgggcgtcgcgattaccgaaatcgataccgctttgggcaaggtgccttcggtgtccgggggcggggcgcagcaaacgcccgggctcgacaacgacgccgtgcgcgcgctcgaccaggccgagcagcttgccgaaaaggcgggcgacagcttcgtgccggtccagcgtatcctgcaggcgcttgccatgcaggacaacgatgcaggccacgcgctcaaggctgcgggcatagacgccaagtcgctcgaagccgcgatccaggaggcgaccggtggccgcactgcggatagcgcgggcgcggaagacgcgtatgacgcgatgaagaaatacgctcgcgatctcactcaggcggcgcgcgacggcaagctcgaccccgttatcgggcgcgacgaggaaatccgtcgcacggtgcagatcctcgcccggcggaccaagaacaaccccgcgctcatcggtgaacccggcactggcaagacagcgatcgccgagggcctcgctctgcgcatcgccaatggcgatgtgcccgacagtctcaagggccgcacgctcatgtcgctggatcttggcgcactcattgcgggcgcgaagtaccgcggcgagttcgaggagcggctaaaggccgtgctcgatgaggtgaagggcgccgaagggcagatcattctcttcatcgacgagatgcacacgctgatcggcgcgggcgcgagcgaaggcagcatggatgctggcaacctcctcaagcctgccctgtcgcgcggggaactgcactgcatcggcgcgaccacgctcgacgaataccagaagtatgtcgagaaggaccccgcgctccagcggcgcttccagcccgtctatatcgacgagccgagcgtcgaggacacgatcagcatcctgcgcggcatcaaggacaagtacgagctgcaccatggcgtgcgcatcaccgacggcgcgatcgtggcggctgcgcagctcagcaaccgctacatccagaaccgctttttgcccgacaaggccatcgacctgatggacgaggcggcctcgcgcattcgtatggaggtagagagcaagcccgaggaaatcgaagggctcgaccgtcgcatcatccagctgcgtattgaagagcaggcgttgcagaaggaaaccgacagcgcgtcgaaggaccggctggaggcgctgcgcaaggagctgtccgaactcgagcagcagtcctccgaactgaccacccgctggcagaacgagcgcgacaagatccatgccgaggcacggatcaaggaagagctcgacgcggcgcgtatcgagctcgaacaggcccagcgcggcggcgacctgcagaaggcgggcgagttgcaatacggcaagatcccagagctcgaaaagcggctccaggaggccagcggacaaaccgacaacgcgctgctcaaggaagaagtcaccgaagacgacatcgccggcgtggtctcacgctggacgggcatcccggtcgacaagatgatggaaggcgagcgcgagaagctgctcgacatggaaaacatcctcgccaagcgggtaatcggccagagccaggcgatcgacgccgtgtccaaggccgtgcgccgtgcgcgggcggggctgcaggatccgggccgtccgctcggcagcttcctgttcctcggcccgaccggtgtcggcaagaccgaactgaccaaggcgctcgccggcttcctgttcgacgacgaccaggcgatggtccgcatcgacatgagcgaattcatggaaaagcacgcggtcgcccgcctcatcggcgcgcctccgggctatgtcggatacgaggagggcggcgtgctgaccgaggcggtgcggcgcaggccctaccaagtggtgctgttcgacgaggtcgagaaggcgcacagcgatgtcttcaacgtgctgctgcaggtgctcgacgacgggcgcctgaccgacgggcagggccgcgtggtcgatttctcgaacacgctgatcatcctcacttccaacctcggcagccagtatctggcgaacatggaggatggccagaaggtcgaggaggtcgagccgcaggtaatggacgtggttcgcgggcatttccgccccgagttcctcaaccgcctcgacgagatcatcctgttccaccgcctggcgcaggagcacatggccccgatcgtcgatatccaggtcgcgcgggtgcagaaactgctcaaggatcgcaagatcgtgctcgacctgaccgaggcggccaagaagtggctcggccgcgtaggctacgatcccgtctacggcgcgcgtcctctgaagcgcgcggtccagcgctacgtgcaggatccgctggccgacatgatcctgtcgggcaatgtgccagatgggtcgacggtagcgatcgacgagggcgacggctctctagagatgacggtcagatga

SEQ ID NO: 33805 - protein, 858 aa, Erythrobacter sp. SD-21
MNLEKFTDRAKGFLQAAQTVAIRMSHQRITPAHLLKALLDDEQGMAAQLIQRAGGNPGVAITEIDTALGKVPSVSGGGAQQTPGLDNDAVRALDQAEQLAEKAGDSFVPVQRILQALAMQDNDAGHALKAAGIDAKSLEAAIQEATGGRTADSAGAEDAYDAMKKYARDLTQAARDGKLDPVIGRDEEIRRTVQILARRTKNNPALIGEPGTGKTAIAEGLALRIANGDVPDSLKGRTLMSLDLGALIAGAKYRGEFEERLKAVLDEVKGAEGQIILFIDEMHTLIGAGASEGSMDAGNLLKPALSRGELHCIGATTLDEYQKYVEKDPALQRRFQPVYIDEPSVEDTISILRGIKDKYELHHGVRITDGAIVAAAQLSNRYIQNRFLPDKAIDLMDEAASRIRMEVESKPEEIEGLDRRIIQLRIEEQALQKETDSASKDRLEALRKELSELEQQSSELTTRWQNERDKIHAEARIKEELDAARIELEQAQRGGDLQKAGELQYGKIPELEKRLQEASGQTDNALLKEEVTEDDIAGVVSRWTGIPVDKMMEGEREKLLDMENILAKRVIGQSQAIDAVSKAVRRARAGLQDPGRPLGSFLFLGPTGVGKTELTKALAGFLFDDDQAMVRIDMSEFMEKHAVARLIGAPPGYVGYEEGGVLTEAVRRRPYQVVLFDEVEKAHSDVFNVLLQVLDDGRLTDGQGRVVDFSNTLIILTSNLGSQYLANMEDGQKVEEVEPQVMDVVRGHFRPEFLNRLDEIILFHRLAQEHMAPIVDIQVARVQKLLKDRKIVLDLTEAAKKWLGRVGYDPVYGARPLKRAVQRYVQDPLADMILSGNVPDGSTVAIDEGDGSLEMTVR

SEQ ID NO: 33806 - DNA, 2610 bp, unidentified eubacterium SCB49
  CDS (1)..(2610): transl_table=11
atgaattttaacaactatactatcaaaagtcaagaggctatacaacgagcgcaacaactcgctcaagaatacagccaccaacaaatagaaaacgaacatattttaaaagcaatttttgaagtagatgaaaacgtgactccttttttattaaaaaaattaaatgtcaacctatccctattacaacaaatacttaataaacaaattgaatctttcccaaaagtttctggtggtgacttaatgttatctaaggaagcaggaaaaacagtaaatgaagcaagtattattgctaaaaaaatgaacgatgaatatgtttcattagaacatcttttactcgctatattcaattcgaaaagcaatattgcacaatcattaaaagatcagggagtttcagaaaaaggattaaaagcagccatagaagaattacgaaaaggtgataatgtaacatcgcaaaatgctgaagaaagctataacgcacttaacaagtatgctaaaaatttaaaccaattagcacgcgatggcaaactagaccctgtaattggccgtgatgaagaaataagaagaatcttacaaattctaacgcgccgtacaaaaaacaacccaatgcttgtgggagagccaggaacaggaaaaacagcaatcgcagaaggtctagcacatagaatagtagacggtgatgtaccagagaatttaaaatctaaagaagtattctctctagacatgggagcccttatcgcaggagcaaaatacaaaggagaatttgaagaacgattaaaagcagtaataaaagaagtaacatctagcgatggagatatcgttttatttatagatgaaattcatacacttgttggcgcaggaggtgggcaaggagcaatggatgctgctaatattttaaaacctgcacttgctcgtggagagttaagagccattggtgccactacacttgatgaataccaaaaatactttgaaaaagacaaagctctagagagaaggtttcaaaaagtaatcgtagatgaaccagatacagaaagtgctatatctattttaagaggaattaaagaaaaatacgagacacaccataaagtacgtattaaagatgatgcaattattgctgccgtagagttatcacaacgctatattacaaacagatttttaccagacaaagccattgatttaatggatgaggctgctagtaaaatgcgtatggagattaacagtaagccagaagagcttgatgtacttgacagaaaagtgatgcaattagaaatagagattgcagcgataaagagagaaaaggatgaaactaaacttaaatctttacgcagcgatctagcaaatctaaaagaagaacgcaatgagctaaatgcaaaatggaagagcgaaaaagaggttgtagaaaatgtacaaaacctaaaaacagaaattgaagcatataagcttgaagcagaacgtgcagaacgcgatggtgattttggaaaagtagcagaaatacgttacggaaaaattaaagaagctcaagaatcacttcataaaatagaagcaaaactcgcagaaaaccaaaatgaagattcattaataaaagaagaagttacacacgaagacattgctgaagttgttgcaaaatggacaggaatccctgtgacaaaaatgctgcaaagtgatagagaaaaacttttaaaattagaagatgaactacataaacgtgtagtaggacaagaagaagcaatcatagcggtaagtgacgccgttagaagaagtcgcgcaggtttacaagatcaaaaaaagcctataggtagctttttatttttaggaacaaccggagtgggtaaaacagaacttgcaaaagcacttgcgtcttatatgtttgatgatgaaaattctatgacacgtatagatatgagcgaatatcaagaaagacatagtgtaagtagattagttggtgctcctccaggatacgtaggctatgatgaaggtgggcaattaacagaagctgtgcgtcgtaaaccttattctgtaatattacttgatgagatagaaaaagcacatccagatacttttaatattttattacaagtgctagatgaaggtagactgacagataacaaaggccgtgttgcagattttaaaaatgccataatcattatgacgagtaatatgggtagtgagattattcagcaaaaatacgacaccgttaaagatcctgataccgctatggaaacagcaaaagttgaagtacttggtttactaaaacaaacggtgaggcctgaatttttaaatagaatagacgacattattttatttactcctttatctaaggacgatatttcagaaatagtaggcctacaattaaaaggcttaacaaaaatgttagcagctcaaggtattactatggatgcaacgcaagaggctattaaatatctagcacaaaaaggttatgaccctcaatatggggcaagacctgtaaaaagagtaatccagagagaagtacttaattcactctctaaagagattcttgcgggtaatataacaacagatagtattattttacttgatagttttgatagcaaattagtttttagaaatcaaaacgctgagatagaaacagtgagttaa

SEQ ID NO: 33807 - protein, 869 aa, unidentified eubacterium SCB49
MNFNNYTIKSQEAIQRAQQLAQEYSHQQIENEHILKAIFEVDENVTPFLLKKLNVNLSLLQQILNKQIESFPKVSGGDLMLSKEAGKTVNEASIIAKKMNDEYVSLEHLLLAIFNSKSNIAQSLKDQGVSEKGLKAAIEELRKGDNVTSQNAEESYNALNKYAKNLNQLARDGKLDPVIGRDEEIRRILQILTRRTKNNPMLVGEPGTGKTAIAEGLAHRIVDGDVPENLKSKEVFSLDMGALIAGAKYKGEFEERLKAVIKEVTSSDGDIVLFIDEIHTLVGAGGGQGAMDAANILKPALARGELRAIGATTLDEYQKYFEKDKALERRFQKVIVDEPDTESAISILRGIKEKYETHHKVRIKDDAIIAAVELSQRYITNRFLPDKAIDLMDEAASKMRMEINSKPEELDVLDRKVMQLEIEIAAIKREKDETKLKSLRSDLANLKEERNELNAKWKSEKEVVENVQNLKTEIEAYKLEAERAERDGDFGKVAEIRYGKIKEAQESLHKIEAKLAENQNEDSLIKEEVTHEDIAEVVAKWTGIPVTKMLQSDREKLLKLEDELHKRVVGQEEAIIAVSDAVRRSRAGLQDQKKPIGSFLFLGTTGVGKTELAKALASYMFDDENSMTRIDMSEYQERHSVSRLVGAPPGYVGYDEGGQLTEAVRRKPYSVILLDEIEKAHPDTFNILLQVLDEGRLTDNKGRVADFKNAIIIMTSNMGSEIIQQKYDTVKDPDTAMETAKVEVLGLLKQTVRPEFLNRIDDIILFTPLSKDDISEIVGLQLKGLTKMLAAQGITMDATQEAIKYLAQKGYDPQYGARPVKRVIQREVLNSLSKEILAGNITTDSIILLDSFDSKLVFRNQNAEIETVS

SEQ ID NO: 33808 - DNA, 2574 bp, Moritella sp. PE36
  CDS (1)..(2574): transl_table=11
atgcgcttagatcaacttaccaccaaattccaaatggctatttctgatgcgcagtcacttgcactgggtaaagataatcaatttatcgaacccattcacttgatgaccgcgttattaaaccaagaccacagctctattcgcccattactgaccgctgccgcgattgatgccaatgcattgcgctggcaattagcggatgagttagaccgcttaccacaagtgcaaggtacccaaggcgatctccaattatcgtcagccttgaatatgctattaaacttgtgtgataagtttgcccaaaaacgtaaagataaatttattgcttccgagatgtttgtccttgcagcggttgaagataaaggccgtttagggcaattattacgcaaagccggagggtcgcgtaagctagtcgaagaagcgattgacgtgatccgtggtggtgacaaagtgaatgaccaaggcgcggaagagcaacgtgaagcgttagccaaatataccttagatctgaccgaacgtgctgaagtcggtaagcttgatcctgtgattggccgggatgacgagatccgccgtgttatccaggtattacaacgccggactaagaataacccggtattaattggtgagcccggggtaggtaaaactgcgattgccgaaggtttggcacagcgtattgtgaatggcgaagtaccggaaggtttaaagaataaacgcgtgttatcactggatatgggggccttgattgcgggggctaaataccgtggtgaatttgaagaacggttaaaatcagtgatcaaagaactggcgcaaaccgaaggccaaacgattctgtttattgatgaactacataccatggtcggcgccggtaaaggtgagggcgcgatggatgccggcaacatgctaaaaccggcattagcccgtggtgaattacattgcatgggcgcgaccacccttgatgaataccgtaaatatattgaaaaagatgcggcacttgaacgtcgttttcaaaaagtattgattgaagagccaaatgttgaagacactattgctatcttacgtggtttaaaatcacgctatgaactacatcataatgttgatattaccgatcccgccattgttgcggcagcgaccttatcgcaccgttatatttccgatcgtcaattgcccgataaagccattgatctgatcgatgaagctgcatcgtctattcgcttacaaatggactcaaaaccagaagcgttagataaattagaacgtcgtattattcaacttaaaattgaacgacaagcgctagaaaaagaagatgactcggccagtattaaacgtttatcgacgattgctgaggaattggctgagaagcaagataagtttaacgagctagatgagatctggcggactgaaaaagccgcgctttctggtactaaacacattaaatcagcgttagataaagcccgtgttgaattggatatggctcgacgcgcgagcgatttaaataaaatgtcagaactgcaatacggcactattccaatgttagaaaaacaattggatttagccgcccaagctgaaatgcaagacatgaccttgttaaagcataaggtgggagaagccgagatcgccgatattttatcgcgttggacggggatcccggtacaccgtatgctggaaggggaaaaagaaaagctgctggcgatggaagataacttacatcaacgggtgattggtcaagcagaagcgatcagcgtggtatccaatgcgatacgccgtagccgtgccggtcttgctgatccaaaccgtccgatgggatcttttttattcatggggccaacgggtgtcggtaaaactgaagtatgcaaagccttagctgattttatctttgattcagaccaggccatgatccgccttgatatgtctgaatttatggagaagcattctgttgctcgtctgattggtgcgcctcctggttatgtgggttatgaagaaggcggttacctgaccgaagcggtacgtcgaaaaccttactcagttatcttactcgatgagattgaaaaagcgcatcctgatattttcaatattttattacaagtgttggatgatggtcgcttaacggatggtcagggacgaaccgttaacttccgcaatacggtgatcattatgacatctaacttgggctcggatatcattcaagaagagtatgggaagcatgactataatacggtgaaattacgtttgttagagttgcttggacaaagcttccgtcccgagtttattaaccgtatcgatgataccgtggtgttccatccactcgggcgtagtcacatcgagaaaattgcggtgatccagttaaaatcgttagaagcgcggttaaaacaactgggttatagcttatcgatcaccgccggtgccttagcaaaattagccgatgcggggtttgatccgttatttggtgccagaccgctaaaacgggtattacagaaacaagtcgaaaaccgcttagccaatgctattttggcaggtgatgtggtcccgggtaaacagattaagataagtgtggttgatgatgagttaagcgtgactcaataa

SEQ ID NO: 33809 - protein, 857 aa, Moritella sp. PE36
MRLDQLTTKFQMAISDAQSLALGKDNQFIEPIHLMTALLNQDHSSIRPLLTAAAIDANALRWQLADELDRLPQVQGTQGDLQLSSALNMLLNLCDKFAQKRKDKFIASEMFVLAAVEDKGRLGQLLRKAGGSRKLVEEAIDVIRGGDKVNDQGAEEQREALAKYTLDLTERAEVGKLDPVIGRDDEIRRVIQVLQRRTKNNPVLIGEPGVGKTAIAEGLAQRIVNGEVPEGLKNKRVLSLDMGALIAGAKYRGEFEERLKSVIKELAQTEGQTILFIDELHTMVGAGKGEGAMDAGNMLKPALARGELHCMGATTLDEYRKYIEKDAALERRFQKVLIEEPNVEDTIAILRGLKSRYELHHNVDITDPAIVAAATLSHRYISDRQLPDKAIDLIDEAASSIRLQMDSKPEALDKLERRIIQLKIERQALEKEDDSASIKRLSTIAEELAEKQDKFNELDEIWRTEKAALSGTKHIKSALDKARVELDMARRASDLNKMSELQYGTIPMLEKQLDLAAQAEMQDMTLLKHKVGEAEIADILSRWTGIPVHRMLEGEKEKLLAMEDNLHQRVIGQAEAISVVSNAIRRSRAGLADPNRPMGSFLFMGPTGVGKTEVCKALADFIFDSDQAMIRLDMSEFMEKHSVARLIGAPPGYVGYEEGGYLTEAVRRKPYSVILLDEIEKAHPDIFNILLQVLDDGRLTDGQGRTVNFRNTVIIMTSNLGSDIIQEEYGKHDYNTVKLRLLELLGQSFRPEFINRIDDTVVFHPLGRSHIEKIAVIQLKSLEARLKQLGYSLSITAGALAKLADAGFDPLFGARPLKRVLQKQVENRLANAILAGDVVPGKQIKISVVDDELSVTQ

SEQ ID NO: 33810 - DNA, 2586 bp, Herbaspirillum seropedicae
  CDS (1)..(2586): transl_table=11
atgcgtctcgacaaactcaccaccaaattgcaggaagcgctggccgatgcgcaatcccaggccgtcggccacgacaatcaatacatcgaacccgtccacctcatcctggcgctgctgaaccaggaggacggcggcgctcgctcgctgctgcagcgcgccggcgtgaacgtcaatggtctgtctgccgccttgcaggcggccgtcaagcgcctgccgcaggtctccggcaatggcggcgaagtgcaggtcggccgcgagctggtggccctgctgaacctggccgacaaggaagcgcaaaagcatggcgaccagttcgtcgccagcgaaatggtgctgctgggcctggtggacgacaagtccgacgccggccgcgccgcgcgcgaaaacggtctgacccgcaagtcgctggaagcggccatcaccgccgtgcgcggtggcgcgtccgtgtcctcgcagcaagatgaaggccagcgcgaagccctgaagaaatacaccctggacctgaccgagcgtgcccgcgccggcaagctcgacccggtgatcggccgcgacgatgaaatccgccgcgccatccaggtgctgcaacggcgcagcaagaacaacccggtcctgatcggggagccgggcgtgggcaagaccgccatcgtcgaaggcctggcccagcgcatcgtcaatggcgaagtgccggacagcctcaagtccaagcgcgtgctgtcgctggacatggcggccctgctggcgggcgccaagtatcgcggcgaattcgaggaacgcctgaaagcggtcttgaaggaaatcgcccaggacgaaggccagaccatcgtcttcatcgatgagttgcataccatggtcggcgccggctatgccgagggcgccatggacgccggcaacatgttgaagccggccctggcgcgcgccgaactgcactgcgtgggcgccaccaccctggatgaataccgccagtacatcgagaaagatgccgcgctggaacgccgcttccagaagatcctggtggatgagcccagcgtggaagccaccatcgccatcctgcgcggtctgcaggaaaagtacgaggtgcaccacggcgtggacatcaccgacccggccatcgtggctgcggccgagctgtcgcatcgctatatcaccgaccgcttcctgccggacaaggccatcgacctgatcgacgaagcggcttccaagatcaagatcgaaatcgattccaagccggaagtgatggacaagctcgaccgtcgcctgatccagttgaagatcgagcgcgaagccgtcaagcgcgagaaggacgaagcctcgcagaagcgcctgcagctgatcgaggaagaaatcgagaagctcgagcgcgaatacgccgacctggaagaaatctggaaggccgagaagtcgagcgcccagggcggccagcaattgaaggaagaaatcgagaaggtgcgcctgcagatggaagaggccacccgcaagagcgactggcagaaggtctcggaactgaagtacggcaagctggccgagctggaagccgcgctggaagtgcagaacaagaaggatgcggcgggcgtcaagaccgagaagcccaagctggtgcgcacgcaggtgggcgctgaggaaatcgccgagatcgtcgcgcgcgccactggcattccggtctcgcggatgatgcagggcgaacgcgaaaaactgctgcacatggaagacgtgctgcatgaacgcgtggtcggccaggacgaagccatcgtggccgtctccgacgccatccgccgttcccgtgccggcctgggcgatcccagcaagccctatggttccttcatgttcctgggccccaccggggtgggcaagaccgagctgtgcaaggcgctggcctcctatctcttcgataccgaggaagccatgatccgcatcgacatgagcgaattcatggagaagcattccgtggcccgcctgatcggcgcgccgccgggctatgtcggctatgaagagggcggttacctgaccgaagcggtgcgtcgcaagccctacagcgtgatcctgctcgacgaaatcgagaaggcccacccggatgtcttcaacgtgctgctgcaggtgctggacgatggccgcatgaccgatggccagggccgtaccgtggacttcaagaacaccgtgatcgtgatgacttccaacctgggttcgcacaagatccagagcatggaagacagcgatccggccctggtgaagctggccgtgatggccgaggtgcgcacccacttccgtccggaattcatcaaccgggtggatgagatcgtggtcttccacgcgctggacgccaagaacatcggcgccatcgccaagatccagctgcgcatcctggagcaacgcctggccaagctggagatcggcctggagatcagcgaggccggtttgcagaagatcgccgaggctggtttcgatccggtctatggcgctcgtccgctcaagcgcgccatccagcaggagatcgagaacccgctgtccaagcagatcctggcaggcaagttcggtcccaaggatgtggtgcgggtggacgtggaccatggccagttgagtttcagcaagtaa

SEQ ID NO: 33811 - protein, 861 aa, Herbaspirillum seropedicae
MRLDKLTTKLQEALADAQSQAVGHDNQYIEPVHLILALLNQEDGGARSLLQRAGVNVNGLSAALQAAVKRLPQVSGNGGEVQVGRELVALLNLADKEAQKHGDQFVASEMVLLGLVDDKSDAGRAARENGLTRKSLEAAITAVRGGASVSSQQDEGQREALKKYTLDLTERARAGKLDPVIGRDDEIRRAIQVLQRRSKNNPVLIGEPGVGKTAIVEGLAQRIVNGEVPDSLKSKRVLSLDMAALLAGAKYRGEFEERLKAVLKEIAQDEGQTIVFIDELHTMVGAGYAEGAMDAGNMLKPALARAELHCVGATTLDEYRQYIEKDAALERRFQKILVDEPSVEATIAILRGLQEKYEVHHGVDITDPAIVAAAELSHRYITDRFLPDKAIDLIDEAASKIKIEIDSKPEVMDKLDRRLIQLKIEREAVKREKDEASQKRLQLIEEEIEKLEREYADLEEIWKAEKSSAQGGQQLKEEIEKVRLQMEEATRKSDWQKVSELKYGKLAELEAALEVQNKKDAAGVKTEKPKLVRTQVGAEEIAEIVARATGIPVSRMMQGEREKLLHMEDVLHERVVGQDEAIVAVSDAIRRSRAGLGDPSKPYGSFMFLGPTGVGKTELCKALASYLFDTEEAMIRIDMSEFMEKHSVARLIGAPPGYVGYEEGGYLTEAVRRKPYSVILLDEIEKAHPDVFNVLLQVLDDGRMTDGQGRTVDFKNTVIVMTSNLGSHKIQSMEDSDPALVKLAVMAEVRTHFRPEFINRVDEIVVFHALDAKNIGAIAKIQLRILEQRLAKLEIGLEISEAGLQKIAEAGFDPVYGARPLKRAIQQEIENPLSKQILAGKFGPKDVVRVDVDHGQLSFSK

SEQ ID NO: 33812 - DNA, 2670 bp, Oryza sativa subsp
  CDS (1)..(2670)
atggaggtgtgctgctgctcgacgtcgtcggccgtgcccgggaggaggttcgcggcggccggggcggcggcggcggcggtggcggcgaggtggggcgccgagggggtcgggagggcggtgcgggaggccaaggggctcggggagggcgccgtggcgccgcgccacctgctgctggggctcatcgccgaggaccggtcggcgggcgggttcctctcgtcggggatcaacatcgagcgcgcgcgcgaggagtgccgcggcatcggcgccagggacttgacccccggcgcgccgtcgccgtccggctccgggctggaaatggacatacccttctccggcagctgcaagcgggtgttcgaggtcgccgtggagttctcccggaacatgggctgcagcttcatctccccggagcacctcgccctcgcgctcttcaccctcgacgatcccaccaccaacagcctcctcaggagcttgggagcggatccgagtcaactagcatcagtagcgcttacccgactccaagcggagcttgcgaaagatggcagagaacctgcaggagcatcatctttcaaagtacccaagaaatctcctgctggagctggaagatctgccttctcgaaatctttaaattcaaagaaagaaaagggtgcgcttgatcaattttgtttagatctgaccacacaagctagtggcgggtttattgatcctatcattggccgtgaggaggagattgaaagagtagttcagataatatgccgacggacaaagaacaatcctattcttttgggtgaggcaggtgttggcaaaactgcaatcgctgaagggttggctcttcgaattgcaaatggagatgtccccatttaccttgtggcaaagcgtataatgtcattggacgttggtctacttattgctggtgcaaaagaaagaggtgaactggagtccagggttactagtttaattcgtgaagtccgggaagcaggggatgttattcttttcattgatgaggttcacaatcttattggatctggcactgttggaaagggtaagggtgctggccttgacattggcaacttgctgaagcccccacttgctagaggtgaattgcagtgcattgcagctacaactctagatgaacacagaatgcattttgagaaggataaggctttggctcgccgcttccagccagtattagtagaggagcctagtcaggatgatgctgtgaagatattacttggtcttcgtgaaaaatatgaaacatatcacaaatgcaaatttaccttagaagccatcaatgcagcagtttatctgtcagcaagatatattcctgacaggcagctccctgacaaggccatcgatctgattgatgaagctggcagtagagctcgaatggaatcatttaataggaagaaggaagggcagtcttcaatcctcttaaagtcgccagatgaatactggcaagagataagagctgctcaaaacatgcatgaagtggtgtcatcaaaccagatgaagtattccccttgtcaagagaatggcagtgctgccattaaagcaccaagcgaggacatgaatgagttgacatctgaactccaagttgaggaaccaattgtagttggaacagaggaaattgcaagagttgcctcattgtggtcagggataccagtccagcagttaactgctgatgatagaaagcttctcgtaggactagatggtgaactcagaaagcgtgtgattggtcaagatgatgctgttatggcaatatctagagcagtgaagagatcacgtgttggcctcaatgatcctgacagacctattgccactctacttttctgtggtccgacaggagttggtaaaactgagcttactaaagctctagcagctagttattttggatcggaatctgctatgcttagattagacatgagcgagtatatggagaggcacactgtgagcaagctcataggctctcctccagggtacatcggatatggtgaaactggtactctgacagaagctgtcaggagaaagccatttactgtagtattacttgatgagatagagaaagctcaccctgatattttcaacattcttctccaaatttttgaagatgggcatctgtcggactcacagggccgcagagtgtccttcaagaacacattgattgtcatgacatcaaatgttggttctacatcaatttcaaagggaagacgaagcatgggtttcatgacagaagatactgaatcaagctcatatgttgcaatgaaatctctagtaatggaagagttgaaggcatttttccgtccagaattgctcaacagaatcgatgagatggttgtattccgtcccttagagaaaactcagatgctagcaattcttgatatcatcctacaagaagtgaagggtaggctgttagcccttggaataggcctcgaggtgtccgatgcaatgaaggacctgatttgcgaagaaggctatgacaagagctacggtgcgcggccactgaggagagccgtcacccacctgattgaggatgtgatcagcgaagcaattctatttggcgaatacaagcctggggacacgatactgatggatattgatgccgcggggaaaccttgcatgagccacctgaatgagaaggttgtccagttgtctgatccgacacggacattctga

SEQ ID NO: 33813 - protein, 889 aa, Oryza sativa subsp
MEVCCCSTSSAVPGRRFAAAGAAAAAVAARWGAEGVGRAVREAKGLGEGAVAPRHLLLGLIAEDRSAGGFLSSGINIERAREECRGIGARDLTPGAPSPSGSGLEMDIPFSGSCKRVFEVAVEFSRNMGCSFISPEHLALALFTLDDPTTNSLLRSLGADPSQLASVALTRLQAELAKDGREPAGASSFKVPKKSPAGAGRSAFSKSLNSKKEKGALDQFCLDLTTQASGGFIDPIIGREEEIERVVQIICRRTKNNPILLGEAGVGKTAIAEGLALRIANGDVPIYLVAKRIMSLDVGLLIAGAKERGELESRVTSLIREVREAGDVILFIDEVHNLIGSGTVGKGKGAGLDIGNLLKPPLARGELQCIAATTLDEHRMHFEKDKALARRFQPVLVEEPSQDDAVKILLGLREKYETYHKCKFTLEAINAAVYLSARYIPDRQLPDKAIDLIDEAGSRARMESFNRKKEGQSSILLKSPDEYWQEIRAAQNMHEVVSSNQMKYSPCQENGSAAIKAPSEDMNELTSELQVEEPIVVGTEEIARVASLWSGIPVQQLTADDRKLLVGLDGELRKRVIGQDDAVMAISRAVKRSRVGLNDPDRPIATLLFCGPTGVGKTELTKALAASYFGSESAMLRLDMSEYMERHTVSKLIGSPPGYIGYGETGTLTEAVRRKPFTVVLLDEIEKAHPDIFNILLQIFEDGHLSDSQGRRVSFKNTLIVMTSNVGSTSISKGRRSMGFMTEDTESSSYVAMKSLVMEELKAFFRPELLNRIDEMVVFRPLEKTQMLAILDIILQEVKGRLLALGIGLEVSDAMKDLICEEGYDKSYGARPLRRAVTHLIEDVISEAILFGEYKPGDTILMDIDAAGKPCMSHLNEKVVQLSDPTRTF

SEQ ID NO: 33814 - DNA, 2844 bp, Oryza sativa subsp
  CDS (1)..(2844)
atggcgtcggaggcggggcacgcgcagctgacgccgctgcacctgacggcggcgctggcggcggacaagggcgggatactccggcaggcgatctcgcaggcgtccggcggggacgccggcgcgccggactcgttcgagcgcgtggtgagcggggcgctcaagaagctgccctcgcagtcgccgccgccggacagcgtgccggcgtccacggcgctgatcaaggtcatccgccgcgcgcagtccgcgcagaagaagcgcggggactcccacctcgccgtcgaccagctgctgctgggcctcctggaggactcgctaatctccgactgcctcaaggaggccggcgtgtccgcggcgcgggtgcgcgccgagctcgagaagctccgtggcggggagggccgcaaggtggagtccgcgtccggcgacaccaacttccaggcgctcaagacctacggccgcgacctcgtcgagcaggccggtaagctcgaccccgtcattggccgcgacgaggagatccgccgcgtcgtgcgcatcctgtcgcgccgcacgaagaacaaccccgtactcatcggcgagcccggcgtcggcaagacggccgtcgtggagggcctcgcgcagcgcatcgtgcgcggggacgtgcccagcaacctgctcgacgtccgcctcatcgcgctcgacatgggcgcgctcgtcgccggcgccaagtaccgcggcgagttcgaagaacggctcaaggccgtgctcaaggaggtggaggaggccgagggcaaggtgatcctcttcatcgacgagatacacctcgtcctcggcgccgggaggacggagggctccatggacgcggccaacctgttcaagccaatgctcgcgaggggccagctccggtgcatcggcgccacgacgctggaggagtaccgcaagtacgtcgagaaggacgccgcgttcgagaggcggttccagcaggtgttcgtcgcggagccgagcgtcccggacaccatcagcatcctgcgaggcctcaaggagaagtacgaggggcaccacggtgtgaggatccaggaccgcgcgctcgtcgtcgccgcgcagctctcggcgaggtacatcatgggacgccacctgcctgacaaagcgatcgacctcgtcgacgaggcctgcgcgaacgtgagggtgcagctggacagccagccagaggagatcgacaacctcgagaggaagaggattcagctggaggtggagcaccacgcgctggagaaggagaaggacaaggcaagcaaggcccggcttgtcgaggtcaagaaagagctggacgatctgagggacaagctgcagccattgacgatgaagtacaggaaggagaaggagaggatcgacgagatcaggaagctgaagcagcgccgcgaggagctccagttcacgctgcaggaggccgagcgccggatggacctcgcccgcgtcgccgacctcaagtacggcgcgctccaggagatcgacgtcgccatcgcgaagctcgagagcgagacgggggagaacctgatgctcaccgagaccgtcggccccgagcagatcgccgaggtggtgagccgctggaccggcatcccggtgacccggctcggccagaacgacaaggagaggctcgtcggcctcgccgacaggctgcaccagagggtggtcggccaggcggaggccgtgagcgccgtcgccgaggcggtgctgaggtcgcgcgccggacttggccggccgcagcagcccaccggctcgtttctcttcctcggtcccaccggcgtcggcaagaccgagctcgccaaggccctcgccgagcagctgttcgacgacgagaacctgctcgtccgcatcgacatgtccgagtacatggagcagcactccgtcgctcgcctcatcggagcaccacctggctacgtcggccatgaggaaggtgggcagctgacggagcaagtgcggcggcggccgtacagcgtgatcctgttcgacgaggtcgagaaggcgcacgtcgcggtgttcaacactctgctccaggttctcgacgacgggaggctcaccgacgggcaaggccgcacggtggacttcaggaacaccgtgatcatcatgacctccaacctcggcgccgagcacctcctcgccggcatggtcggcaagaactccatgaaggtcgcccgtgaccttgtcatgcaggaggtgaggaggcacttccgtcctgagctcctgaaccggctcgacgagattgtgatattcgatcccctgtcccacgagcaactcaggaaggtcgcccgtctccagatgaaggacgtcgccgtccggctcgccgagaggggtgtcgccctggccgtcaccgacgccgcgctggacgtcattctgtctctgtcctatgatccggtttatggcgcgaggccgatcaggaggtggatcgagaagagggtggtgacgcagctgtccaagatgctgatccaggaggagatcgacgagaactgcacggtgtacatcgacgcggcgccgcacaaggacgagctggcctatagggtggacaaccgcggggggttggtgaacgccgagacggggcagaagtcggacatcctcatccaggtgcccaacggcgccgccaccgggagcgacgccgcgcaggcggtgaagaagatgaggatcatggaggacgaggaggacggcatggacgaagagtatacttgcagggtgcagtttttgttcctcaactggaacgaagttacagatggagcatctactgttgataaattgtccggctggaagtctctactatcagattggatagctgggcataagagcaacatcgaaagggcttcaggtccttggaagccccactga

SEQ ID NO: 33815 - protein, 947 aa, Oryza sativa subsp
MASEAGHAQLTPLHLTAALAADKGGILRQAISQASGGDAGAPDSFERVVSGALKKLPSQSPPPDSVPASTALIKVIRRAQSAQKKRGDSHLAVDQLLLGLLEDSLISDCLKEAGVSAARVRAELEKLRGGEGRKVESASGDTNFQALKTYGRDLVEQAGKLDPVIGRDEEIRRVVRILSRRTKNNPVLIGEPGVGKTAVVEGLAQRIVRGDVPSNLLDVRLIALDMGALVAGAKYRGEFEERLKAVLKEVEEAEGKVILFIDEIHLVLGAGRTEGSMDAANLFKPMLARGQLRCIGATTLEEYRKYVEKDAAFERRFQQVFVAEPSVPDTISILRGLKEKYEGHHGVRIQDRALVVAAQLSARYIMGRHLPDKAIDLVDEACANVRVQLDSQPEEIDNLERKRIQLEVEHHALEKEKDKASKARLVEVKKELDDLRDKLQPLTMKYRKEKERIDEIRKLKQRREELQFTLQEAERRMDLARVADLKYGALQEIDVAIAKLESETGENLMLTETVGPEQIAEVVSRWTGIPVTRLGQNDKERLVGLADRLHQRVVGQAEAVSAVAEAVLRSRAGLGRPQQPTGSFLFLGPTGVGKTELAKALAEQLFDDENLLVRIDMSEYMEQHSVARLIGAPPGYVGHEEGGQLTEQVRRRPYSVILFDEVEKAHVAVFNTLLQVLDDGRLTDGQGRTVDFRNTVIIMTSNLGAEHLLAGMVGKNSMKVARDLVMQEVRRHFRPELLNRLDEIVIFDPLSHEQLRKVARLQMKDVAVRLAERGVALAVTDAALDVILSLSYDPVYGARPIRRWIEKRVVTQLSKMLIQEEIDENCTVYIDAAPHKDELAYRVDNRGGLVNAETGQKSDILIQVPNGAATGSDAAQAVKKMRIMEDEEDGMDEEYTCRVQFLFLNWNEVTDGASTVDKLSGWKSLLSDWIAGHKSNIERASGPWKPH

SEQ ID NO: 33816 - DNA, 2355 bp, Oryza sativa subsp
  CDS (1)..(2355)
atggacatacccttctccggcagctgcaagcgggtgttcgaggtcgccgtggagttctcccggaacatgggctgcagcttcatctccccggagcacctcgccctcgcgctcttcaccctcgacgatcccaccaccaacagcctcctcaggagcttgggagcggatccgagtcaactagcatcagtagcgcttacccgactccaagcggagcttgcgaaagattgcagagaacctgcaggagcatcatctttcaaagtacccaagaaatctcctgctggagctggaagatctgccttctcgaaatctttaaattcaaagaaagaaaagggtgcgcttgatcaattttgtttagatctgaccacacaagctagtggcgggtttattgatcctatcattggccgtgaggaggagattgaaagagtagttcagataatatgccgacggacaaagaacaatcctattcttttgggtgaggcaggtgttggcaaaactgcaatcgctgaagggttggctcttcgaattgcaaatggagatgtccccatttaccttgtggcaaagcgtataatgtcattggacgttggtctacttattgctggtgcaaaagaaagaggtgaactggagtccagggttactagtttaattcgtgaagtccgggaagcaggggatgttattcttttcattgatgaggttcacaatcttattggatctggcactgttggaaagggtaagggtgctggccttgacattggcaacttgctgaagcccccacttgctagaggtgaattgcagtgcattgcagctacaactctagatgaacacagaatgcattttgagaaggataaggctttggctcgccgcttccagccagtattagtagaggagcctagtcaggatgatgctgtgaagatattacttggtcttcgtgaaaaatatgaaacatatcacaaatgcaaatttaccttagaagccatcaatgcagcagtttatctgtcagcaagatatattcctgacaggcagctccctgacaaggccatcgatctgattgatgaagctggcagtagagctcgaatggaatcatttaataggaagaaagaagggcagtcttcaatcctcttaaagtcgccagatgaatactggcaagagataagagctgctcaaaacatgcatgaagtggtgtcatcaaaccagatgaagtattcccctcgtcaagagaatggcagtgctgccattaaagcaccaagcgaggacatgaatgagttgacatctgaactccaagttgaggaaccaattgtagttggaacagaggaaattgcaagagttgcctcattgtggtcagggataccagtccagcagttaactgctgatgatagaaagcttctcgtaggactagatggtgaactcagaaagcgtgtgattggtcaagatgatgctgttatggcaatatctagagcggtgaagagatcacgtgttggcctcaatgatcctgacagacctattgccactctacttttctgtggtccgacaggagttggtaaaactgagcttactaaagctctagcagctagttattttggatcggaatctgctatgcttagattagacatgagcgagtatatggagaggcacactgtgagcaagctcataggctctcctccagggtacatcggatatggtgaaactggtactctgacagaagctgtcaggagaaagccatttactgtagtattacttgatgagatagagaaagctcaccctgatattttcaacattcttctccaaatttttgaagatgggcatctgtcggactcacagggccgcagagtgtccttcaagaacacattgattgtcatgacatcaaatattggttctacatcaatttcaaagggaagacgaagcatgggtttcatgacagaagatactgaatcaagctcatatgttgcaatgaaatctctagtaatggaagagttgaaggcatttttccgtccagaattgctcaacagaatcgatgagatggttgtattccgtcccttagagaaaactcagatgctagcaattcttgatatcatcctacaagaagtgaagggtaggctgttagcccttggaataggcctcgaggtgtccgatgcaatgaaggacctgatttgcgaagaaggctatgacaagagctacggtgcgcggccactgaggagagccgtcacccacctgattgaggatgtgatcagcgaagcaattctatttggcgaatacaagcctggggacacgatactgatggatattgatgccggggggaaactttgcatgagccacctgaatgagaaggttgtccagttgtctgatccgacacggacattctga

SEQ ID NO: 33817 - protein, 784 aa, Oryza sativa subsp
MDIPFSGSCKRVFEVAVEFSRNMGCSFISPEHLALALFTLDDPTTNSLLRSLGADPSQLASVALTRLQAELAKDCREPAGASSFKVPKKSPAGAGRSAFSKSLNSKKEKGALDQFCLDLTTQASGGFIDPIIGREEEIERVVQIICRRTKNNPILLGEAGVGKTAIAEGLALRIANGDVPIYLVAKRIMSLDVGLLIAGAKERGELESRVTSLIREVREAGDVILFIDEVHNLIGSGTVGKGKGAGLDIGNLLKPPLARGELQCIAATTLDEHRMHFEKDKALARRFQPVLVEEPSQDDAVKILLGLREKYETYHKCKFTLEAINAAVYLSARYIPDRQLPDKAIDLIDEAGSRARMESFNRKKEGQSSILLKSPDEYWQEIRAAQNMHEVVSSNQMKYSPRQENGSAAIKAPSEDMNELTSELQVEEPIVVGTEEIARVASLWSGIPVQQLTADDRKLLVGLDGELRKRVIGQDDAVMAISRAVKRSRVGLNDPDRPIATLLFCGPTGVGKTELTKALAASYFGSESAMLRLDMSEYMERHTVSKLIGSPPGYIGYGETGTLTEAVRRKPFTVVLLDEIEKAHPDIFNILLQIFEDGHLSDSQGRRVSFKNTLIVMTSNIGSTSISKGRRSMGFMTEDTESSSYVAMKSLVMEELKAFFRPELLNRIDEMVVFRPLEKTQMLAILDIILQEVKGRLLALGIGLEVSDAMKDLICEEGYDKSYGARPLRRAVTHLIEDVISEAILFGEYKPGDTILMDIDAGGKLCMSHLNEKVVQLSDPTRTF

SEQ ID NO: 33818 - DNA, 2898 bp, Oryza sativa subsp
  CDS (1)..(2898)
atgaatccggacaacttcacgcacaagaccaacgaggcgctcgtggcggcgcacgagatagcgtcggaggcggggcacgcgcagctgacgccgctgcacctggtggcggcgctggcggcggacaagggcgggatactccggcaggcgatctcgcaggcgtccggcggggacgccggcgcgccggactcgttcgagcgcgtggtgagcggggcgctcaagaagctgccctcgcagtcgccgccgccggacagcgtgccggcgtccacggcgctgatcaaggtcatccgccgcgcgcagtccgcgcagaagaagcgcggggactcccacctcgccgtcgaccagctgctgctgggcctcctggaggactcgctaatctccgactgcctcaaggaggccggcgtgtccgcggcgcgggtgcgcgccgagctcgagaagctccgtggcggggagggccgcaaggtggagtccgcgtccggcgacaccaacttccaggcgctcaagacctacggccgcgacctcgtcgagcaggccggtaagctcgaccccgtcattggccgcgacgaggagatccgccgcgtcgtgcgcatcctgtcgcgccgcacgaagaacaaccccgtactcatcggcgagcccggcgtcggcaagacggccgtcgtggagggcctcgcgcagcgcatcgtgcgcggggacgtgcccagcaacctgctcgacgtccgcctcatcgcgctcgacatgggcgcgctcgtcgccggcgccaagtaccgcggcgagttcgaagaacggctcaaggccgtgctcaaggaggtggaggaggccgagggcaaggtgatcctcttcatcgacgagatacacctcgtcctcggcgccgggaggacggagggctccatggacgcggccaacctgttcaagccaatgctcgcgaggggccagctccggtgcatcggcgccacgacgctggaggagtaccgcaagtacgtcgagaaggacgccgcgttcgagaggcggttccagcaggtgttcgtcgcggagccgagcgtcccggacaccatcagcatcctgcgaggcctcaaggagaagtacgaggggcaccacggtgtgaggatccaggaccgcgcgctcgtcgtcgccgcgcagctctcggcgaggtacatcatgggacgccacctgcctgacaaagcgatcgacctcgtcgacgaggcctgcgcgaacgtgagggtgcagctggacagccagccagaggagatcgacaacctcgagaggaagaggattcagctggaggtggagcaccacgcgctggagaaggagaaggacaaggcaagcaaggcccggcttgtcgaggtcaagaaagagctggacgatctgagggacaagctgcagccattgacgatgaagtacaggaaggagaaggagaggatcgacgagatcaggaagctgaagcagcgccgcgaggagctccagttcacgctgcaggaggccgagcgccggatggacctcgcccgcgtcgccgacctcaagtacggcgcgctccaggagatcgacgtcgccatcgcgaagctcgagagcgagacgggggagaacctgatgctcaccgagaccgtcggccccgagcagatcgccgaggtggtgagccgctggaccggcatcccggtgacccggctcggccagaacgacaaggagaggctcgtcggcctcgccgacaggctgcaccagagggtggtcggccaggcggaggccgtgagcgccgtcgccgaggcggtgctgaggtcgcgcgccggacttggccggccgcagcagcccaccggctcgttcctcttcctcggtcccaccggcgtcggcaagaccgagctcgccaaggccctcgccgagcagctgttcgacgacgagaacctgctcgtccgcatcgacatgtccgagtacatggagcagcactccgtcgctcgcctcatcggagcaccacctggctacgtcggccatgaggaaggtgggcagctgacggagcaagtgcggcggcggccgtacagcgtgatcctgttcgacgaggtcgagaaggcgcacgtcgcggtgttcaacactctgctccaggttctcgacgacgggaggctcaccgacgggcaaggccgcacggtggacttcaggaacaccgtgatcatcatgacctccaacctcggcgccgagcacctcctcgccggcatggtcggcaagaactccatgaaggtcgcccgtgaccttgtcatgcaggaggtgaggaggcacttccgtcctgagctcctgaaccggctcgacgagattgtgatattcgatcccctgtcccacgagcaactcaggaaggtcgcccgtctccagatgaaggacgtcgccgtccggctcgccgagaggggtgtcgccctggccgtcaccgacgccgcgctggacgtcattctgtctctgtcctatgatccggtttatggcgcgaggccgatcaggaggtggatcgagaagagggtggtgacgcagctgtccaagatgctgatccaggaggagatcgacgagaactgcacggtgtacatcgacgcggcgccgcacaaggacgagctggcctacagggtggacaaccgcggggggttggtgaacgccgagacggggcagaagtcggacatcctcatccaggtgcccaacggcgccgccaccgggagcgacgccgcgcaggcggtgaagaagatgaggatcatggaggacgaggacggcatggacgaagagtatacttgcagggtgcagtttttgttcctcaactggaacgaagttacagatggagcatctactgttgataaattgcccggctggaagtctctactatcagattggatagctgggcataagagcaacatcaaaagggcttcaggtccttggaagccccactga

SEQ ID NO: 33819 - protein, 965 aa, Oryza sativa subsp
MNPDNFTHKTNEALVAAHEIASEAGHAQLTPLHLVAALAADKGGILRQAISQASGGDAGAPDSFERVVSGALKKLPSQSPPPDSVPASTALIKVIRRAQSAQKKRGDSHLAVDQLLLGLLEDSLISDCLKEAGVSAARVRAELEKLRGGEGRKVESASGDTNFQALKTYGRDLVEQAGKLDPVIGRDEEIRRVVRILSRRTKNNPVLIGEPGVGKTAVVEGLAQRIVRGDVPSNLLDVRLIALDMGALVAGAKYRGEFEERLKAVLKEVEEAEGKVILFIDEIHLVLGAGRTEGSMDAANLFKPMLARGQLRCIGATTLEEYRKYVEKDAAFERRFQQVFVAEPSVPDTISILRGLKEKYEGHHGVRIQDRALVVAAQLSARYIMGRHLPDKAIDLVDEACANVRVQLDSQPEEIDNLERKRIQLEVEHHALEKEKDKASKARLVEVKKELDDLRDKLQPLTMKYRKEKERIDEIRKLKQRREELQFTLQEAERRMDLARVADLKYGALQEIDVAIAKLESETGENLMLTETVGPEQIAEVVSRWTGIPVTRLGQNDKERLVGLADRLHQRVVGQAEAVSAVAEAVLRSRAGLGRPQQPTGSFLFLGPTGVGKTELAKALAEQLFDDENLLVRIDMSEYMEQHSVARLIGAPPGYVGHEEGGQLTEQVRRRPYSVILFDEVEKAHVAVFNTLLQVLDDGRLTDGQGRTVDFRNTVIIMTSNLGAEHLLAGMVGKNSMKVARDLVMQEVRRHFRPELLNRLDEIVIFDPLSHEQLRKVARLQMKDVAVRLAERGVALAVTDAALDVILSLSYDPVYGARPIRRWIEKRVVTQLSKMLIQEEIDENCTVYIDAAPHKDELAYRVDNRGGLVNAETGQKSDILIQVPNGAATGSDAAQAVKKMRIMEDEDGMDEEYTCRVQFLFLNWNEVTDGASTVDKLPGWKSLLSDWIAGHKSNIKRASGPWKPH

SEQ ID NO: 33820 - DNA, 2841 bp, Vitis vinifera
  CDS (1)..(2841)
atggaagtatcatcatcatcgttgtcatcctcctcacccctatcagttcactggagaagggatttctccccactacttggtcgagtttctctcgactgccatggcagccgcaagctcccaaatcgccctttctcttcttccacttgttcttgctttggaatttcaatctcccagcggccccattcccattcctttgtgttcagaaaatcctctccacgcatttccgcagtctttgagcgcttcactgaacgagccattaaggctgtcatcttttcccaaagagaagcgaaagctttgggcaggaatatggtattcacccagcatcttttattgggtttggtcgctgaggatcgtagtctcgatggctttcttggatctggcatcaccatagacgatgcacgcgatgctgttcgcagcatttggcatgattataacgacagcagcatcatttctggaattcccagttcccaaacctctgttgcctcctccactgacgtccccttttccattagcacaaagcgagtgtttgaagccgcaattgagtactctaggactatgggttataatttcattgctcccgagcatatcgctattgggttatttacagttgatgacggcagtgctggtcgtgtcctcaagagattgggggcaaatgttaatcacttggcagctgtggcagtctccaggcttcaaggagaacttgccaaagatggtagtgaaccatctgctacattcaaagggatgcagggaaaatctttttctggaaaagcagccattgtgaaatcctcaggaaaaaagaaggagaaaagtgctctggctcaattctgtgtagaccttactgctcgtgctactgatggactcattgatcctgtaattggccgagacatggaagttcagagggttgtccaaatactttgccgaagaactaaaaataaccccattcttctaggtgaaagcggggttgggaaaacagctattgctgaaggattggcaattagtattgcagaggcagatgttccctcttttctcttgacaaaacgcataatgtccttggatataggtctattaatggcaggcacaaaggagaggggagaattagaggcacgtgttactactttaataagtgatattttgaaatcaggtaatatcattcttttcattgatgaagtccacatgcttgttgggtctggcattgctggacgaggaaacaaggggtcaggtctagacattgctagtctattgaagccctctcttgggaggggacagttacagtgttttgcatccactaccatagatgagtacgtgaaactttttgagaaggataaagcattagcaagaagattccaacctgtgttgatcaatgaaccaagccaggaggaagctgttaggatactgttgggcctgcgggagaaatatgaggcccatcacaaatgcagattcacattggaggccataaatgctgctgtgcacctatcagcaagatatattcctgataggcgtcttcctgataaagcaattgatcttattgatgaggcaggaagtaaagctcgtatggaagcatacaagaggaagaaggaaaagcaaacttctgtgcttttaaaatcaccagatgattattggcaagaaattagggctgttaaggccatgcatgaaatggtcatggctagtaaactgaaaaattgtaatggtgcttcttgcatggaagatggtagcactgtcctttttgaatcccctttgccttcaatgtcagatgataatgaacctatagtggtgggacccaatgaaatagcagtagttgcatcactctggtcagggataccagttcagcagatcactgctgatgaaagaatgctcctggtgggtcttcatgagcagcttaggaaacgggtggttggtcaagataatgctattgcttccatttctcgtgctgttaagagatcccgggttggcttgaaggaccccaacagacccattgcagcaatgcttttttgtggcccaactggggttggcaaaactgaattggcaaaagctttagcggcatgctattttggatcagaggcagcaatggtaagattggacatgagtgaatatatggagcagcatagtgtgagtaagttgataggatctcccccaggttatgtaggctatggagagggaggcactcttacagaagctatcagaaggcaaccttttacagttgtattgcttgatgaaatagagaaagcccatcccgatatattcaatattctcctccaaatgtttgaagatggtcacttaacagattctcagggtcggagggtgttgtttaggaatgcattggttgtcatgacctccaatgtgggttctgctgccattgcaaagggtagacaaagctccattggtttctcaattgcagatgatgaaccaacttcatatgctgggatgaaagcactggtaatggaagaactgaaggcatattttcgtcctgagttactcaacagattagatgaaatagttgtgttccatcccctggaaaaggctcagatgctggagattctgaataccatgctccaggaggtgaaggaaaggctcagctctctgggaattggtatggaagtgtcagtgtcggttatagacctcttgtgccaacaaggctatgacaaaaactatggtgcccgtccactcaggagggctgttaccttaattatagaagatcccttgagtgaagcacttctcacggaagaataccagcctggtgacattgctgttgttgatttggatgcttcaggaaacccatttgtaaggaagcagtcaaataggagaatccacctctctgatacagcctatgacgaaaaattgtaa

SEQ ID NO: 33821 - protein, 946 aa, Vitis vinifera
MEVSSSSLSSSSPLSVHWRRDFSPLLGRVSLDCHGSRKLPNRPFSSSTCSCFGISISQRPHSHSFVFRKSSPRISAVFERFTERAIKAVIFSQREAKALGRNMVFTQHLLLGLVAEDRSLDGFLGSGITIDDARDAVRSIWHDYNDSSIISGIPSSQTSVASSTDVPFSISTKRVFEAAIEYSRTMGYNFIAPEHIAIGLFTVDDGSAGRVLKRLGANVNHLAAVAVSRLQGELAKDGSEPSATFKGMQGKSFSGKAAIVKSSGKKKEKSALAQFCVDLTARATDGLIDPVIGRDMEVQRVVQILCRRTKNNPILLGESGVGKTAIAEGLAISIAEADVPSFLLTKRIMSLDIGLLMAGTKERGELEARVTTLISDILKSGNIILFIDEVHMLVGSGIAGRGNKGSGLDIASLLKPSLGRGQLQCFASTTIDEYVKLFEKDKALARRFQPVLINEPSQEEAVRILLGLREKYEAHHKCRFTLEAINAAVHLSARYIPDRRLPDKAIDLIDEAGSKARMEAYKRKKEKQTSVLLKSPDDYWQEIRAVKAMHEMVMASKLKNCNGASCMEDGSTVLFESPLPSMSDDNEPIVVGPNEIAVVASLWSGIPVQQITADERMLLVGLHEQLRKRVVGQDNAIASISRAVKRSRVGLKDPNRPIAAMLFCGPTGVGKTELAKALAACYFGSEAAMVRLDMSEYMEQHSVSKLIGSPPGYVGYGEGGTLTEAIRRQPFTVVLLDEIEKAHPDIFNILLQMFEDGHLTDSQGRRVLFRNALVVMTSNVGSAAIAKGRQSSIGFSIADDEPTSYAGMKALVMEELKAYFRPELLNRLDEIVVFHPLEKAQMLEILNTMLQEVKERLSSLGIGMEVSVSVIDLLCQQGYDKNYGARPLRRAVTLIIEDPLSEALLTEEYQPGDIAVVDLDASGNPFVRKQSNRRIHLSDTAYDEKL

SEQ ID NO: 33822 - DNA, 2673 bp, Vitis vinifera
  CDS (1)..(2673)
  misc_feature (1229)..(1229): w is a or t
atggctagggctctggttcagtcaaccaatatctttgcttcagttgctgatgggaagcatggaaagtttcaagggtctgagagaaccaaaaagtctgtcaaaatgatgtgtaatgccatgatttccattccagagtggcagctgctatttctggttcggggaggaaaggctagtcgatgtgtagctagagctatgtttgagcgcttcactgagaaagcaattaaagttattatgcttgcacaagaggaagcaagaagacttggtcacaattttgttggcactgagcagattctgttgggtcttattggggaaggcactggtattgctgctaaggtccttaaatccatgggaatcaatctgaaagatgcccgtgtggaagtggaaaagataattggaaggggcagtggatttgttgctgtcgagattccatttacgcctcgagcaaagcgtgttttggaactttcgctggaggaagctcggcaacttggccataactatattggatcggagcacttgcttctgggactacttcgtgaaggcgaaggtgtagctgcccgtgttcttgagaatttaggtgctgaccctagtaatattcgcactcaggcaagcaaagctgttggtgctggtgttggaggaggaaccactggcaataagatgccaacgttggaggagtatggtaccaatttaacaaagctggcagaggagggtaaattggaccctgttgttggaaggcagcaacaaatagagcgtgtaacccaaattttgggtcgacggactaaaaataacccatgcctcattggagaacctggcgttggaaaaacagcaattgcagaaggccttgcacaaagaattgcaaatggtgatgttccagaaacgattgaggggaagaaggttataacattggatatgggtctccttgttgctggaacaaaatatcgcggagagtttgaggaaagattgaagaagctaatggaagaaatcaaacaaagtgatgagataatactcttcattgatgaggtacacaccttaattggagcaggagcagcagagggggcgattgatgctgctaacatcttgaagccagctcttgcaaggggtgaactgcagtgtatcggagccacaacactggatgaatacaggaagcacattgagaaagaccctgccttggaaaggagattccagccagtcaaagtgcctgaaccatctgtggatgaaaccatacaaatttwgaaagggcttcgggagcggtatgagatccatcacaagctccggtatacggatgaagctttggtatctgctgcccgactgtcataccagtacattagtgatcgatttcttcctgataaggcaattgacttgatcgacgaagctggttctcgggttcgacttcgtcatgcacagcttccagaggaagcaagagagcttgagaaagagctcagacagatcactaaagagaagaatgaagcagtacgaagccaagattttgagaaggccggtgaattacgtgatagagaaatggatctaaaggcacagatctcaaccctcatagacaaaggcaaggagatgaccaaggcagagactgaggcaggagatataggtcctatggtgacagaagtggacattcagcacattgtatctgcttggactggcatccctgttgagaaagtgtcaactgatgaatctgatcgtctcctcaagatggaggagaccctccacagacgagtcattggtcaggatgaagctgttaaagccatcagccgtgctattcgccgagctcgtgttggactcaagaatcccaaccgtccaattgccagcttcatcttttctggtccaactggtgtaggaaagtcagaattggcaaaagcactagctgcttactattttggttctgaagaagccatgatccgtcttgatatgagtgagttcatggagagacacacagtctccaaactgattggttcacctcctggttatgttggttatactgagggtggtcagttgactgaggctgttagacgccgaccttatacagtggttctctttgatgaaattgagaaggctcaccctgatgtcttcaacatgatgcttcagattcttgaggatggcaggttgacagacagcaagggccgaactgtggacttcaagaatactcttttgataatgacatccaatgttggaagcagtgtgatcgagaagggaggccgcaggataggatttgatctcgattacgatgaaaaggatagcagttacaaccgaattaagagcttggtgacagaggaactgaaacaatatttcaggccagagttcttgaatagattggatgagatgattgttttccgacagctcactaagctggaggtgaaggacattgctgatataatgctgaaggaggtgtttgaaaggctgaaggccaaggacatagaacttcaggtgaccgagaggtttagagatagagtggtggatgaagggtacaaccccagttatggtgcaaggccactgagaagagccataatgagacttttggaggacagcatggctgagaagatgcttgcaagggaaatcaaagaaggcgattcggtaattgtggatgttgattctgatggaaatgtcactgtgctcaatggcagcagtggtgctccacctgagtcattaccagaggcaatgcctgtgtaa

SEQ ID NO: 33823 - protein, 890 aa, Vitis vinifera
  misc_feature (410)..(410): The Xaa at location 410 stands for Stop, or Leu.
MARALVQSTNIFASVADGKHGKFQGSERTKKSVKMMCNAMISIPEWQLLFLVRGGKASRCVARAMFERFTEKAIKVIMLAQEEARRLGHNFVGTEQILLGLIGEGTGIAAKVLKSMGINLKDARVEVEKIIGRGSGFVAVEIPFTPRAKRVLELSLEEARQLGHNYIGSEHLLLGLLREGEGVAARVLENLGADPSNIRTQASKAVGAGVGGGTTGNKMPTLEEYGTNLTKLAEEGKLDPVVGRQQQIERVTQILGRRTKNNPCLIGEPGVGKTAIAEGLAQRIANGDVPETIEGKKVITLDMGLLVAGTKYRGEFEERLKKLMEEIKQSDEIILFIDEVHTLIGAGAAEGAIDAANILKPALARGELQCIGATTLDEYRKHIEKDPALERRFQPVKVPEPSVDETIQIXKGLRERYEIHHKLRYTDEALVSAARLSYQYISDRFLPDKAIDLIDEAGSRVRLRHAQLPEEARELEKELRQITKEKNEAVRSQDFEKAGELRDREMDLKAQISTLIDKGKEMTKAETEAGDIGPMVTEVDIQHIVSAWTGIPVEKVSTDESDRLLKMEETLHRRVIGQDEAVKAISRAIRRARVGLKNPNRPIASFIFSGPTGVGKSELAKALAAYYFGSEEAMIRLDMSEFMERHTVSKLIGSPPGYVGYTEGGQLTEAVRRRPYTVVLFDEIEKAHPDVFNMMLQILEDGRLTDSKGRTVDFKNTLLIMTSNVGSSVIEKGGRRIGFDLDYDEKDSSYNRIKSLVTEELKQYFRPEFLNRLDEMIVFRQLTKLEVKDIADIMLKEVFERLKAKDIELQVTERFRDRVVDEGYNPSYGARPLRRAIMRLLEDSMAEKMLAREIKEGDSVIVDVDSDGNVTVLNGSSGAPPESLPEAMPV

SEQ ID NO: 33824 - DNA, 2721 bp, Vitis vinifera
  CDS (1)..(2721)
  misc_feature (1140)..(1140): y is t or c
atgaatccagagaaattcacccacaagacaaatgagactcttgctggggctcatgagcttgctatgaactctggccatgctcagctcacaccacttcacgttgctgtggctttgataactgatcccaatggcatcctccggcaagccataatcggtgctggtggaaatgaggaggctgccaactctgttgaaagagtcttcaataaagctctgaagaaactcccatctcagagtcctcctccagatgaaatcccagtaagcactactctaatcaaagtggttcgaagagcccaatcttcacaaaagtcacggggtgacacccatttagcagttgatcaattgattcttggccttcttgaggattcccaaattggtgatttgcttaaagaagccggggttagtacttctagagtgaaatctgaggttgagaagcttcgagggaaagaaggtaagaaggtggaaagtgcttctggggacaccacattccaggcattgaagacttatgggcgtgaccttgttgagcaagctggaaagcttgatcctgtcattggccgggacgaagagattcggagggtcatcaggattctttcaaggaggaccaagaacaaccctgttcttattggagaaccaggtgtgggtaagactgctgttgttgaaggattagctcagagaattgtaagaggggacgttcccagtaatctcgctgaagtgaggcttatagcattggatatgggtgctttggttgctggggcaaaatatagaggagaattcgaggagaggttgaaatctgttttgaaagaagtggaagaggcagaagggaaagtgattttattcattgatgaaattcaccttgttcttggtgctggtcggactgaaggatctatggatgctgctaacttgtttaagcccatgcttgccagaggtcagctacgctgcatcggagcaacgacccttgaggaatacagaaagtatgttgagaaagatgccgcttttgagaggcggttccagcaagtttatgtagctgagcccagcgtccctgacacaataagcattcttcgagggctaaaagaaaggtatgaagggcatcatggtgttcgaattcaggaccgagctcttgtagttgcagcccaactatcaagycgatacatcactgacaaggcaatcgacctggttgatgaagcttgcgccaatgtgagagttcaacttgatagccagcccgaagaaatcgacaatttggaaaggaagagaatgcaattagaagttgaacttcatgctcttgaaaaggagaaggacaaagccagtaaagctcgtcttgttgaagtccgcagagagcttgacgacttgagggacaagcttcaacccttgatgatgaagtacaaaaaggagaaagaaaggattgatgagcttcgcaggctaaaacagaaaagagaggagctcttgtttgctttacaagaggctgaaagaagatatgatttagccagagctgctgatttgcgatatggggcaattcaagaagtggaggctgctatagcaaaccttgaaggaaccactgatgagaacatgatgttaacggagactgttgggcctgagcagattgctgaggtggtgagccgctggactggcatccctgtcactaggcttggacaaaatgataaagaaaggttaattgggcttgcggagaggctgcatcagagagtggtgggacaggatcaggcagtcagtgctgtggcagaggctgtcttgagatcgagggctgggttaggaaggccacaacaacccactggttcgttcctcttcttgggtccaactggtgttggtaagactgagcttgccaaggccctggctgaacagctctttgatgatgaaaatcttttggtgagaattgacatgtccgagtatatggagcagcattcagtttcaagattgattggggctcctcctggatatgttggacatgatgaaggtgggcaactcacagaggcagtaagaaggaggccttatagtgttgtactgttcgatgaagtagagaaagcacatatcgccgtattcaataccctcctccaggttttagacgatggaaggttaactgatggccaaggccgcactgtagacttcacaaacacagtgatcatcatgacttcaaaccttggagctgagcatctcctctcgggtttagtaggcaagtgtacaatgcaagatgctcgtgaccgggtgatgcaggaggtgagaaggcacttcaggccagagttgcttaaccggctggatgaaattgtggtatttgatcccctctcacatgaccaactgagaaaggttgccaggctacaaatgaaggatgttgcaagccgcttggcggagaggggcattgctctggctgtgactgatgcagcattggatgttgttctagcagagagttatgatccggtttacggtgcaagacccattaggagatggctggagaagaaggtggtgactgagctatcaaagatgctcataagggaggagatcgatgaaaactcaactgtttatatagatgcgggagtgtcaggaaaggggttggcgtaccgagtagaaaacaatggggggctggtgaatgcatccaccggacaaaagtcagacgtgttgattcggatcccaaacgggccaagaagcgatgctgcccaagcggtgaagaagatgaagatcgaagaaatagaagacgaagaggatgagatggatctataa

SEQ ID NO: 33825 - protein, 906 aa, Vitis vinifera
MNPEKFTHKTNETLAGAHELAMNSGHAQLTPLHVAVALITDPNGILRQAIIGAGGNEEAANSVERVFNKALKKLPSQSPPPDEIPVSTTLIKVVRRAQSSQKSRGDTHLAVDQLILGLLEDSQIGDLLKEAGVSTSRVKSEVEKLRGKEGKKVESASGDTTFQALKTYGRDLVEQAGKLDPVIGRDEEIRRVIRILSRRTKNNPVLIGEPGVGKTAVVEGLAQRIVRGDVPSNLAEVRLIALDMGALVAGAKYRGEFEERLKSVLKEVEEAEGKVILFIDEIHLVLGAGRTEGSMDAANLFKPMLARGQLRCIGATTLEEYRKYVEKDAAFERRFQQVYVAEPSVPDTISILRGLKERYEGHHGVRIQDRALVVAAQLSSRYITDKAIDLVDEACANVRVQLDSQPEEIDNLERKRMQLEVELHALEKEKDKASKARLVEVRRELDDLRDKLQPLMMKYKKEKERIDELRRLKQKREELLFALQEAERRYDLARAADLRYGAIQEVEAAIANLEGTTDENMMLTETVGPEQIAEVVSRWTGIPVTRLGQNDKERLIGLAERLHQRVVGQDQAVSAVAEAVLRSRAGLGRPQQPTGSFLFLGPTGVGKTELAKALAEQLFDDENLLVRIDMSEYMEQHSVSRLIGAPPGYVGHDEGGQLTEAVRRRPYSVVLFDEVEKAHIAVFNTLLQVLDDGRLTDGQGRTVDFTNTVIIMTSNLGAEHLLSGLVGKCTMQDARDRVMQEVRRHFRPELLNRLDEIVVFDPLSHDQLRKVARLQMKDVASRLAERGIALAVTDAALDVVLAESYDPVYGARPIRRWLEKKVVTELSKMLIREEIDENSTVYIDAGVSGKGLAYRVENNGGLVNASTGQKSDVLIRIPNGPRSDAAQAVKKMKIEEIEDEEDEMDL

SEQ ID NO: 33826 - DNA, 2703 bp, Pichia guilliermondii
  CDS (1)..(2703)
atggaagaaacacagtttactgacaatgcattgaacatcataacgaatgctacgcagatagctaaggagggaagccatgctcaattgatgcctttacatctcttggcagcaatggttccttccgacaatgagtcttcgaccccatacttgaagacgttgataacgaaggctaggtatgaatggccggattttgaaagaatagtcaaccgcagggtggtgagacttccatcgcagaatccacctccagatactccagcgccaagttatgctacgggacaagtattgcagaaagctgcaaaattcaagacccagcaaaaggacaattatattgctcaggatcatatattattggcattgcttgaggacgctagtatcaaggaaatattcaaggaagccggaatcaacacggagaccatactgagcgaagtcatggagatgagaaagggccagagaattgacagtcgaactgccgactcgtcgcaaacgtttgagttcttgagcaagtattgcgaagacttgacggaaaaggctcgtgagggaagaatagaccctgtcattggtcgtgaagaagagatcaggagggtcatcagagtgttggcaagaagaacaaagtccaactcggtcctcattggtgaggctggtgttggtaagacatctattgtggaaggtgtggcccagagaattgttgacggggacgtgcctaatgtgttatcccaggcacgtttgttcgctctcgatctcggcgcattgaccgctggtgcaaagtacaagggtgaattcgaagagagaatcaagggagtattgaaagatatcgagaactcgaaagacatgatcatccttttcatcgacgaaatccacatgttaatgggcgatggaaagtctgacgctgctaacttgttgaaacccatgttagccagaggttcactccactgtattggtgctaccacattcagtgaatatcaaaagttcattgctaaggatggtgcctttgagagaagattccaaaagattgacgttcctgccgctactgtcaacgagactgtggctattttgagaggcttgcaaccaagatacgaaatccaccacggagtgcgtattttggatagtgctcttgtcacagcagctcaattagcttctcgttatttgacctacagaagcttaccagattctgcagtggacctcatagatgaaagtgcagccactgtagctgtcgctcgtgactccaagcccgaagagttggacaatttggagcgtgagcttcacttggttgaggtggaaatcaatgcccttgaaagagatgtggatgcagattctgcctccaaggatcgtctcgagatcgctaagaggaagcaagctgaattgattgaaaagttgaacccattgagagaacaattcaaccaagaacgggcaggacatgaagaattgattgcagccaagagaaagttggatgagcttgaaatcaaagctcatgatgctgaaagacggcacgaaaccgcaaaggctgcagacttgagatactttgccattcctgacgttcagaaacacattcaagagcttgagattaaggtagctgaggaagaggcacaagaaggactggaagccttattaagaaatgttgtcggttcagagcaagtatctgaaactgctgccaagctcacgggaattccagtaaccaaattgactcgtgctgagaattccaaattgatcaacatggagaaagaattggcttctgaggttgttggacagccagaagcagtcaaggcggtttccaatgctatcagattgtcacgctctggacttgccaatccaaaccaaccagcttcattcttgttcctcggtttatcgggttccggtaagactgaattggccaagaagttggccgggttcttgtttgccgatgaaagggccatgataagaattgactgttccgagttgggagacaagtggtccgcctctaaattattgggtgctgctccaggttatgttggttatgaagagggaggaatccttacagaggctttgattcgtcgtccatactctgttgttttgtttgatgaagttgagaaggctgctcctgaggttttgaccgtcttgttgcaggtcttggatgatggtagaatcacttcatctcaaggaaaggtggtgaattgcgccaatgcaatctttattatgacatctaaccttggtgctcagttcatcaacaactcgctgcactccaagatcgatcctcaaaccaaggaattggttatgactgctgtcagaaaccacttcagacccgagttcttaaatcgtatttcgggtatgattgtgttcaaccggttgtctagaaaggccatcgccaagattgtcaagatccggttgaacgaaatacaaaagagatttgcagctaatggcaaagcatttacgttgtcgttggacgatgcagcattggagtacttgtgcaaaaacggttactcctcggatctcggagcacgtcctttgaaccgtcttattcagaatgaaattttgaacaagttggcgatccttcttttgaaaggtcaaatcaaagacaaggagactgctagagtcacacttggctctaaaggcctcgaggttatacctaatcacgatgtcgaagacatggatatgggagatgcggatgacgaaggctggtgggacgttgatgacgatgatgatgacgacgttgttgaaaccctcgattga

SEQ ID NO: 33827 - protein, 900 aa, Pichia guilliermondii
MEETQFTDNALNIITNATQIAKEGSHAQLMPLHLLAAMVPSDNESSTPYLKTLITKARYEWPDFERIVNRRVVRLPSQNPPPDTPAPSYATGQVLQKAAKFKTQQKDNYIAQDHILLALLEDASIKEIFKEAGINTETILSEVMEMRKGQRIDSRTADSSQTFEFLSKYCEDLTEKAREGRIDPVIGREEEIRRVIRVLARRTKSNSVLIGEAGVGKTSIVEGVAQRIVDGDVPNVLSQARLFALDLGALTAGAKYKGEFEERIKGVLKDIENSKDMIILFIDEIHMLMGDGKSDAANLLKPMLARGSLHCIGATTFSEYQKFIAKDGAFERRFQKIDVPAATVNETVAILRGLQPRYEIHHGVRILDSALVTAAQLASRYLTYRSLPDSAVDLIDESAATVAVARDSKPEELDNLERELHLVEVEINALERDVDADSASKDRLEIAKRKQAELIEKLNPLREQFNQERAGHEELIAAKRKLDELEIKAHDAERRHETAKAADLRYFAIPDVQKHIQELEIKVAEEEAQEGLEALLRNVVGSEQVSETAAKLTGIPVTKLTRAENSKLINMEKELASEVVGQPEAVKAVSNAIRLSRSGLANPNQPASFLFLGLSGSGKTELAKKLAGFLFADERAMIRIDCSELGDKWSASKLLGAAPGYVGYEEGGILTEALIRRPYSVVLFDEVEKAAPEVLTVLLQVLDDGRITSSQGKVVNCANAIFIMTSNLGAQFINNSLHSKIDPQTKELVMTAVRNHFRPEFLNRISGMIVFNRLSRKAIAKIVKIRLNEIQKRFAANGKAFTLSLDDAALEYLCKNGYSSDLGARPLNRLIQNEILNKLAILLLKGQIKDKETARVTLGSKGLEVIPNHDVEDMDMGDADDEGWWDVDDDDDDDVVETLD

SEQ ID NO: 33828 - DNA, 2787 bp, Arabidopsis thaliana
  CDS (1)..(2787)
atggctatggccacaagggtgttggctcaatcgactccaccgtctttagcttgttaccagaggaatgttccttcacgtggatctggaagatcgagaagatcggtgaaaatgatgtgtatcatttttaatgtctggttaccaatgcaagggtttatgggattacgtggtaacaatgctttagacactcttggaaaaagtcgtcaagattttcattcgaaggtgcgacaggcaatgaatgtgcccaaggggaaagctagccggtttacggtgaaagcaatgtttgaaagatttacggagaaagctatcaaagttattatgcttgctcaggaggaagctagaagactaggccacaattttgtgggaaccgaacaaattcttcttggtcttattggtgagggtactggaatcgctgctaaagttttgaaatccatggggattaacttaaaagatgcacgtgtggaggttgaaaaaattattggaaggggaagtggctttgttgctgttgaaatcccattcactcctcgtgccaagcgtgttcttgaactctctcttgaggcaactcgccaacttggtcacaattacattggatccgagcaccttttgcttgggttgctacgtgaaggtgaaggagttgcagctcgagtccttgaaaatttaggtgcagatcctagtaatattcgcactcaggtgatacgcatggtgggtgaaaacaatgaagtaactgctaatgttgggggaggaagcagcagcaataagatgccaactcttgaagagtacggaacaaacttgacgaaactggctgaggagggtaaattggacccagttgttggaaggcagccgcagatagaacgtgtggtgcaaattcttggcaggagaaccaagaacaacccttgtcttattggagaacctggtgttggtaagacagctattgctgaaggacttgcacagcgtattgccagtggcgatgtccctgaaactattgaagggaagaaggttataacactcgacatgggtcttctagttgctggaacaaaatatcgtggagagtttgaagagagattgaaaaagcttatggaggaaattagacagagcgatgagataatcttatttatcgacgaagtgcatactttgattggggctggagcagcagaaggtgcaattgacgcagctaacattttaaaaccagctctcgctagaggtgaattgcagtgcattggagcgacaacattagatgaataccgaaagcacattgagaaagaccctgccttggaaagaagattccagccagtgaaagtacctgaacctaccgtggatgaaactattcagatccttaagggtctgcgagagcgatatgaaattcaccacaagcttcgttacacagacgaatctttagtagcagctgcacagttgtcataccagtatataagtgatcgtttccttcctgacaaggcaattgacttgattgatgaagctggttctcgggttcgacttcgtcatgcacaggtccctgaggaagttagggagcttgagaaggagcttaggcagataacaaaggagaagaatgaagctgtccgtggccaggactttgagaaggctgggacacttcgggatagagaaattgaactcagagctgaggtatctgcaatccaagcgaaaggcaaggagatgagcaaagcagagagtgagaccggtgaggaaggccctatggtcacggagtcagacatccaacacattgtgtcttcatggactggtattcctgttgagaaagtatcaaccgatgagtctgaccgtctcctcaagatggaagaaaccctccacaaacgtatcataggccaagacgaagctgtgaaagccataagccgagccattcgccgtgcacgtgttggactcaagaatcctaaccgtccaatcgctagtttcatattctcgggtccaaccggtgttgggaaatctgagcttgccaaagctttagcagcttactacttcggttccgaagaagccatgattcgtttagatatgagtgagttcatggagaggcacactgtctccacactcatcggttcacttcctggatatgtcggatacaccgaaggaggtcagttaacagaagcggttagacgtcgcccttacaccgtcgttttattcgatgagattgaaaaagcccatccagatgttttcaacatgatgcttcaaatccttgaagatggtagattaacagacagcaaaggaagaacagttgacttcaaaaacacacttctcatcatgacatcaaacgtcggaagcagcgtgattgagaaaggaggaagacgtatcggattcgacttagactacgacgagaaagacagcagttacaacagaatcaagagccttgtaacagaggagctgaaacaatatttcagacccgagttcctaaacaggctagacgagatgattgtgttcagacagctaacaaagctggaagtgaaagaaattgctgacatactgttgaaggaagtgttcgagaggttgaagaagaaagagattgagcttcaggtgaccgaaagattcaaagagagagtagtagacgaaggttataacccgagctatggagcaagaccgttgagaagagccatcatgaggcttttagaggatagtatggcagagaagatgcttgcgagagagatcaaagaaggagactcggtgattgtggacgttgacgctgaaggtaacgtcacggtgctaaatggtggaagtggcactccaactacttccttggaggagcaggaagattctctccctgttgcttaa

SEQ ID NO: 33829 - protein, 928 aa, Arabidopsis thaliana
MAMATRVLAQSTPPSLACYQRNVPSRGSGRSRRSVKMMCIIFNVWLPMQGFMGLRGNNALDTLGKSRQDFHSKVRQAMNVPKGKASRFTVKAMFERFTEKAIKVIMLAQEEARRLGHNFVGTEQILLGLIGEGTGIAAKVLKSMGINLKDARVEVEKIIGRGSGFVAVEIPFTPRAKRVLELSLEATRQLGHNYIGSEHLLLGLLREGEGVAARVLENLGADPSNIRTQVIRMVGENNEVTANVGGGSSSNKMPTLEEYGTNLTKLAEEGKLDPVVGRQPQIERVVQILGRRTKNNPCLIGEPGVGKTAIAEGLAQRIASGDVPETIEGKKVITLDMGLLVAGTKYRGEFEERLKKLMEEIRQSDEIILFIDEVHTLIGAGAAEGAIDAANILKPALARGELQCIGATTLDEYRKHIEKDPALERRFQPVKVPEPTVDETIQILKGLRERYEIHHKLRYTDESLVAAAQLSYQYISDRFLPDKAIDLIDEAGSRVRLRHAQVPEEVRELEKELRQITKEKNEAVRGQDFEKAGTLRDREIELRAEVSAIQAKGKEMSKAESETGEEGPMVTESDIQHIVSSWTGIPVEKVSTDESDRLLKMEETLHKRIIGQDEAVKAISRAIRRARVGLKNPNRPIASFIFSGPTGVGKSELAKALAAYYFGSEEAMIRLDMSEFMERHTVSTLIGSLPGYVGYTEGGQLTEAVRRRPYTVVLFDEIEKAHPDVFNMMLQILEDGRLTDSKGRTVDFKNTLLIMTSNVGSSVIEKGGRRIGFDLDYDEKDSSYNRIKSLVTEELKQYFRPEFLNRLDEMIVFRQLTKLEVKEIADILLKEVFERLKKKEIELQVTERFKERVVDEGYNPSYGARPLRRAIMRLLEDSMAEKMLAREIKEGDSVIVDVDAEGNVTVLNGGSGTPTTSLEEQEDSLPVA

SEQ ID NO: 33830 - DNA, 2676 bp, Spinacia oleracea
  CDS (1)..(2676)
atggctggggcattgattcaatcaactaacatcccttcattggcttacaaagtaaatggccaatttcaaagatctgataagggtaataaggctgtgaagatgatggccagccttcaggaccccggatatagaatgcgaactttctcgggggttcgtggaggaaatgctttggatactttgggaactaccagtgaatgtttctactccaagatgagggctgtgctttctgtacgtaaagggacagccagccgtggtgtagttagggctatgtttgaacgtttcactgagaaagcaattaaagtaatcatgcttgctcaagaagaggcaagacggttaggccataactttgttggcacagagcagattttgctgggtcttattggtgaaggcactggaattgctgccaaggtcttgaaatccatgggaattaatctgaaagatgctcgtgtagaagttgagaaaattattgggaggggcagcggatttgttgctgttgaaattccatttactcctcgtgccaagcgtgttttggaactttcattagaggaagcccgtcaacttggccacaactatattgggtcagagcacttgcttctgggtcttcttcgtgagggtgagggtgtagctgctcgtgttttagagaatttgggtgctgatcctagtaacatccgtacgcaggttatacgtatggtcggtgaaaacacagaagctgttggtgctggtgttggaggtggcactacagggaataagatgccaactttggaagagtatggaacaaatttgacaaaattggcggaagagggaaaattggatcctgttgttggaagacaagcacagattgagcgtgttacccaaattctgggtaggcgaacaaaaaataacccctgtcttattggagagcccggtgttggtaaaacagctatagcagagggccttgctcaaagaatagctactggtgatgttccagaaacaattgagggaaagaaggttattactcttcatatgggtcttctggttgctggaactaaataccgtggagaatttgaggaaagattgaagaagttgatggaggaaattaaacaaagtgatgaaataattttatttattgatgaagtacatactttgattggggcaggagcagcagaaggagccatcgatcgtgcaaacattttgaaaccacgttttcgaaggggtgaattacagtgtattggagctaccacccttgatgagtacagaaaacacattgagaaagatccagcacttgagagaaggtttcagcctgttaaagtgcccgagccaactgtagatgaaactatacagatcttgaaagggcttcgtgaacgctatgagatccatcacaaacttcggtacacggatgaagcactagtggctgcagcacaactctcttaccagtacatcagtgaccgtttcctgcctgataaagctattgaccttatagatgaagcgggttcccgggttctgcccagctccctgaagaagctagagagctggttacaacatgagaaagaacttaggcagctcactaaggagaagaatgaagctgtccgtggccaagactttgaaaaggctggtgagttgcgtgacagagaaatggacctcaaggcccaaattagtgctcttgtagagaagaagaaggaaatgagcaaggcggagacagaagctggggatgtcggtcctatggtcacagaatctgatattcagcacatagtgtcttcttggactggtattcctgttgagaaagtatctactgatgaatctgatcgtctactcaagatggaagatacacttcataccagagtaattggtcaagatgaagctgttaaagccattagccgtgccatccgccgtgctcgtgtaggcctaaagaaccccaaccgtccaattgcaagcttcatcttctcaggtccaactggtgttggaaagtctgaacttgccaaagctttggctgcttactactttggttcagaagaagctatgatacggcttgatatgagtgagttcatggaaaggcacactgtatccaaactaattggttcacccccaggttatgtaggttatactgaaggtggccagcttactgaggctgttagacgtcgcccatacacggtggttctttttgatgaaattgagaaggcacatcctgatgtctttaacatgatgcttcaaattcttgaagacgggaggttgactgacagcaagggaaggactgccgatttcaagaacacacttcttattatgacatcaaatgttggaagtagtgtaatcgagaaaggtgggcgtaggataggttttgacctagactatgatgagaaggacagcagttacaaccgtatcaagagccttgtgactgaagagcttaagcagtactttaggcctgagttcttgaacagattagatgagatgattgtgtttaggcaacttacaaagctggaggtcaaggaaattgccgatattatgttgaaggaggtatttgggaggttgaagaacaaggaaattgagcttcaagtaacagagagattcagagatagggtggtggatgaaggctacaaccctagttatggtgctagacctttgaggagggctattatgagacttctggaggatagcatggctgagaaaatgcttgctaggaaatcaaagagggtgattcagtga

SEQ ID NO: 33831 - protein, 891 aa, Spinacia oleracea
MAGALIQSTNIPSLAYKVNGQFQRSDKGNKAVKMMASLQDPGYRMRTFSGVRGGNALDTLGTTSECFYSKMRAVLSVRKGTASRGVVRAMFERFTEKAIKVIMLAQEEARRLGHNFVGTEQILLGLIGEGTGIAAKVLKSMGINLKDARVEVEKIIGRGSGFVAVEIPFTPRAKRVLELSLEEARQLGHNYIGSEHLLLGLLREGEGVAARVLENLGADPSNIRTQVIRMVGENTEAVGAGVGGGTTGNKMPTLEEYGTNLTKLAEEGKLDPVVGRQAQIERVTQILGRRTKNNPCLIGEPGVGKTAIAEGLAQRIATGDVPETIEGKKVITLHMGLLVAGTKYRGEFEERLKKLMEEIKQSDEIILFIDEVHTLIGAGAAEGAIDRANILKPRFRRGELQCIGATTLDEYRKHIEKDPALERRFQPVKVPEPTVDETIQILKGLRERYEIHHKLRYTDEALVAAAQLSYQYISDRFLPDKAIDLIDEAGSRVLPSSLKKLESWLQHEKELRQLTKEKNEAVRGQDFEKAGELRDREMDLKAQISALVEKKKEMSKAETEAGDVGPMVTESDIQHIVSSWTGIPVEKVSTDESDRLLKMEDTLHTRVIGQDEAVKAISRAIRRARVGLKNPNRPIASFIFSGPTGVGKSELAKALAAYYFGSEEAMIRLDMSEFMERHTVSKLIGSPPGYVGYTEGGQLTEAVRRRPYTVVLFDEIEKAHPDVFNMMLQILEDGRLTDSKGRTADFKNTLLIMTSNVGSSVIEKGGRRIGFDLDYDEKDSSYNRIKSLVTEELKQYFRPEFLNRLDEMIVFRQLTKLEVKEIADIMLKEVFGRLKNKEIELQVTERFRDRVVDEGYNPSYGARPLRRAIMRLLEDSMAEKMLARKSKRVIQ

SEQ ID NO: 33832 - DNA, 2814 bp, Oryza sativa
  CDS (1)..(2814)
atggaggcgtgctgctgctcgtcgtcgtcggtgccgtccgcgtccatcctcgccacgggcgccggcctccgccgccggttctcccctgcgggggccggcgggggtgggagggcggtggcggttgcggcagggcgaccgatccgcgcgtccgcggctctgctggccgcgcccgcgccgcggcggcgcgggggcgtcgtcgtgagggcggtgttcgagcggttcacggagcgggcggtgaaggcggtggtgttctcgcagcgggaggcgcgcgggatgggggacgagacggtggcgccgcaccacctgctgctgggcctcgtcgcggaggaccggtcgccgctggggttcctcgcctcgggcgtccgcgtcgagcgcgcccgcgaggcgtgccgcgccgccgtgggcaaggaagggctcgcgcaggcgccggtcgggctggccacggacgtgcccttctcgggggccagcaagcgcgtcttcgaggccgccgtggagttctccaggaacatgggatgcaacttcatctcgccggagcacattgcgctcggcctcttcaacctgaacgatcccaccacgaacaacgtccttaagagcttaggagtagattcaagtcagctagcaaagcaggcacttacccgagtccaaggggagcttgcaaaggatggaagagagcctgtcggattatcttcttttaaagtgcgtgagaaatttactcctggaggtgggaagtctgcaattgtcaaatactcgaataaaaagaaagagaagagtgcactggctctattttgtctagacttgaccatgcgagccagtggaggattgattgatcctgttattggtcgcaaggatgagattgaaagagtagttcagattatatgccgccgcacgaagaacaatccaattcttttgggcgaagcaggtgttggtaagactgccattgctgagggtttggcccataaaattgccaatggagatgttcctattttcctcgtgggaaagcgtatattatcattggatgttgctctactaatggctggtgctaaagagaggggtgaactggaagccagagttactagtttaatacgtgaagtgcgcaaagcaggtgatgttatactgttcattgatgaagtccatactcttattgggtctgggattgctggaagaggaagcaaaggagctggtcttgatattgcgaatttgctgaagcctgcactggctagaggagaattgcagtgtattgcatctacaactctggatgaacaccgattgcattttgataaggataaggctttggctcgccgatttcagcctgttttggtgaatgagcctagccaggaggatgctgtgaagatattacttggtctgcgtgagaagtatgagacctatcacaaatgcaaatacactttggaaagcatcaatgcagcagtttatttgtcagcaagatatattgctgacagacatcttcccgataaggccattgatctaattgatgaagctggcagtagagctaggatggaatcatttaaaaggaagaaggaggaacaatgctctattctctcaaaatcaccagatgagtactggcaagagattagagctgtccagaacatgcatgaagtggcactgactaacaaggtaaaatattctctaaatcagaatgaccaagaggatgctgttgatattgaactcgtgggtgaggacaaaacaagtccagcatctatgctatcaacttcaactgataaaccatctctggttggatcagaggaaattgcaagagtcacatcattgtggtcaggcataccagttcagcagttgactgcagatgaaagaaagcttctagtaggactggatgatgaactcaggaaacgtgtcataggtcaagacgatgctgttctagccatatctaaagctgtgaagagatcgcgtgttggcctcaatgaccctgacagacctattgctacactaattttctgtggcccaacaggtgttggaaaaactgagctcacgaaagctctagcagcaagttattttggatctgaatcagctactgttaggttagatatgagtgagtatatggagcggcatgctgtgagcaagttgataggctctcctccaggatacatgggatttggtgaaggtggtactttgactgaagcagtcaggagaaaaccattcactgtggtgttgcttgatgaaatagagaaagctcatcctgatattttcaatattcttcttcaaatattcgaagacggtcatttgactgattcacagggccggagggtttccttcaagaatacattaattgtgatgacatcaaatgttggttccacatcaatttctaatggaaagaggagcataggtttccagacacaaactgatactgaagaaaagtcatatgctgcaatgaaatctttggtaatggaagaactgaaggcatttttccgtcccgaattgctcaatagaattgatgaagtggttgtgttccaccctcttgagaaaactcagatgctggctattctcaatataatgctgcaagaggtgaagggtaggattttagcccttgggattggcctagaggtgtctgattccatgaaggacctgatttctcagcatgggtacgacaagagctacggtgcacggccactaagaagagccgtcactcagctggttgaggatgttatcagcgaagcaattctgtctggtcagttcaagcctggtgacaccataatgatggacactgatgccacggggaaaccttgcttgagccgactgaatgatcagaccgtccaattatccgatccgacaccaacactttga

SEQ ID NO: 33833 - protein, 937 aa, Oryza sativa
MEACCCSSSSVPSASILATGAGLRRRFSPAGAGGGGRAVAVAAGRPIRASAALLAAPAPRRRGGVVVRAVFERFTERAVKAVVFSQREARGMGDETVAPHHLLLGLVAEDRSPLGFLASGVRVERAREACRAAVGKEGLAQAPVGLATDVPFSGASKRVFEAAVEFSRNMGCNFISPEHIALGLFNLNDPTTNNVLKSLGVDSSQLAKQALTRVQGELAKDGREPVGLSSFKVREKFTPGGGKSAIVKYSNKKKEKSALALFCLDLTMRASGGLIDPVIGRKDEIERVVQIICRRTKNNPILLGEAGVGKTAIAEGLAHKIANGDVPIFLVGKRILSLDVALLMAGAKERGELEARVTSLIREVRKAGDVILFIDEVHTLIGSGIAGRGSKGAGLDIANLLKPALARGELQCIASTTLDEHRLHFDKDKALARRFQPVLVNEPSQEDAVKILLGLREKYETYHKCKYTLESINAAVYLSARYIADRHLPDKAIDLIDEAGSRARMESFKRKKEEQCSILSKSPDEYWQEIRAVQNMHEVALTNKVKYSLNQNDQEDAVDIELVGEDKTSPASMLSTSTDKPSLVGSEEIARVTSLWSGIPVQQLTADERKLLVGLDDELRKRVIGQDDAVLAISKAVKRSRVGLNDPDRPIATLIFCGPTGVGKTELTKALAASYFGSESATVRLDMSEYMERHAVSKLIGSPPGYMGFGEGGTLTEAVRRKPFTVVLLDEIEKAHPDIFNILLQIFEDGHLTDSQGRRVSFKNTLIVMTSNVGSTSISNGKRSIGFQTQTDTEEKSYAAMKSLVMEELKAFFRPELLNRIDEVVVFHPLEKTQMLAILNIMLQEVKGRILALGIGLEVSDSMKDLISQHGYDKSYGARPLRRAVTQLVEDVISEAILSGQFKPGDTIMMDTDATGKPCLSRLNDQTVQLSDPTPTL

SEQ ID NO: 33834 - DNA, 2436 bp, Aspergillus oryzae
  CDS (1)..(2436)
atggcttcaaggttgcagctcgctcgtggtcgactgctgcgctccccagcgctatcatcgccaaaccgtatatttcaccctactcaacaaatacgtttacctccgcacacgcgggtcctaccttccgtcataactaaaacatccttatttcagcctgtatccccggctcgcaactatgcgagtggacgccctcacccccctggcggtactcaccgcatgaatttgggaggcgagccggagaagtcagctttagaacaatttggtgttgatcttaccgcaaaggcgaaggccggcaagttggaccccgtcatcgggcgagacgctgagatccatcgaactattcaggttttgtcaagaagaacgaaaaacaacccggtattgataggagccgctggtacggggaaaacagcggtcttggagggtttggctcaaaggattgtccagggagatgtcccggaaagtatcaaggacaaacgtgtcatctctctagatctgggtgcgcttatagctggtgcaaaattcagaggtgatttcgaagaacgcttgaaatctgtcctcaaagaggtcgaagaggcgcaaggtggtgtgatcctattcattgacgagctgcacactttactcggtctcggaaaggcagagggtagcatcgatgctagcaaccttctgaaaccggccttgtcaaggggcgagctccagtgctgtggcgctaccactttgaatgaatacagattgatcgagaaggatgtcgcactagcgagacggttccagccgatcatggtcggagagccgtccgtgcccgccactatatcgatcttgcgtggtataaagaacaagtacgaagtccaccacggtgtacggatcacagacggatctttggtggcggcagcaacttacagtaaccgttatatcaccgaccgtttccttccggacaaggctattgatctagtggatgaggctgcctcagccctacgactgcagcaagaatcaaaaccagatgtaattcgtgaactagatcgagacatcaccactatccaaatcgagctcgaatccctgcgcaaggaaaccgatgtcagcagccgtgagagacgagaaaaactacaggaagacttaaaagccaaacaagaagaagccgccaaactgacggagacttgggagaaagagaaggctgaaattgagactctcaagcgtaccaaggaggacctagagcgtgctcgtttcgaacttgagcaggctcagagagaaggaaatttcgcaaaagctggcgagttgagatactccaccatcccaagtctcgaggccaagctgccgaaggaaggtgaagagcaggttgcaggatctcagagtctgattcatgattctgtcacagccgatgacattgccaacgttgtttcgcgaactaccggcattcctgtcaataagctcatggccggagaagttgaaaaactgatccgaatggaggacactctgcggcagtcagttcggggccaggatgaggcactttctgcagtagcaaacgcagtccgcatgcagagagcaggtcttagtggcgaaaaccggccactggcatcgttcatgttcctcggtcctacaggtgttggaaagaccgaactctgcaagaagatggccgagtttttgttttccaccgagacagccgttgtgagatttgacatgagtgaattccaagaaaaacacacgatcagtcgcttaatcggttctcccgccggctacgtgggctatgacgatgccggccagctcacagaagccgtcagacggaagccgtatgcggtccttttgttcgatgaatttgagaaagctcatcgtgacatatctgccttactgcttcaagttttggatgagggcttcctcacggatgctcagggacacaaggttgatttcagaaatacccttattgtcctcacctctaacctgggagcggatatccttgtgggctcggatcccctgcatactctcaaacagacggataatgacgagatttcccctgataccaagaaagcagtcatggatgttgtgcaacatgcatatcccccagagttcctcaatcggatcgatgaatttattatattcaagagactttctcgggaagctcttagggacattgttgatatcagactcaaagagcttcaatcaaggctcgacgatagaaggatgacactgcaggtggacagtgagatcaaggactggctttgcgaaaaagggtacgaccctagatatggtgcccgtcccctcaaccgcctaatcgcaaaggaaatcggcaacaggttggccgataaaatcatccgtggtgaagttacctctggacaaaccgcccatgtttcattcaacgccgacaagagtgggcttgaagttactgcggaaggaacaaagactgaagatgcaacaaatgcaacgtacccaacagagaccgaaaacccataa

SEQ ID NO: 33835 - protein, 811 aa, Aspergillus oryzae
MASRLQLARGRLLRSPALSSPNRIFHPTQQIRLPPHTRVLPSVITKTSLFQPVSPARNYASGRPHPPGGTHRMNLGGEPEKSALEQFGVDLTAKAKAGKLDPVIGRDAEIHRTIQVLSRRTKNNPVLIGAAGTGKTAVLEGLAQRIVQGDVPESIKDKRVISLDLGALIAGAKFRGDFEERLKSVLKEVEEAQGGVILFIDELHTLLGLGKAEGSIDASNLLKPALSRGELQCCGATTLNEYRLIEKDVALARRFQPIMVGEPSVPATISILRGIKNKYEVHHGVRITDGSLVAAATYSNRYITDRFLPDKAIDLVDEAASALRLQQESKPDVIRELDRDITTIQIELESLRKETDVSSRERREKLQEDLKAKQEEAAKLTETWEKEKAEIETLKRTKEDLERARFELEQAQREGNFAKAGELRYSTIPSLEAKLPKEGEEQVAGSQSLIHDSVTADDIANVVSRTTGIPVNKLMAGEVEKLIRMEDTLRQSVRGQDEALSAVANAVRMQRAGLSGENRPLASFMFLGPTGVGKTELCKKMAEFLFSTETAVVRFDMSEFQEKHTISRLIGSPAGYVGYDDAGQLTEAVRRKPYAVLLFDEFEKAHRDISALLLQVLDEGFLTDAQGHKVDFRNTLIVLTSNLGADILVGSDPLHTLKQTDNDEISPDTKKAVMDVVQHAYPPEFLNRIDEFIIFKRLSREALRDIVDIRLKELQSRLDDRRMTLQVDSEIKDWLCEKGYDPRYGARPLNRLIAKEIGNRLADKIIRGEVTSGQTAHVSFNADKSGLEVTAEGTKTEDATNATYPTETENP

SEQ ID NO: 33836 - DNA, 2787 bp, Aspergillus oryzae
  CDS (1)..(2787)
atgaacggcgctcaattcacagatagagctaacaaggccctgctggattccagcagtttggctgaacaatactcccattctcagattctccccgttcacctagcagtggccctcttaaatccttctccagatgaatcgaaagaccaacaagctacggcacacccctcacacgattcctcttcggcccctctcttccgccaagtcattgaacgcgcccatggcgaccctcagcttctcgaacgcgctctcatgaagaccctggtccgttgtccaagccaagaccctccccccgaatccgttagtgtctctccagcactagccaaggttattcggtcagcttccgagttgtccaagacccagaaggacagcttcgttgctatcgatcatttgattgtgtccgtcgcccaggactctcaggtccagcgagcattggcggatgccaacattcccaacgtcaagttgctagactctgccgttcagcaaatccgcggtacgaggagggtagattccaagacagccgactcagaaagcgagaatgagaacctcaaaaagttcaccattgatatgacggccctcgcaagagagggcaagattgaccctgtcattggccgcgaggaagaaattcgtcgagtgattcgtatcctcagtcgccgaacgaagaacaacccagtgctcatcggtgagcctggtgtcggaaagaccaccattgtggaggggttggctcgccgaattgtgaatgccgatatcccggcaaacttggctcaatgcaaattgctttcgctcgatgtcggttcattggttgcaggaagcaagtaccggggtgagttcgaagaaagaatgaagggagtcctcaaagagatcgaagaatctaaagaaacaatcgtcctgtttgtcgacgaaatccatcttctcatgggtgcaggctctagcggtgagggtggcatggatgccgccaatcttctgaagccgatgttggctcgaggccaactgcactgtatcggtgccacgacactaggcgaatatcggaagtatattgagaaggaccaggcgtttgaacgacgtttccaacaggtcttagtgaaggagccttctgttaacgaaactatctctatcctccgtgggttgaaggagaagtacgaagtgcatcacggtgtcaacattctcgatggtgccattgtttccgcagccacactggcttcgcgttacctaactgctcgtcgacttcccgactctgcagttgatcttatcgatgaagctgctgccgctgttagagtgacacgtgagtccgagcctgaggccttggataacttggagagaaagctccgacagctgcaaatcgagatccatgccctcgagcgcgagaaagatgacgcatctagagctcgcttggaggcagccaagcaggaggcagccaatgttactgaggagctgcgcccgctgcgtgagaagtacgaaagcgagaagcagcgcagcaaggccattcaggatgccaagatcaagctcgactccctcaaggttaagagagatgaggcagaacggtccggggatacagtgaccgccgctgacttggaatactatgccattccggagaccaaagctctgatcgaaagactcgaggtggatcgcgcgaaagcggatgaagaacgacgtgctcgctccggagacgctggagagacactgctcgctgacgctgtcggccccgatcagatcaacgagattgttgctcggtggactggtatccctgtcaccagactcaagaccactgagaaggacaagttgttgaacatggagaagcacctcgccaagatagtcgtcggccagaaggaggctgtgacctccgtatcgaatgcaatccgactccagcgatctggcctcagcaaccctaactcgccgccaagtttcctcttctgtggtccatccggaactggtaagaccttgcttacgaaggctcttgcagagttcctcttcgatgaccccaaggctatgattcgattcgatatgtctgaataccaggaacgccactctttgagccgtatgatcggtgcgcctccgggatacgtcggacatgatgctggtggccagctgacagaaagcctccggcgacgcccgttctccattcttcttttcgatgaagttgaaaaggcagccaaggaggtcctcacggttctcctccagctcatggacgacggacgtgtcacagacggtcaaggcagaattgtcgacgcgaagaactgcatcgtcgtcatgacgtccaacctgggtgccgaattcctgtctcgtcccgccactaaggatggacggatcgatcctcaaactcgtgaattggtcatgggcgccctccgtgactacttccttcctgaattcctcaaccgtatctccagtacggtcatcttcaatcgcctcaccaagaaagaaattcgcaagatcgtcgacctccgtctggacgaagtccaaaagcgcttggagcaaaacggaaagaacgtcacgatcgaatgcacagaggaggtcaaagactacctcggcgacgcaggctattcgcccgcttatggcgctcggcctttggctcgcatcatcgagcgcgaagttctcaaccgtctcgctattcttatcctccgtggaagcatcgttgacggcgaggtggctcgtgtcatcatgcgcgatggtcgtatcgacgtcctgccgaaccatgagatcccggttgacgaagatcaagacatgctcgatagtgaagatgaagccatagccgagatggaagacggcagtggtgacatggatctctacgagtaa

SEQ ID NO: 33837 - protein, 928 aa, Aspergillus oryzae
MNGAQFTDRANKALLDSSSLAEQYSHSQILPVHLAVALLNPSPDESKDQQATAHPSHDSSSAPLFRQVIERAHGDPQLLERALMKTLVRCPSQDPPPESVSVSPALAKVIRSASELSKTQKDSFVAIDHLIVSVAQDSQVQRALADANIPNVKLLDSAVQQIRGTRRVDSKTADSESENENLKKFTIDMTALAREGKIDPVIGREEEIRRVIRILSRRTKNNPVLIGEPGVGKTTIVEGLARRIVNADIPANLAQCKLLSLDVGSLVAGSKYRGEFEERMKGVLKEIEESKETIVLFVDEIHLLMGAGSSGEGGMDAANLLKPMLARGQLHCIGATTLGEYRKYIEKDQAFERRFQQVLVKEPSVNETISILRGLKEKYEVHHGVNILDGAIVSAATLASRYLTARRLPDSAVDLIDEAAAAVRVTRESEPEALDNLERKLRQLQIEIHALEREKDDASRARLEAAKQEAANVTEELRPLREKYESEKQRSKAIQDAKIKLDSLKVKRDEAERSGDTVTAADLEYYAIPETKALIERLEVDRAKADEERRARSGDAGETLLADAVGPDQINEIVARWTGIPVTRLKTTEKDKLLNMEKHLAKIVVGQKEAVTSVSNAIRLQRSGLSNPNSPPSFLFCGPSGTGKTLLTKALAEFLFDDPKAMIRFDMSEYQERHSLSRMIGAPPGYVGHDAGGQLTESLRRRPFSILLFDEVEKAAKEVLTVLLQLMDDGRVTDGQGRIVDAKNCIVVMTSNLGAEFLSRPATKDGRIDPQTRELVMGALRDYFLPEFLNRISSTVIFNRLTKKEIRKIVDLRLDEVQKRLEQNGKNVTIECTEEVKDYLGDAGYSPAYGARPLARIIEREVLNRLAILILRGSIVDGEVARVIMRDGRIDVLPNHEIPVDEDQDMLDSEDEAIAEMEDGSGDMDLYE

SEQ ID NO: 33838 - DNA, 2526 bp, Streptomyces tenjimariensis
  CDS (1)..(2526): transl_table=11
atgttcgagaggttcaccgaccgcgcgcggcgggttgtcgtcctggctcaggaagaagcccggatgctcaaccacaactacatcggcaccgagcacatcctcctgggcctgatccacgagggtgaaggtgtcgccgcaaaggccctggagagcctcggcatttcgcttgaggcggtccgccagcaggtggaggagatcatcggccagggccagcaggccccttccggccacatccccttcacgccccgtgccaagaaggtcctggagctgtcgctccgcgaggcccttcagctcggccacaactacatcggcaccgagcacatcctgctcggactgatccgcgagggcgagggcgtcgccgcccaggtcctcgtgaagctgggtgccgatctcaaccgggtgcggcagcaggtcatccagctgctctccggctactccacgggcaaggagaccgccaccgccggcggtcccgccgagggcacgccctcgacgtccctggtcctcgaccagttcggccggaacctcacccaggccgcccgtgagtccaagctcgaccccgtcatcgggcgcgagaaggagatcgagcgggtcatgcaggtgctgtcccgccgtaccaagaacaacccggtcctcatcggtgagcccggcgtcggcaagacggcggtcgtcgagggcctggcgcaggccatcgtcaagggcgaggtgcccgagaccctcaaggacaagcacctctacaccctggacctgggcgcgctcgtcgccggttcccggtaccgcggtgacttcgaggagcgcctgaagaaggtgctcaaggagatccgcacccgcggcgacatcatcctgttcatcgacgagctccacaccctggtgggtgcgggtgccgccgagggcgccatcgacgcggcgtccatcctgaagccgatgctcgcccgcggtgagcttcagaccatcggcgccacgacgctcgacgagtaccgcaagtacctggagaaggacgcggccctggagcgccgcttccagcccatccaggtcgcggagccgtcgctgccgcacaccatcgagatcctcaagggcctgcgcgaccggtacgaggcccaccaccgggtctccatcacggacgaggccctcgtccaggcggccacgctggccgaccggtacatctcggaccgcttcctgccggacaaggcgatcgacctgatcgacgaggccggttcccggatgcgtatccgccggatgaccgcgccgccggacctccgcgagttcgacgagaagatcgcgggcgtccgccgcgacaaggagtccgcgatcgacgcgcaggacttcgagaaggccgcctcgctccgcgacaaggagaagcagctcctcgcggccaaggccaagcgggagaaggagtggaaggccggcgacatggacgtcgtcgcggaggtcgacggcgagctgatcgccgaggttctcgcgaccgccaccggcatcccggtcttcaagctgacggaggaggagtcctcccggctgctgcgcatggaggacgagctccacaagcgcgtcatcggccaggaagacgccatcaaggccctgtcgcaggccatccgccgtacccgcgccggtctgaaggacccgaagcgccccggtggctcgttcatcttcgccggcccgtccggtgtcggtaagaccgagctgtccaagacgctcgcggagttcctcttcggtgacgaggacgcgatgatctccctcgacatgtcggagttcagcgagaagcacaccgtctcgcggctcttcggctccccgcccggatacgtgggctacgaggagggcggccagctcaccgagaaggtccgtcgcaagccgttctccgtcgtcctcttcgacgaggtcgagaaggcccacccggacatcttcaactcgctgctccagatcctggaggacggtcgcctgaccgactcccagggccgggtcgtggacttcaagaacacggtcatcatcatgacgaccaacctcggcacccgggacatctccaagggcttcaacctgggcttcgccgcccagggcgacgtcaagaccgggtacgagcggatgaaggcgaaggtcaacgaggagctgaagcagcacttccgccccgagttcctgaaccgtgtcgacgacaccgtcgtgttccaccagctcagccaggaagacatcatccagatcgtcgacctgatgatcgcgaaggtggacgagcggctgaaggaccgcgacatgggcatcgagctcagccaggacgcgaagatcctgctggccaagcgcggttacgacccggtgctgggcgcccggccgctgcgccggaccatccagcgcgagatcgaggacgtgctctccgagaagatcctcttcggtgagctgcgccccggtcacatcgtggtcgtggacaccgagggcgagggtgaggagaagaagttcaccttccgcggcgaggagaagtccgcgctcccggacgtgccgccgatcgaggcggccggcggggcgggtccgaacctgtccaaggacgcgtag

SEQ ID NO: 33839 - protein, 841 aa, Streptomyces tenjimariensis
MFERFTDRARRVVVLAQEEARMLNHNYIGTEHILLGLIHEGEGVAAKALESLGISLEAVRQQVEEIIGQGQQAPSGHIPFTPRAKKVLELSLREALQLGHNYIGTEHILLGLIREGEGVAAQVLVKLGADLNRVRQQVIQLLSGYSTGKETATAGGPAEGTPSTSLVLDQFGRNLTQAARESKLDPVIGREKEIERVMQVLSRRTKNNPVLIGEPGVGKTAVVEGLAQAIVKGEVPETLKDKHLYTLDLGALVAGSRYRGDFEERLKKVLKEIRTRGDIILFIDELHTLVGAGAAEGAIDAASILKPMLARGELQTIGATTLDEYRKYLEKDAALERRFQPIQVAEPSLPHTIEILKGLRDRYEAHHRVSITDEALVQAATLADRYISDRFLPDKAIDLIDEAGSRMRIRRMTAPPDLREFDEKIAGVRRDKESAIDAQDFEKAASLRDKEKQLLAAKAKREKEWKAGDMDVVAEVDGELIAEVLATATGIPVFKLTEEESSRLLRMEDELHKRVIGQEDAIKALSQAIRRTRAGLKDPKRPGGSFIFAGPSGVGKTELSKTLAEFLFGDEDAMISLDMSEFSEKHTVSRLFGSPPGYVGYEEGGQLTEKVRRKPFSVVLFDEVEKAHPDIFNSLLQILEDGRLTDSQGRVVDFKNTVIIMTTNLGTRDISKGFNLGFAAQGDVKTGYERMKAKVNEELKQHFRPEFLNRVDDTVVFHQLSQEDIIQIVDLMIAKVDERLKDRDMGIELSQDAKILLAKRGYDPVLGARPLRRTIQREIEDVLSEKILFGELRPGHIVVVDTEGEGEEKKFTFRGEEKSALPDVPPIEAAGGAGPNLSKDA

SEQ ID NO: 33840 - DNA, 2727 bp, Funaria hygrometrica
  CDS (1)..(2727)
atgaatccggagaagtttactcacaagacgaacgaagcgttggcagccgggcaggagcttgcgaccgaagccggccatgcgcaatacacgcccgtgcatttggcccttgcgctgttgaatgatagtgagggactgttgcgccaggccattgcctctgcgtcgggtggcgaccaaacgctcaattctgttgagcgtgtgttgaagaatactctgaagaagattccatcgcagaatcctgctcctgacgcttctcctgcgaacaatgcactcattaaatgtataaagaaggcgcagagcttgcagaaatcaagaagcgactcacatttggctgtcgatcagctgattttggcgttgctcgaggattcccagatagcagactgcttcaaggaggcgggtgtgagtgcaactagggtgaagagagagctcgaggctgtgagaagatcttctaaaaaggtcgacaacgcaaacgctgattccaattttcaagcattgaaaaaatatgggcgggatttggtggaggatgctgcgaagctggatcccgtcattggtcgagatgacgaaatccggagagttgtgagaatcctgtctcggaggacgaagaataatcccgtgttgattggtgagcctggcgtcggaaaaacagctgtcgttgaggggctcgcccagcgtattgtgagaggagatgcgccaagcaatttgctagaagtccgtctagtcgctttggatatgggagccttggttgcgggagccaaataccgaggtgaatttgaggaaagattgaaggccgtgctcaaggaagtggaagattctgatggcaaagtcattcttttcatagatgaaattcatcttgttcttggagcagggcgtacagaaggatctatggatgcagccaatctactgaagccaatgctggcccgaggacagctccgttgcattggagcaaccactttggatgagtacaggaagtatgttgaaaaggatgcagccttcgagcggcggtttcagcaggttatggtttcagaaccaagtgtagcagacacgatcagtattttaagaggcctgaaggagcgatacgaagggcaccatggtgtccgtctcttagacagggctttggttgttgctgcgcaactatcgagcagatacataacaagcaggttcttgcccgacaaagcgattgacctcattgatgaagcatgtgccaacgtgcgtgtgcagctggatagtcaaccagaagagattgatgttttggaaaggcgtagaatacagcttgaggtggaggctcatgctatggagaaagagaaggataaagccagcaaggcccgtttacttgaggtgcggcaggaactccaaaatttggaggatcaactgagacttctgaaaatgaagtatcaaagagaaaaggaaagggtcgatgaacttcggaagttgaagcagaagagagaagatcttcaagccagtttggtggatgcagaacgacggtatgatttggcaagggcagcagacttcaagtacggagctttagtggaggtggagaaggctatccagaaaatggagcagcaagagtctggagaaaacaccatgctcacggaatctgtaggtccagagcaaattgcggaggtggttagtcggtggactggaattccggtaactaggttgggtcaaaatgagaaagcccggctgttggccttcgccgatcgtttacatgagcgagttgttggtcaagacgaggcagttcaggctgtcgcagaagcaatattacgatcacgggctggtttgggtcgacagcaacaacccactggatccttcctcttccttggtccaacgggtgtgggcaaaactgaattggcgaaggcattggctgagcagctctttgacaaggaaaaccagcttgttcgcatggatatgtccgaatacatggaacagcattcggtttctcgtctgattgggtctccacctgggtatgtgggacacgaggagggaggtcagcttacagaagcagtgagaaggcgcccttacagtgttgttctttttgatgaagttgagaaagcccatccggcagttttcaacactctcttgcagttgcttgatgatggtcgtctcacggatggccaaggccgaactgtggatttcaccaacacagtagtcatcatgacctctaacctaggagcagagcatttacttgcgggtttgagtggcatgatgtctatgactgtcgccaaggaaaaagttctagagcaagtgcgggtacacttccgtccagaacttctcaatcgattggacgaaattgtagttttcgagccgctcaagcacgatcagctgcgcaaagtggcaaggatgcagatgaaggatgttgccttgcgacttgcagaacggggcgttgcattagctgtcactgatgccgctcttgaccttgttttgaaggagtcgtacgatcctgtttacggtgcgcgtccactgcgaagatggttagagcgcaaagttgtgaccaacctatcaaggatgctgatcaacgatgaagtggatgacaattctacagtcttcatagacgttaaaccaggagagaatcaactctcatatgctgtggaacgcaacggcggcctggtgaacagtattactgggaagaaggcggacatcctcatcgaagtaccgagagtagaacagcatgatgtcaagagaataagagttgaagaaccagacagcgacttagatgatgagatggaagactaa

SEQ ID NO: 33841 - protein, 908 aa, Funaria hygrometrica
MNPEKFTHKTNEALAAGQELATEAGHAQYTPVHLALALLNDSEGLLRQAIASASGGDQTLNSVERVLKNTLKKIPSQNPAPDASPANNALIKCIKKAQSLQKSRSDSHLAVDQLILALLEDSQIADCFKEAGVSATRVKRELEAVRRSSKKVDNANADSNFQALKKYGRDLVEDAAKLDPVIGRDDEIRRVVRILSRRTKNNPVLIGEPGVGKTAVVEGLAQRIVRGDAPSNLLEVRLVALDMGALVAGAKYRGEFEERLKAVLKEVEDSDGKVILFIDEIHLVLGAGRTEGSMDAANLLKPMLARGQLRCIGATTLDEYRKYVEKDAAFERRFQQVMVSEPSVADTISILRGLKERYEGHHGVRLLDRALVVAAQLSSRYITSRFLPDKAIDLIDEACANVRVQLDSQPEEIDVLERRRIQLEVEAHAMEKEKDKASKARLLEVRQELQNLEDQLRLLKMKYQREKERVDELRKLKQKREDLQASLVDAERRYDLARAADFKYGALVEVEKAIQKMEQQESGENTMLTESVGPEQIAEVVSRWTGIPVTRLGQNEKARLLAFADRLHERVVGQDEAVQAVAEAILRSRAGLGRQQQPTGSFLFLGPTGVGKTELAKALAEQLFDKENQLVRMDMSEYMEQHSVSRLIGSPPGYVGHEEGGQLTEAVRRRPYSVVLFDEVEKAHPAVFNTLLQLLDDGRLTDGQGRTVDFTNTVVIMTSNLGAEHLLAGLSGMMSMTVAKEKVLEQVRVHFRPELLNRLDEIVVFEPLKHDQLRKVARMQMKDVALRLAERGVALAVTDAALDLVLKESYDPVYGARPLRRWLERKVVTNLSRMLINDEVDDNSTVFIDVKPGENQLSYAVERNGGLVNSITGKKADILIEVPRVEQHDVKRIRVEEPDSDLDDEMED

SEQ ID NO: 33842 - DNA, 2742 bp, Triticum turgidum subsp
  CDS (1)..(2742)
atgaatcccgacaagttcacgcacaagaccaatgaggcgctcgcggcggcgcacgagatggcgtccgaggccggccatgcgcagctcacgccgctgcacctcgccgcggcgctcgcggcggacaggtcgggcatcctccgccaggccatcgcccacgcgtccggcggcaacgacgccgcggccgagtcgttcgagcgcgtcgcgaccgcagcgctcaagcggctgccttcgcagtccccgccgcccgacaccgtcccggcctccacttcgctggtcaaggccgtccgccgcgcgcagtcggcgcagaagtcgcgcggcgactcgcacctcgccgtcgaccagctgctcatgggcctcctcgaggacccacagatctccgacgcgctcaaggaggccggcatctccgccgcgcgggtgaaggcagaggtcgagaagctccggggaggcgacaaccggcgcgtggagtccgcgtcgggggacaccaacttccaggccctcaagacgtacggccgcgacctcgtggaggtggcgggcaagctggacccggtcatcggccgcgacgaggagatccggcgcgtggtgcggatcctgtcgcggcgcaccaagaacaaccccgtcctgatcggcgagcccggcgtgggcaagaccgccgtggtggaggggctcgcgcagcgcgtcgtgcgcggcgacgtccccagcaacctcctggacgtgcgcctggtcgcgctggacatgggcgcgctcgtggccggcgccaagtaccgcggcgagttcgaggagcggctcaaggccgtgctcaaggaggtggaggaggccgaggggaaggtgatactgttcatcgacgagatacacctggtgctcggcgccgggcggacggaggggtccatggacgcggccaacctgttcaagccgatgctggcgagggggcagctcaggtgcattggcgcgacgaccctcgaggagtacaggaagtacgtggagaaggacgcggcgttcgagaggcggttccagcaggtgttcgtggcagagcccagcgtccccgacaccgtcagcatactgagagggctcaaggagaagtacgaggggcaccatggtgtgaggattcaggaccgcgcgctcgtcattgccgcgcagctctcgtcgaggtacatcatgggtcgtcatctgcctgataaagcaatcgatttggttgacgaggcctgcgcaaatgtgagggtgcaacttgacagccagcctgaagagatcgacaacctcgagaggaagaggatccagttggaagtcgagctccatgccctcgagaaggagaaggacaaggctagcaaagctcggctagttgatgtgaggaaagagttggacgatctgcgagacaagctgcagccgctgcagatgaagtatcgcaaggagaaagagaggatcgacgagatcaggagactgaagcagcgccgcgaagagctgcagttcactctgcaggaggccgagcgccggatggatttggcccgcgtggctgatctcagatacggtgctctgcaggaggttgatgctgccatcgctaagctggagggtgagaccggcgagaacctgatgttaacagagactgtcggcccggaccagattgccgaggtggtgagccgctggactggcattcctgtcactaggctgggacagaatgagaaggccaggctgatcggtctggctgatagactgcatcagagggtggttggacagtatgaggccgtcaatgcagtcggagaggctgttttgcggtcgagggctggccttggacggccacagcagcctactggttcattcctcttcctcgggccgaccggtgtgggtaaaaccgagctcgccaaggctctagctgagcagctgtttgatcacgagaacctgctcgtccgcattgacatgtctgaatacatggagcagcattcggttgcccggctaatcggtgccccacctggttacgttggtcatgaggaaggagggcagctgacagagcaagtgaggaggaggccatacagtgtcatcctcttcgacgaggttgagaaggcacatgtggcggtattcaacaccctgctccaggtcctggacgacgggcggttgaccgacgggcaaggcaggacggttgatttcaggaacaccgtcatcatcatgacctcgaaccttggcgcggagcacctcctcgccggaatggtgggcaactccatgaaggttgctcgcgatctcgtcatgcaggaggtgaggaggcatttccgcccggagctgctgaaccgcctggacgagatcgtcatcttcgaccctctgtcgcacgagcagctgcggaaggttgcccggcttcagatgaaagatgtggcagtacgtcttgcggagaggggcgttgccttggccgtcacagacgctgccctggacgtcatcctctcactctcttatgatccggtgtacggcgccaggccaatcaggagatggatcgagaagaggatagtggcggagctttccaagatgttgatccgcgaggagatcgacgagaactccacggtgtacatcgacgctgcgcccagcaaggacgagctgacctatggcgtcgacaagcacggagggctggtgaacgcgcgcacgggccacaagtccgacatcctcatccaggttcctagcggagctgttgagggcgatgcggcgcacgccgtgaagaagatgaagatcatgcaggacggcggagaggtggacgacatggaggaagagtag

SEQ ID NO: 33843 - protein, 913 aa, Triticum turgidum subsp
MNPDKFTHKTNEALAAAHEMASEAGHAQLTPLHLAAALAADRSGILRQAIAHASGGNDAAAESFERVATAALKRLPSQSPPPDTVPASTSLVKAVRRAQSAQKSRGDSHLAVDQLLMGLLEDPQISDALKEAGISAARVKAEVEKLRGGDNRRVESASGDTNFQALKTYGRDLVEVAGKLDPVIGRDEEIRRVVRILSRRTKNNPVLIGEPGVGKTAVVEGLAQRVVRGDVPSNLLDVRLVALDMGALVAGAKYRGEFEERLKAVLKEVEEAEGKVILFIDEIHLVLGAGRTEGSMDAANLFKPMLARGQLRCIGATTLEEYRKYVEKDAAFERRFQQVFVAEPSVPDTVSILRGLKEKYEGHHGVRIQDRALVIAAQLSSRYIMGRHLPDKAIDLVDEACANVRVQLDSQPEEIDNLERKRIQLEVELHALEKEKDKASKARLVDVRKELDDLRDKLQPLQMKYRKEKERIDEIRRLKQRREELQFTLQEAERRMDLARVADLRYGALQEVDAAIAKLEGETGENLMLTETVGPDQIAEVVSRWTGIPVTRLGQNEKARLIGLADRLHQRVVGQYEAVNAVGEAVLRSRAGLGRPQQPTGSFLFLGPTGVGKTELAKALAEQLFDHENLLVRIDMSEYMEQHSVARLIGAPPGYVGHEEGGQLTEQVRRRPYSVILFDEVEKAHVAVFNTLLQVLDDGRLTDGQGRTVDFRNTVIIMTSNLGAEHLLAGMVGNSMKVARDLVMQEVRRHFRPELLNRLDEIVIFDPLSHEQLRKVARLQMKDVAVRLAERGVALAVTDAALDVILSLSYDPVYGARPIRRWIEKRIVAELSKMLIREEIDENSTVYIDAAPSKDELTYGVDKHGGLVNARTGHKSDILIQVPSGAVEGDAAHAVKKMKIMQDGGEVDDMEEE

SEQ ID NO: 33844 - DNA, 2742 bp, Triticum turgidum subsp
  CDS (1)..(2742)
atgaatcccgacaagttcacgcacaagaccaatgaggcgctcgcggcggcgcacgagatggcgtccgaggccggccacccgcagctcacgccgctgcacctcgccgcggcgctcgcggcggacaggtcgggcatcctccgccaggccatcgcccacgcgtccggcggcaacgacgccgcggccgattcgttcgagcgcgtcgcgtccgccgcgctcaagcggctgccctcgcagtccccgccgcccgacaccgtcccggcctccacctcgctggtcaaggccgtccgccgcgcgcagtcggcgcagaagtcgcgcggcgactcgcacctcgccgtcgaccagctgctcatgggcctcctcgaggacgcgcagatctccgacgcgctcaaggaggccggtatctccgccgcgcgggtgaaggccgaggtggagaagctccggggaggcgacaaccggcgcgtggagtcggcgtcgggggacaccaacttccaggccctcaagacgtacggccgcgacctggtggaggtggccggcaagctggacccggtcatcggccgcgacgaggagatccggcgcgtggtgcggatcctgtcgcggcgcaccaagaacaaccccgtcctcatcggcgagcccggcgtgggcaagaccgccgtcgtggaggggctcgcgcagcgcgtcgtgcgcggtgacgtccccagcaacctcctggacgtgcgcctggtggcgctggacatgggcgcgctcgtggccggcgccaagtaccgcggcgagttcgaggagcggctcaaggccgtgctcaaggaggtggaggaggccgaggggaaggtgatcctgttcatcgacgagatacacctggtgctcggcgccgggcggacggaggggtccatggacgccgccaacctgttcaagccgatgctggcgagggggcagctcaggtgcatcggcgccacgaccctcgaggagtacaggaagtacgtggagaaggacgcggcgttcgagaggcggttccagcaggtgttcgtggcggagcccagcgtccccgacaccgtcagcatactgagagggctcaaggagaagtacgagggccaccatggtgtgaggatccaggaccgcgcgctcgtcattgccgcgcagctctcgtcgaggtacatcacgggtcgtcatttgcctgataaagcaatcgatttggtcgacgaggcctgtgcaaatgtgagggtgcagcttgacagccagcctgaagagattgacaacctcgagaggaagagaatccagttggaagtcgagctccatgccctcgagaaggagaaggacaaggctagcaaagctcggttagttgatgtgaggaaagagttggacgatctgcgagacaagctgcagccgctgcagatgaagtaccgcaaggagaaagagaggatcgacgagatcaggagcctgaagcagcgccgcgaagagctgcagttcactctgcaggaggccgagcgccggatggacttggcccgcgtggctgatctcagatacggtgctctgcaggaggttgacgctgccattgctaagctggagggtgagaccggcgagaacttgatgttaacagagactgtcggcccggaccagattgccgaggtggtgagccgctggactggcattcctgtcaccaggctcgggcagaatgagaaggcgaggctgatcgggcttgctgacagactgcatcagagggtggttggacagtacgaggccgtcaatgcggtcggagaggctgttttgcggtcgagggctggccttgggcggccacagcagcctactggttcattcctcttcctcggaccgaccggtgtgggtaaaaccgagctcgcaaaggctctagctgagcagctgtttgatgatgagaacctgctcgtccgcatcgacatgtctgaatacatggagcagcattcggttgcccggctaatcggagccccacctggttacgttggtcatgaggaaggagggcagctgacggagcaagtgaggaggaggccatacagtgtcgtcctcttcgacgaggttgagaaggcgcatgtggcggtattcaacactctgctccaggtcctggacgacgggcggttgaccgacgggcaaggcaggacggtggacttcaggaacaccgtgatcatcatgacctcgaaccttggcgcggagcacctgctcgccggaatggtgggcagctcgatgaaggttgctcgcgatctcgtcatgcaggaggtgaggaggcatttccggccggagctgctgaaccgtctggacgagatcgtcatcttcgaccctctgtcgcacgagcagctgcggaaggtcgcccggcttcagatgaaagatgtggcagtccgtcttgccgagaggggcgtcgctctggccgtcaccgacgccgccctggacgtcatcctctcactctcttacgatccggtgtatggcgccaggccaatcaggagatggatcgagaagaggatagtgacggagctgtccaagatgttgatccgcgaggagatcgacgagaattccacggtgtacatcgacgccgcgcccagcaaggacgagctgacctatggcgtcgacaagcacggggggctggtgaacgcgcgcacgggccacaagtccgatatcctcatccaggtccctaacggagctgtcgggggcgatgcggcgcacgccgtgaagaagatgaagatcatgcaggacggcggagatgtggacgacatggaggaagagtag

SEQ ID NO: 33845 - protein, 913 aa, Triticum turgidum subsp
MNPDKFTHKTNEALAAAHEMASEAGHPQLTPLHLAAALAADRSGILRQAIAHASGGNDAAADSFERVASAALKRLPSQSPPPDTVPASTSLVKAVRRAQSAQKSRGDSHLAVDQLLMGLLEDAQISDALKEAGISAARVKAEVEKLRGGDNRRVESASGDTNFQALKTYGRDLVEVAGKLDPVIGRDEEIRRVVRILSRRTKNNPVLIGEPGVGKTAVVEGLAQRVVRGDVPSNLLDVRLVALDMGALVAGAKYRGEFEERLKAVLKEVEEAEGKVILFIDEIHLVLGAGRTEGSMDAANLFKPMLARGQLRCIGATTLEEYRKYVEKDAAFERRFQQVFVAEPSVPDTVSILRGLKEKYEGHHGVRIQDRALVIAAQLSSRYITGRHLPDKAIDLVDEACANVRVQLDSQPEEIDNLERKRIQLEVELHALEKEKDKASKARLVDVRKELDDLRDKLQPLQMKYRKEKERIDEIRSLKQRREELQFTLQEAERRMDLARVADLRYGALQEVDAAIAKLEGETGENLMLTETVGPDQIAEVVSRWTGIPVTRLGQNEKARLIGLADRLHQRVVGQYEAVNAVGEAVLRSRAGLGRPQQPTGSFLFLGPTGVGKTELAKALAEQLFDDENLLVRIDMSEYMEQHSVARLIGAPPGYVGHEEGGQLTEQVRRRPYSVVLFDEVEKAHVAVFNTLLQVLDDGRLTDGQGRTVDFRNTVIIMTSNLGAEHLLAGMVGSSMKVARDLVMQEVRRHFRPELLNRLDEIVIFDPLSHEQLRKVARLQMKDVAVRLAERGVALAVTDAALDVILSLSYDPVYGARPIRRWIEKRIVTELSKMLIREEIDENSTVYIDAAPSKDELTYGVDKHGGLVNARTGHKSDILIQVPNGAVGGDAAHAVKKMKIMQDGGDVDDMEEE

SEQ ID NO: 33846 - DNA, 2754 bp, Triticum turgidum subsp
  CDS (1)..(2754)
atgaacccggacaacttcacgcacaagaccaacgaggcgctggtggcggcgcacgaggcggcgtcggaggccggccacgcgcagatcacgccgctgcacctggcggcggcgctggcggcggacaggtcgggcatcctgcggcaggcggtggcgggggcgtccggcgggaacgcgtccgcgggggactcgttcgagcgcgtgctctccgccgcgctcaagaagctgccgtcgcagtcgccgccgccggactccgtgccggcctccacggcgctcatcaaggccatccgccgcgcgcagtcggcgcagaagaagcgcggggactcgcacctcgccgtcgaccagctgctcatgggcctcctcgaggacgcgcagatcgccgactgcctcaaggaggccggcgtgtccgcctcgcgggtgcgcgccgagctcgagaagctccgcggcggggacaacgcgcgcaaggtcgagtccgcctccggcgacaccaacttccaggcgctcaagacgtacggccgcgacctcgtcgaggtggccggcaagctcgaccccgtcatcggccgcgacgaggagatccgccgcgtcgtgcgcatcctctcgcgccgcaccaagaacaaccccgtcctcatcggcgagcccggcgtgggcaagacggccgtcgtggagggcctcgcgcagcgcgtcgtgcgcggggacgtgcccagcaacctgctcgacgtccgcctcgtcgcgctcgacatgggcgccctcgtcgccggcgccaagtaccgcggcgagttcgaggagcggctcaaggccgtgctcaaggaggtggaggaggccgacggcaaggtcatcctcttcatcgacgagatacacctcgtcctcggtgccggcaggacggaggggtccatggacgcggccaacctgttcaagccgatgctcgcgcgtggccagctccggtgcatcggcgccaccacgctggaggagtaccgcaagtacgtcgagaaggacgccgcgttcgagcggcggttccagcaggtgtacgtggccgagccgagcgtcgccgacaccatcagcatcctgcgagggctcaaggagaagtacgaggggcaccacggcgtgcgcatccaggaccgcgccatcgtcgtcgcggcgcagctctcggcgaggtacatcatgggccggcacctgccggacaaggccatcgacctggtggacgaggcgtgcgcgaacgtgagggtgcagctggacagccagccggaggagatcgacaacctggagaggaagcggattcagctggaggtggagctccacgcgctggagaaggagaaggacaaggccagcaaggcccggctggtggaggtgaggaaggagctggacgacctgagggacaagctgcagccgctgaccatgaagtaccgcaaggagaaggagcggatcgacgagatccggaagctgaagcagcggcgcgaggagctgcagttcacgctgcaggaggcggagcggcgcatggacctggcacgcgtcgccgacctcaagtacggcgccctccaggagatcgacgccgccatcgccaagctggagggcgagaccggcgagaacctgatgctcaccgagaccgtcggccccgagcagatcgcggaggtggtgagccggtggaccggcatcccggtgacccggctcgggcaaaacgacaaggagcggctggtgggcatggcggacaggctgcacacgagggtggtcgggcagacggaggccgtgaacgccgtcgccgaggcggtgctgaggtccagggcggggcttggacggccgcagcagcccaccgggtcgttcctcttcctgggcccgaccggcgtaggcaagaccgagctcgccaaggccctcgccgagcagctgttcgacgacgagaacctgctcgtccgcatcgacatgtccgagtacatggagcagcactccgtcgctcgcctcatcggagcgccacctggctatgtcgggcacgaggagggcgggcagctgacggagcaggtgaggaggcggccgtacagcgtgatcctgttcgacgaggtggagaaggcgcacgtggcggtgttcaacacgctcctccaggtgctggacgacggccggctgaccgacgggcagggcaggacggtggacttccggaacaccgtgatcatcatgacctccaacctcggcgccgagcacctcctcgccgggatggtcggcaagaactccatgaaggtcgcgcgcgacctcgtcatgcaggaggtgaggaggcacttcaggccggagctgctgaaccggctggacgagatcgtcgtcttcgacccgctgtcccacgagcagctgaggaaggtcgctcgcctgcagatgagggacgtggccgtccggctcgccgagcgcggcgtcgccctggccgtcaccgacgccgcgctggacgtcatcctgtcgctggcctacgatccagtgtatggcgctcggccgatcaggaggtggatcgagaagcgggtggtgacgcagctgtccaagatgctgatccaggaggagatcgacgagaactgcacggtgtacatcgacgccgccaacaaggacgagctggcctaccgggtggaccgcagcggcgggctggtgaacgccgagacggggcagaggtccgacatcctcatccaggtgcccaacggcgccctcggcggcggcggcggcgaggcggccaaggccgtgaagaagatgagggtgatggaggacggggacgaggacagcatggacgaggatgtttga

SEQ ID NO: 33847 - protein, 917 aa, Triticum turgidum subsp
MNPDNFTHKTNEALVAAHEAASEAGHAQITPLHLAAALAADRSGILRQAVAGASGGNASAGDSFERVLSAALKKLPSQSPPPDSVPASTALIKAIRRAQSAQKKRGDSHLAVDQLLMGLLEDAQIADCLKEAGVSASRVRAELEKLRGGDNARKVESASGDTNFQALKTYGRDLVEVAGKLDPVIGRDEEIRRVVRILSRRTKNNPVLIGEPGVGKTAVVEGLAQRVVRGDVPSNLLDVRLVALDMGALVAGAKYRGEFEERLKAVLKEVEEADGKVILFIDEIHLVLGAGRTEGSMDAANLFKPMLARGQLRCIGATTLEEYRKYVEKDAAFERRFQQVYVAEPSVADTISILRGLKEKYEGHHGVRIQDRAIVVAAQLSARYIMGRHLPDKAIDLVDEACANVRVQLDSQPEEIDNLERKRIQLEVELHALEKEKDKASKARLVEVRKELDDLRDKLQPLTMKYRKEKERIDEIRKLKQRREELQFTLQEAERRMDLARVADLKYGALQEIDAAIAKLEGETGENLMLTETVGPEQIAEVVSRWTGIPVTRLGQNDKERLVGMADRLHTRVVGQTEAVNAVAEAVLRSRAGLGRPQQPTGSFLFLGPTGVGKTELAKALAEQLFDDENLLVRIDMSEYMEQHSVARLIGAPPGYVGHEEGGQLTEQVRRRPYSVILFDEVEKAHVAVFNTLLQVLDDGRLTDGQGRTVDFRNTVIIMTSNLGAEHLLAGMVGKNSMKVARDLVMQEVRRHFRPELLNRLDEIVVFDPLSHEQLRKVARLQMRDVAVRLAERGVALAVTDAALDVILSLAYDPVYGARPIRRWIEKRVVTQLSKMLIQEEIDENCTVYIDAANKDELAYRVDRSGGLVNAETGQRSDILIQVPNGALGGGGGEAAKAVKKMRVMEDGDEDSMDEDV

SEQ ID NO: 33848 - DNA, 2742 bp, Triticum turgidum subsp
  CDS (1)..(2742)
atgaacccggacaacttcacgcacaagaccaacgaggcgctggtggcggcgcacgaggcggcgtcggaggccggccacgcgcagatcacgccgttgcacctggcggcggcgctggcggcggacaagtcgggcatcctgcggcaggccgtcgcgggggcgtccggcgggaatgcgtccgcgggggactcgttcgagcgcgtgctcgccggcgcgctcaagaagctgccgtcgcagtcgccgccgccggactccgtgccggcctccacggcgctcatcaaggccatccgccgcgcgcagtcggcgcagaagaagcgcggggactcgcacctcgccgtcgaccagctgctcatgggcctcctcgaggacgcgcagatcgccgactgcctcaaggaggccggcgtgtccgcctcgcgggtgcgcgccgagctcgacaagctccgcggcggggacaactcgcgcaaggtcgagtccgcctccggcgacaccaccttccaggcgctcaagacgtacggccgcgacctcgtcgaggtggccggcaagctcgaccccgtcatcggccgcgacgaggagatccgccgcgtcgtgcgcatcctctcgcgccgcaccaagaacaaccccgtcctcatcggcgagcccggcgtcggcaagacggccgtcgtcgagggcctcgcgcagcgcgtcgtgcgcggggacgtgcccagcaacctgctcgacgtccgcctcgtcgcgctcgacatgggcgcgctcgtcgccggcgccaagtaccgcggcgagttcgaggagcggctcaaggccgtgctcaaggaggtggaggaggccgacggcaaggtcatcctcttcatcgacgagatacacctcgtcctcggcgccgggaggacggaggggtccatggacgcggccaacctcttcaagcccatgctcgccaggggccagctccggtgcatcggcgccaccacgctggaggagtaccgcaagtacgtcgagaaggacgccgcgttcgagcggcggttccagcaggtgtacgtggccgagccgagcgtcgccgacaccatcagcatcctgcgagggctcaaggagaagtacgaggggcaccacggcgtgcgcatccaggaccgcgccatcgtcgtcgcggcgcagctctcggcgaggtacatcatgggccgccacctgccggacaaggccatcgacctggtggacgaggcgtgcgccaacgtgagggtgcagctggacagccagccggaggagatcgacaatctggagcggaagcggattcagctggaggtggagctgcacgcgctggagaaggagaaggacaaggccagcaaggcccggctggtggaggtgaggaaggagctggacgacctgagggacaagctgcagccgctgaccatgaagtacaggaaggagaaggagcggatcgacgagatccggaagctgaagcagcggcgggaggagctgcagttcacgctgcaggaggccgagcggcgcatggacctggcacgcgtcgccgacctcaagtacggcgccctccaggagatcgacgccgccattgcgaagctggagggagagaccggcgagaacctgatgctcaccgagaccgtcggccccgagcagatcgcggaggtggtgagccggtggaccggcatcccggtgacccggctcgggcagaacgacaaggagcgcctggtcggcatggcggacaggctgcacacgagggtggtcgggcagacggaggccgtgaacgccgtcgccgaggcggtgctgaggtccagggcggggcttgggcggccgcagcagcccaccgggtcgttcctcttcctgggcccgaccggcgtgggcaagacagagctcgccaaggccctcgccgagcagctgttcgacgacgagaacctgctcgtccgcatcgacatgtccgagtacatggagcagcactccgtcgctcgcctcatcggcgcgccaccaggctatgtcggacacgaggagggcgggcagctgacggagcaggtgaggaggaggccgtacagcgtgatcctgttcgacgaggtggagaaggcgcacgtggcggtgttcaacacgctcctccaggtgctggacgacggccggctgaccgacgggcaaggccggacggtggacttccggaacaccgtgatcatcatgacctccaacctcggcgccgagcacctcctcgccgggatggtgggcaagaactccatgaaggtcgcccgcgacctcgtcatgcaggaggtgaggaggcacttcaggccggagctgctgaaccggctggacgagatggtgatcttcgacccgctgtcccacgagcagctgaggaaggtcgctcgcctgcagatgaaggacgtggccgtccggctcgccgagcgcggcgtcgcactggccgtcaccgacgccgcgctggacgtcatcctgtcgctggcctacgatccagtgtatggcgctcggccgatcaggaggtggatcgagaagagggtggtgacgcagctgtccaagatgctgatccaggaggagatcaacgagaactgcactgtgtacatcgacgccgccgacaaggacgagctggcctaccgggtggaccgcagcggcgggctggtgaacgccgagacggggcagaggtccgacatcctcatccaggtgcccaacggcgccctcggcggcggcggcggcggcgaggcggccaaggccgtgaagaagatgagggtcatggaggacggggacgaggatgcttga

SEQ ID NO: 33849 - protein, 913 aa, Triticum turgidum subsp
MNPDNFTHKTNEALVAAHEAASEAGHAQITPLHLAAALAADKSGILRQAVAGASGGNASAGDSFERVLAGALKKLPSQSPPPDSVPASTALIKAIRRAQSAQKKRGDSHLAVDQLLMGLLEDAQIADCLKEAGVSASRVRAELDKLRGGDNSRKVESASGDTTFQALKTYGRDLVEVAGKLDPVIGRDEEIRRVVRILSRRTKNNPVLIGEPGVGKTAVVEGLAQRVVRGDVPSNLLDVRLVALDMGALVAGAKYRGEFEERLKAVLKEVEEADGKVILFIDEIHLVLGAGRTEGSMDAANLFKPMLARGQLRCIGATTLEEYRKYVEKDAAFERRFQQVYVAEPSVADTISILRGLKEKYEGHHGVRIQDRAIVVAAQLSARYIMGRHLPDKAIDLVDEACANVRVQLDSQPEEIDNLERKRIQLEVELHALEKEKDKASKARLVEVRKELDDLRDKLQPLTMKYRKEKERIDEIRKLKQRREELQFTLQEAERRMDLARVADLKYGALQEIDAAIAKLEGETGENLMLTETVGPEQIAEVVSRWTGIPVTRLGQNDKERLVGMADRLHTRVVGQTEAVNAVAEAVLRSRAGLGRPQQPTGSFLFLGPTGVGKTELAKALAEQLFDDENLLVRIDMSEYMEQHSVARLIGAPPGYVGHEEGGQLTEQVRRRPYSVILFDEVEKAHVAVFNTLLQVLDDGRLTDGQGRTVDFRNTVIIMTSNLGAEHLLAGMVGKNSMKVARDLVMQEVRRHFRPELLNRLDEMVIFDPLSHEQLRKVARLQMKDVAVRLAERGVALAVTDAALDVILSLAYDPVYGARPIRRWIEKRVVTQLSKMLIQEEINENCTVYIDAADKDELAYRVDRSGGLVNAETGQRSDILIQVPNGALGGGGGGEAAKAVKKMRVMEDGDEDA

SEQ ID NO: 33850 - DNA, 2736 bp, Glycine max
  CDS (1)..(2736)
atgaatcctgagaagtttactcacaagactaatgaagctcttgcgtcggcccacgagctcgcgatgagttcaggccacgcgcaattgactcccatccacttggcccacgcgctgatttccgatcccaacggcatcttcgtgctagcgataaacagcgcgggcggcggcgaggaatcggcacgcgccgtggagcgagtgttgaaccaggctctgaagaagctaccctgccagtcccctccgccggacgaggtgccggcgagcaccaacctcgtgagggccatcaggagagcacaggcggcgcaaaaatcacgtggcgacacgcgtttggccgttgatcagttgatcctcggaatcctcgaagactcccaaatcggagacctgttgaaggaagcgggggttgcggtggcgaaggtagaatcggaagtggataagcttcgtgggaaggaagggaagaaggttgagagcgcttccggggatacgaatttccaagctttgaagacttatgggcgtgaccttgttgaacaagcggggaagctcgaccctgttattggccgtgacgaagagattagaagggttgtgaggattctatcacggaggactaagaacaacccggttctcgttggagaaccgggtgtgggaaaaactgcggttgtggaagggttggcacagaggatagtaagaggggatgttccaagcaaccttgctgatgtgaggcttattgcgttggatatgggggcgttggtcgcgggtgccaagtatagaggcgagtttgaggagcggttaaaggctgttttgaaggaagtggaggaggctgaggggaaggtgatactcttcattgatgagattcatttggtccttggtgctggtagaactgaaggctccatggatgctgctaatctattcaaacctatgcttgctcgcggccagcttaggtgcattggtgccaccacgcttgaggagtacaggaagtatgtggagaaggatgctgcattcgagaggaggttccaacaggtttttgtggcggaacctagtgtggttgataccattagcattcttcgtggcttgaaagagagatatgaaggccatcacggtgttagaattcaggaccgtgctttggttatggcagctcaattgtctaaccggtatataactgggcgtcatcttcctgacaaggcaattgatttggttgacgaggcttgtgcaaatgttagggttcaacttgatagtcagcctgaggaaattgataaccttgaaaggaagagaatgcagctagaagtggaacttcatgctctggagaaagagaaagacaaggctagcaaagcccgtcttgttgaagtgcggaaagaacttgatgacttgagggacaagcttcagcctttgatgatgaagtaccgaaaagagaaagagagggttgatgagattcgaaggctcaagaagaaaagagaagagcttctttttgctttacaagaggctgagagaagatatgatctggctagagctgcagacctgcgatatggagcaattcaagaggtggaaactgcaatacaacaacttgaagggagcactgaagagaatctgatgttgactgaaactgttggaccggagcaaatagctgaggttgtgagccgctggaccggtataccagttacaaggcttggccaaaatgaaaaagaaagattgattggacttggtgacagattgcacagcagagttgtaggacaagaccaagctgttaatgctgttgctgaggctgtgttgagatctagagctgggctaggaagacctcaacaaccaactggttcattcctattccttggtccaactggtgttggtaaaactgagcttgcaaaggctcttgctgagcaactatttgataatgaaaaccagttggtgagaattgatatgtccgaatacatggagcagcactcggtttcaagattgattggtgcaccaccagggtatgttggacatgaggaaggtggacaactaactgaagccgtaaggcgaagaccttacagtgtggtgctttttgatgaagtggaaaaggcacatacatctgtgttcaatactcttcttcaagttttggacgatgggaggttaactgatggacaaggccgtactgtggactttagaaacactgtaattatcatgacctcaaatcttggagcagagcacctcctcagtggactttcaggaaaatgtaccatgcaagttgctcgggatcgggtaatgcaggaggtgagaaggcaatttaggccagaattgctgaatcgacttgatgaaattgtggtatttgaccccctttcacatgaccaattgaggaaggttgcaaggctacaaatgaaggatgtagctagtcgtcttgctgagaaaggaattgccttggcagtcactgatgcagcactagactatatactttccgagagctatgatccggtgtatggtgctagaccaataaggaggtggcttgagaagaaggtggtgacagagttgtctagaatgcttgtaagagaggagattgatgagaattcaacggtttacatagatgctggacccaatgggggcgagttggtctaccgtgtagaaaagaatggaggggttgttaatcctacaactgggcagaagtccgatatcttgattcagatacctaatggacatgcacctaaaactgatgctgttcaagcagtcaagaagatgaagattgaggaaattgatgatgatgaaatggaagagtga

SEQ ID NO: 33851 - protein, 911 aa, Glycine max
MNPEKFTHKTNEALASAHELAMSSGHAQLTPIHLAHALISDPNGIFVLAINSAGGGEESARAVERVLNQALKKLPCQSPPPDEVPASTNLVRAIRRAQAAQKSRGDTRLAVDQLILGILEDSQIGDLLKEAGVAVAKVESEVDKLRGKEGKKVESASGDTNFQALKTYGRDLVEQAGKLDPVIGRDEEIRRVVRILSRRTKNNPVLVGEPGVGKTAVVEGLAQRIVRGDVPSNLADVRLIALDMGALVAGAKYRGEFEERLKAVLKEVEEAEGKVILFIDEIHLVLGAGRTEGSMDAANLFKPMLARGQLRCIGATTLEEYRKYVEKDAAFERRFQQVFVAEPSVVDTISILRGLKERYEGHHGVRIQDRALVMAAQLSNRYITGRHLPDKAIDLVDEACANVRVQLDSQPEEIDNLERKRMQLEVELHALEKEKDKASKARLVEVRKELDDLRDKLQPLMMKYRKEKERVDEIRRLKKKREELLFALQEAERRYDLARAADLRYGAIQEVETAIQQLEGSTEENLMLTETVGPEQIAEVVSRWTGIPVTRLGQNEKERLIGLGDRLHSRVVGQDQAVNAVAEAVLRSRAGLGRPQQPTGSFLFLGPTGVGKTELAKALAEQLFDNENQLVRIDMSEYMEQHSVSRLIGAPPGYVGHEEGGQLTEAVRRRPYSVVLFDEVEKAHTSVFNTLLQVLDDGRLTDGQGRTVDFRNTVIIMTSNLGAEHLLSGLSGKCTMQVARDRVMQEVRRQFRPELLNRLDEIVVFDPLSHDQLRKVARLQMKDVASRLAEKGIALAVTDAALDYILSESYDPVYGARPIRRWLEKKVVTELSRMLVREEIDENSTVYIDAGPNGGELVYRVEKNGGVVNPTTGQKSDILIQIPNGHAPKTDAVQAVKKMKIEEIDDDEMEE

SEQ ID NO: 33852 - DNA, 2736 bp, Vitis vinifera
  CDS (1)..(2736)
atgaatccagagaaattcacccacaagacaaatgagactcttgctggggctcatgagcttgctatgaactctggccatgctcagctcacaccacttcacgttgctgtggctttgataactgatcacaatggcatcctccggcaagccataatcggtgctggtggaaatgaggaggctgccaactctgttgaaagagtcttcaataaagctctgaagaaactcccaactcagagtcctcctccagatgaaatcccagtaagcactactctaatcaaagtggttcgaagagcccaatcttcacaaaagtcacggggtgacacccatttagcagttgatcaattgattcttggccttcttgaggattcccaaattggtgatttgcttaaagaagccggggttagtacttctagagtgaaatctgaggttgagaagcttcgagggaaagaaggtaagaaggtggaaagtgcttctggggacaccacattccaggcattgaagacttatgggcgtgaccttgttgagcaagctggaaagcttgatcctgtcattggccgggacgaagagattcggagggtcatcaggattctttcaaggaggaccaagaacaaccctgttcttattggagaaccaggtgtgggtaagactgctgttgttgaaggattagctcagagaattgtaagaggggacgttcccagtaatctcgctgaagtgaggcttatagcattggatatgggtgctttggttgctggggcaaaatatagaggagaattcgaggagaggttgaaatctgttttgaaagaagtggaagaggcagaagggaaagtgattttattcattgatgaaattcaccttgttcttggtgctggtcggactgaaggatctatggatgctgctaacttgtttaagcccatgcttgccagaggtcagctacgctgcatcggagcaacgacccttgaggaatacagaaagtatgttgagaaagatgccgcttttgagaggcggttccagcaagtttatgtagctgagcccagcgtccctgacacaataagcattcttcgagggctaaaagaaaggtatgaagggcatcatggtgttcgaattcaggaccgagctcttgtagttgcagcccaactatcaagccgatacatcactggccgacatctgccagacaaggcaatcgacctggttgatgaagcttgcgccaatgtgagagttcaacttgatagccagcccgaagaaatcgacaatttggaaaggaagagaatgcaattagaagttgaacttcatgctcttgaaaaggagaaggacaaagccagtaaagctcgtcttgttgaagtccgcagagagcttgacgacttgagggacaagcttcaacccttgatgatgaagtacaaaaaggagaaagaaaggattgatgagcttcgcaggctaaaacagaaaagagaggagctcttgtttgctttacaagaggctgaaagaagatatgatttagccagagctgctgatttgcgatatggggcaattcaagaagtggaggctgctatagcaaaccttgaaggaaccactgatgagaacatgatgttaacggagactgttgggcctgagcagattgctgaggtggtgagccgctggactggcatccctgtcactaggcttggacaaaatgataaagaaaggttaattgggcttgcggagaggctgcatcagagagtggtgggacaggatcaggcagtcagtgctgtggcagaggctgtcttgagatcgagggctgggttaggaaggccacaacaacccactggttcgttcctcttcttgggtccaactggtgttggtaagactgagcttgccaaggccctggctgaacagctctttgatgatgaaaatcttttggtgagaattgacatgtccgagtatatggagcagcattcagtttcaagattgattggggctcctcctggatatgttggacatgatgaaggtgggcaactcacagaggcagtaagaaggaggccttatagtgttgtactgttcgatgaagtagagaaagcacatatcgccgtattcaataccctcctccaggttttagacgatggaaggttaactgatggccaaggccgcactgtagacttcacaaacacagtgatcatcatgacttcaaaccttggagctgagcatctcctctcgggtttagtaggcaagtgtacaatgcaagatgctcgtgaccgggtgatgcaggaggtgagaaggcacttcaggccagagttgcttaaccggctggatgaaattgtggtatttgatcccctctcacatgatcaactgagaaaggttgccaggctacaaatgaaggacgttgcaagccgcttggcagagaggggcattgctctggctgtgactgatgcagcattggatgttgttctagcagagagttatgatccggtttacggtgcaagacccattaggagatggctggagaagaaggtggtgactgagctatcaaagatgctcataagggaggagatcgatgaaaactcaactgtttatatagatgcgggagtgtcaggaaaggggttggcgtaccgagtagaaaacaatggggggctggtgaatgcatccaccggacaaaagtcagacgtgttgattcggatcccaaacgggcaaagaagcgatgctgcccaagcggtgaagaagatgaagatcgaagaaatagaagacgaagaggatgagatggatctataa

SEQ ID NO: 33853 - protein, 911 aa, Vitis vinifera
MNPEKFTHKTNETLAGAHELAMNSGHAQLTPLHVAVALITDHNGILRQAIIGAGGNEEAANSVERVFNKALKKLPTQSPPPDEIPVSTTLIKVVRRAQSSQKSRGDTHLAVDQLILGLLEDSQIGDLLKEAGVSTSRVKSEVEKLRGKEGKKVESASGDTTFQALKTYGRDLVEQAGKLDPVIGRDEEIRRVIRILSRRTKNNPVLIGEPGVGKTAVVEGLAQRIVRGDVPSNLAEVRLIALDMGALVAGAKYRGEFEERLKSVLKEVEEAEGKVILFIDEIHLVLGAGRTEGSMDAANLFKPMLARGQLRCIGATTLEEYRKYVEKDAAFERRFQQVYVAEPSVPDTISILRGLKERYEGHHGVRIQDRALVVAAQLSSRYITGRHLPDKAIDLVDEACANVRVQLDSQPEEIDNLERKRMQLEVELHALEKEKDKASKARLVEVRRELDDLRDKLQPLMMKYKKEKERIDELRRLKQKREELLFALQEAERRYDLARAADLRYGAIQEVEAAIANLEGTTDENMMLTETVGPEQIAEVVSRWTGIPVTRLGQNDKERLIGLAERLHQRVVGQDQAVSAVAEAVLRSRAGLGRPQQPTGSFLFLGPTGVGKTELAKALAEQLFDDENLLVRIDMSEYMEQHSVSRLIGAPPGYVGHDEGGQLTEAVRRRPYSVVLFDEVEKAHIAVFNTLLQVLDDGRLTDGQGRTVDFTNTVIIMTSNLGAEHLLSGLVGKCTMQDARDRVMQEVRRHFRPELLNRLDEIVVFDPLSHDQLRKVARLQMKDVASRLAERGIALAVTDAALDVVLAESYDPVYGARPIRRWLEKKVVTELSKMLIREEIDENSTVYIDAGVSGKGLAYRVENNGGLVNASTGQKSDVLIRIPNGQRSDAAQAVKKMKIEEIEDEEDEMDL

SEQ ID NO: 33854 - DNA, 2943 bp, Solanum lycopersicum
  CDS (1)..(2943)
atgtctaccgtgacgtcattttccggcgtacagttttgcgttccttcttcttcttccaattcttcaaacagagttgctttattttcatcccattcagcgccgtacctgaacttctcaggcaaatcgcgagttcttggcaagtgtagttcgttgaaactgaagaggaaggatgtgttcttcagtaggaaaactgagaaactttctcagggctcaaggcttaccgtacgttgtgatgcttcaaatggaaggatcactcagcaagattttacagaaatggcatggcaagcaattgttgcatcgccagaaatagctaaagagaacaagcatcaaatagtagagactgagcacttgatgaaggcactgttggagcaaaagaatgggctggctcgtcgcatattctccaaggcgggtgtagataatacccgccttttagaggctactgataagtttattagacaacaaccaaaggttattggtgagacagcaggttctatgttaggccgagagttggaaggtctgatgcagagagccagggagtacaagaaagagtatggtgattcctttgtgtcagttgagcatttggtgcttggcttcattcaagataaacgatttgggaagcaactgtttaatgatttccagatttccctgaagacactgaaaactgccattgaatccataaggggacgccaaaatgttattgatcaagatcctgaagggaagtatgaatcactagaaaaatatggaaaagacctgactgctatggctagagcggggaagcttgacccagttataggaagagatgatgagatacgtagatgcatacaaatcctctcaaggagaacaaagaataacccagtgttaattggtgagcctggagttgggaaaactgcaatctctgaagggcttgctcagagaattgtgcaaggagatgtacctcaggctttgatgaatcgaaggttgatatctcttgatatgggtgcgctcatagctggtgcaaaatatcgtggtgaatttgaagacagattgaaggcagtgcttaaggaagtgacagaatctgaaggacagatcatcctttttattgatgagatacatactgttgttggtgcaggtgctactaatggtgcaatggatgctgggaatctattgaagccgatgcttggtcgaggagaactacgatgtattggtgcgaccaccttggatgaataccgtaaatatattgagaaagatcctgccctggagcgtcgtttccagcaagtttatgttgaccagcctacagttgaagacactgtctccatacttcgcggattacgtgaaagatatgagctgcatcacggggttcgcatttcagacactgcgcttgtcgacgcagctattctttcggaccgttatattagtggacgttttctacctgacaaagctattgacctagttgatgaagctgctgcaaaactgaaaatggagatcacctcaaaacctacagcccttgacgagatcaatcgtgcagttttgaagttggagatggagaggctatctctaactaatgatacagataaagcatcgaaagaccggttaaaccgtcttgagactgaattgtctcttctgaaggagaggcaagctgagctgactgagcagtgggagcatgaaaagagtgtgatgactcgcttgcagtccattaaggaagagatcgaccgggtaaatcttgagatccagcaagcagagcgggaatatgatcttaatcgtgctgctgaacttaagtatgggagtctaaacaccttgcagcgtcaacttgaagcttcagaaaaagaactgagtgattatatgaagtctggaaaatcgatgctcagagaagaagtaactgggaatgatgttgcagagattgttagtaagtggactgggattcctgtttctaagctacaacagtcggagagggaaaagctgttgcatttagaggaagagttgcacaaacgtgttgttggtcaagatccagcagtaagagcagtagcagaggcaatccagcgctcgcgtgctggactttcagatcctcatcgtcctattgcaagctttatgttcatgggtcccactggagttggaaagacggagttagctaaggcccttgctaactatttgttcaatactgaagaggcacttgtgcgcatcgatatgagtgaatacatggagaagcatgcagtttcaagattgataggagctccccctggttatgtcgggtatgaagaaggggggcagttgacagagattgttcgccgaagaccttatgcagttatattgtttgatgaaattgagaaggcccattcggatgtatttaatgtgttcctgcaaatcttagatgatggtagggtgaccgactcgcaaggacgcacagtgagtttcaccaatactgtcatcatcatgacatcaaatgttggttcacaatatatcctaaatacagatgataatgatgatgattcatcgaaggaagcgacttatcaaacaataaagcaaagggtgatggatgctgcacgtgcagttttccgccctgagttcatgaaccgggttgatgaatatatagtattccagcctcttgatcgtgaccagatcagtagcattgtgcgattacagcttgaaagagtgcagcagagattagctgatcgtaaaatgaagattcaagtgagtgaagctgctattcaattgcttggaagtcttggttatgaccccaactatggagcacggccagtgaagcgggtgatccagcagaatgttgagaacgaattggccaaaggaatattaagaggagaattcaaggatgaggatactattttagtagacacggaggtcagcgcattttcgaatggacaacttcctcagcagaagctagtgtttaaaagacaagagtctggttcagattctccagctgagaaccaagaagctttctctcagaaactatga

SEQ ID NO: 33855 - protein, 980 aa, Solanum lycopersicum
MSTVTSFSGVQFCVPSSSSNSSNRVALFSSHSAPYLNFSGKSRVLGKCSSLKLKRKDVFFSRKTEKLSQGSRLTVRCDASNGRITQQDFTEMAWQAIVASPEIAKENKHQIVETEHLMKALLEQKNGLARRIFSKAGVDNTRLLEATDKFIRQQPKVIGETAGSMLGRELEGLMQRAREYKKEYGDSFVSVEHLVLGFIQDKRFGKQLFNDFQISLKTLKTAIESIRGRQNVIDQDPEGKYESLEKYGKDLTAMARAGKLDPVIGRDDEIRRCIQILSRRTKNNPVLIGEPGVGKTAISEGLAQRIVQGDVPQALMNRRLISLDMGALIAGAKYRGEFEDRLKAVLKEVTESEGQIILFIDEIHTVVGAGATNGAMDAGNLLKPMLGRGELRCIGATTLDEYRKYIEKDPALERRFQQVYVDQPTVEDTVSILRGLRERYELHHGVRISDTALVDAAILSDRYISGRFLPDKAIDLVDEAAAKLKMEITSKPTALDEINRAVLKLEMERLSLTNDTDKASKDRLNRLETELSLLKERQAELTEQWEHEKSVMTRLQSIKEEIDRVNLEIQQAEREYDLNRAAELKYGSLNTLQRQLEASEKELSDYMKSGKSMLREEVTGNDVAEIVSKWTGIPVSKLQQSEREKLLHLEEELHKRVVGQDPAVRAVAEAIQRSRAGLSDPHRPIASFMFMGPTGVGKTELAKALANYLFNTEEALVRIDMSEYMEKHAVSRLIGAPPGYVGYEEGGQLTEIVRRRPYAVILFDEIEKAHSDVFNVFLQILDDGRVTDSQGRTVSFTNTVIIMTSNVGSQYILNTDDNDDDSSKEATYQTIKQRVMDAARAVFRPEFMNRVDEYIVFQPLDRDQISSIVRLQLERVQQRLADRKMKIQVSEAAIQLLGSLGYDPNYGARPVKRVIQQNVENELAKGILRGEFKDEDTILVDTEVSAFSNGQLPQQKLVFKRQESGSDSPAENQEAFSQKL

SEQ ID NO: 33856 - DNA, 2880 bp, Oryza sativa subsp
  CDS (1)..(2880)
atggagagaaccctactgaacccgccgccgtctctccgatcgccggcatgccgtaccaccaccgccaccaggatcaggccctcctcctccatggctactatgatcccaacgcctccgccgatgcggcacgcccgcctcgtcaaggcatcggccgcgggccggcgagagctccacgctcccccgatcgcgccgccaatattactcggcctccgttcacccgcggcggcgtcgtacgggcgtgcgagcggcggcggcgggaggaggaggggggcgcgggtggtggcgaggatggggttcgacatgttcacggacaaggcgatcaaggcgatcatgatggcgcaggaggaggcgcggcggctggggcaccacgccgccggcagcgagcagctcctcctcggcgtcatcggggagggcaccggcatcggcgccaaggtgctcaggggcgccgggctcagcctcaaggcggcgcgcgccgaggtggagaagatggccgggaggggccccggcatggtccccatggagatcaagttcacccccgccgccaagaacgtcctccaggcctcccaagaagaagcgcaccagctagggcataactatgttggatctgaacacctcctacttgggttgctccgtgagcatggtgccgcgcttgttgtgctgaagaactttcaggctgatcccagcaacatccgcagtgaggttatccgaatgatcagtgacacctctgaagatcatcaacctgttagtgctgcagttgggggaggaagcagtacaactaagatacccacacttttagagtatggtactaatctgacaaaactagcagaggaggggaagctggatcctgttgtcggaaggcaaaaccaggttgaccgtgtagtgcagattctcggcaggcggaccaagaacaacccctgcctgattggagagcctggagtagggaaaacagcgatcgcggaagggctcgcgcagcgcattgctgcaggaaatgtgcctgaaacaatcgatgggaaaacgaatttacaatttgagcactatgagattgcgaagagttacctttctagattaccagaaaggaagcatggaaatcctttccaggttatcacccttgatatgggtctacttgttgctggtacaaaataccgtggtgagtttgaggagagattgaagaagctgatggacgaagtgaagcagaatggtgagataattctcttccttgatgaagttcacaccctggtgggtgctggagcagctgaaggggccatcgacgctgccaacatcctgaagccagcgctagcaagaggtgaactacagtgtattggagccactaccattgatgaatacagaaagcacattgagaaagacccagcactggagaggcgttttcagcctgtcaaggtccctgagccaactgttgatgagaccataggaattctcaaaggtctccgggagcgatatgagatccatcataaggtccagtatactgatgagtcgttgatcgcagctgctcggctctcataccagtacatcagtgatcgtttcctcccggataaagcaattgacttggttgatgaagcaggttctcttgtcaggctgcgaaatgcccagctacctgatgaagctaaagaactcgagaagaagctcaagaagatcatggcagagaagagcgaagccatccgaagccaagacttcgagaaggcgggagcgcttcgcggcgaggaggtggagctcaagtcggagatcatgtcgctggtcgacaagagcaaggagatgagcaaggcggcggtggactccggcgagtcgccggggccgacggtgacggaggcggacgtccagcacatcgtctccagctggaccggcgtccccgtggagaaggtcaccgtcgacgagtcgagccgtctcctcgccatggagtcgtcgctgcaccggcgcatcgtcggccaggacgaggccgtgacggcgatcagccgcgccatccgccgcgcccgcgtcgggctccgcgacccgcgccgcccgatcgcgagcttcatcttcgccgggccgacgggggtcggcaagtcggagctcgccaaggcgctggcggcgtactactacggctcgccggaggccatggtgcggctcgacatgagcgagttcatggagaagcacacggtggcgaagctggtgggctcgccgccggggtacgtcggctacgccgagggcggccagctgacggaggcgatccggcggcgcccctacgccgtcgtgctgttcgacgaggtcgagaaggcgcaccccgacgtgttcaacatgatgctccagatcctcgacgatggccggctcacggacagcaaggggaggacggtggatttcaagaactcgctcatcatcatgacatccaacgtcggcagcggcgtcatcgagaagggcgggaggcagctcgggttcgccggcgatggcagcggcgacggcgggtacggggtgatcaagaacatggtggaggaggagatgaagcgctacttcaggccggagttcctgaaccggctggacgagatgatcgtgttccggcagctgacgaagctggaggtgaaggagatcgccgggatcatgctcgccgaggtcaccgggcggatcggcgggaaggggatcgggctgcaggtgacggagaggttcaaggagctcgtcgtcgagcaaggcttcgacccgagctacggcgcgcggccgctgcgccgggccatcatgcggctgctggaggacacgctcacggacaagatgctcgccggggagatctgcgccggcgactcggtgatcgtcgacgccgacggtgacgggaacgtcgtcgtggtcggccggcgcagcgccggcttgccggacctgaaatcgccggcgtttactgtctag

SEQ ID NO: 33857 - protein, 959 aa, Oryza sativa subsp
MERTLLNPPPSLRSPACRTTTATRIRPSSSMATMIPTPPPMRHARLVKASAAGRRELHAPPIAPPILLGLRSPAAASYGRASGGGGRRRGARVVARMGFDMFTDKAIKAIMMAQEEARRLGHHAAGSEQLLLGVIGEGTGIGAKVLRGAGLSLKAARAEVEKMAGRGPGMVPMEIKFTPAAKNVLQASQEEAHQLGHNYVGSEHLLLGLLREHGAALVVLKNFQADPSNIRSEVIRMISDTSEDHQPVSAAVGGGSSTTKIPTLLEYGTNLTKLAEEGKLDPVVGRQNQVDRVVQILGRRTKNNPCLIGEPGVGKTAIAEGLAQRIAAGNVPETIDGKTNLQFEHYEIAKSYLSRLPERKHGNPFQVITLDMGLLVAGTKYRGEFEERLKKLMDEVKQNGEIILFLDEVHTLVGAGAAEGAIDAANILKPALARGELQCIGATTIDEYRKHIEKDPALERRFQPVKVPEPTVDETIGILKGLRERYEIHHKVQYTDESLIAAARLSYQYISDRFLPDKAIDLVDEAGSLVRLRNAQLPDEAKELEKKLKKIMAEKSEAIRSQDFEKAGALRGEEVELKSEIMSLVDKSKEMSKAAVDSGESPGPTVTEADVQHIVSSWTGVPVEKVTVDESSRLLAMESSLHRRIVGQDEAVTAISRAIRRARVGLRDPRRPIASFIFAGPTGVGKSELAKALAAYYYGSPEAMVRLDMSEFMEKHTVAKLVGSPPGYVGYAEGGQLTEAIRRRPYAVVLFDEVEKAHPDVFNMMLQILDDGRLTDSKGRTVDFKNSLIIMTSNVGSGVIEKGGRQLGFAGDGSGDGGYGVIKNMVEEEMKRYFRPEFLNRLDEMIVFRQLTKLEVKEIAGIMLAEVTGRIGGKGIGLQVTERFKELVVEQGFDPSYGARPLRRAIMRLLEDTLTDKMLAGEICAGDSVIVDADGDGNVVVVGRRSAGLPDLKSPAFTV

SEQ ID NO: 33858 - DNA, 2757 bp, Oryza sativa subsp
  CDS (1)..(2757)
atgccgtgcgctatgctggtggcagcagcggttgaggtcgccgtcccaaccctggctgaggctgcagccttgggagccataggtgcaattctggcagggcccttaatgcagccaactaaggttcgatcccctgtcagagtaagaaatagcaatttgaagtgccatggaaccaagatgagatctccctcaatggtttcaatgtcccagagccagcgcatcaagataccgtcttatgtcggtctaagcacagtgcatactcctgcactactcacacctgtcattagctcgagatcgacaagaactttccaaaagacagcaaaaacaatacaagaacggtctcatgccgttatgcaaatccctgaatttacacctggcactggcttgagatcaaccaatgcgattcagagaacaacagaagtactgcagagacattctcatgttggtctaaggcagccacatgctggtcgtctaagagaaatgcatacagcttcaggtaggcctgtcattggcttgacaccaaccattgtgtctcagaagacaaccaaagtgccgaaacagcctcgtttcgtcgccagggcgattgataatttcagcagggaggtgatgaatgctatcgcggttgcacacgacgaagctcaatacattgcacatctcacaatcgggagcacgaacatcctgcttagcctcatttcacagtacatttgcattttcctcctggaaatcatactcaataaggcttacaaaatgttcagagctgctgttaggagagcaaccaggggagctaagttagccacacttatggagtatgggactaatctaacaaaattagcagaggagggtaaattggaccctgttgtcggaaggcagaagcagattgatcatgtcgtccagattctgagcagacggacaaagaacaacccttgcctgatcggagagcctggtgttggaaaaacagcaatcgcagaagggcttgctcagctcattgccacaggggacgttcctgaaacaattcaacagaaaacggttatctcacttgacatgggacttcttcttgctggtacgaaatatcgaggagagttggaagaaagactgaagaatatcttggaagaaatcaagcagaacggtgaaataatactattccttgacgaagtccacactctagtaacagcaggatcagcagaaggtgctattgatgctgctaatatttttaagccagcactggcaagaggtgaactacagtgtattggagccactacaattaatgaatacaggaagcacatcgagaaagatgctgcattagaaaggcgcttccaacctgtaaaaattccagagtcaacagttgatgagaccgtaggaattctgaaaggacttcgagagagatatcagggtcatcacaaggtccaatacactgatgaagcccttgttgcagctgctgaactctcccataagcacatcagagatcgttttctccctgacaaagccattgatctgatggatgaagcaggttcgatcgtcaggctaagaaatgcccagtgtaaaccatcgaagaaggttaatgatttggaggcagagctcaagaaaaccttgaaggagaagaatgatgccatcagcatacagaacttcagaagggcaaagcagcttcgcgatcatgagctgcagctcaggaccaacatctcagctctaactgacaagaaaacgcagatgatggagccagacgccattgccatgccagtggtcaccgaagacgacgtccggcacgccatctcaaggtggaccggcgtcccattgcacaaggtgtccatggacgaatcaagaaagctcctcaagctggaggaggccctgcatcgccgcgtcgtcggccagggcgaggcggtggcggcggtcagccgcgccatccgccgcgcccgcctcggcctcaagcaccccggccggcccgtcgcgagcctcgtgttcgccgggccaaccggcgtcggcaagtcggagctcgccaaggcgctcgcggcgtactactacggctcgtcggagtcggaggaggcggccatggtgcggctcgacatgagcgagtacatggagaagcacgcggtggcgaggctggtcggctcgccgccggggtacgtctggcacggcgagggtggccagctgacggaggcggtgcgacggcggccgcacgcggtggtgctgctcgacgaggtcgagaaggcgcaccgcgacgtgttcgacctgctgctgcaggtgctcgacgacggccgcctcaccgacgggaaggggaggacggtggacttcaagaacacgctcatcgtcatgacgaccaacatcggcagcagcctcatcgtcaacaacggcggcgacggcgccgccgccgccgggaggatcaagaacacggtgaccgacgagatgaagcgccacttccggcccgagttcctgaaccggctggacgaggtgatcatgttccagccactgaccgagctcgaggtcgggaagatcgccgggatcatgctggaggagttcgccgggagggtcagggagaaggggatcaagctgaaggtgacggacaagttcagggagctcgtcgtggaggagggattcgacccgagctacggcgcgaggccgctgaggcgggccgtcgtgcggctgctggaggacaccctcgcggagaagatgctcgccggagaggtcagagaaggggattcggtgatcgtcgacgccgattcagctgggaatgccgtggtcaggaggagcaacgccatgcctgcctag

SEQ ID NO: 33859 - protein, 918 aa, Oryza sativa subsp
MPCAMLVAAAVEVAVPTLAEAAALGAIGAILAGPLMQPTKVRSPVRVRNSNLKCHGTKMRSPSMVSMSQSQRIKIPSYVGLSTVHTPALLTPVISSRSTRTFQKTAKTIQERSHAVMQIPEFTPGTGLRSTNAIQRTTEVLQRHSHVGLRQPHAGRLREMHTASGRPVIGLTPTIVSQKTTKVPKQPRFVARAIDNFSREVMNAIAVAHDEAQYIAHLTIGSTNILLSLISQYICIFLLEIILNKAYKMFRAAVRRATRGAKLATLMEYGTNLTKLAEEGKLDPVVGRQKQIDHVVQILSRRTKNNPCLIGEPGVGKTAIAEGLAQLIATGDVPETIQQKTVISLDMGLLLAGTKYRGELEERLKNILEEIKQNGEIILFLDEVHTLVTAGSAEGAIDAANIFKPALARGELQCIGATTINEYRKHIEKDAALERRFQPVKIPESTVDETVGILKGLRERYQGHHKVQYTDEALVAAAELSHKHIRDRFLPDKAIDLMDEAGSIVRLRNAQCKPSKKVNDLEAELKKTLKEKNDAISIQNFRRAKQLRDHELQLRTNISALTDKKTQMMEPDAIAMPVVTEDDVRHAISRWTGVPLHKVSMDESRKLLKLEEALHRRVVGQGEAVAAVSRAIRRARLGLKHPGRPVASLVFAGPTGVGKSELAKALAAYYYGSSESEEAAMVRLDMSEYMEKHAVARLVGSPPGYVWHGEGGQLTEAVRRRPHAVVLLDEVEKAHRDVFDLLLQVLDDGRLTDGKGRTVDFKNTLIVMTTNIGSSLIVNNGGDGAAAAGRIKNTVTDEMKRHFRPEFLNRLDEVIMFQPLTELEVGKIAGIMLEEFAGRVREKGIKLKVTDKFRELVVEEGFDPSYGARPLRRAVVRLLEDTLAEKMLAGEVREGDSVIVDADSAGNAVVRRSNAMPA

SEQ ID NO: 33860 - DNA, 2469 bp, Oryza sativa subsp
  CDS (1)..(2469)
atgtcgatccaccgcaagaagtaccgctacggcatcctcgacgccgacgccgccgatcgccctcccgtccacgcgaagtggtccagcggtatggtgaaggtgaagtacgaatgcgacgacgacgacgacggcgatggcggcggcgacgcgtggcgacgcaaggccctcctctacggcgacgaggtcggcagcgggccctcctccgccgccgccgccccgctggtgcaccgctcgcacggccgggcgtcgtcgcggccgcgcagcggcggcaagcacctccgcgctggccacctctcctcctcgcagtggtcggtgtggggcccggcgtcttccaccaacgccgtcatcaagggggacacctcgtcgtcggccgtagtgggatccaccggccgggtgcttctcgccggcgaagacgtcatcggaaggcggagtacgaagccgaagccgaagccgagtggtggcgtccccgctgccgccgccgccgcagccgccgcctacgtgaccaaggccaagccggtcgctcctccgaaggagaccgcactgcgcacgtacgggcgggacatgacggggtccgccgccgccgccgacccggtgataggccgcgacgacgaggtcgaccgcgtggtgtgcatcctgtgccgccggaccaagaacagcgccgtgctcgtcggcgcgccgggggtcggcaagacggccatcgccgagggccttgcgcgccgcgtcgcggccggggacgtccccgccgcgctcgccggcgcgcgcgtcgtggagctcgacgtcggctccctggtggcgggcacccagtaccgcggcatgttcgaggagcgcgtcaagaaggtgatccaggaggcggagggcgcggcgggcaaggtgatcctcttcatcgacgagatgcacatgctgctcggcgccggcgcgtgcaagggcggcagcatggacggcgccaacctgctcaagccggcgctggcccgtggccgcatccgctgcgtcggcgccaccaccttcgacgagtaccgcaagcacatcgagagggacgccgcgttcgagcgccggttccagaaggtgatcgtcgaggagccgaccacgcaggcgaccattgctattctgcaggggctgaagcagaggtacgaagagcaccatggcttgaagattcaggatgctgccattgtcgctgctgcacagcttgcggaccgctacattaccggtcgtcaatttcctgacaaggcgattgatctgattgatgaggcttgctccaccgtaaggctgaagattgatagtcaaaaaggggtgaacaccacaggaatgcaaaataacaatggaaatacgtcagtgaatggagtgaacgaagcaattgttggcccagatcatgttgctcaagttgtgagccgatggactggcatcccggtcactacacttgatcaagaggagaaggagaagttaatccacctggcagacagattgcacgagcgagttgttggccaggatgaagctgtcaaactggttgcacaggcagttttacgttctagggcaggccttgaacaacctggccaacctataggctctttcctctttctgggctcaaccggtgttggaaagacggagcttgcaaaagcccttgctgagcagctatttgacagcgagaagatgttgatccgctttgacatgtctgaatttgttgggagtggatctgtgttgcgtctcattggagcacctccaagctatcatggccatcaagatggcggacaattgacagaaaaagttaggacgcgtccttacagtgtcatcctttttgatgaggtggagaaggcagatccctcggtgttcaacgtgttccttcagctcctcgatgatggcatgttgactgatggcaaaggaaggacagtagatttcaagaacaccatcatcattatgacctcaaatctgggagctgagcacctaactgaaggagtgactggtgaaagaacaatggaagctgcacgggaccttgttatgaaacaagttcagaagtatttcaggcctgaacttctcaacaggctgagtgagattgtgatatttgagccgctttcgcacgacaatcttaaggaggtcgtcaaaattcagatgaagagtgtcgttaccagtgtggctcacaagggcgtatctctacttgcaagtgatgatgccttggacgtcatcttgtctgaatcatacaacccaatgtatggggcaagaccagtaaggaggtgggtgcagaagaatgtgatgacaaagctctctgagatgcttattacaggagatgctggacaggggtcaactatttccattgacgctactgatgacaagaaggggctgaactttcaagtattgaaggaggaggtagtggttccgcgaggcaagaggccagtcgaggagcttcaaagcgactcggatagcgatgacgatgtgttcgagatcgcccccataccaaagaggaagaaaggtgattattag

SEQ ID NO: 33861 - protein, 822 aa, Oryza sativa subsp
MSIHRKKYRYGILDADAADRPPVHAKWSSGMVKVKYECDDDDDGDGGGDAWRRKALLYGDEVGSGPSSAAAAPLVHRSHGRASSRPRSGGKHLRAGHLSSSQWSVWGPASSTNAVIKGDTSSSAVVGSTGRVLLAGEDVIGRRSTKPKPKPSGGVPAAAAAAAAAYVTKAKPVAPPKETALRTYGRDMTGSAAAADPVIGRDDEVDRVVCILCRRTKNSAVLVGAPGVGKTAIAEGLARRVAAGDVPAALAGARVVELDVGSLVAGTQYRGMFEERVKKVIQEAEGAAGKVILFIDEMHMLLGAGACKGGSMDGANLLKPALARGRIRCVGATTFDEYRKHIERDAAFERRFQKVIVEEPTTQATIAILQGLKQRYEEHHGLKIQDAAIVAAAQLADRYITGRQFPDKAIDLIDEACSTVRLKIDSQKGVNTTGMQNNNGNTSVNGVNEAIVGPDHVAQVVSRWTGIPVTTLDQEEKEKLIHLADRLHERVVGQDEAVKLVAQAVLRSRAGLEQPGQPIGSFLFLGSTGVGKTELAKALAEQLFDSEKMLIRFDMSEFVGSGSVLRLIGAPPSYHGHQDGGQLTEKVRTRPYSVILFDEVEKADPSVFNVFLQLLDDGMLTDGKGRTVDFKNTIIIMTSNLGAEHLTEGVTGERTMEAARDLVMKQVQKYFRPELLNRLSEIVIFEPLSHDNLKEVVKIQMKSVVTSVAHKGVSLLASDDALDVILSESYNPMYGARPVRRWVQKNVMTKLSEMLITGDAGQGSTISIDATDDKKGLNFQVLKEEVVVPRGKRPVEELQSDSDSDDDVFEIAPIPKRKKGDY

SEQ ID NO: 33862 - DNA, 2739 bp, Zea mays
  CDS (1)..(2739)
atgaatccggacaacttcacccacaagacgaacgaggcgatcgtgggggcgcacgagattgcggtggaggccggccacgcgcagctcacgccgctgcacctggccgcagtgctggctgcggacaagggcggcatcctgcggcaggccatcacgggggcgtcggggggcgacggagcggccggggactcgttcgagcgcgtgctgaacaactcgctcaagaagctgccgtcgcagtccccgccgccggactccgttccggcgtctacggcgctgatcaaggtcatccgccgggcgcagtccgcgcagaagaaacgcggggactcgcacctcgccgtcgaccagctgctgctcggcctgctcgaggactcgcagatctccgactgcctcaaggaggccggcgtgtccgcggcgcgggtgcgcgccgagcttgagaagctccgcggcggggaggggcgccgcgtagagtccgcgtcgggggataccaacttccaggcgctcaagacatacggccgggacctcgtcgagcaggccgggaagcttgaccccgtcatcggccgcgacgaggagatccgccgcgtcgtgcgcattctctcgcgccgcaccaagaataaccccgtcctcatcggcgggcccggcgttggcaagacggccgtcgtggagggcctcgcgcagcgcatcgttcgcggcgacgtgcccagtaacctcctcgacgtccgcctcatcgcgctcgacatgggcgcgctcgtcgcgggcgccaagtaccgcggcgagttcgaggagcggctcaaggccgtgctcaaggaggtggaagaggccgaggggaaggtcattctcttcatcgacgagatacacctcgtcctgggcgcgggcaggacggagggttccatggacgcggccaacctgttcaagccaatgctggcgaggggacagctcaggtgcatcggcgccaccacgctggaggagtaccgcaagtacgtggagaaggacgcagcgttcgagcggcggttccagcaggtgttcgtcgcggagccgagcgtgcccgacaccgtcagcattctgaggggcctcaaggagaagtacgaggggcaccatggcgtgaggatccaggaccgcgccctcgtggtcgcggcacagctctccgcgaggtacatcatgggtcggcacctgcctgacaaagccatagacctggtggacgaggcctgcgccaatgtgagggtgcagctcgacagccagccggaagagattgataacctggagaggaagagaatccagcttgaggttgagctccacgcgctcgagaaggagaaggacaaggccagcaaagcccggctgattgaggtcaggaaggaattggacgatctgagggtcaagctgcagcccctgaccatgaagtacaggaaggagaaggagagaattgatgagatcaggaagctgaagcagcgccgcgaggagctccagttcaccctgcaggaggccgagcgccggatggacctggcccgtgtggccgacctcaagtacggcgccctccaggaaatcgacgctgctatctccaagctggagagcgaaacaggggagaacctgatgctcaccgaaaccgtcggccctgaacaaattgcagaggtggtgagccgttggacgggtattccagtgacccggcttggccagaacgacaaggagaggctggttggcctggctgacaggcttcaccagagggtggtcggccagacagaggctgtgagcgccgtcgcagaggcggtgctgaggtcgagggccggtcttggcaggccacaacagcccactggctcgttcctcttcctgggtccgactggcgtggggaaaactgagctggccaaggccctagccgaacagctgttcgacgacgagaaccttcttgtccgcatcgacatgtcggagtacatggagcagcactcggttgcccgcctcatcggagcaccacctggctacgtcggccatgaagagggtgggcagcttactgaacaagtgaggaggaggccgtacagcgtgatcctgttcgacgaggtcgagaaggcccatgtcgccgtgttcaacaccctgctccaggtcctcgacgacggcaggctgacggatgggcaaggcaggacggtgaacttcaggaacaccgtgatcatcatgacatcgaaccccggcgccgagcacctcctcgctgggatggtgggcaagaactccatgaaggtcgctcgcgatctggtcatgcaggaggtgaggaggcacttccgccctgagctgctgaaccgtctcgacgagatcgtgatcttcgatcctctgtcccacgagcagctgaggaaggtcgctcgccttcagatgaaggatgtggccgtccgtcttgccgaaaggggcatcgctctggctgtgaccgacgccgcattggacatcatcttgtctctctcttacgatccggtgtatggcgcgcggccaatcaggaggtggatcgagaagagggtggtgacgcagctgtcgaagatgctgatccaggaggagatcgacgagaactgcacggtctacatcgacgccgcgcccggcaaggacgagctggtctacagggtggaccggagcggcggtctggtgaacgctgagacggggatgaagtcggacatcctgatccaggcccccaacagctccaccaggagcgacgctgcgcaggccgtcaagaagatgaggatcatggaggaggacgaggacggtatggacgaggagtaa

SEQ ID NO: 33863 - protein, 912 aa, Zea mays
MNPDNFTHKTNEAIVGAHEIAVEAGHAQLTPLHLAAVLAADKGGILRQAITGASGGDGAAGDSFERVLNNSLKKLPSQSPPPDSVPASTALIKVIRRAQSAQKKRGDSHLAVDQLLLGLLEDSQISDCLKEAGVSAARVRAELEKLRGGEGRRVESASGDTNFQALKTYGRDLVEQAGKLDPVIGRDEEIRRVVRILSRRTKNNPVLIGGPGVGKTAVVEGLAQRIVRGDVPSNLLDVRLIALDMGALVAGAKYRGEFEERLKAVLKEVEEAEGKVILFIDEIHLVLGAGRTEGSMDAANLFKPMLARGQLRCIGATTLEEYRKYVEKDAAFERRFQQVFVAEPSVPDTVSILRGLKEKYEGHHGVRIQDRALVVAAQLSARYIMGRHLPDKAIDLVDEACANVRVQLDSQPEEIDNLERKRIQLEVELHALEKEKDKASKARLIEVRKELDDLRVKLQPLTMKYRKEKERIDEIRKLKQRREELQFTLQEAERRMDLARVADLKYGALQEIDAAISKLESETGENLMLTETVGPEQIAEVVSRWTGIPVTRLGQNDKERLVGLADRLHQRVVGQTEAVSAVAEAVLRSRAGLGRPQQPTGSFLFLGPTGVGKTELAKALAEQLFDDENLLVRIDMSEYMEQHSVARLIGAPPGYVGHEEGGQLTEQVRRRPYSVILFDEVEKAHVAVFNTLLQVLDDGRLTDGQGRTVNFRNTVIIMTSNPGAEHLLAGMVGKNSMKVARDLVMQEVRRHFRPELLNRLDEIVIFDPLSHEQLRKVARLQMKDVAVRLAERGIALAVTDAALDIILSLSYDPVYGARPIRRWIEKRVVTQLSKMLIQEEIDENCTVYIDAAPGKDELVYRVDRSGGLVNAETGMKSDILIQAPNSSTRSDAAQAVKKMRIMEEDEDGMDEE

SEQ ID NO: 33864 - DNA, 2667 bp, Oryza sativa subsp
  CDS (1)..(2667)
atgatgcgtaccatgccaacacggaccctcaccctggggggtttccagggcctgcggcagacgaatttcctggactcgaggtcggtgattaagcgtgacttcggctctattgtcgcgagccagatttcacgcccccgagggttggggtcaagaggggtggtccgcgccatgtttgagcgcttcacggagaaggcaatcaaggtgatcatgcttgcacaggaagaagcgaggcgcctgggccacaactttgttgggacggagcaaattctactgggccttatcggtgagggcacaggaatcgcggcaaaggttctcaagtctatgggtatcaaccttaaggatgcccgtgtggaagttgagaagatcattggacgtggtagcgggtttgtggctgttgagatcccattcacgcctcgtgcaaagcgtgtcttggaactgtcacttgaagaagctcgccagctagggcataactatataggatctgagcacttacttctggggctacttcgtgagggtgaaggtgtagcagcacgggtactggaaagtcttggtgctgatccaaacaacattcgtacccaggtcataagaatggttggtgaaagcacagaagctgttggtgctggagttggtggcggaagcagtggccagaagatgcctacactcgaagagtatggcactaatttgactaagctggcagaagagggtaaactagacccagttgttggcaggcaggatcaaattgagcgtgtaactcaaattttgggaaggcggacaaagaacaacccttgcctaattggagaacctggtgttggaaagactgctattgctgaggggcttgcacaacgtatttccaatggtgacgttccagaaacaattgaaggaaagaaggttattactcttgacatggggctccttgttgctggtaccaagtaccgtggagagttcgaagaaagactgaagaaacttatggaggaaatcaaacaaaatgatgacattattctctttattgatgaagtgcacacgctaattggagcaggtgctgctgaaggtgcaattgatgctgccaacatcttgaaaccagctcttgctagaggtgaactgcagtgcattggtgccacaacacttgatgagtacaggaaacatattgagaaagatccagctttagagcgacggtttcaaccagttaaggttccagagccaactgttgatgaaacaatacaaatcttaagaggacttcgtgagcgatatgaactgcatcataagctgcgatacacagatgattctttaattgctgcagcacaattgtcataccagtatatcagtgatcgcttcctgcctgataaggctattgacttgattgatgaagcaggatctcgtgttaggctcaggcatgcacagctccctgatgaagccaaggagctggacaaagagcttcgacaggtaaccaaagacaagaacgaggctgtacgtggccaagattttgaaaaggctggggaattaagagatcgggaaatggaattgaaggcccaaattacagccattattgacaagagcaaggaaatggttaaagcagagactgaatccggtgaagtcggtccccttgttactgaggcagatattcagcatatcgtgtcctcttggactggaatacctgtggagaaagtctcatctgatgagtctgaccgtctccttaagatggaggagacactccatacgcgtatcattggtcaggatgaggctgtcaaagctattagccgtgccatccgccgtgctcgtgttggcctcaagaacccaaatcggcctattgctagcttcatcttctctggaccaactggtgtcggtaaatcagagttagcaaaggctcttgcagcctactactttggctcagaagaggccatgatcagactagacatgagtgagttcatggagaggcatacagtctccaagctcattggatcacctccaggttatgttggttacactgagggtggtcaactgacagaagcagttcgccgccgaccatacactgttgttctcttcgatgagattgaaaaggcacatcctgatgtcttcaacatgatgcttcagatcttagaagatggaagactaactgacagcaagggtcggactgttgatttcaagaacacactgttgatcatgacatcaaatgttggaagcagtgtcattgagaagggaggacggaagattggatttgaccttgactatgatgagaaagacaccagctacaataggattaagagcttggtgactgaagagctgaagcagtacttccgacctgagttcttaaacagattggacgagatgattgtgttccggcagcttaccaagctggaggttaaggagattgctgatattatgctcaaagaagtgtttgacaggctcaaggcaaaggacatcgacctccaggtgacagagaagttccgggatagagttgtcgacgaaggttacaacccaagctatggtgccaggcctctgcggcgtgctattatgaggcttctggaggacagcttggcggagaagatgttggctggcgaggtcaaggaaggtgactctgctattgttgatgtggattcagagggcaaggtgatagttcttaacggtggtagtggtgttccggaaccactggcacctgctctgagtgtctaa

SEQ ID NO: 33865 - protein, 888 aa, Oryza sativa subsp
MMRTMPTRTLTLGGFQGLRQTNFLDSRSVIKRDFGSIVASQISRPRGLGSRGVVRAMFERFTEKAIKVIMLAQEEARRLGHNFVGTEQILLGLIGEGTGIAAKVLKSMGINLKDARVEVEKIIGRGSGFVAVEIPFTPRAKRVLELSLEEARQLGHNYIGSEHLLLGLLREGEGVAARVLESLGADPNNIRTQVIRMVGESTEAVGAGVGGGSSGQKMPTLEEYGTNLTKLAEEGKLDPVVGRQDQIERVTQILGRRTKNNPCLIGEPGVGKTAIAEGLAQRISNGDVPETIEGKKVITLDMGLLVAGTKYRGEFEERLKKLMEEIKQNDDIILFIDEVHTLIGAGAAEGAIDAANILKPALARGELQCIGATTLDEYRKHIEKDPALERRFQPVKVPEPTVDETIQILRGLRERYELHHKLRYTDDSLIAAAQLSYQYISDRFLPDKAIDLIDEAGSRVRLRHAQLPDEAKELDKELRQVTKDKNEAVRGQDFEKAGELRDREMELKAQITAIIDKSKEMVKAETESGEVGPLVTEADIQHIVSSWTGIPVEKVSSDESDRLLKMEETLHTRIIGQDEAVKAISRAIRRARVGLKNPNRPIASFIFSGPTGVGKSELAKALAAYYFGSEEAMIRLDMSEFMERHTVSKLIGSPPGYVGYTEGGQLTEAVRRRPYTVVLFDEIEKAHPDVFNMMLQILEDGRLTDSKGRTVDFKNTLLIMTSNVGSSVIEKGGRKIGFDLDYDEKDTSYNRIKSLVTEELKQYFRPEFLNRLDEMIVFRQLTKLEVKEIADIMLKEVFDRLKAKDIDLQVTEKFRDRVVDEGYNPSYGARPLRRAIMRLLEDSLAEKMLAGEVKEGDSAIVDVDSEGKVIVLNGGSGVPEPLAPALSV

SEQ ID NO: 33866 - DNA, 2781 bp, Paracoccidioides brasiliensis
  CDS (1)..(2781)
atgaacggaacacagttgacagacagagctaatcaagctcttgtcgatgctcacgcactcgcagagcagcatgctcacccacagctcctccccattcatctcgcagtttcgctcctggacccccctgtggatgagtccaaggaccagcaagttaccacacatccctcacaccaagccagttcaggctctctcttcaaacgagttgtggagaaagcccatggcgatcctcagcagctacgcagggccctcaacaagtctttggtccggctagcttcgcaagatccgcctccagagaccatctccccgtcaccggcgtttgcaaaggttctccgggcggcttccaatttatcaaagacccagaaggatacttatgtcgcaattgatcatttaatagctgcgctggcgcaggatcctactatccagcgggcgcttgcggacgcaaatatccccaatgtcaagatgatcgattctgctatccagcaaatccgcgggatgaaacgcgtggattcaaaaacggcagatacagaagaagaaagtgaaaacttaaaaaagtttacagttgacatgactgccatggcgagagaagggaagattgatcccgtgatcggccgagaagaggagattagaagagtgattcgcattctcagccgacggacaaagaacaatccagtgcttattggcgaacctggcgtgggaaagacaacggtcgtcgaaggcctagcacgacggattgtcaatgccgatgttcccgccaatctggctaattgcaagcttctatccttggatgtcggatcacttgttgctggcagcaagtatcgtggtgagttcgaggagaggatgaagggcgttttgaaagagattgaagaatcaaaggagaccatcgttctgtttgtggatgaaatccatcttcttatgggagctggctccagtggagaaggtggcatggatgccgcaaatctactcaagcccatgcttgcaagaggtcagctacattgcattggcgcaaccactcttggcgaatacaggaagtacatcgagaaagaccaagctttcgagcgtcgattccaacaggtcttggtcaaggagcctactgttggcgagaccatctctattctcaggggtctgaaagaacgatacgaagttcaccatggtgttaacatcctcgatggagccattgtatccgcagccaaccttgcttctcgttaccttactgcccgaagacttccagattctgcagttgatctaattgacgaagcagccgccgctgttcgcgtcacgagagaatctcaacctgaagccctggatactttggaacgccgtgcccgacaactccagatcgaaatccatgctctggctcgcgaaaaggatgcggcctcgaaggctcgactcgaggctgccaaacaggaagcagctaacgtcaacgaagagcttcgccctctacgagaaaaatatgaaagtgagaaacaacggagcaaggatattcaagatgctaaaatcaaattggaccttttgaaagtgaaaagggacgaggcaacccggtctggagatacccaaactgcttcggatctgatttactatgccatcccggatgtcgagaagcgcatcgaacaattggaggctgaaagagctcgacaagatgcggaactatcagcccagccaggtgcaggagaaacccttatggcagatgctgttggccctgagcaaatcaatgaaattgtggccagatggactggcattcccgttaccagactgaggaccaccgaaaaggacaggcttctgcacatggaatcgcacctttccaaaattgttgttggccagaaggaagccgtccaatcagtgtcgaacgcaattcgactccaacggtctggcctgagcaaccctaactccccgccaagcttcctcttctgtgggccatcaggcacgggtaaaaccctgcttactaaggcactggcggaattcctgttcgatgaccccaaggctatgatccgatttgacatgtctgaatatcaggaacggcattctttgagtcgaatgatcggagcgccacctggctacgttgggcatgatgctggtggccagctaacagaatcacttcgccggcgaccattctccattctcctcttcgatgaggtggaaaaagctgcgaaggaagttttaaccgtcctccttcagctgatggatgacggaagaatcacagacggtcagggaagaattgtcgatgcaaagaattgcatcgttgtcatgacttccaaccttggcgccgagtttctccaacggcccacagcttccaatggccagattgaccccaccactaaagagcttgttatgggcgcactgcggaactacttcctgcccgaattccttaatcgaatctctagcatcattatcttcaatcgcctcacaaggcgggagatacggaagatcgtggatgttcggttacaagagatccaacggaggctagagcagaacgaccgcacggtgacgatagattgtacagacgaagtcaaggattacttgggtaatgccggatactcgccagtctatggcgccaggccactctcgcgactcattgagaaagaggtcttgaaccgccttgcggtcttgatcttaagaggggccatcaaagacggcgagactgcacgtgttgtgatgcaggaaggaaggatcactgtcctaccaaaccacgttgaaacggaaagtgaagacgaggagatgattgatgaatctgacacacttgcggagatggaagaggatatgggagaacgggacctttatgagtga

SEQ ID NO: 33867 - protein, 926 aa, Paracoccidioides brasiliensis
MNGTQLTDRANQALVDAHALAEQHAHPQLLPIHLAVSLLDPPVDESKDQQVTTHPSHQASSGSLFKRVVEKAHGDPQQLRRALNKSLVRLASQDPPPETISPSPAFAKVLRAASNLSKTQKDTYVAIDHLIAALAQDPTIQRALADANIPNVKMIDSAIQQIRGMKRVDSKTADTEEESENLKKFTVDMTAMAREGKIDPVIGREEEIRRVIRILSRRTKNNPVLIGEPGVGKTTVVEGLARRIVNADVPANLANCKLLSLDVGSLVAGSKYRGEFEERMKGVLKEIEESKETIVLFVDEIHLLMGAGSSGEGGMDAANLLKPMLARGQLHCIGATTLGEYRKYIEKDQAFERRFQQVLVKEPTVGETISILRGLKERYEVHHGVNILDGAIVSAANLASRYLTARRLPDSAVDLIDEAAAAVRVTRESQPEALDTLERRARQLQIEIHALAREKDAASKARLEAAKQEAANVNEELRPLREKYESEKQRSKDIQDAKIKLDLLKVKRDEATRSGDTQTASDLIYYAIPDVEKRIEQLEAERARQDAELSAQPGAGETLMADAVGPEQINEIVARWTGIPVTRLRTTEKDRLLHMESHLSKIVVGQKEAVQSVSNAIRLQRSGLSNPNSPPSFLFCGPSGTGKTLLTKALAEFLFDDPKAMIRFDMSEYQERHSLSRMIGAPPGYVGHDAGGQLTESLRRRPFSILLFDEVEKAAKEVLTVLLQLMDDGRITDGQGRIVDAKNCIVVMTSNLGAEFLQRPTASNGQIDPTTKELVMGALRNYFLPEFLNRISSIIIFNRLTRREIRKIVDVRLQEIQRRLEQNDRTVTIDCTDEVKDYLGNAGYSPVYGARPLSRLIEKEVLNRLAVLILRGAIKDGETARVVMQEGRITVLPNHVETESEDEEMIDESDTLAEMEEDMGERDLYE

SEQ ID NO: 33868 - DNA, 2424 bp, Leptosphaeria maculans
  CDS (1)..(2424)
atgctaactactaaagcgcgcctcagtgcgaggcatctcatcacccatggaacagtacaattaccatctcgaccgttgttaccatgtgcagccatcacgttacgcgcgcatcaagatcctgttccaagacaacagctattaggccctacgaggtcctacatgaacacgactcgcccgcaacaaccatgtttgatacaaccgcgcatcacttctcgaggctatgcgaacggacggccgcatccaccaggtggcacacatcgaatgaatatggggggtgagccggaaaaaccggcgttggaacaatacggaatagacctcacagaacgggcacgggatggaaaattagatcctgtcatcggccgtgacggcgagatccagcggactatacagatcctgtcacgacggacaaagaacaatccggtactcatagggaaagccggaactggcaaaactgctattcttgaaggcttggctcagcgtatcgtcaagggcgatgtgcctgagtcaatcaaggataagcgtgtcatctcactcgatcttggttcgctcattgcaggcgccaagttccgaggcgattttgaagaacggctgaagagcgtcttaaaagaggtggaagaagcgaagaaaggagtcatcttattcgttgatgagcttcatacgctcttgggtctcggcaaggcagagggtagcattgatgccagtaacttactaaagccagctctgtcccggggcgagctacagctctgcggtgccactactttgagcgagtatcgccaaattgaaaaggatgctgcgcttgctagacgctttcagcccattcaagttggcgaacccaccgtccaagataccatttcaattcttcgtggaatcaaagagcgttatgaggtccaccacggagtgcgcataaccgataatgccctggtcgcggcggcctcatacagcaacaggtacataacagatcgcttcctcccagacaaagcaattgatctcgtggacgaggctgccagcgccttacgactgcaacaggagagcaaacccgatgcaattcaagagcttgatcgtcagatcatgacgatccagatcgaattggaatcacttcgaaaggagaccgacatcgccagcaaagagcgacgccagcgcttggaagagtctttgaagcaaaagcaagaggaagccaaaggactcaccgaaaagtgggagaaggagcgcgcggagctcgaagaaattaagaacgcccaagagaatcttgaaaaagcaagactggagcttgaacaagcccgacgagagggcaattttgccaaggctggagagctacagtacagcagaattccggagctgatagagaagctcccaaaagacgaggaattggttgcaggcgccagccgtcctgactcactgctgcatgactcagtcacggccgatgatatagccagtgtcgtctcacgtacgacaggaatcccactttccaagttgaacagtggtgaaagcgagaaactgattcacatggaggagaccttacgccaatttgtcaaagggcaagatgaggcactcacagcagttgcaaatgctattcgcttgcaaagagcgggactttctggggagaataggccgatagcttctttcatgatgctggggccaacaggtgtcggcaagacagaggtatgtaagaggctggcagagtatctgttcagcactccacaggcagtcatccgtttcgacatgagcgaattcagcgaaaagcacactgtctcgagattgataggcagtccagccggatacgtaggctatgaagacgccggacagctcaccgaggccgtaagacgaaagccatatgccgtgctccttttcgacgagtgggaaaaggctcacaaggacatttccacactattactgcaggttctagacgaaggtttcttgacagatgcacaaggtcacaaggttgacttccgcaacacgatcattgttatgacatcgaatctgggcgcagacatcatcgtcggcgatgacgccttacgttcaggtaatcaagactctggcgagatatcgtctgatgtccgcaatgctgtcatggatatcgtttccgccacgtatcctcccgagttcctcaatcgtctcgacgaattcataattttcaggcgcttatctcgtgaagcactgagggacattgtagacattcgactgaaagagctccagcaacgattggacgaccgaagaatcacccttgattgccccgacgaagcaaaacaatggctctgcgatcgcggatacgaccctaagtatggagcgaggccgttgaacaggcttatcgcacgagaaattggtaatggccttgcagacaaaattattcgaggagaaattcgaagtggcgacacagctaaaatcggcgtcaaatcggatggctcaggcctcgaggtgactgcgtga

SEQ ID NO: 33869 - protein, 807 aa, Leptosphaeria maculans
MLTTKARLSARHLITHGTVQLPSRPLLPCAAITLRAHQDPVPRQQLLGPTRSYMNTTRPQQPCLIQPRITSRGYANGRPHPPGGTHRMNMGGEPEKPALEQYGIDLTERARDGKLDPVIGRDGEIQRTIQILSRRTKNNPVLIGKAGTGKTAILEGLAQRIVKGDVPESIKDKRVISLDLGSLIAGAKFRGDFEERLKSVLKEVEEAKKGVILFVDELHTLLGLGKAEGSIDASNLLKPALSRGELQLCGATTLSEYRQIEKDAALARRFQPIQVGEPTVQDTISILRGIKERYEVHHGVRITDNALVAAASYSNRYITDRFLPDKAIDLVDEAASALRLQQESKPDAIQELDRQIMTIQIELESLRKETDIASKERRQRLEESLKQKQEEAKGLTEKWEKERAELEEIKNAQENLEKARLELEQARREGNFAKAGELQYSRIPELIEKLPKDEELVAGASRPDSLLHDSVTADDIASVVSRTTGIPLSKLNSGESEKLIHMEETLRQFVKGQDEALTAVANAIRLQRAGLSGENRPIASFMMLGPTGVGKTEVCKRLAEYLFSTPQAVIRFDMSEFSEKHTVSRLIGSPAGYVGYEDAGQLTEAVRRKPYAVLLFDEWEKAHKDISTLLLQVLDEGFLTDAQGHKVDFRNTIIVMTSNLGADIIVGDDALRSGNQDSGEISSDVRNAVMDIVSATYPPEFLNRLDEFIIFRRLSREALRDIVDIRLKELQQRLDDRRITLDCPDEAKQWLCDRGYDPKYGARPLNRLIAREIGNGLADKIIRGEIRSGDTAKIGVKSDGSGLEVTA

SEQ ID NO: 33870 - DNA, 2817 bp, Oryza sativa subsp
  CDS (1)..(2817)
atggaggtgtgctgctgctcgacgtcgtcggccgtgcccgggaggaggttcgcggcggccggggcggcggcggcggcggtggcggcgaggtggggcgccgtgggggtcgggagggcggtggtgctggcgcacccgctgcgcccggcgccgcgcggcgggcacgcgcacgcgcagcaggcgggcgcgcggcgggcgcggcgcgcggtcgtcagggcggtgttcgagcggttcacggagcgggcggtgaaggcggtggtgctgtcgcagcgggaggccaaggggctcggggagggcgccgtggcgccgcgccacctgctgctggggctcatcgccgaggaccggtcggcgggcgggttcctctcgtcggggatcaacatcgagcgcgcgcgcgaggagtgccgcggcatcggcgccagggacttgacccccggcgcgccgtcgccgtccggctccgggctggaaatggacatacccttctccggcagctgcaagcgggtgttcgaggtcgccgtggagttctcccggaacatgggctgcagcttcatctccccggagcacctcgccctcgcgctcttcaccctcgacgatcccaccaccaacagcctcctcaggagcttgggagcggatccgagtcaactagcatcagtagcgcttacccgactccaagcggagcttgcgaaagatggcagagaacctgcaggagcatcatctttcaaagtacccaagaaatctcctgctggagctggaagatctgccttctcgaaatctttaaattcaaagaaagaaaagggtgcgcttgatcaattttgtttagatctgaccacacaagctagtggcgggtttattgatcctatcattggccgtgaggaggagattgaaagagtagttcagataatatgccgacggacaaagaacaatcctattcttttgggtgaggcaggtgttggcaaaactgcaatcgctgaagggttggctcttcgaattgcaaatggagatgtccccatttaccttgtggcaaagcgtataatgtcattggacgttggtctacttattgctggtgcaaaagaaagaggtgaactggagtccagggttactagtttaattcgtgaagtccgggaagcaggggatgttattcttttcattgatgaggttcacaatcttattggatctggcactgttggaaagggtaagggtgctggccttgacattggcaacttgctgaagcccccacttgctagaggtgaattgcagtgcattgcagctacaactctagatgaacacagaatgcattttgagaaggataaggctttggctcgccgcttccagccagtattagtagaggagcctagtcaggatgatgctgtgaagatattacttggtcttcgtgaaaaatatgaaacatatcacaaatgcaaatttaccttagaagccatcaatgcagcagtttatctgtcagcaagatatattcctgacaggcagctccctgacaaggccatcgatctgattgatgaagctggcagtagagctcgaatggaatcatttaataggaagaaggaagggcagtcttcaatcctcttaaagtcgccagatgaatactggcaagagataagagctgctcaaaacatgcatgaagtggtgtcatcaaaccagatgaagtattccccttgtcaagagaatggcagtgctgccattaaagcaccaagcgaggacatgaatgagttgacatctgaactccaagttgaggaaccaattgtagttggaacagaggaaattgcaagagttgcctcattgtggtcagggataccagtccagcagttaactgctgatgatagaaagcttctcgtaggactagatggtgaactcagaaagcgtgtgattggtcaagatgatgctgttatggcaatatctagagcagtgaagagatcacgtgttggcctcaatgatcctgacagacctattgccactctacttttctgtggtccgacaggagttggtaaaactgagcttactaaagctctagcagctagttattttggatcggaatctgctatgcttagattagacatgagcgagtatatggagaggcacactgtgagcaagctcataggctctcctccagggtacatcggatatggtgaaactggtactctgacagaagctgtcaggagaaagccatttactgtagtattacttgatgagatagagaaagctcaccctgatattttcaacattcttctccaaatttttgaagatgggcatctgtcggactcacagggccgcagagtgtccttcaagaacacattgattgtcatgacatcaaatgttggttctacatcaatttcaaagggaagacgaagcatgggtttcatgacagaagatactgaatcaagctcatatgttgcaatgaaatctctagtaatggaagagttgaaggcatttttccgtccagaattgctcaacagaatcgatgagatggttgtattccgtcccttagagaaaactcagatgctagcaattcttgatatcatcctacaagaagtgaagggtaggctgttagcccttggaataggcctcgaggtgtccgatgcaatgaaggacctgatttgcgaagaaggctatgacaagagctacggtgcgcggccactgaggagagccgtcacccacctgattgaggatgtgatcagcgaagcaattctatttggcgaatacaagcctggggacacgatactgatggatattgatgccgcggggaaaccttgcatgagccacctgaatgagaaggttgtccagttgtctgatccgacacggacattctga

SEQ ID NO: 33871 - protein, 938 aa, Oryza sativa subsp
MEVCCCSTSSAVPGRRFAAAGAAAAAVAARWGAVGVGRAVVLAHPLRPAPRGGHAHAQQAGARRARRAVVRAVFERFTERAVKAVVLSQREAKGLGEGAVAPRHLLLGLIAEDRSAGGFLSSGINIERAREECRGIGARDLTPGAPSPSGSGLEMDIPFSGSCKRVFEVAVEFSRNMGCSFISPEHLALALFTLDDPTTNSLLRSLGADPSQLASVALTRLQAELAKDGREPAGASSFKVPKKSPAGAGRSAFSKSLNSKKEKGALDQFCLDLTTQASGGFIDPIIGREEEIERVVQIICRRTKNNPILLGEAGVGKTAIAEGLALRIANGDVPIYLVAKRIMSLDVGLLIAGAKERGELESRVTSLIREVREAGDVILFIDEVHNLIGSGTVGKGKGAGLDIGNLLKPPLARGELQCIAATTLDEHRMHFEKDKALARRFQPVLVEEPSQDDAVKILLGLREKYETYHKCKFTLEAINAAVYLSARYIPDRQLPDKAIDLIDEAGSRARMESFNRKKEGQSSILLKSPDEYWQEIRAAQNMHEVVSSNQMKYSPCQENGSAAIKAPSEDMNELTSELQVEEPIVVGTEEIARVASLWSGIPVQQLTADDRKLLVGLDGELRKRVIGQDDAVMAISRAVKRSRVGLNDPDRPIATLLFCGPTGVGKTELTKALAASYFGSESAMLRLDMSEYMERHTVSKLIGSPPGYIGYGETGTLTEAVRRKPFTVVLLDEIEKAHPDIFNILLQIFEDGHLSDSQGRRVSFKNTLIVMTSNVGSTSISKGRRSMGFMTEDTESSSYVAMKSLVMEELKAFFRPELLNRIDEMVVFRPLEKTQMLAILDIILQEVKGRLLALGIGLEVSDAMKDLICEEGYDKSYGARPLRRAVTHLIEDVISEAILFGEYKPGDTILMDIDAAGKPCMSHLNEKVVQLSDPTRTF

SEQ ID NO: 33872 - DNA, 2379 bp, Paracoccidioides brasiliensis
  CDS (1)..(2379)
atgttgcttaagacaacctctttgactcacaccataaccattatggacaagcaccttctacacaccctaactggggtacaggtcaatgccatagataaagctttagcggttggtcccgactgggtattattgggccttagcgaagttggggccaccaaaagcttattgaacagcatcggtgtcagtgcagacagtctgcgtcaggtaattttaaaaattcgaggtgatgaaaaagtgatgagtaataatcatgaagatcaacgtgattcactcaataaatacactgtagatttaaccgaacgtgcgctggccggcaagctcgatccggtgattggccgtgatgatgaaatccgccgtaccgtacaggtcttgtcacgtcggaccaaaaataacccggtactgattggtgagcctggggtcggtaaaaccgcaattgtagaaggtctggcacagcgtattgtgaatggtgaagtgccagaaagcttaaaaggcaaacgcgtgttatcgctggacctgggttcattgctggccggtgccaaatatcgcggcgagtttgaggagcgtttaaaagcggtcctgaaagatctggccaagcatgaaggcgaaatcatcctgtttattgatgagttgcataccctggttggcgcaggtaaaggtgatggcgcgatggatgccggcaacatgctgaaaccggcgctggcacgcggtgaattacgctgcgtgggggcaaccacactcgatgaatatcgtcagtacattgaaaaagatgccgcccttgagcgccgtttccagaaagtgctggtcgatgagccaagtgtcgaagacaccattgccattttacgtggtctgaaagagcgttatgaagtccaccacggggtgaaaattctcgactcagcgattattgctgcagcgaaaatgtcacatcgttatatcactgaccgtcagttgcccgataaagccattgacctgattgatgaagcagcatcgcgcatcaagatggagctggactctaaaccggaagcgctggataagctggaacgccgtctgattcagttaaagttgcaacttgaagctgtgaaaaaagatgaagatgccggcagccgtgcagaagtcagtcatctggaaaaacagatcgaagacgtccaaaaagactataacgatctggaagaagtgtggaagtctgaaaaaactctggtcgaaggcactaagcagattcaggcacagctggatcaggcgcgtattgccttgcaaaaagcacagcgtgaaaatgatctgggcgagatgtcgcgtctgcaatatggcgtgattccggaactggaaaaacagctggcccaagatgagctggtggaagagaaagaagaaccgaagttattgcgcaataaagtcaccgataacgaaattgcggaagtggtcagcgcagccaccggtattccggttgcgaaaatgctgcaaggcgagcgtgaaaaactgctgcaaatggaaagcttcctgcatcagcgtgtggtagggcaggatgaagcggtgattgcggtatccaatgcggtgcgccgttcacgtgccgggttgtcggatccgaaccgtccaagtggttctttcctgttcctgggtccaaccggtgtcggtaagaccgagttaaccaaagccttggccaatttcctgtttgacagcgatgacgccatgatccggattgatatgtccgaatttatggaaaaacactcagtcagccgtctggtcggtgcgcctccgggctatgtcggctatgaagaaggcggggtattaaccgaagccgtacgccgtaaaccatatagcgtggtgctgtttgatgaggtggaaaaagcccatccggatgtatttaacatcttgctgcaggtactggatgatggtcgcttgaccgactcgcagggccgtgtagtggactttaaaaacaccgtgattgtaatgacctcgaacctgggttcaagcgatgtgcgtgaactgggcgataatccaagccgtgatgatgtacgcaatgtagtgatggcagccgtgtctgagcatttccgtccggagtttatcaaccgtattgatgagctggtagtattccatgccctggaaaaagcgcagattcgtggtattgccgatatccagctggaccgtttacgtgcccgtctggccgaccgcgatatcaagttaacggtagatgattctgcctttgaccagctgattgaagccggttttgacccagtttacggtgcgcgtccattaaaacgtgccatccagcaacaggtagaaaataatctggcgcagaaaattctggccggtgacttccagccgggagataccattgtgattacggcagatgcaggccaactggatttccagaagctgaaactgaactaa

SEQ ID NO: 33873 - protein, 792 aa, Paracoccidioides brasiliensis
MLLKTTSLTHTITIMDKHLLHTLTGVQVNAIDKALAVGPDWVLLGLSEVGATKSLLNSIGVSADSLRQVILKIRGDEKVMSNNHEDQRDSLNKYTVDLTERALAGKLDPVIGRDDEIRRTVQVLSRRTKNNPVLIGEPGVGKTAIVEGLAQRIVNGEVPESLKGKRVLSLDLGSLLAGAKYRGEFEERLKAVLKDLAKHEGEIILFIDELHTLVGAGKGDGAMDAGNMLKPALARGELRCVGATTLDEYRQYIEKDAALERRFQKVLVDEPSVEDTIAILRGLKERYEVHHGVKILDSAIIAAAKMSHRYITDRQLPDKAIDLIDEAASRIKMELDSKPEALDKLERRLIQLKLQLEAVKKDEDAGSRAEVSHLEKQIEDVQKDYNDLEEVWKSEKTLVEGTKQIQAQLDQARIALQKAQRENDLGEMSRLQYGVIPELEKQLAQDELVEEKEEPKLLRNKVTDNEIAEVVSAATGIPVAKMLQGEREKLLQMESFLHQRVVGQDEAVIAVSNAVRRSRAGLSDPNRPSGSFLFLGPTGVGKTELTKALANFLFDSDDAMIRIDMSEFMEKHSVSRLVGAPPGYVGYEEGGVLTEAVRRKPYSVVLFDEVEKAHPDVFNILLQVLDDGRLTDSQGRVVDFKNTVIVMTSNLGSSDVRELGDNPSRDDVRNVVMAAVSEHFRPEFINRIDELVVFHALEKAQIRGIADIQLDRLRARLADRDIKLTVDDSAFDQLIEAGFDPVYGARPLKRAIQQQVENNLAQKILAGDFQPGDTIVITADAGQLDFQKLKLN

SEQ ID NO: 33874 - DNA, 2706 bp, Phycomyces blakesleeanus
  CDS (1)..(2706)
atgagtggaatgaattttactgaaaaagtcgaaaagactcttgcaactgctcaagctcaggcgcgcgaattctcgcacactctcttgcaccctgctcacatcgcatgtgccatgtttgacgatgttgacggacagtccctgttcaagtcgattctcgagaaggctggtgccgatccctctctggtcgagcggggttacaagaagcagatggttcaccttcctgcccaagatcctcctccacctgagatcagcatcagtccccagacagccaaactgctccgtaatgccgagaaacacatgaaagaccaaaaggattcctacatctccatcgaccacctgatccttgccttggccgacgagaccacaacattccagccgatgaaggatgctggtgtgacaaagaaggctctcgaaagcgcagtccagcaggtccgcggaaacaagcgtgtggatagcaaaaacgccgaagaggtctacgagtccctgtcaaagtatgcgattgaccttaccgagatggcccagactggaaaactcgatcctgtcattggccgtgacgatgagatccgtcgtgtaatccgagtgctctgtcggcgtaccaagaacaacccagtcctgattggtgagcctggtgtcggtaaaactgcgattgccgaaggtctggcacgtcgtatcgtcgaacgagatgttccagagtccctgcagtgcaagttgttctcgctcgacatgggtgccctgattgccggtgcaaagtaccgtggtgagttcgaagagcgtctcaaggccgtcctcaaggaagtcaaggagtccgaagaaggcatcattctctttattgacgagatccacaccgtcctgggtgccggtaaaggcgaaggttcaatggacgctgccaatctgctcaagcctatgctggcccgcggtgaacttcgctgcatcggtgcaacaaccctgaccgagtacaaggttatcgaaaaggatccagcctttgaacgtcgtttccaaaaggtcgatgtcggagagccttctgttgctgccacaatctctatcctgcgtggtctcaaagaacgctacgagtcctaccatggtgtcaagatcactgactctgcactagtcgttgccgcccagctctccgaccgttacatcaccacccgtttcttgcccgacaaggccattgatctgattgacgaggctggtgccaacactcgtgtccagcttgactcaaagccagaggagatcgatgttcttgagcgcaagcacttccagctcgagattgaggccatggcgctcggcaaggagaagaacaacaaggactcgcaggagcgtctcaaggttgtcaaggaggagatggccaagatccaggaggagttgaagcccctaaagctgcggtacgacatggacaagggccgattggacgagatccgagacttgaagcaaaagttggatgagctgaagcgcaaggctgtcgaggcaagaaaccgctatgatctagactctgcagctgatatcgagtactatgccattcctgatgtcgagcagcgtatcaatgccctgtctgccgagaagcaacgcaagatggctgagcagatggccaacgacacagccggccaggcatcgacaaccggtcagttggtgagcgagattgtccgacctgagcagattatggaagtcatctctcgctggactggtatccccgttcagaatctggccaagagtgagcgagagaagctgctgcacatggaggccgagattggtaaaaaggtggttggtcaaaagagagcaattgagtcggtgtgtgatgcaatccgtctttcgaaagctggactgcagaatccaaccaagccactggctagctttatgttccttggtcctactggtgttggtaagacgcttctttgcaagaccctggctgaatttctgttcaacgatgagcgcgcgatgatccgtattgatatgagtgagcttatggaacagcacagtgttgcaaaacttatcggagcccctcccggttatgtcggtcacgaagacggaggtttatttgaggcagtccgtcgcaagccatatgctgttgttcttcttgatgaactggagaaggcacacaaggatgttgcaaatgtgcttctgcaggtgcttgatgaaggatttattcatgattccaagggtcgcaagatcgatttccgcaacacgattatcgtcatgacatccaaccttggagctcatcttttagccgaacagtctgctgcaggaggcgacccggatttgattattttgaaagagagtattctgcagattgtccgccagcactttagcccagagttcacgaaccgtattgatgagatcgtgatcttcaaccgcctgactgagacgaacattacaaacattgtggatgtgcgacttgaggaagtccaagagcgcctggccgatcgtaagattaccctggatgtttcaaagcctgccaaggaattactcggaaaggaaggatatgagcctgtatttggtgcacgcccgctcaaccgtcttattcagcaaaaggttctcaatccattggcacgtctgattatcgatggaggtgtacgtcctggcgaggtagctcatgtgggattgaacgagtctggcaagcttgaggttttgcgcaatcatgagatccaatctgactacgaggttgaagaacccatggaagaaaataatgattctgatgaagacatggactaa

SEQ ID NO: 33875 - protein, 901 aa, Phycomyces blakesleeanus
MSGMNFTEKVEKTLATAQAQAREFSHTLLHPAHIACAMFDDVDGQSLFKSILEKAGADPSLVERGYKKQMVHLPAQDPPPPEISISPQTAKLLRNAEKHMKDQKDSYISIDHLILALADETTTFQPMKDAGVTKKALESAVQQVRGNKRVDSKNAEEVYESLSKYAIDLTEMAQTGKLDPVIGRDDEIRRVIRVLCRRTKNNPVLIGEPGVGKTAIAEGLARRIVERDVPESLQCKLFSLDMGALIAGAKYRGEFEERLKAVLKEVKESEEGIILFIDEIHTVLGAGKGEGSMDAANLLKPMLARGELRCIGATTLTEYKVIEKDPAFERRFQKVDVGEPSVAATISILRGLKERYESYHGVKITDSALVVAAQLSDRYITTRFLPDKAIDLIDEAGANTRVQLDSKPEEIDVLERKHFQLEIEAMALGKEKNNKDSQERLKVVKEEMAKIQEELKPLKLRYDMDKGRLDEIRDLKQKLDELKRKAVEARNRYDLDSAADIEYYAIPDVEQRINALSAEKQRKMAEQMANDTAGQASTTGQLVSEIVRPEQIMEVISRWTGIPVQNLAKSEREKLLHMEAEIGKKVVGQKRAIESVCDAIRLSKAGLQNPTKPLASFMFLGPTGVGKTLLCKTLAEFLFNDERAMIRIDMSELMEQHSVAKLIGAPPGYVGHEDGGLFEAVRRKPYAVVLLDELEKAHKDVANVLLQVLDEGFIHDSKGRKIDFRNTIIVMTSNLGAHLLAEQSAAGGDPDLIILKESILQIVRQHFSPEFTNRIDEIVIFNRLTETNITNIVDVRLEEVQERLADRKITLDVSKPAKELLGKEGYEPVFGARPLNRLIQQKVLNPLARLIIDGGVRPGEVAHVGLNESGKLEVLRNHEIQSDYEVEEPMEENNDSDEDMD

SEQ ID NO: 33876 - DNA, 2700 bp, Candida albicans
  CDS (1)..(2700): transl_table=12
atggaagattttacagataacgctatcaagattatcaataatgctactgaattggcaaaacaacaggccaattcgcaattggtaccccttcattttcttgctgcatttatcccatcagatgatactgaaggctcaacacagtatttgaaaacgttggtcaagagagcaagatacgaatggggcgatttcgaaagaatcgtgaacagacatttggttaaaataccatctcagaacccccctccagatgaaatacgaccaagctatcaagcaggccaggtgttaacgagggccaacaaaatcaaacaacaacaaaaggactcatatgttgctcaggaccatattttgttggcgctcttggaggaccaatcaattaaagatattttcaaagaagctggtatgagtgttgacacaataaagacacaagctattgaattgagagggtcccaaaggattgactccagacaagctgattcgtcttcatcttatgaatttttgaacaagtattgtgaagattttaccgaaaaggctagggaaggtaagattgatcctgtaattggtagagaggaagaaattcgaagagtcatcagagttttggcaagaagaagcaaatcgaactcggtgttgatcggtgatgctggtgttggtaagacttctattgttgaaggtgttgcacaaagaatagttgatggggacgttccaaatgttttggctggctcaagattatttgctcttgatttgggtgcattgactgcaggtgcaaaatacaagggtgagtttgaggaaagattgaaaggtgttttgaatgaaattgaaaaatccaaagagtttatcatcttgttcattgatgaaatccacatgttgatgggtgatggtaaatcagatgctgctaatttgttgaagccaatgttggccagaggtgcattacattgtattggtgctactacctttgctgaatacagaaagttcatttccaaagatggtgcatttgaaagaagattccaaaaaatcgatgttcctgccgccaccgtgcaagaaactgttgccattttaagaggtatccagcctaaatatgaaattcaccatggggtccgtatattggatagtgcattggtcactgctgctcagttggcttcaagatacttgacatacagagcattacctgattcagctgttgatcttgttgatgagagtgctgctgctgttgctgtggctagagactctaagccagaagagttggacactttggaaagacaattgcatttggtagatgtcgaaatcagtgcattagaaagagacaaagatgcagactctgcttccaaggaacgtttgaatttggccaaaaagaagaaagcagaattggaagaaaaaattggaccattgaacgagagatacagacaagaacgagctagtcatgaacaattgactgctgccaaaagaaaattggatgaacttgagatcaaagctcaagatgctgaaagaagatacgatactgctactgctgctgacttgagatactttgctatcccagatatccagaagcaaattgaagagttagaagtcaaagttgctgaagaggaagcttctaatttggacagcttgttgaagaatgcagttggaccagaacaaatatgtgaaaccgctgctagattgactggtatccctgtcacgaaattgtcgcaagcagaaaacaataaattgatcaatatggaagcagaattgtcgaaagaagttgttggacaatcggaagctgtgaaggcagtctccaatgccatcagattaagaagatcgggtttggctaatcctaaccaaccaccatcctttttgtttttgggtctttctggttcgggtaagactgaattggctaagaagcttgctggttttctctttgcagacgaaaaggcaattattagaattgactgctctgaattgggagacaaatggtctgcttcaaaattgttgggtgctgctccaggttatgttggatatgaagaaggtggtatcttgactgagccattaatcagacggccatactctgtggtcttgttggatgaagttgaaaaagctgctcctgaagtgttgactgtgttattacagattttggatgatggtagagttacctcttctcaaggtaagcttgttaactgctcgaatgccattttcataatgacgtctaatttgggtgcaaactacatcaatgccgccaagggaagcaagattgatgccaacacaaaggaacatgtaatggatgctgtgagagcacatttcagacctgaatttattaaccgtatttccagtattgttgtgtttaacagattgtcgagaaaagccatttccaagattgtcaagatcaggttgtccgaaattgaaaacagattcactgctaatggtaaggctatacaattgaagctagatgatgatgccatggagtacttgtgcaagaatggatggtcacctgacttgggtgcaagaccattgaaccgcttgatccaaaacgagattttgaacaggttggctgtaatgttgttgaaagggcaaatccaagataaagaaactgctagagttgttcttggcgaaaaaggtttggagattttacctaaccatgaaccagaagatgtggaaatgaatgatgttgataactggcaagactcagaggatgaagatgatgacgaagccagattcacttcacctggacttgactaa

SEQ ID NO: 33877 - protein, 899 aa, Candida albicans
MEDFTDNAIKIINNATELAKQQANSQLVPLHFLAAFIPSDDTEGSTQYLKTLVKRARYEWGDFERIVNRHLVKIPSQNPPPDEIRPSYQAGQVLTRANKIKQQQKDSYVAQDHILLALLEDQSIKDIFKEAGMSVDTIKTQAIELRGSQRIDSRQADSSSSYEFLNKYCEDFTEKAREGKIDPVIGREEEIRRVIRVLARRSKSNSVLIGDAGVGKTSIVEGVAQRIVDGDVPNVLAGSRLFALDLGALTAGAKYKGEFEERLKGVLNEIEKSKEFIILFIDEIHMLMGDGKSDAANLLKPMLARGALHCIGATTFAEYRKFISKDGAFERRFQKIDVPAATVQETVAILRGIQPKYEIHHGVRILDSALVTAAQLASRYLTYRALPDSAVDLVDESAAAVAVARDSKPEELDTLERQLHLVDVEISALERDKDADSASKERLNLAKKKKAELEEKIGPLNERYRQERASHEQLTAAKRKLDELEIKAQDAERRYDTATAADLRYFAIPDIQKQIEELEVKVAEEEASNLDSLLKNAVGPEQICETAARLTGIPVTKLSQAENNKLINMEAELSKEVVGQSEAVKAVSNAIRLRRSGLANPNQPPSFLFLGLSGSGKTELAKKLAGFLFADEKAIIRIDCSELGDKWSASKLLGAAPGYVGYEEGGILTEPLIRRPYSVVLLDEVEKAAPEVLTVLLQILDDGRVTSSQGKLVNCSNAIFIMTSNLGANYINAAKGSKIDANTKEHVMDAVRAHFRPEFINRISSIVVFNRLSRKAISKIVKIRLSEIENRFTANGKAIQLKLDDDAMEYLCKNGWSPDLGARPLNRLIQNEILNRLAVMLLKGQIQDKETARVVLGEKGLEILPNHEPEDVEMNDVDNWQDSEDEDDDEARFTSPGLD

SEQ ID NO: 33878 - DNA, 2700 bp, Candida albicans
  CDS (1)..(2700): transl_table=12
atggaagattttacagataacgctatcaagattatcaataatgctactgaattggcaaaacaacaggccaattcgcaattggtaccccttcattttcttgctgcatttatcccatcagatgatactgaaggctcaacacagtatttgaaaacgttggtcaagagagcaagatacgaatggggcgatttcgaaagaatcgtgaacagacatttggttaaaataccatctcagaacccccctccagatgaaatacgaccaagctatcaagcaggccaggtgttaacgaaggccaacaaaatcaaacaacaacaaaaggactcatatgttgctcaggaccatattttgttggcgctcttggaggaccaatcaattaaagatattttcaaggaagctggtatgagtgttgacacaataaagacacaagctattgaattgagagggtcccaaaggattgactccagacaagctgattcgtcttcatcttatgaatttttgaacaagtattgtgaagattttaccgaaaaggctagggaaggtaagattgatcctgtaattggtagagaggaagaaattcgaagagtcatcagagttttggcaagaagaagcaaatcgaactcggtgttgattggtgatgctggtgttggtaagacttctattgttgaaggtgttgcacaaagaatagttgatggggacgttccaaatgttttggctggctcaagattatttgctcttgatttgggtgcattgactgcaggtgcaaaatacaagggtgagtttgaggaaagattgaaaggtgttttgaatgaaattgaaaaatccaaagagtttatcatcttgttcattgatgaaatccacatgttgatgggtgatggtaaatcagatgctgctaatttgttgaagccaatgttggccagaggtgcattacattgtattggtgctactacctttgctgaatacagaaagttcatttccaaagatggtgcatttgaaagaagattccaaaaaatcgatgttcctgccgccaccgtgcaagaaactgttgccattttaagaggtatccagcctaaatatgaaattcaccatggggtccgtatattggatagtgcattggtcactgctgctcagttggcttcaagatacttgacatacagagcattacctgattcagctgttgatcttgttgatgagagtgctgctgctgttgctgtggctagagactctaagccagaagagttggacactttggaaagacaattgcatttggtagatgtcgaaatcaatgcattagaaagagacaaagatgcagactctgcttccaaggaacgtttgaatttggccaaaaagaagaaagcagaattggaagaaaaaattggaccattgaacgagagatacagacaagaacgagctagtcatgaacaattgactgctgccaaaagaaaattggatgaacttgagatcaaagctcaagatgctgaaagaagatacgatactgctactgctgctgacttgagatactttgctatcccagatatccagaagcaaattgaagagttagaagtcaaagttgctgaagaggaagcttctaatttggacagcttgttgaagaatgcagttggaccagaacaaatatgtgaaaccgctgctagattgactggtatccctgtcacgaaattgtcgcaagcagaaaacaataaattgatcaatatggaagcagaattgtcgaaagaagttgttggacaatcggaagctgtgaaggcagtctccaatgccatcagattaagaagatcgggtttggctaatcctaaccaaccaccatcctttttgtttttgggtctttctggttcgggtaagactgaattggctaagaagcttgctggttttctctttgcagacgaaaaggcaattattagaattgactgctctgaattgggagacaaatggtctgcttcaaaattgttgggtgctgctccaggttatgttggatatgaagaaggtggtatcttgactgagccattaatcagacggccatactctgtggtcttgttggatgaagttgaaaaagctgctcctgaagtgttgactgtgttattacagattttggatgatggtagagttacctcttcccaaggtaagcttgttaactgctcgaatgccattttcataatgacgtctaatttgggtgcaaactacatcaatgccgccaagggaagcaagattgatgccaacacaaaggaacatgtaatggatgccgtgagagcacatttcagacctgaatttattaaccgtatttccagtattgttgtgtttaacagattgtcgagaaaagccatttccaagattgtcaagatcaggttgtccgaaattgaaaacagattcactgctaatggtaaggctatacaattgaagctagatgatgatgccatggagtacttgtgcaagaatggatggtcacctgacttgggtgcaagaccattgaaccgcttgatccaaaacgagattttgaacaggttggctgtaatgttgttgaaagggcaaatccaagataaagaaactgctagagttgttcttggcgaaaaaggtttggagattttacctaaccatgaaccagaagatgtggaaatgaatgatgttgataactggcaagactcagaggatgaagatgatgacgaagccagattcacttcacctggacttgactaa

SEQ ID NO: 33879 - protein, 899 aa, Candida albicans
MEDFTDNAIKIINNATELAKQQANSQLVPLHFLAAFIPSDDTEGSTQYLKTLVKRARYEWGDFERIVNRHLVKIPSQNPPPDEIRPSYQAGQVLTKANKIKQQQKDSYVAQDHILLALLEDQSIKDIFKEAGMSVDTIKTQAIELRGSQRIDSRQADSSSSYEFLNKYCEDFTEKAREGKIDPVIGREEEIRRVIRVLARRSKSNSVLIGDAGVGKTSIVEGVAQRIVDGDVPNVLAGSRLFALDLGALTAGAKYKGEFEERLKGVLNEIEKSKEFIILFIDEIHMLMGDGKSDAANLLKPMLARGALHCIGATTFAEYRKFISKDGAFERRFQKIDVPAATVQETVAILRGIQPKYEIHHGVRILDSALVTAAQLASRYLTYRALPDSAVDLVDESAAAVAVARDSKPEELDTLERQLHLVDVEINALERDKDADSASKERLNLAKKKKAELEEKIGPLNERYRQERASHEQLTAAKRKLDELEIKAQDAERRYDTATAADLRYFAIPDIQKQIEELEVKVAEEEASNLDSLLKNAVGPEQICETAARLTGIPVTKLSQAENNKLINMEAELSKEVVGQSEAVKAVSNAIRLRRSGLANPNQPPSFLFLGLSGSGKTELAKKLAGFLFADEKAIIRIDCSELGDKWSASKLLGAAPGYVGYEEGGILTEPLIRRPYSVVLLDEVEKAAPEVLTVLLQILDDGRVTSSQGKLVNCSNAIFIMTSNLGANYINAAKGSKIDANTKEHVMDAVRAHFRPEFINRISSIVVFNRLSRKAISKIVKIRLSEIENRFTANGKAIQLKLDDDAMEYLCKNGWSPDLGARPLNRLIQNEILNRLAVMLLKGQIQDKETARVVLGEKGLEILPNHEPEDVEMNDVDNWQDSEDEDDDEARFTSPGLD

SEQ ID NO: 33880 - DNA, 2574 bp, secondary endosymbiont of Glycaspis brimblecombei
  CDS (1)..(2574): transl_table=11
atgcgtttggatcgtcttaccaacaaatttcaacaagcactagctgatgctcaatctttagcaattggacaagataatcaatttattgaaccagtacatttactgattgccttgttagatcaagaaggcggtacattacgtcctttattgacatcgataggggttaatatcagtcagcttagtaacaaattaaactatattctcaataccttaccgcaagtgcatggcactgctggtgatatccagccatcaaacgatcttattcggcacttaaatttgtgtgataagttggcgcaacagcgaggtgatacgtttatatcctcagagctatttcttctggcaatttttgatgccaaaacctccctggcagatacacttaaaacgatgggagcgaataaagcaaatatagaaaaggcgatagaacaaatgcgtggtggtgataatgttaatgaccaaggtgctgaagagcagcgtcaagcacttaaaaaatacacaattgatttaactgaaagagctgaacaaggcaaactcgatcctgttattggacgtgatgaagagatccgccgaacgatacaagttcttcagcgccgaacaaaaaacaatccggttttaattggtgaaccaggggtaggtaaaaccgcgattgttgaaggtcttgctcaaagaattgttaatggtgaagtacccgaagggttgaaaaataaacgcgttctctctttagatatgggtgctttgctggctggcgctaaatatcggggcgaatttgaagaacgcttaaaggatgtcttaaatgatctggccaaacaagaaggaagtgtgattctgtttatcgatgaattacatactatggttggcgcaggtaaagctgaaggagcaatggatgctggtaatatgttaaaaccagcactagcgcgaggagaattgcattgcgtcggtgcgactacacttgatgaatatcgtcagtatattgaaaaggatgcggcattagagcgtcgtttccagaaagtttatgttgctgaacctaccgttgaggacaccattgcaatattaaggggactgaaagaacgttatgagctgcatcatcatgtacaaataactgaccctgccattgttgctgctgccagtttatcaaatcgttatatttctgatcgtatgcttcctgataaagcaatagatttaattgatgaagctggcgctagcttacgcatgcagatggattctaaaccggaagcgcttgatcgtttagaacgtcgagttactcaattaaaacttgaacaacaagcgctaaaaaaggaatctgatgacgccagtaaaaagcggcttaaaatgttagaggaagaactaacggaaaaagaacgggaatattcagagctagaagaagagtggaaagcggaaaaagcagagcttaccggtacacagcatataaaagcggaattggaaaacgcacgtataagtatggagcaggctcggcgtagcggtgatttagctaaaatgtcagaattgcaatatggtaaaattcctgaattagaaaaacaacttgaagctgccactaaggcggaaagtcacagcatgaagttattgcgcaataaagtaactgatgcagagattgcagaaatattagcgcgctggacaggcattcccgtttcaaaaatgttagaaagtgaacgtgaaaagttactccatatggaacaggatctgcataagcgagtcattggtcagaatgaagctgttgatgcggtatctaatgctattcggcgtagtcgtgctggtttatcagatccaaatcggcctattggctcattcttatttttaggtcctacgggtgttggtaaaaccgagctatgtaaggcactggcaaattttttatttgatagtgacgatgcaatggtacgtattgatatgtccgaatttatggaaaaacatacagtctccaggctagttggtgcacctccaggttatgtaggatatgaagaaggcggttatttaaccgaagccatccgacgtcgcccttattctgttattttgcttgatgaaattgaaaaagcacatcccgatgttttcaatattttattacaagttctggatgatggacgtttgaccgatgggcaaggaagaacggtcgattttcgtaatacagttgtcattatgacatcaaacctaggttcggatttaatccaagagcgttttggtagtttgggttatgacgaaatgaaagagctcgtcatggaagttgtcagccgtagtttccgacccgaatttataaaccgtattgatgaagtagtagtattccatccactcgataaagagcaaattacagaaattgcgcagattcaactatcgcgtttatataaacgaatggaagagcaaggctataaagtaaaaatcacgccagcggcattagaaaaattaggcgaagcgggatttgatccggtatttggtgcacgccctttgaaacgagcgatccaacaagagatagaaaatccattggctgaacagatgttatcaggcaaattagtgccaggcaaacaagtcactttagatattaaaaaaggtgttattgttgctaagcaataa

SEQ ID NO: 33881 - protein, 857 aa, secondary endosymbiont of Glycaspis brimblecombei
MRLDRLTNKFQQALADAQSLAIGQDNQFIEPVHLLIALLDQEGGTLRPLLTSIGVNISQLSNKLNYILNTLPQVHGTAGDIQPSNDLIRHLNLCDKLAQQRGDTFISSELFLLAIFDAKTSLADTLKTMGANKANIEKAIEQMRGGDNVNDQGAEEQRQALKKYTIDLTERAEQGKLDPVIGRDEEIRRTIQVLQRRTKNNPVLIGEPGVGKTAIVEGLAQRIVNGEVPEGLKNKRVLSLDMGALLAGAKYRGEFEERLKDVLNDLAKQEGSVILFIDELHTMVGAGKAEGAMDAGNMLKPALARGELHCVGATTLDEYRQYIEKDAALERRFQKVYVAEPTVEDTIAILRGLKERYELHHHVQITDPAIVAAASLSNRYISDRMLPDKAIDLIDEAGASLRMQMDSKPEALDRLERRVTQLKLEQQALKKESDDASKKRLKMLEEELTEKEREYSELEEEWKAEKAELTGTQHIKAELENARISMEQARRSGDLAKMSELQYGKIPELEKQLEAATKAESHSMKLLRNKVTDAEIAEILARWTGIPVSKMLESEREKLLHMEQDLHKRVIGQNEAVDAVSNAIRRSRAGLSDPNRPIGSFLFLGPTGVGKTELCKALANFLFDSDDAMVRIDMSEFMEKHTVSRLVGAPPGYVGYEEGGYLTEAIRRRPYSVILLDEIEKAHPDVFNILLQVLDDGRLTDGQGRTVDFRNTVVIMTSNLGSDLIQERFGSLGYDEMKELVMEVVSRSFRPEFINRIDEVVVFHPLDKEQITEIAQIQLSRLYKRMEEQGYKVKITPAALEKLGEAGFDPVFGARPLKRAIQQEIENPLAEQMLSGKLVPGKQVTLDIKKGVIVAKQ

SEQ ID NO: 33882 - DNA, 2934 bp, Phaseolus lunatus
  CDS (1)..(2934)
atggctaccagacgaactccgacgctagccaaatcgcttttcgccaccgtaactgcttctagaacctctcgctcccggtccgcgcgacgactcttctccgccataactcgtgcttcggagacttctccgaatgtcctttctcggtctcaggttgtcgacgcacttgcagccaacaatgtcgcctccgccaaattcctctccctctctttcacccgcagcttccacgccactaatccctccctccgctctgctgcaagctctcaggtagcccagactgaattcacagatatggcatgggaggggattcttggggctgttgatgcggctcggattagtaaacagcaaattgtggagtctgagcacttaatgaaagcccttttggagcaaaaggatggcttggcacgaagggtgtttactaagacaggattggacaacacgtctgttctacaggctactgatgattttataccgaagcaacctaaggttactggcgacactactggacctgttataggctcacaccttagctccctcttggacaatgcgcgaaagtacaagaaagaaatgggggatgagtatgtgtctgtggagcacctattgcttgcatttcattcagataagacgtttgggcagcagttgttcaagaatcttcagcttagcgggataactttgaaggatgctgtacaagctgttcgtggaagtcaaagagtgactgatcaaaatccggaggggaaatatgaggcactggataagtatggaaacgatctgactgaacttgctaagcgtggcaagcttgatcctgtcataggtcgagatgatgaaattcggcgctgtatccagatattatcaaggagaacaaaaaacaatccggttattattggtgaacccggtgtgggcaaaactgcaatagctgaaggattagctcaacgtattgtgcgtggtgatgttcctgagccattgatgaacagaaagttgatctccctggatatgggttcattgcttgctggggccaagtatcgtggagattttgaagaaaggttgaaagctgtcctgaaggaagttacagcatcaaatgggcaaataattttgtttattgatgaaattcatactgttgtaggtgcaggggctacaagtggtgcaatggacgccgggaacttgttgaagccaatgcttggaagaggtgaacttagatgtataggagcaactacattaaatgagtatagaaaatatattgaaaaggatcctgcactggagcgtagatttcagcaagtgttttgcagtcaaccatctgttgaagatacaatatccattcttcgtgggttgcgtgaacggtatgagttgcatcatggagtcaaaatatcagatagtgcacttgtttcagctgcagttcttgcagatcgatacattacggagcgctttttacctgacaaagccattgatcttgttgatgaagctgctgcgaagctgaagatggagataacctctaagcctactgaattggatgagatagacagggcaatattgaaattggagatggaaaagctctctttgaaaaatgacactgacaaggcatctaaagaaagattaagtaagctcgaaaatgatttgagtttacttaaacagaagcaaaaagaattggcagaacaatgggacaatgaaaaagtttttatgacacgaataaggtcaatcaaagaagagattgacagagtcaacctagagatggaagctgctgaacgtgattatgacctgaaccgtgctgctgagctcaagtatggaactttgatgtcccttcagcgccaattagaagaagctgaaaagaacctaactgacttccgaaagtctgggaaatctttacttcggagaagaggtcactaccttgatattactgagattgttagcaagtggactggtataccattatcaaacctccaacaaacagagagagaaaaattagtcttgctggaacaggttcttcacaatagagtggttggtcaggatatcgctgtaaaatctgtggctgatgcaattcgccgttcaagggctggattgtctgatccaaaccggccaattgcaagcttcatgttcatgggtccaactggtgttggcaaaactgagcttgccaaggctttggctggttacttgtttaacactgaaaatgctcttgttagaattgatatgagtgagtacatggagaaacatgctgtttcacgtttagttggagcccctcctggttatattggttatgaagaaggaggtcagctgactgaagtggtccggagaagaccctactctgtggtcctatttgatgaaatagagaaggcacatcacgatgtcttcaacatattgttacagttgttggatgatggaaggattactgattcccaaggaaggactgttagcttcacgaattgtgttgtgatcatgacttcaaacattggttcacattttatacttgaaacccttcgtagcacacaagatgataaaactggagtctatgatcagatgaagagacaagttgttgagttggccaggcaaacatttcgtccagagttcatgaatcgcattgacgaatatattgtgttccagcctttggattccgaacagataagcaaaatagtggagctccagatggaacgagtgaaaaacaggcttaagcaaaagaaaattgatcttcatttcacagaagaagctgttaaacatcttggtgtactgggttttgatccaaattttggtgcaagaccagttaagagagtgatacaacagttagttgaaaatgaaattgctatgggagttctaaggggagatttcaaagaagaggactcaattattgtggatgctgatgtggctccatcaggcaaagaacgttctctaaatagactgcttattaagaagttggacagccctgttgcagatgccatggttgtcaatcactaa

SEQ ID NO: 33883 - protein, 977 aa, Phaseolus lunatus
MATRRTPTLAKSLFATVTASRTSRSRSARRLFSAITRASETSPNVLSRSQVVDALAANNVASAKFLSLSFTRSFHATNPSLRSAASSQVAQTEFTDMAWEGILGAVDAARISKQQIVESEHLMKALLEQKDGLARRVFTKTGLDNTSVLQATDDFIPKQPKVTGDTTGPVIGSHLSSLLDNARKYKKEMGDEYVSVEHLLLAFHSDKTFGQQLFKNLQLSGITLKDAVQAVRGSQRVTDQNPEGKYEALDKYGNDLTELAKRGKLDPVIGRDDEIRRCIQILSRRTKNNPVIIGEPGVGKTAIAEGLAQRIVRGDVPEPLMNRKLISLDMGSLLAGAKYRGDFEERLKAVLKEVTASNGQIILFIDEIHTVVGAGATSGAMDAGNLLKPMLGRGELRCIGATTLNEYRKYIEKDPALERRFQQVFCSQPSVEDTISILRGLRERYELHHGVKISDSALVSAAVLADRYITERFLPDKAIDLVDEAAAKLKMEITSKPTELDEIDRAILKLEMEKLSLKNDTDKASKERLSKLENDLSLLKQKQKELAEQWDNEKVFMTRIRSIKEEIDRVNLEMEAAERDYDLNRAAELKYGTLMSLQRQLEEAEKNLTDFRKSGKSLLRRRGHYLDITEIVSKWTGIPLSNLQQTEREKLVLLEQVLHNRVVGQDIAVKSVADAIRRSRAGLSDPNRPIASFMFMGPTGVGKTELAKALAGYLFNTENALVRIDMSEYMEKHAVSRLVGAPPGYIGYEEGGQLTEVVRRRPYSVVLFDEIEKAHHDVFNILLQLLDDGRITDSQGRTVSFTNCVVIMTSNIGSHFILETLRSTQDDKTGVYDQMKRQVVELARQTFRPEFMNRIDEYIVFQPLDSEQISKIVELQMERVKNRLKQKKIDLHFTEEAVKHLGVLGFDPNFGARPVKRVIQQLVENEIAMGVLRGDFKEEDSIIVDADVAPSGKERSLNRLLIKKLDSPVADAMVVNH

SEQ ID NO: 33884 - DNA, 2739 bp, Zea mays
  CDS (1)..(2739)
atgaatccggacaacttcacccacaagacgaacgaggcgatcgtgggggcgcacgagattgcggtggaggccggccacgcgcagctcacgccgctgcacctggccgcagtgctggctgcggacaagggcggcatcctgcggcaggccatcacgggggcgtcggggggcgacggagcggccggggactcgttcgagcgcgtgctgaacaactcgctcaagaagctgccgtcgcagtccccgccgccggactccgttccggcgtctacggcgctgatcaaggtcatccgccgggcgcagtccgcgcagaagaaacgcggggactcgcacctcgccgtcgaccagctgctgctcggcctgctcgaggactcgcagatctccgactgcctcaaggaggccggcgtgtccgcggcgcgggtgcgcgccgagcttgagaagctccgcggcggggaggggcgccgcgtggagtccgcgtcgggggataccaacttccaggcgctcaagacatacggccgggacctcgtcgagcaggccgggaagcttgaccccgtcatcggccgcgacgaggagatccgccgcgtcgtgcgcattctctcgcgccgcaccaagaataaccccgtcctcatcggcgagcccggcgttggcaagacggccgtcgtggagggcctcgcgcagcgcatcgttcgcggcgacgtgcccagtaacctcctcgacgtccgcctcatcgcgctcgacatgggcgcgctcgtcgcgggcgccaagtaccgcggcgagttcgaggagcggctcaaggccgtgctcaaggaggtggaagaggccgaggggaaggtcattctcttcatcgacgagatacacctcgtcctgggcgcgggcaggacggagggttccatggacgcggccaacctgttcaagccaatgctggcgaggggacagctcaggtgcatcggcgccaccacgctggaggagtaccgcaagtacgtggagaaggacgcagcgttcgagcggcggttccagcaggtgttcgtcgcggagccgagcgtgcccgacaccgtcagcattctgaggggcctcaaggagaagtacgaggggcaccatggcgtgaggatccaggaccgcgccctcgtggtcgcggcacagctctccgcgaggtacatcatgggtcggcacctgcctgacaaagccatagacctggtggacgaggcctgcgccaatgtgagggtgcagctcgacagccagccggaagagattgataacctggagaggaagagaatccagcttgaggttgagctccacgcgctcgagaaggagaaggacaaggccagcaaagcccggctgattgaggtcaggaaggaattggacgatctgagggacaagctgcagcccctgaccatgaagtacaggaaggagaaggagagaattgatgagatcaggaagctgaagcagcgccgcgaggagctccagttcaccctgcaggaggccgagcgccggatggacctggcccgtgtggccgacctcaagtacggcgccctccaggaaatcgacgctgctatctccaagctggagagcgaaacaggggagaacctgatgctcaccgaaaccgtcggccctgaacaaattgcagaggtggtgagccgttggacgggtattccagtgacccggcttggccagaacgacaaggagaggctggttggcctggctgacaggcttcaccagagggtggtcggccagacagaggctgtgagcgccgtcgcagaggcggtgctgaggtcgagggccggtcttggcaggccacaacagcccactggctcgttcctcttcctgggtccgactggcgtggggaaaactgagctggccaaggccctagccgaacagctgttcgacgacgagaaccttcttgtccgcatcgacatgtcggagtacatggagcagcactcggttgcccgcctcatcggagcaccacctggctacgtcggccatgaagagggtgggcagctgactgaacaagtgaggaggaggccgtacagcgtgatcctgttcgacgaggtcgagaaggcccatgtcgccgtgttcaacaccctgctccaggtcctcgacgacggcaggctgacggatgggcaaggcaggacggtggacttcaggaacaccgtgatcatcatgacatcgaacctcggcgccgagcacctcctcgctgggatggtgggcaagaactccatgaaggtcgctcgcgatctggtcatgcaggaggtgaggaggcacttccgccctgagctgctgaaccgtctcgacgagatcgtgatcttcgatcctctgtcccacgagcagctgaggaaggtcgctcgccttcagatgaaggatgtggccgtccgtcttgccgaaaggggcatcgctctggctgtgaccgacgccgcattggacatcatcttgtctctctcttacgatccggtgtatggcgcgcggccaatcaggaggtggatcgagaagagggtggtgacgcagctgtcgaagatgctgatccaggaggagatcgacgagaactgcacggtctacatcgacgccgcgcccggcaaggacgagctggtctacagggtggaccggagcggcggtctggtgaacgctgagacggggatgaagtcggacatcctgatccaggtccccaacagctccaccaggagcgacgctgcgcaggccgtcaagaagatgaggatcatggaggaggacgaggacggcatggacgaggagtaa

SEQ ID NO: 33885 - protein, 912 aa, Zea mays
MNPDNFTHKTNEAIVGAHEIAVEAGHAQLTPLHLAAVLAADKGGILRQAITGASGGDGAAGDSFERVLNNSLKKLPSQSPPPDSVPASTALIKVIRRAQSAQKKRGDSHLAVDQLLLGLLEDSQISDCLKEAGVSAARVRAELEKLRGGEGRRVESASGDTNFQALKTYGRDLVEQAGKLDPVIGRDEEIRRVVRILSRRTKNNPVLIGEPGVGKTAVVEGLAQRIVRGDVPSNLLDVRLIALDMGALVAGAKYRGEFEERLKAVLKEVEEAEGKVILFIDEIHLVLGAGRTEGSMDAANLFKPMLARGQLRCIGATTLEEYRKYVEKDAAFERRFQQVFVAEPSVPDTVSILRGLKEKYEGHHGVRIQDRALVVAAQLSARYIMGRHLPDKAIDLVDEACANVRVQLDSQPEEIDNLERKRIQLEVELHALEKEKDKASKARLIEVRKELDDLRDKLQPLTMKYRKEKERIDEIRKLKQRREELQFTLQEAERRMDLARVADLKYGALQEIDAAISKLESETGENLMLTETVGPEQIAEVVSRWTGIPVTRLGQNDKERLVGLADRLHQRVVGQTEAVSAVAEAVLRSRAGLGRPQQPTGSFLFLGPTGVGKTELAKALAEQLFDDENLLVRIDMSEYMEQHSVARLIGAPPGYVGHEEGGQLTEQVRRRPYSVILFDEVEKAHVAVFNTLLQVLDDGRLTDGQGRTVDFRNTVIIMTSNLGAEHLLAGMVGKNSMKVARDLVMQEVRRHFRPELLNRLDEIVIFDPLSHEQLRKVARLQMKDVAVRLAERGIALAVTDAALDIILSLSYDPVYGARPIRRWIEKRVVTQLSKMLIQEEIDENCTVYIDAAPGKDELVYRVDRSGGLVNAETGMKSDILIQVPNSSTRSDAAQAVKKMRIMEEDEDGMDEE

SEQ ID NO: 33886 - DNA, 2742 bp, Triticum aestivum
  CDS (1)..(2742)
atgaatcccgacaagttcacgcacaagaccaatgaggcgctcgcggcggcgcacgagatggcgtccgaggccggccacgcgcagctcacgccgctgcacctcgccgcggcgctcgcggcggacaggtcgggcatcctccgccaggccatcgcccacgcgtccggcggcaacgacgccgcggccgagtcgttcgagcgcgtcgcgtccgccgcgctcaagcggctgccctcgcagtccccgccgcccgacaccgtcccggcctccacctcgctggtcaaggccgtccgccgcgcgcagtcggcgcagaagtcgcgcggcgactcgcacctcgccgtcgaccagctgctcatgggcctcctcgaggacccgcagatctccgacgcgctcaaggaggccggcatctccgctgcgcgggtgaaggccgaggtcgagaagctccggggaggcgacaaccggcgcgtggagtccgcgtcgggggacaccaacttccaggccctcaagacgtacggccgcgacctcgtggaggtggcgggcaagctggacccggtcatcggccgcgacgaggagatccggcgcgtggtgcggatcctgtcgcggcgcacaaagaacaaccccgtcctcatcggcgagcccggcgtgggcaagaccgccgtggtggaggggctcgcgcagcgcgtcgtgcgcggcgacgtccccagcaacctcctggacgtgcgcctggtcgcgctcgacatgggcgcgctcgtggccggcgccaagtaccgcggcgagttcgaggagcggctcaaggccgtgctcaaggaggtggaggaggccgaggggaaggtgatactgttcatcgacgagatacacctggtgctcggcgccgggcggacggaggggtcaatggacgcggccaacctgttcaagccgatgctggcgagggggcagctcaggtgcattggcgcgacgaccctcgaggagtacaggaagtacgtcgagaaggacgccgcgttcgagaggcggttccagcaggtgttcgtggcggagcccagcgtcccggacaccgtcagcatactcagagggctcaaggagaagtacgaggggcaccatggcgtgaggattcaggaccgcgcgctcgtcattgccgcgcagctctcgtcgaggtacatcatgggtcgccatttgcctgataaagcaatcgatttggttgacgaggcctgcgcaaatgtgagggtgcaacttgacagccagcctgaagagatcgacaacctcgagaggaagaggatccagttggaagtcgagctccatgccctcgagaaggagaaggacaaggctagcaaagctcggctagttgatgtgaggaaagagttggacgatctgagagacaagctgcagccgctgcagatgaagtatcgcaaggagaaagagaggatcgacgagatcaggagcctgaagcagcgccgcgaagagctgcagttcactctgcaggaggccgagcgccggatggatttggcccgcgtggctgatctcagatacggtgctctgcaggaggttgacgctgccattgctaagctggagggtgagaccggcgagaatttgatgttaacagagactgtcggcccggaccagattgctgaggtggtgagccgctggactggtattcctgtcaccaggctcggacagaatgagaaggcgaggctgatcgggctggcagatcgactgcatcagagggtcgttggacagtatgaggccgtcaatgcagttggagaggctgttctacggtcgagggctggccttggacgcccgcagcagcctactggttcattcctcttccttggaccgaccggtgtcggaaaaaccgagctcgccaaggctctagctgagcagctgtttgatgacgagaacctgctcgtccgcatcgacatgtctgaatacatggagcagcattcggttgcccggctaatcggagccccacctggatatgttggtcatgaagaaggggggcagctgaccgagcaagtgaggaggaggccatacagtgtcatcctcttcgacgaggttgagaaggcgcatgtggcggtgttcaacactctgctccaggtcctggacgatgggcggttgaccgacgggcaaggcaggacggttgattttaggaacacggtgatcatcatgacctcaaaccttggcgcggagcacctcctcgccggaatggtgggcaattcgatgaaggttgctcgtgatctggtcatgcaggaggtgaggaggcatttccgcccggagctgctgaaccgtctggacgagatcgtcatcttcgaccctctgtcgcatgagcagctgcggaaggtcgctcggcttcagatgaaagatgtggcagtccgtcttgccgagaggggcgttgctctggccgtcaccgacgccgccctggacgtcatcctgtcactgtcttacgatccggtctatggcgccaggccaatccggagatggatcgagaagaggatagtgacggagctctccaagatgttgatccgcgaggagatcgacgagaactccacggtgtacatcgacgctgcgcccagcaaggacgagctgacctatggcgtcgacaagcacggagggctggtgaacgcgcgcacgggccacaagtccgacatcctgatccaggttcctagcggagctgttgggggcgatgcggcgcacgccgtgaagaagatgaagatcatgcaggacagcggagaggtggacgacatggaggaagagtag

SEQ ID NO: 33887 - protein, 913 aa, Triticum aestivum
MNPDKFTHKTNEALAAAHEMASEAGHAQLTPLHLAAALAADRSGILRQAIAHASGGNDAAAESFERVASAALKRLPSQSPPPDTVPASTSLVKAVRRAQSAQKSRGDSHLAVDQLLMGLLEDPQISDALKEAGISAARVKAEVEKLRGGDNRRVESASGDTNFQALKTYGRDLVEVAGKLDPVIGRDEEIRRVVRILSRRTKNNPVLIGEPGVGKTAVVEGLAQRVVRGDVPSNLLDVRLVALDMGALVAGAKYRGEFEERLKAVLKEVEEAEGKVILFIDEIHLVLGAGRTEGSMDAANLFKPMLARGQLRCIGATTLEEYRKYVEKDAAFERRFQQVFVAEPSVPDTVSILRGLKEKYEGHHGVRIQDRALVIAAQLSSRYIMGRHLPDKAIDLVDEACANVRVQLDSQPEEIDNLERKRIQLEVELHALEKEKDKASKARLVDVRKELDDLRDKLQPLQMKYRKEKERIDEIRSLKQRREELQFTLQEAERRMDLARVADLRYGALQEVDAAIAKLEGETGENLMLTETVGPDQIAEVVSRWTGIPVTRLGQNEKARLIGLADRLHQRVVGQYEAVNAVGEAVLRSRAGLGRPQQPTGSFLFLGPTGVGKTELAKALAEQLFDDENLLVRIDMSEYMEQHSVARLIGAPPGYVGHEEGGQLTEQVRRRPYSVILFDEVEKAHVAVFNTLLQVLDDGRLTDGQGRTVDFRNTVIIMTSNLGAEHLLAGMVGNSMKVARDLVMQEVRRHFRPELLNRLDEIVIFDPLSHEQLRKVARLQMKDVAVRLAERGVALAVTDAALDVILSLSYDPVYGARPIRRWIEKRIVTELSKMLIREEIDENSTVYIDAAPSKDELTYGVDKHGGLVNARTGHKSDILIQVPSGAVGGDAAHAVKKMKIMQDSGEVDDMEEE

SEQ ID NO: 33888 - DNA, 2859 bp, Arabidopsis thaliana
  CDS (1)..(2859)
atggcttggtcgatagctcttcttacacctcctttttttggtcccggaaggcatgtgcaggccaaagaatacagggaaccaagagggtgtgtgatgaagatgagcagtttaaaagcacctgttctgagaattcaggccacagaatacagagaaccaagagggcgtgtgaagatgatgtccagtttacaagcacctcttctgacaattcagagcttctcagggttaagggcccccagtgcattagattatttgggaaggcctagtccaggtttccttgttaagtataaacttgcaaaatcatctgggagagaaaaagctagccgatgtgtacccaaagcaatgtttgagcgttttaccgagaaagcaattaaggtcataatgctgtctcaagaggaagctcggagacttggccataactttgttgggactgagcaaatactgttgggtctaattggagaagggactgggattgccgccaaggttcttaaatccatggggatcaatcttaaagattcacgcgtggaagtagaaaagataattgggagaggcagtggattcgtggcagtggagattccatttactcctcgcgcaaagcgggtgctggagttgtcactagaggaagctcgacaacttgggcataactacattggttcagagcaccttttgcttggtctacttcgtgaaggggagggtgtggcagctcgtgtcttggagaatttgggtgcagatcctagtaatatacggacacaggttatacgtatggtcggggaaaacaatgaagtcacagcaagcgttggtgggggaagcagcggaaacagcaaaatgccaacacttgaagagtatgggactaacttaactaaactagcagaggagggtaaactggatccggttgttggaaggcagccacagatcgaacgagtggtccagatcttggctcgaagaaccaagaacaacccatgtcttattggagaacctggagttggtaagacggcaatagcagaaggacttgcacagcgaatagctagtggtgatgttcctgaaacaatcgaggggaagacggttataacccttgatatgggtcttctagtggctggaacgaaataccgtggagagttcgaggaaagattgaagaagcttatggaggaaatcaggcaaagtgatgagataattctgtttattgatgaagtgcacacgctcatcggtgcaggagccgctgaaggtgcgatcgatgctgctaacatcttaaagccagctctagcaagaggtgaattgcagtgtattggtgcaacaacaattgatgagtacaggaaacacattgagaaagatcctgcattggagagacggttccagcctgtgaaagtacctgaaccaactgtagaagaagctatacagattttgcaaggtctgcgtgagcgctatgagatccaccacaaacttcgatacactgatgaagccttggttgctgctgcacaattgtcacatcagtacatcagtgatcggtttcttcccgacaaagcgattgacttgattgatgaagctgggtctcgggttcgactacgccatgctcagcttcctgaggaagctagagagcttgaaaagcaactcaggcaaatcacaaaagagaagaatgaagctgtgcgaagccaagacttcgagatggctggttctcatcgtgaccgtgaaatagagctcaaggctgagatagctaatgttttatctcgaggcaaagaagtggccaaagccgagaatgaagctgaggaaggaggacctactgtcacagaatctgacatccaacacatcgtcgccacctggacaggaatcccggtagagaaagtctcgtctgatgaatctagccgtcttctccaaatggagcagacccttcacacaagagtcattggccaagatgaagccgttaaagcaatcagtcgggctatccgccgtgcccgtgttgggctcaaaaacccaaaccgtcctatcgccagtttcatcttctctggtccaactggtgttgggaaatcagagcttgctaaggccttggctgcttactacttcggttcagaagaagcaatgatccgtcttgacatgagtgagttcatggaacgacacactgtttcgaaactcatcggttcacctcctggttacgtaggatacacagaaggaggtcagttaacagaggcggttcgacgcaggccctacactcttgttctctttgacgaaattgagaaagcacatcccgatgttttcaacatgatgcttcagatcctagaagacggtagactaactgatagcaaaggaagaactgtcgatttcaagaacacgcttctgatcatgacttcaaacgtagggagcagcgtgatcgaaaaaggtggtagaagaattgggtttgatcttgaccacgacgagaaagacagcagttacaacagaatcaagagcttagtgactgaggaactaaaacagtatttcagaccagagttcttgaacaggttagatgagatgattgttttcagacagttaacaaagctggaagtcaaggagattgctgatataatgcttaaagaagtggtggcgagacttgaggtcaaagagattgagcttcaggtgactgagaggtttaaagagagagtggtggatgaaggattcgacccgagttatggtgcgaggccacttagacgtgcaataatgaggcttttggaggatagtatggcggagaagatgctttcaagggacattaaagaaggagattctgtgattgttgatgttgatgccgaaggaagtgtggttgtgttgagtggtaccactggacgtgttggtggttttgctgctgaagaagccatggaagaccctattccaatattgtag

SEQ ID NO: 33889 - protein, 952 aa, Arabidopsis thaliana
MAWSIALLTPPFFGPGRHVQAKEYREPRGCVMKMSSLKAPVLRIQATEYREPRGRVKMMSSLQAPLLTIQSFSGLRAPSALDYLGRPSPGFLVKYKLAKSSGREKASRCVPKAMFERFTEKAIKVIMLSQEEARRLGHNFVGTEQILLGLIGEGTGIAAKVLKSMGINLKDSRVEVEKIIGRGSGFVAVEIPFTPRAKRVLELSLEEARQLGHNYIGSEHLLLGLLREGEGVAARVLENLGADPSNIRTQVIRMVGENNEVTASVGGGSSGNSKMPTLEEYGTNLTKLAEEGKLDPVVGRQPQIERVVQILARRTKNNPCLIGEPGVGKTAIAEGLAQRIASGDVPETIEGKTVITLDMGLLVAGTKYRGEFEERLKKLMEEIRQSDEIILFIDEVHTLIGAGAAEGAIDAANILKPALARGELQCIGATTIDEYRKHIEKDPALERRFQPVKVPEPTVEEAIQILQGLRERYEIHHKLRYTDEALVAAAQLSHQYISDRFLPDKAIDLIDEAGSRVRLRHAQLPEEARELEKQLRQITKEKNEAVRSQDFEMAGSHRDREIELKAEIANVLSRGKEVAKAENEAEEGGPTVTESDIQHIVATWTGIPVEKVSSDESSRLLQMEQTLHTRVIGQDEAVKAISRAIRRARVGLKNPNRPIASFIFSGPTGVGKSELAKALAAYYFGSEEAMIRLDMSEFMERHTVSKLIGSPPGYVGYTEGGQLTEAVRRRPYTLVLFDEIEKAHPDVFNMMLQILEDGRLTDSKGRTVDFKNTLLIMTSNVGSSVIEKGGRRIGFDLDHDEKDSSYNRIKSLVTEELKQYFRPEFLNRLDEMIVFRQLTKLEVKEIADIMLKEVVARLEVKEIELQVTERFKERVVDEGFDPSYGARPLRRAIMRLLEDSMAEKMLSRDIKEGDSVIVDVDAEGSVVVLSGTTGRVGGFAAEEAMEDPIPIL

SEQ ID NO: 33890 - DNA, 2709 bp, Pleurotus sajor
  CDS (1)..(2709)
atgtctgttgataatttcgactttaccgacaaagctcgccgcacgatcaccgccgctgtccaactggcaaaggactacgcgaatgcgcaagttcatccagttcatatcgcttcgtctctcttgaatgattcaggagaagaggagcaatcgtcaggaggaggactgggagacgcttcttccaggtcccaatccttattccactcagcaatttcaaaggctggtggtgatccggcagtagttaaacgcgggatacagcgtgcagtcgtcaggctgcctacgcaagatccccctcctgaagaagtttacttcagcgggcctgcgctcaaagtcctgcgagaagcgcagagcttgcagaagacaatgcacgactcgtacatcgctcaggaccatctactcctcgccgccttgaaggacgcgaccattcaagcagttatcaaagaagccgggcttactgaggctaccttgaaaactgccattgaacaagcacgaggaaaccgtcgtatcgaatcgaagacggctgaacaaggttttgatgcccttcaaaaatacgccgtcgacttgaccgctctggcagaggaaggaaagatcgacccagtcattggccgtgacaatgaaattcgtcgcgtcatccgaattctctgccgaagaacgaagaacaatccggttctcatcggtgaacccggtgtaggcaaaacctcgatcgctgagggtctcgctcaaagaatagtcaagagggatgtaccagccagcctgatctctagattatactcgctcgacatgggtgctttaatggcaggcgcgaagtataagggtgaatacgaagagcgtatcaaggctgtcttgaacgaagttgagaaggcatccgaagatggtggcccaggcgttattctctttgctgacgaattgcacctcattatggctggacgtggcgccgaaggaggaggcatggacgctgccaatctcttcaaacctctccttgcgcgtggcaagcttcgatgtattggcgcgacgaccctcgccgaatatcgaaaatacattgaaactgatgcggcactcgaacgtcgattcgcccaagtcttagtaaacgaaccgagcgtgctggaaacgatcagtatccttcgaggcatccgtgagaagtacgaagtccatcatggtgtcaggatattggacggcgcgctgatacaagctgcgacattggcacaccgctacttgacatctcggcgtctgcctgacgctgctattgatctcgtggacgaggcttgtgctagcgtacgtgttaatcgcgaaacggagcccgaggcaatcgacaagcttcagcgcaagaggcttgagcttgagatagaaatccatgccctcgagcgagagaaggatgctgcaagcaaggagcgtctccaagctgcgaagaaagctatttccgacgtagacgaggagctgcaacctctccaggctgcgttccaggcagagaagatgcgaggcgataactcaacgttctgcggcggaagatggacgaactcaaggcgaagattgaagaggctgagcgaagaccgcgacattaccactgcctccgatttgaaattctatgctgtccccgaagttcaagcgcgtatcgagcagctagaagcaaagaaggcagcagaggacgcttccaccggctctgcagctgatgtggtaaccccagaagccattgcagatattgttggacggtggaccaacattcccgtctcgaggctcatgtcttccgaaaaggagaagctgctaaggatggagcggattctcaccgaaaacgtcgttgggcagcccgaggcagtgaaggctgtcgcgaatgccatccggctctctcgcagtgggctcgcaaatgctcaaaggccaattgcaagcttccttttcgcaggccccagtggcacgggcaaaactcttctttccaagacactcgcgacacttctattcgactcgcctgacgctatgatccgaattgatggctccgagtactcagagaagcactccattgctcgtttgatcggagcaccgccagggtacatcggccatgatgcaggaggacaactcacggaatacgttcgccgcaagccttacagtattatcctcattgatgaaatcgagaaggcctgccgagaatttgtcaccctcttcctgcaagtcctcgatgatggcagacttactgatggtcaaggacgtgtcgttgacttcagaaactcggttatcatcatgacatccaacctgggcgccgcctatctcaatgatatgggcgatggacctgttcgtccggagacaagaacactagtcatgggcgccattcaaggtcatttccctcccgagtttgtgaatcgtatcgacgagattgttatcttccgtgcgctttcccagaagaacgtactgaagatcgtggacatccgtctcaaggaggtactcgagcgtcttgctgaacgaaagattacaatcgacatcgacgacgtggcgaagagctacctcagctcagccggatattctcctgcgtacggcgcccgtccactgaatcgggccattcaaagcgaactcttgaaccccttgtcgatcatgatcttgtccgaacaagttcgcttcgacggacctcataatcgtctgaatatcatcccgaatcacgaagccaccgaaacgcaagggatggatgtagattatgacgacgacgatattgaaattgaagagatggattaa

SEQ ID NO: 33891 - protein, 902 aa, Pleurotus sajor
MSVDNFDFTDKARRTITAAVQLAKDYANAQVHPVHIASSLLNDSGEEEQSSGGGLGDASSRSQSLFHSAISKAGGDPAVVKRGIQRAVVRLPTQDPPPEEVYFSGPALKVLREAQSLQKTMHDSYIAQDHLLLAALKDATIQAVIKEAGLTEATLKTAIEQARGNRRIESKTAEQGFDALQKYAVDLTALAEEGKIDPVIGRDNEIRRVIRILCRRTKNNPVLIGEPGVGKTSIAEGLAQRIVKRDVPASLISRLYSLDMGALMAGAKYKGEYEERIKAVLNEVEKASEDGGPGVILFADELHLIMAGRGAEGGGMDAANLFKPLLARGKLRCIGATTLAEYRKYIETDAALERRFAQVLVNEPSVLETISILRGIREKYEVHHGVRILDGALIQAATLAHRYLTSRRLPDAAIDLVDEACASVRVNRETEPEAIDKLQRKRLELEIEIHALEREKDAASKERLQAAKKAISDVDEELQPLQAAFQAEKMRGDNSTFCGGRWTNSRRRLKRLSEDRDITTASDLKFYAVPEVQARIEQLEAKKAAEDASTGSAADVVTPEAIADIVGRWTNIPVSRLMSSEKEKLLRMERILTENVVGQPEAVKAVANAIRLSRSGLANAQRPIASFLFAGPSGTGKTLLSKTLATLLFDSPDAMIRIDGSEYSEKHSIARLIGAPPGYIGHDAGGQLTEYVRRKPYSIILIDEIEKACREFVTLFLQVLDDGRLTDGQGRVVDFRNSVIIMTSNLGAAYLNDMGDGPVRPETRTLVMGAIQGHFPPEFVNRIDEIVIFRALSQKNVLKIVDIRLKEVLERLAERKITIDIDDVAKSYLSSAGYSPAYGARPLNRAIQSELLNPLSIMILSEQVRFDGPHNRLNIIPNHEATETQGMDVDYDDDDIEIEEMD

SEQ ID NO: 33892 - DNA, 2757 bp, Triticum aestivum
  CDS (1)..(2757)
atgaacccggacaacttcacgcacaagaccaacgaggcgctggtggcggcgcacgaggcggcgtcggaggccggccacgcgcagatcacgccgctgcacctggcggcggcgctggcggcggacaagtcgggcatcctgcgccaggccgtcgcgggggcgtccggcgggaacgcgtccgcgggggactcgttcgagcgcgtgctctccggcgcgctcaagaagctgccgtcgcagtcccccccgccggactccgtgccggcctccacggcgctcatcaaggccatccggcgcgcgcagtccgcgcagaagaagcgcggggactcccacctcgccgtcgaccagctgctcatgggcctcctcgaggacgcgcagatcgccgactgcctcaaggaggccggcgtgtccgcctcgcgggtgcgcgccgagctcgagaagctccgcggcggggacaactcgcgcaaggtcgagtccgcctccggcgacaccaacttccaggcgctcaagacgtacggccgcgacctcgtcgaggtggccggcaagctcgaccccgtcatcggccgcgacgaggagatccgccgcgtcgtgcgcatcctctcacgccgcaccaagaacaaccccgtcctcatcggcgagcccggcgtgggcaagacggccgtcgtggagggcctcgcgcagcgcgtcgtgcgcggggacgtgcccagcaacctgctcgacgtccgcctcgtcgcgctcgacatgggcgcgctcgtcgccggcgccaagtaccgcggcgagttcgaggagcggctcaaggccgtgctcaaggaggtggaggaggccgagggcaaggtcatcctcttcatcgacgagatacacctcgtcctcggcgccgggaggacggaggggtccatggacgccgccaacctgttcaagccgatgctcgccaggggccagctccggtgcatcggcgccaccacgctggaggagtaccgcaagtacgtcgagaaggacgccgcgttcgagcggcggttccagcaggtgtacgtggccgagccgagcgtcgccgacaccatcagcatcctgcgagggctcaaggagaagtacgaggggcaccacggcgtgcgcatccaggaccgcgccatcgtcgtcgcggcgcagctctcggcgaggtacatcatgggccggcacctgccggacaaggccatcgacctggtggacgaggcgtgcgccaacgtgagggtgcagctggacagccagccggaggagatcgacaacctggagaggaagcggattcagctggaggtggagctgcacgcgctggagaaggagaaggacaaggccagcaaggcccggctggtggaggtgaggaaggagctggacgacctgagggacaagctgcagccgctgacgatgaagtacaggaaggagaaggagcggatcgacgagatccggaagctgaagcagcggcgcgaggagctgcagttcacgctgcaggaggcggagcggcgcatggacctggcccgcgtcgccgacctcaagtacggcgcgctccaggagatcgacgccgccatcgccaagctggagggcgagaccggcgagaacctgatgctcaccgagaccgtcggccccgagcagatcgcggaggtggtgagccggtggaccggcatcccggtgacccggctcgggcagaacgacaaggagcggctcgtcggcatggcggacaggctgcacacgagggtggtcgggcagacggaggccgtgaacgccgtcgccgaggcggtgctgaggtccagggcggggcttgggcggccgcagcagcccaccgggtcgttcctcttcctgggcccgaccggcgtgggcaagaccgagctcgccaaggccctcgccgagcagctgttcgacgacgagaacctgctcgtccgcatcgacatgtccgagtacatggagcagcactccgtcgcccgcctcatcggagcgccacctggctatgtcgggcacgaggagggcgggcagctgacggagcaggtgaggaggaggccgtacagcgtgatcctgttcgacgaggtggagaaggcgcacgtggcggtgttcaacacgctcctccaggtgctggacgacggccggctgaccgacgggcaaggcaggacggtggacttccggaacaccgtgatcatcatgacctccaacctcggcgccgagcacctcctcgccgggatggtgggcaagaactccatgaaggtcgcgcgcgacctcgtcatgcaggaggtgaggaggcacttcaggccggagctgctgaaccggctggacgagatcgtcgtcttcgacccgctgtcccacgagcagctgaggaaggtcgctcgcctgcagatgaaggacgtggccgtccggctcgccgagcgcggcgtcgccctggccgtcaccgacgctgcgctggacgtcatcctgtctctggcctacgacccggtgtatggcgctcggccgatcaggaggtggatcgagaagcgggtggtgacgcagctgtccaagatgctgatccaggaggagatcgacgagaactgcacggtgtacatcgacgccgccaacaaggacgagctggcctaccgggtggaccgcagcggcgggctggtgaacgccgagacggggcagaggtccgacatcctcatccaggtgcccaacggcgccctcggcggcggcaaaggcggcgaggcggccaaggccgtgaagaagatgcgggtcatggaggacggggacgaggacggcatggacgaagatgtttga

SEQ ID NO: 33893 - protein, 918 aa, Triticum aestivum
MNPDNFTHKTNEALVAAHEAASEAGHAQITPLHLAAALAADKSGILRQAVAGASGGNASAGDSFERVLSGALKKLPSQSPPPDSVPASTALIKAIRRAQSAQKKRGDSHLAVDQLLMGLLEDAQIADCLKEAGVSASRVRAELEKLRGGDNSRKVESASGDTNFQALKTYGRDLVEVAGKLDPVIGRDEEIRRVVRILSRRTKNNPVLIGEPGVGKTAVVEGLAQRVVRGDVPSNLLDVRLVALDMGALVAGAKYRGEFEERLKAVLKEVEEAEGKVILFIDEIHLVLGAGRTEGSMDAANLFKPMLARGQLRCIGATTLEEYRKYVEKDAAFERRFQQVYVAEPSVADTISILRGLKEKYEGHHGVRIQDRAIVVAAQLSARYIMGRHLPDKAIDLVDEACANVRVQLDSQPEEIDNLERKRIQLEVELHALEKEKDKASKARLVEVRKELDDLRDKLQPLTMKYRKEKERIDEIRKLKQRREELQFTLQEAERRMDLARVADLKYGALQEIDAAIAKLEGETGENLMLTETVGPEQIAEVVSRWTGIPVTRLGQNDKERLVGMADRLHTRVVGQTEAVNAVAEAVLRSRAGLGRPQQPTGSFLFLGPTGVGKTELAKALAEQLFDDENLLVRIDMSEYMEQHSVARLIGAPPGYVGHEEGGQLTEQVRRRPYSVILFDEVEKAHVAVFNTLLQVLDDGRLTDGQGRTVDFRNTVIIMTSNLGAEHLLAGMVGKNSMKVARDLVMQEVRRHFRPELLNRLDEIVVFDPLSHEQLRKVARLQMKDVAVRLAERGVALAVTDAALDVILSLAYDPVYGARPIRRWIEKRVVTQLSKMLIQEEIDENCTVYIDAANKDELAYRVDRSGGLVNAETGQRSDILIQVPNGALGGGKGGEAAKAVKKMRVMEDGDEDGMDEDV

SEQ ID NO: 33894 - DNA, 2757 bp, Triticum aestivum
  CDS (1)..(2757)
atgaacccggacaacttcacgcacaagaccaacgaggcgctggtggcggcgcacgaggcggcgtcggaggccggccacgcgcagatcacgccgttgcacctggcggcggcgctggcggcggacaagtcgggcatcctgcggcaggccgtcgcgggggcgtccggcgggaatgcgtccgcgggggactcgttcgagcgcgtgctcgccggcgcgctcaggaagctgccgtcgcagtcgccgccgccggactccgtgccggcctccacggcgctcatcaaggccatccgccgcgcgcagtcggcgcagaagaagcgcggggactcgcacctcgccgtcgaccagctgctcatgggcctcctcgaggacgcgcagatcgccgactgcctcaaggaggccggcgtgtccgcctcgcgggtgcgcgccgagctcgacaagctccgcggcggggacaactcgcgcaaggtcgagtccgccttcggcgacaccaccttccaggcgctcaagacgtacggccgcgacctcgtcgaggtggccggcaagctcgaccccgtcatcggccgcgacgaggagatccgccgcgtcgtgcgcatcctctcgcgccgcaccaagaacaaccccgtcctcatcggcgagcccggcgtcggcaagacggccgtcgtcgagggcctcgcgcagcgcgtcgtgcgcggggacgtgcccagcaacctgctcgacgtccgcctcgtcgcgctcgacatgggcgcgctcgtcgccggcgccaagtaccgcggcgagttcgaggagcggctcaaggccgtgctcaaggaggtggaggaggccgacggcaaggtcatcctcttcatcgacgagatacacctcgtcctcggcgccgggaggacggaggggtccatggacgcggccaacctcttcaagcccatgctcgccaggggccagctccggtgcatcggcgccaccacgctggaggagtaccgcaagtacgtcgagaaggacgccgcgttcgagcgacggttccagcaggtgtacgtggccgagccgagcgtcgccgacaccatcagcatcctgcgagggctcaaggagaagtacgaggggcaccacggcgtgcgcatccaggaccgcgccatcgtcgtcgcggcgcagctctcggccaggtacatcatgggccgccacctgccggacaaggccatcgacctggtggacgaggcgtgcgccaacgtgagggtgcagctggacagccagccggaggagatcgacaatctggagcggaagcggattcagctggaggtggagctgcacgcgctggagaaggagaaggacaaggccagcaaggcccggctggtggaggtgaggaaggagctggacgacctgagggacaagctgcagccgctgaccatgaagtacaggaaggagaaggagcggatcgacgagatccggaagctgaagcagcggcgggaggagctgcagttcacgctgcaggaggccgagcggcgcatggacctggcacgcgtcgccgacctcaagtacggcgccctccaggagatcgacgccgccattgcgaagctggagggcgagaccggcgagaacctgatgctcaccgagaccgtcggccccgagcagatcgcggaggtggtgagccggtggaccggcatcccggtgacccggctcgggcagaacgacaaggagcgcctggtcggcatggcggacaggctgcacacgagggtggtcgggcagacggaggccgtgaacgccgtcgccgaggcggtgctgaggtccagggcggggcttgggcggccgcagcagcccaccgggtcgttcctcttcctgggcccgaccggcgtgggcaagacagagctcgccaaggccctcgccgagcagctgttcgacgacgagaacctgctcgtccgcatcgacatgtccgagtacatggagcagcactccgtcgctcgcctcatcggcgcgccaccaggctatgtcggacacgaggagggcgggcagctgacggagcaggtgaggaggaggccgtacagcgtgatcctgttcgacgaggtggagaaggcgcacgtggcggtgttcaacacgctcctccaggtgctggacgacggccggctgaccgacgggcaaggccggacggtggacttccggaacaccgtgatcatcatgacctccaacctcggcgccgagcacctcctcgccgggatggtgggcaagaactccatgaaggtcgcccgcgacctcgtcatgcaggaggtgaggaggcacttcaggccggagctgctgaaccggctggacgagatggtgatcttcgacccgctgtcccacgagcagctgaggaaggtcgcccgcctgcagatgaaggacgtggccgtccggctcgccgagcgcggcgtcgcactggccgtcaccgacgccgcgctggacgtcatcctgtcgctggcctacgatccagtgtatggcgctcggccgatcaggaggtggatcgagaagagggtggtgacgcagctgtccaagatgctgatccaggaggagatcgacgagaattgcactgtgtacatcgacgccgccgacaaggacgagctggcctaccgggtggaccgcagcggcgggctggtgaacgccgagacggggcagaggtccgacatcctcatccaggtgcccaacggcgccctcggcggcggcggcggcggcgaggcggccaaggccgtgaagaagatgagggtcatggaggacggggacgaggacggcatggacgaagatgtttga

SEQ ID NO: 33895 - protein, 918 aa, Triticum aestivum
MNPDNFTHKTNEALVAAHEAASEAGHAQITPLHLAAALAADKSGILRQAVAGASGGNASAGDSFERVLAGALRKLPSQSPPPDSVPASTALIKAIRRAQSAQKKRGDSHLAVDQLLMGLLEDAQIADCLKEAGVSASRVRAELDKLRGGDNSRKVESAFGDTTFQALKTYGRDLVEVAGKLDPVIGRDEEIRRVVRILSRRTKNNPVLIGEPGVGKTAVVEGLAQRVVRGDVPSNLLDVRLVALDMGALVAGAKYRGEFEERLKAVLKEVEEADGKVILFIDEIHLVLGAGRTEGSMDAANLFKPMLARGQLRCIGATTLEEYRKYVEKDAAFERRFQQVYVAEPSVADTISILRGLKEKYEGHHGVRIQDRAIVVAAQLSARYIMGRHLPDKAIDLVDEACANVRVQLDSQPEEIDNLERKRIQLEVELHALEKEKDKASKARLVEVRKELDDLRDKLQPLTMKYRKEKERIDEIRKLKQRREELQFTLQEAERRMDLARVADLKYGALQEIDAAIAKLEGETGENLMLTETVGPEQIAEVVSRWTGIPVTRLGQNDKERLVGMADRLHTRVVGQTEAVNAVAEAVLRSRAGLGRPQQPTGSFLFLGPTGVGKTELAKALAEQLFDDENLLVRIDMSEYMEQHSVARLIGAPPGYVGHEEGGQLTEQVRRRPYSVILFDEVEKAHVAVFNTLLQVLDDGRLTDGQGRTVDFRNTVIIMTSNLGAEHLLAGMVGKNSMKVARDLVMQEVRRHFRPELLNRLDEMVIFDPLSHEQLRKVARLQMKDVAVRLAERGVALAVTDAALDVILSLAYDPVYGARPIRRWIEKRVVTQLSKMLIQEEIDENCTVYIDAADKDELAYRVDRSGGLVNAETGQRSDILIQVPNGALGGGGGGEAAKAVKKMRVMEDGDEDGMDEDV

SEQ ID NO: 33896 - DNA, 2730 bp, Nicotiana tabacum
  CDS (1)..(2730)
atgaatcctgaaaaattcacccacaagactaacgaggcccttgctggggcactcgagctagcactatccgcagggcatgctcaatttacgcctctgcatatggctgtggccttaatatctgatcacaatggtatttttcgacaagcgattgtcaatgctggtgggaatgaagaagtagctaattcagtggagcgggtattgaatcaagcgatgaagaagctaccttctcaaacaccggctcctgacgaaatcccacctagcacttcccttatcaaggtgttacgccgagcacaatcgtcgcagaagtctcgtggtgacagccatttagcagtggatcagttgattttaggactgctagaagactcccaaattggagatcttttgaaagaagctggagtgagtgcatcaagagtgaaatcagaggtagagaaacttagaggaaaggaaggaagaaaagtcgaaagtgcttcaggggacaccacattccaagcactcaacacttatggccgtgatcttgtggaacaagcaggaaagcttgatcccgtgattggtagggatgaagaaattagaagagtcgttcggattttatcaaggaggactaagaacaacccggttcttattggagagcccggtgtgggtaaaacagcagttgttgaagggctagcacagaggattgtacgtggtgatgttccaagtaatttagctgatgttaggcttatagcattggatatgggagcgctagttgctggagctaagtacagaggtgaatttgaagagaggctgaaggctgtgctgaaagaagttgaagaagcggaagggaaagtaatacttttcattgacgagatacatttagtcctcggtgctggtcggacagaagggtctatggatgctgctaatctgtttaagccaatgctagccagaggtcaattacggtgcattggtgcaactacactcgaggagtacaggaagtatgttgagaaggatgctgcatttgagaggcgtttccagcaggtgtatgttgctgagcctagtgttgctgacactattagtattctccgtgggttgaaggagaggtatgaagggcatcatggtgtcaaaattcaggacagagctcttgtagtggctgcccagctctcatctcggtacattacaggtcgacatctgccagataaggctattgacctagttgatgaagcttgtgcaaatgttagagttcagcttgatagtcaacctgaggaaattgacaatcttgagaggaagagaattcagctagaggttgaacttcacgctctcgagaaggaaaaagacaaagctagcaaagcacgtctcatagaagtgaggaaagaacttgatgatttgagagacaaactccaacctttgatgatgaggtacaagaaagagaaggaaaggatagatgagctgcgcaggctcaagcaaaagcgcgatgagctcatctatgctttacaagaagctgaaaggagatatgatctggcgagggcagcagatctgagatatggggcaattcaagaagtggaaactgcaatagcaaatcttgagagtacctcagctgaaagtacaatgctaacagagactgtgggtcctgatcagattgcggaagttgtgagtcgttggactggtattccggtctcaaggcttggtcagaatgagaaagagaaactgattggtcttggcgatagattgcaccaaagagtggtcgggcaagatcatgcagttagagctgttgctgaagccgtgttaaggtccagagctggtttaggaaggccacagcaaccaactggttcattccttttcttggggccaactggtgttggaaagacagagctcgctaaagctcttgcagagcagctctttgatgatgataaactgatgatcagaatagacatgtccgagtacatggaacaacactctgtttcccggctgattggtgctccaccaggttatgttgggcatgatgagggaggacaacttactgaagctgttaggaggcggccttacagtgttgtgctatttgatgaagttgagaaagcccatcctgcagtgtttaatacattgcttcaagttctggatgatggaaggttaacagatggtcaaggccgcacagttgatttcaccaactccgtgattattatgacttcaaacttgggagcagagtatctgttgtctggattaatgggcaaatgtaccatggagacagctcgtgaaatggtcatgcaggaggtgcgaaagcagtttaagcccgagctgctgaatcggctggatgagattgttgtgtttgatcctctgtcccacaagcagttgaggcaagtatgccgctaccagatgaaggacgttgcactacggctggctgagaggggtattgcattgggcgttactgaggcagctccagatgtcatactcacagagagttatgacccggtttatggtgcaagacctattaggagatggttggagaggaaggtggtgaccgagctatccaagatgctcgtgaaggaggagattgatgagaactcaacggtttacatagatgctggggtcagcgggaaagatctaacctacagggtggagaagaatggagggcttgtgaatgctgccaccgggcaaaaatctgatatattgattcagcttcctaatggtcccaggagtgatgctgtccaagcagtcaagaagatgaggattgaagaaattgaagatgacgaaatggaagattga

SEQ ID NO: 33897 - protein, 909 aa, Nicotiana tabacum
MNPEKFTHKTNEALAGALELALSAGHAQFTPLHMAVALISDHNGIFRQAIVNAGGNEEVANSVERVLNQAMKKLPSQTPAPDEIPPSTSLIKVLRRAQSSQKSRGDSHLAVDQLILGLLEDSQIGDLLKEAGVSASRVKSEVEKLRGKEGRKVESASGDTTFQALNTYGRDLVEQAGKLDPVIGRDEEIRRVVRILSRRTKNNPVLIGEPGVGKTAVVEGLAQRIVRGDVPSNLADVRLIALDMGALVAGAKYRGEFEERLKAVLKEVEEAEGKVILFIDEIHLVLGAGRTEGSMDAANLFKPMLARGQLRCIGATTLEEYRKYVEKDAAFERRFQQVYVAEPSVADTISILRGLKERYEGHHGVKIQDRALVVAAQLSSRYITGRHLPDKAIDLVDEACANVRVQLDSQPEEIDNLERKRIQLEVELHALEKEKDKASKARLIEVRKELDDLRDKLQPLMMRYKKEKERIDELRRLKQKRDELIYALQEAERRYDLARAADLRYGAIQEVETAIANLESTSAESTMLTETVGPDQIAEVVSRWTGIPVSRLGQNEKEKLIGLGDRLHQRVVGQDHAVRAVAEAVLRSRAGLGRPQQPTGSFLFLGPTGVGKTELAKALAEQLFDDDKLMIRIDMSEYMEQHSVSRLIGAPPGYVGHDEGGQLTEAVRRRPYSVVLFDEVEKAHPAVFNTLLQVLDDGRLTDGQGRTVDFTNSVIIMTSNLGAEYLLSGLMGKCTMETAREMVMQEVRKQFKPELLNRLDEIVVFDPLSHKQLRQVCRYQMKDVALRLAERGIALGVTEAAPDVILTESYDPVYGARPIRRWLERKVVTELSKMLVKEEIDENSTVYIDAGVSGKDLTYRVEKNGGLVNAATGQKSDILIQLPNGPRSDAVQAVKKMRIEEIEDDEMED

SEQ ID NO: 33898 - DNA, 2781 bp, Solanum lycopersicum
  CDS (1)..(2781)
atgatggctagagctttagttcagtcaacaaacattctaccttcagttgctggtgaaagggctggacaattcaatggatcccggaaagatcaaagaactgttagaatgctatgtaatgtaaaatgttgttcctcaaggctgaacaattttgcaggactgcgagggtgcaacgcattagatacactactagtaaaatctggagaaactctccattcgaaagtggcagctgcaacttttgtcagacggccacgagggtgccgatttgtcccaaaagcaatgtttgagcggttcactgagaaagcaataaaagtcattatgcttgcccaagaagaggccagacgactaggtcacaactttgttgggacagaacagatcctgctgggtcttattggtgagggaactggtattgctgctaaggttcttaaatccatgggaattaatttgaaagatgctcgtgtggaagtagagaagatcattggcaggggtagtggatttattgcagtggaaatcccttttactcctcgtgcaaagcgtgttctagaactatctctggaggaagcccgccaactagggcataattatattggctccgagcacttgttacttggactgttgcgcgaaggtgaaggtgtggctgcccgtgttcttgaaaacttgggtgctgaccccactaacattcgcacacaggtgatacggatggttggcgagagtagtgaggctgttggtgctagtgttggaggtggaacttctggcctaaagatgcctacattggaggagtacggcaccaatttgacaaagttagctgaagaggggaaactagatcctgtagttggaagacaggctcaaatcgagcgtgttactcaaatcttgggtcgccgtaccaaaaacaacccttgccttattggagaaccaggtgttggaaaaactgctattgccgaagggctagctcaaagaattgctaatggtgatgtccctgaaacaatagaaggaaagaaggtcataacacttgatatgggattgcttgttgctgggacaaaataccgtggagagtttgaggaaagactgaagaaactaatggaggaaattaaacaaagtgatgaaataatactgtttattgatgaagtacacacattgattggagctggagctgcagagggagcaattgatgctgcaaacatcttgaaacctgccctggctagaggcgagctacagtgtattggagccacaaccctggatgagtacagaaagcacattgagaaagaccctgcactagagagaaggttccagccagttaaagtccctgaaccttctgtggatgaaaccatacagatcttgaaagggcttcgggagaggtatgagattcatcacaagctccattacactgatgaggcaatagaggccgctgccaagctttctcaccagtacatcagtgaccgctttctgcctgataaagcaattgacttgattgatgaagctggttcccgtgttcgacttcgtcatgcacagctccctgaggaagcaagagagctggaaaaggagcttcgccagattacaaaggagaaaaatgaagctgtccgcggtcaagattttgagaaggctggggagttgcgtgatagagaaatggatcttaaggcacaaatctcagccttgatagacaaaaacaaagagaagagcaaggcagaatctgaggcaggagatgcagcaggtcccatagtgacagaggcagatattcagcacattgtctcttcctggaccggcattcctgtagagaaggtctcaactgacgaatctgatcgcctcctaaaaatggaagaaacacttcatacccgagtcattggccaggatgaagcagtaaaagccattagtcgcgctatcagacgtgcccgtgttggcctcaagaatcccaaccgacctattgccagtttcatcttttctggtccaactggtgttgggaagtcagaactggcaaagtctttagcaacgtactactttggttctgaagaagcaatgattcggcttgatatgagtgagtttatggaaagacacactgtgtctaaactcatcggttcaccccctgggtatgttggttacactgaaggtggtcaattaactgaagctgttaggcgtcgaccttatacagttgtgctctttgatgagattgagaaggctcatcctgatgtcttcaacatgatgcttcaaattcttgaagatggaagattgacagacagcaaaggcagaactgtcgacttcaagaatacactcctcatcatgacatcgaatgttggaagcagtgtgatagagaaaggaggtcgtcgtataggttttgatctagattttgacgagaaggatagtagttacaaccgtatcaagagcttggtgactgaggagttgaaacagtacttcaggccagagtttttaaacagattgagtgagatgattgtattccgtcagctcactaagttggaggtgaaggagattgccgatatcatgcttaaggaggtctttgtgaggttgaagaataaggagatagaactccaagtgacagagaggtttagagatagggtagttgatgaaggatataacccaagctatggagctagaccattgaggagagctattatgagactgctagaggatagtatggccgagaagatgcttgcaggtgagatcaaagaaggtgattcagtaattgtggatgtggattcagatggcaacgtcaccgttctcaatggcactagtggtgctccctcagattcagctcctgagcctatccttgtgtag

SEQ ID NO: 33899 - protein, 926 aa, Solanum lycopersicum
MMARALVQSTNILPSVAGERAGQFNGSRKDQRTVRMLCNVKCCSSRLNNFAGLRGCNALDTLLVKSGETLHSKVAAATFVRRPRGCRFVPKAMFERFTEKAIKVIMLAQEEARRLGHNFVGTEQILLGLIGEGTGIAAKVLKSMGINLKDARVEVEKIIGRGSGFIAVEIPFTPRAKRVLELSLEEARQLGHNYIGSEHLLLGLLREGEGVAARVLENLGADPTNIRTQVIRMVGESSEAVGASVGGGTSGLKMPTLEEYGTNLTKLAEEGKLDPVVGRQAQIERVTQILGRRTKNNPCLIGEPGVGKTAIAEGLAQRIANGDVPETIEGKKVITLDMGLLVAGTKYRGEFEERLKKLMEEIKQSDEIILFIDEVHTLIGAGAAEGAIDAANILKPALARGELQCIGATTLDEYRKHIEKDPALERRFQPVKVPEPSVDETIQILKGLRERYEIHHKLHYTDEAIEAAAKLSHQYISDRFLPDKAIDLIDEAGSRVRLRHAQLPEEARELEKELRQITKEKNEAVRGQDFEKAGELRDREMDLKAQISALIDKNKEKSKAESEAGDAAGPIVTEADIQHIVSSWTGIPVEKVSTDESDRLLKMEETLHTRVIGQDEAVKAISRAIRRARVGLKNPNRPIASFIFSGPTGVGKSELAKSLATYYFGSEEAMIRLDMSEFMERHTVSKLIGSPPGYVGYTEGGQLTEAVRRRPYTVVLFDEIEKAHPDVFNMMLQILEDGRLTDSKGRTVDFKNTLLIMTSNVGSSVIEKGGRRIGFDLDFDEKDSSYNRIKSLVTEELKQYFRPEFLNRLSEMIVFRQLTKLEVKEIADIMLKEVFVRLKNKEIELQVTERFRDRVVDEGYNPSYGARPLRRAIMRLLEDSMAEKMLAGEIKEGDSVIVDVDSDGNVTVLNGTSGAPSDSAPEPILV

SEQ ID NO: 33900 - DNA, 2772 bp, Solanum lycopersicum
  CDS (1)..(2772)
atggctagagctctagttcagtcaacaagcatcccatcgtcagttgctggtgaaaggacaaccaaattcaatggatctgggaaaacaaaaagagctgttacaatgctatgcaatgcacaatcatcttcacttacactgagggattttacaggattgcgaggatgcaacgcaatagatacactagttagatctggagaaactctccaatccaaagtagctgctgcaacttatgtcagacggccacgaggttgccgatttgtaccaaaagcaatgtttgagcgcttcacagagaaggcgataaaagtcattatgcttgcacaagaagaggccagacgacttggtcacaattttgttggcactgagcagatcttgttgggtctaattggtgagggaactggtattgctgccaaggttcttaaatcgatggggatcaatttgaaagatgctcgtgtggaagtggaaaagataattggaaggggtagtgggtttgttgctgttgagatcccttttacccctcgtgccaagcgtgttctggaactctctctggaggaagcccgccagctagggcataactatattggttcggagcacttgctacttggattgctacgtgaaggtgaaggtgtggctgcccgtgttcttgaaaacttgggtgctgaccccagcaacatccgcactcaggtgatccggatggttggtgagagtaatgaggctgttggtgctagcgttggaggtggaacttctggccaaaaaatgccaacactggaggagtatggaacaaatttgacaaaattggcggaagagggaaaattggaccccgttgttggaagacagccgcaaattgaacgggtcactcaaatcttgggtcggcggactaagaacaacccttgtcttattggtgaaccaggtgttggcaaaacagctattgctgagggtttggcacaaagaattgcaaatggtgatgtccctgaaacaattgaggggaagaaggtgataactcttgatatgggattgcttgttgctggaacaaaataccgtggagagtttgaggaaaggctaaaaaagttgatggaggaaattaagcagagtgatgaaataatactatttatcgatgaagtgcacacattgattggagctggagcagcagagggggccatcgatgctgcaaacatcttgaaacctgccctagctcgaggtgaactacagtgtatcggagctactacactggatgaatacagaaagcatattgagaaagatcctgcactagagaggagattccaaccagttaaggtccctgaacctactgttgatgaaactatacagattctgaaagggcttcgtgagaggtatgaaattcatcacaaacttcgttacactgacgaagacttagtggctgctgctcagctctcataccagtacatcagtgaccgatttctgcctgacaaagcaattgatttgattgatgaagctggttctcgtgttcgacttcgccatgctcagctccccgaggaagcaaaagagctcgagaaagaacttcgtcagataacaaaggagaagaatgaagctgttcgtggtcaagatttcgaaaaggctggggaattacgtgatagagaaatggatctgaaggcacagatcacagccctcatagacaaaaacaaagaggtgagcaaggctgaaagtgaggctgcagatacaggtccacttgtgacagaagcagatattcagcacatcgtctcttcttggactggtatccctgttgagaaggtctccactgacgaatctgaccgtctcctaaaaatggaagaaacacttcacacacgaatcattggccaggatgaagctgtcaaagccattagtcgcgctattcgacgtgcacgagttgggctcaagaatcccaacagacctattgctagtttcatcttttccggtcccactggtgttgggaaatcagaactggcaaaggcactggctgcatattactttggttctgaagaagcaatgatccggcttgatatgagtgagttcatggaaagacacactgtctctaaactcattggatccccccctggttatgttggttacacagagggtggtcaattgactgaagctgttaggcgtcgaccttatacagttgtgctctttgatgagattgagaaggctcatcctgatgtcttcaacatgatgcttcaaattcttgaagatggaagattgacagacagcaagggtagaactgtagatttcaagaacacacttctcatcatgacatcaaatgttggaagtagtgtaattgagaaaggtggccgtcgtataggttttgatctcgaccttgatgagaaggatagcagttacaatcgcatcaagagcttagtgacagaagaattgaagcagtacttcaggccagagtttttgaacagattggatgagatgattgtattccgtcagctcactaagttagaggttaaggagatagctgatatcatgcttaaggaggtctttgagaggttgaaagttaaggagatagaacttcaagtgacagagaggtttagagacagggtggttgacgagggatacaaccctagctatggagcacgacctctgagaagagctattatgagacttttagaggacagcatggctgagaaaatgcttgcaaatgagattaaagaaggtgattcagttatcgtggacgttgattcagatggcaatgtgactgtcctcaatggaagtagtggtactccctcggatccggctcctgagcctatccccgtttag

SEQ ID NO: 33901 - protein, 923 aa, Solanum lycopersicum
MARALVQSTSIPSSVAGERTTKFNGSGKTKRAVTMLCNAQSSSLTLRDFTGLRGCNAIDTLVRSGETLQSKVAAATYVRRPRGCRFVPKAMFERFTEKAIKVIMLAQEEARRLGHNFVGTEQILLGLIGEGTGIAAKVLKSMGINLKDARVEVEKIIGRGSGFVAVEIPFTPRAKRVLELSLEEARQLGHNYIGSEHLLLGLLREGEGVAARVLENLGADPSNIRTQVIRMVGESNEAVGASVGGGTSGQKMPTLEEYGTNLTKLAEEGKLDPVVGRQPQIERVTQILGRRTKNNPCLIGEPGVGKTAIAEGLAQRIANGDVPETIEGKKVITLDMGLLVAGTKYRGEFEERLKKLMEEIKQSDEIILFIDEVHTLIGAGAAEGAIDAANILKPALARGELQCIGATTLDEYRKHIEKDPALERRFQPVKVPEPTVDETIQILKGLRERYEIHHKLRYTDEDLVAAAQLSYQYISDRFLPDKAIDLIDEAGSRVRLRHAQLPEEAKELEKELRQITKEKNEAVRGQDFEKAGELRDREMDLKAQITALIDKNKEVSKAESEAADTGPLVTEADIQHIVSSWTGIPVEKVSTDESDRLLKMEETLHTRIIGQDEAVKAISRAIRRARVGLKNPNRPIASFIFSGPTGVGKSELAKALAAYYFGSEEAMIRLDMSEFMERHTVSKLIGSPPGYVGYTEGGQLTEAVRRRPYTVVLFDEIEKAHPDVFNMMLQILEDGRLTDSKGRTVDFKNTLLIMTSNVGSSVIEKGGRRIGFDLDLDEKDSSYNRIKSLVTEELKQYFRPEFLNRLDEMIVFRQLTKLEVKEIADIMLKEVFERLKVKEIELQVTERFRDRVVDEGYNPSYGARPLRRAIMRLLEDSMAEKMLANEIKEGDSVIVDVDSDGNVTVLNGSSGTPSDPAPEPIPV

SEQ ID NO: 33902 - DNA, 2277 bp, Escherichia coli O157
  CDS (1)..(2277): transl_table=11
atgctcaatcaagaactggaactcagtttaaatatggctttcgccagagcgcgcgagcaccgtcatgagtttatgaccgtcgagcacttgttactggcgctgctcagtaacccatctgcccgggaggcgctggaagcgtgttctgtggatttggttgcgctccgtcaggaactggaagcctttattgaacaaaccacacccgttctgcctgccagtgaagaggagcgcgacacacagccgacgctgagttttcagcgtgtactgcaacgtgcggtcttccatgtccagtcctccggtcgcaatgaggttaccggtgcaaacgttctggtcgctatctttagcgaacaggagtcgcaggcggcatatctgttgcgtaaacatgaagtcagccgtctcgatgtggtgaactttatctctcatggcacgcgtaaagacgagccgacacagtcttctgatcctggcagccagccaaacagcgaagaacaagctggtggggaggaacgtatggagaatttcacgacgaacctgaatcagcttgcgcgcgtgggcggaatcgacccactgattggtcgtgagaaggagctggagcgtgctattcaggttctctgccgtcgccgtaaaaacaacccgctgctagtgggggaatctggtgtcggtaaaaccgcgattgcagaaggtcttgcctggcgaattgttcagggcgatgtgccggaagtgatggctgactgtacgatttactctctcgatatcggttctctgttagcgggcacaaaatatcgcggcgactttgaaaaacgttttaaagcgttgctcaagcagctggagcaggacactaacagcatcctgtttattgatgagatccacaccattatcggtgcgggtgcagcgtctggtggtcaggttgatgcggctaacctaatcaaaccgttgctctccagcggtaaaattcgcgtaattggttcgacaacctatcaggagttcagcaacattttcgagaaagaccgtgctctggcgcgtcgcttccagaaaattgatattactgaaccgtcgatcgaagaaactgttcaaatcatcaatggcctgaaaccgaagtatgaagcacaccacgacgtgcgttataccgcaaaagcggtgcgtgcggcggtagagctggcggtgaaatacattaacgatcgtcatctgccggataaagccattgatgttatcgacgaagcgggcgctcgcgcacgtctgatgccggtaagcaaacgcaagaaaaccgttaatgtggcggatattgagtccgtggtggcccgtattgcacgcattccagagaagagtgtttctcagagtgaccgcgataccctgaaaaacctcggcgatcgcctgaaaatgctggtcttcggtcaggataaagccattgaggcgctgactgaagccattaagatggcgcgtgcaggtttaggtcacgaacataaaccggtcggttcgttcctgtttgccggccctaccggggtcgggaaaacagaggtgacggtacagctttcgaaagctttgggcattgagcttctgcgctttgatatgtccgagtatatggaacgccataccgtcagccgtcttattggtgcgcctccgggatacgttggttttgatcagggcggtttgctgactgatgcggtcatcaagcatccacatgcggtgctgctgctggacgaaatcgagaaagcgcacccggacgtgttcaatattctgttgcaggtgatggacaacggtacgctgaccgataacaacggacgcaaagcggacttccgtaacgtggtactggtgatgaccactaacgccggggtacgggaaactgagcgcaaatccattggtcttatccaccaggataacagcaccgatgcgatggaagagatcaagaagatctttacaccggaattccgtaaccgtctcgacaacattatctggttcgatcatctgtcaactgacgtgatccatcaggtggtggataaattcatcgtcgagttgcaggttcagctggatcagaaaggtgtttctctggaagtgagccaggaagcgcgtaactggctggccgagaaaggttacgaccgggcaatgggcgcacgtccgatggcgcgtgtcatccaggacaacctgaaaaaaccgctcgccaacgaactgctgtttggttcgctggtggacggcggtcaggtcaccgtcgcgctggataaagagaaaaatgagctgacttacggattccagagtgcacaaaagcacaaggcggaagcagcgcattaa

SEQ ID NO: 33903 - protein, 758 aa, Escherichia coli O157
MLNQELELSLNMAFARAREHRHEFMTVEHLLLALLSNPSAREALEACSVDLVALRQELEAFIEQTTPVLPASEEERDTQPTLSFQRVLQRAVFHVQSSGRNEVTGANVLVAIFSEQESQAAYLLRKHEVSRLDVVNFISHGTRKDEPTQSSDPGSQPNSEEQAGGEERMENFTTNLNQLARVGGIDPLIGREKELERAIQVLCRRRKNNPLLVGESGVGKTAIAEGLAWRIVQGDVPEVMADCTIYSLDIGSLLAGTKYRGDFEKRFKALLKQLEQDTNSILFIDEIHTIIGAGAASGGQVDAANLIKPLLSSGKIRVIGSTTYQEFSNIFEKDRALARRFQKIDITEPSIEETVQIINGLKPKYEAHHDVRYTAKAVRAAVELAVKYINDRHLPDKAIDVIDEAGARARLMPVSKRKKTVNVADIESVVARIARIPEKSVSQSDRDTLKNLGDRLKMLVFGQDKAIEALTEAIKMARAGLGHEHKPVGSFLFAGPTGVGKTEVTVQLSKALGIELLRFDMSEYMERHTVSRLIGAPPGYVGFDQGGLLTDAVIKHPHAVLLLDEIEKAHPDVFNILLQVMDNGTLTDNNGRKADFRNVVLVMTTNAGVRETERKSIGLIHQDNSTDAMEEIKKIFTPEFRNRLDNIIWFDHLSTDVIHQVVDKFIVELQVQLDQKGVSLEVSQEARNWLAEKGYDRAMGARPMARVIQDNLKKPLANELLFGSLVDGGQVTVALDKEKNELTYGFQSAQKHKAEAAH

SEQ ID NO: 33904 - DNA, 2613 bp, Streptomyces avermitilis
  CDS (1)..(2613): transl_table=11
gtggacgccgagctgaccaacaggagccgggacgccatcaacgcggccaccaacagggccgtgtccgaggggcacccggatctcacccccgcgcatttgctgctggcgctgctggggggcaaggacaacgagaacatcacggacctgctggccgcggtcgacgcggaccaggccgccgtgcgcgccggcaccgagcgtgtcctggccaaactgccgagcgtgaccggttccaccgtcgcgcccccgcagcccaaccgcgagctgctcgcggtcgtcgccgacgcgtcgcagagggcacaggacctcggcgacgacttcctgtcgaccgagcatctgctcatcgggatcgccgcgaacggcggcgcggccggcgacgtactctcccagcagggcgccagtgcgaaaaagctgctggaggcgttccagaagaccaggggagggcgccgggtgacgaccccggatcccgagggccagtacaaggcgctcgaaaagttcggtaccgacttcaccgccgccgcgcgggacggcaagctcgaccccgtcatcgggcgggaccaggagatccggcgggtcgtgcaggtgctcagccgccgcaccaagaacaatcccgtcctcatcggtgagcccggcgtcggcaagaccgccgtcgtcgagggactcgcccagcggatcgtgaagggcgacgtcccggagtccctcaagaacaagcggctggtcgcgctcgacctcggcgccatggtggccggggcgaagtaccgcggtgagttcgaggagcggctgaagaccgtgctcgccgagatcaaggactccgacgggcagatcatcaccttcatcgacgagctgcacaccgtcgtgggggccggcgccggcggtgactccgcgatggacgccggcaacatgctcaagcccatgctcgcccgcggcgagctgcgcatggtcggcgccacgacgctcgacgagtaccgcgagcggatcgagaaggacccggcgctggagcggcgcttccagcaggtgctcgtcgccgagccctccgtcgaggacaccatcgcgatcctgcgcgggctcaaggggcgctacgaggcccaccacaaggtgcagatcgcggacagcgccctggtggccgccgcggcgctctccgaccggtacatcacctcccgcttcctgcccgacaaggccatcgacctcgtcgacgaggcggcctcccgcctccgcatggagatcgactcgtccccggtcgagatcgacgaactccagcgtcaggtcgaccggctcaagatggaggagctggcgatcggcaaggagaccgacgccgccagcagggagcgtctggagaagctgcgccgcgacctcgccgacaaggaggaggagctgcgcggactcaccgcccgctgggagaaggagaagcagtccctcaaccgcgtcggtgagctgaaggagaagctcgacgaactgcgcggccaggccgaacgcgcccagcgcgacggcgacttcgacaccgcgtccaagctgctgtacggcgagatcccggccctggaaagggacttggaggaggcctccgaggcggaggaggaagccgcccgggacaccatggtgaaggaggaggtcggccccgacgacatcgcggacgtggtcggctcctggacgggcatcccggccggccggctcctcgagggcgagacgcagaaactcctgcgcatggaggaggagctggggcaccggctcatcgggcagtcggaggccgtgcaggcggtgtccgacgccgtacggcgcacacgagccggaatcgccgacccggaccgcccgaccggttccttcctcttcctcggcccgaccggtgtcggcaagaccgaactcgccaaggccctcgccgacttcctcttcgacgacgagcgggccatggtccgcatcgacatgagcgagtacggcgagaagcacaccgtcgcccggctggtgggcgccccgcccggctatgtcgggtacgaggagggcggccagctcaccgaggccgtgcgccggcgtccgtacagcgtcgtactcctcgacgaggtcgagaaggcgcacccggaggtcttcgacatcctgctccaggtgctggacgacggacgactgacggacggccaggggcggacggtcgacttccgcaacaccatcctgatcctcacctcgaacctgggcagccagttcctgagcgggcacggcccggccgagccgcagacctcggaagaggagaagaagcggcaggtcctggaggtcgtacgggcctccttcaagccggagttcctcaaccggctcgacgacctggtcgtcttctcggcgctgaaccgtcaggagctggagcgcattgccaagctccagatcgaccggctggcccagcggctcgcccagcgtcggctccgcctggaggtcaccgacgcggcgctggcctggctcgcggaggagggcaacgacccggcgtacggcgcccgcccgctgcgccgcctcgtccagaccgccatcggcgaccgcctcgcgaaggagatcctggcgggcgaggtcaaggacggcgacacggtacgggtggacgccttcggtgagggcctgatcgtgggcccggcgaccggcaagacgctgtaa

SEQ ID NO: 33905 - protein, 870 aa, Streptomyces avermitilis
MDAELTNRSRDAINAATNRAVSEGHPDLTPAHLLLALLGGKDNENITDLLAAVDADQAAVRAGTERVLAKLPSVTGSTVAPPQPNRELLAVVADASQRAQDLGDDFLSTEHLLIGIAANGGAAGDVLSQQGASAKKLLEAFQKTRGGRRVTTPDPEGQYKALEKFGTDFTAAARDGKLDPVIGRDQEIRRVVQVLSRRTKNNPVLIGEPGVGKTAVVEGLAQRIVKGDVPESLKNKRLVALDLGAMVAGAKYRGEFEERLKTVLAEIKDSDGQIITFIDELHTVVGAGAGGDSAMDAGNMLKPMLARGELRMVGATTLDEYRERIEKDPALERRFQQVLVAEPSVEDTIAILRGLKGRYEAHHKVQIADSALVAAAALSDRYITSRFLPDKAIDLVDEAASRLRMEIDSSPVEIDELQRQVDRLKMEELAIGKETDAASRERLEKLRRDLADKEEELRGLTARWEKEKQSLNRVGELKEKLDELRGQAERAQRDGDFDTASKLLYGEIPALERDLEEASEAEEEAARDTMVKEEVGPDDIADVVGSWTGIPAGRLLEGETQKLLRMEEELGHRLIGQSEAVQAVSDAVRRTRAGIADPDRPTGSFLFLGPTGVGKTELAKALADFLFDDERAMVRIDMSEYGEKHTVARLVGAPPGYVGYEEGGQLTEAVRRRPYSVVLLDEVEKAHPEVFDILLQVLDDGRLTDGQGRTVDFRNTILILTSNLGSQFLSGHGPAEPQTSEEEKKRQVLEVVRASFKPEFLNRLDDLVVFSALNRQELERIAKLQIDRLAQRLAQRRLRLEVTDAALAWLAEEGNDPAYGARPLRRLVQTAIGDRLAKEILAGEVKDGDTVRVDAFGEGLIVGPATGKTL

SEQ ID NO: 33906 - DNA, 2616 bp, Synechococcus elongatus
  CDS (1)..(2616): transl_table=11
atgcaaccatctaatccaaatcaatttaccgaaaaagcatgggcagcgatcgcccgcacgccggatctggccaagcaggcacagcatcagaatctggaaagtgaacacctgatgaaatcgctgctagagcaagagggactggcgacacaaattttccaaaaggctggctgttcggtgcagcgaattcgggatctgaccgacgagtttattagccgtcagcccaaaatcagtcatcccagcggcgtttaccttggacagagcctcgacaaacttctcgatcgcgccgaagaggcccgcaaacagtttggcgatgagtttatctcaattgagcacttggtgttggcctttgcccaagacgatcgctttggcaagaaactctttcaggacattggccttagcgaaaaagtgctgcgggaagcaattcagcaaattcgtggctcccaaaaagtgacggatcaaaacccagagggtaaatacgcggcactggaaaaatatggccgtgatctgacactcttggctcgccaggggaaactggatccggtgattggccgcgatgatgaaatccgccgcgtgattcagattctctcccgccgcaccaaaaataacccagtactgattggggagccgggggtggggaaaaccgcgattgctgaaggcctggcacagcggattgtggccagggatgtgcccgattccctgcgcgatcgccagttgattgccctggacatgggcgccttaattgccggtgccaagtatcgtggtgaatttgaagagcgcctgaaagctgttcttaaggaagtcacagattccaacggtcaaatcattctctttattgatgagattcacaccgttgttggcgcaggggcaacccaaggagcgatggatgccggcaatctcctcaaacccatgctggcacggggggaactgcgctgcattggcgccaccaccctagatgagtaccgcaaatacattgagaaggatgcggcccttgaacggcgcttccagcaggtctatgtggatcaacccagtgtggaggacaccatctccattttgcggggcctcaaggaacgctatgagatccaccatggtgtcaaaatttccgatacggccttggtggcagcagcgacactctcggcccgctacattagcgatcgcttcttacccgacaaagccattgacttggtggatgaagcggcggccaaattaaaaatggaaatcacctcgaaacctgaggaactcgatgaaattgaccgcaaaatcctgcaattggagatggagcggctctcgctgcaaaaagaaacctcggcggcttcccgcgatcgccttgagaaactcgaaagagagctagccgacctcaaggaggagcaaagccgcctcaatgcccagtggcaagcggaaaaagaagtgattgaccgtctccaatccatcaaagaggagatcgaaaaagtcaacatcgagatccaacaagcggaacgcaactacgaccttaaccgtgccgccgaactcaaatacggtaaactcacagaactccacaaaaaactggcggaagccgaagccaaactgcgggagattcaagtggggggtcgctccctattgcgggatgaggtgaccgaggccgacattgctgaaatcatctccaaatggaccggcatccccgtgagcaaactggtggagtcggaagcccaaaaactgctgcaccttgaagaagagctgcacaaacgggtggttggtcaggatgaggcggtctccgccgtcgccgaggccattcagcgctcccgtgctgggctagcggatcccaatcgtcccattgccagcttcatcttcctggggccaacgggggtcggtaaaacggaattggctaaagccttggccgcctttatgtttgatactgaagaggcgctggtgcgcattgatatgtccgagtacatggaaaaacatgccgtgtctcggttgattggggcaccccctggttatgtgggctatgacgaaggcggtcaactcacggaagcgattcgccgccgtccctatgccgtcgttctcttcgacgagatcgaaaaagcccatcctgatgtcttcaacgtgttcctgcaaattcttgatgatggccgcgtcactgattcccaagggcgcaccgtggactttaagaacacgatcatcatcatgaccagcaatattggttcccagtacattctcgatgtggccggcgatgacagtcgctactcagaaatgtacaaccgcgttatggaggcgatgcgggcccacttccgacccgaattccttaaccgcgtggatgaatttatcatcttccacagcctgcgcaaggatcaattgcggcaaattgttcaattgcaggtgcagcggttgcagcaacgcctgagcgatcgccacattaccttgtccctcactgagaaggcgatcgacttcttggccgaagtgggttacgaccctgtctatggtgcccgtccgctgaaacgggccatccagaaacaactggaaacccccattgccaaagccatcctgcggggcgacttcttcgatggcgatacgattctggtggatgtgggcgaggacgaacgcctcagcttccggcgccaagtggaactcgccaccgtctag

SEQ ID NO: 33907 - protein, 871 aa, Synechococcus elongatus
MQPSNPNQFTEKAWAAIARTPDLAKQAQHQNLESEHLMKSLLEQEGLATQIFQKAGCSVQRIRDLTDEFISRQPKISHPSGVYLGQSLDKLLDRAEEARKQFGDEFISIEHLVLAFAQDDRFGKKLFQDIGLSEKVLREAIQQIRGSQKVTDQNPEGKYAALEKYGRDLTLLARQGKLDPVIGRDDEIRRVIQILSRRTKNNPVLIGEPGVGKTAIAEGLAQRIVARDVPDSLRDRQLIALDMGALIAGAKYRGEFEERLKAVLKEVTDSNGQIILFIDEIHTVVGAGATQGAMDAGNLLKPMLARGELRCIGATTLDEYRKYIEKDAALERRFQQVYVDQPSVEDTISILRGLKERYEIHHGVKISDTALVAAATLSARYISDRFLPDKAIDLVDEAAAKLKMEITSKPEELDEIDRKILQLEMERLSLQKETSAASRDRLEKLERELADLKEEQSRLNAQWQAEKEVIDRLQSIKEEIEKVNIEIQQAERNYDLNRAAELKYGKLTELHKKLAEAEAKLREIQVGGRSLLRDEVTEADIAEIISKWTGIPVSKLVESEAQKLLHLEEELHKRVVGQDEAVSAVAEAIQRSRAGLADPNRPIASFIFLGPTGVGKTELAKALAAFMFDTEEALVRIDMSEYMEKHAVSRLIGAPPGYVGYDEGGQLTEAIRRRPYAVVLFDEIEKAHPDVFNVFLQILDDGRVTDSQGRTVDFKNTIIIMTSNIGSQYILDVAGDDSRYSEMYNRVMEAMRAHFRPEFLNRVDEFIIFHSLRKDQLRQIVQLQVQRLQQRLSDRHITLSLTEKAIDFLAEVGYDPVYGARPLKRAIQKQLETPIAKAILRGDFFDGDTILVDVGEDERLSFRRQVELATV

SEQ ID NO: 33908 - DNA, 2640 bp, Streptomyces avermitilis
  CDS (1)..(2640): transl_table=11
atggacatgaaccgtctcacccagaagtcccaggaagccctccaggaggcccagaccgcggccggccgcatggggcacaccgaggtcgacggggaacacctgctgctcgcacttctcgatcaggaggacggtctgatcccgcggttgctgcaacaggccggcaccgagccgaaggaactgcgcgcggccgtgcgcgaggaactctcccaccgcccgaaggcgaccggccccggcgcggcacccggccaggtcttcgtcacccagcgcctcgcccggctgctcgacgccgccgagcgggaggccaaacgcctcaaggacgagtacgtgtccgtggagcacctcctgctcgcgctggctgaggagagctcttcgaccgccgccgggctactgctcaaacaggccggcatcaccagggactcgttcctgagcgcgctcacccaggtccgcggcaaccagcgggtcacctccgccaaccccgaagtggcctacgaggctctggagaagtacggccgcgacctggtcctcgaggctcggtccgggcggctggacccggtcatcggccgggacgcggagatccgccgcgtgacccagatcctcagccgcaagaccaagaacaaccccgtcctcatcggcgaccccggcgtcggcaagaccgccatcgtcgagggcctggcccagcgcatcgttcgcggcgacgtccccgagggcctgcgcgacaagacggtgttcgccctcgacatgggctccctggtcgccggcgccaagtaccgcggggagttcgaggaacgcctcaaggccgtgctcagcgaggtcaaggccgccgaggggcggatcctgctcttcgtcgacgaactccacaccgtcgtaggagcgggcgccgcggaaggggccatggacgcgggcaacatgctcaagccgatgctcgcccgcggcgaactccacatgatcggcgccaccaccctcgacgagtaccgcaagcacatcgagaaggacgccgccctcgaacgccgcttccagcaggtcctggtcgacgagccgagcgtggaggacaccatctccatcctgcgcggactgcgcgaacgcctcgaggtcttccacggcgtgaagatccaggacaccgcgctggtctccgcggccaccctcagccaccgctacatcaccgatcggttcctgcccgacaaggccatcgacctcgtcgacgaggcgtgcgcccggctgcgtaccgagatcgactcgatgcccgcggaactcgacgagatcacccgccgcgtcacccgcctggagatcgaggaagcggccctgtccaaggagagcgaccccgccagcaagacccgcctggaggagctgcgcagggaactggccgacctgcgcggcgaggccgacgccaaacacgcccagtgggaggccgaacggcaggcgatccgccgcgtgcaggaactgcgccaggaactggagcaggtccgccacgaggcggaggaggccgaacgcgcctacgacctcaaccgcgccgccgaactccgctacggccgcctccaggacctggagcgccgactcgccgcggaggaggagcaactggccgccaagcaaggggagaaccggctgctgcgcgaggtcgtcaccgaggaggagatcgccgagatcgtcgccgcctggaccggcatccccgtcgcccgcctccaggagggcgaacgcgagaaactgctgcgcctcgacgagatcctgcgcgagcgcgtcatcggccaggacgaagccgtcaaactcgtcaccgacgccatcatccgcgcccgctccggcatccgcgaccctcgccgccccatcggctcgttcatcttcctcggccccaccggcgtcgggaagaccgagctggccaagaccctcgcccggactctgttcgactccgaggagaacatggtccgcctcgacatgagcgaataccaggagcggcacaccgtcagccggctcatgggcgcaccgcccggatacgtcggctacgaggaaggcggccagctcaccgaggccgtacgccgcaagccgtactcggtcgtgctgttcgacgagatcgagaaggcgcacaccgatgtcttcaacaccctgctgcagatcctcgacgacggccgcatcaccgacgcccagggccgcaccgtcgacttccgcaacaccgtgatcatcatgacgtccaacatcggctccgagcaccttctcgacggcgccaccgccgaaggtgagatcaagcccgacgcccgcgccctggtgatgggcgagctgcgcgggcacttccgcccggagttcctcaaccgcgtcgacgacatcgtgctgttcaaaccgctgggtgagcggcagatcgagcggatcgtggaactgcagttcgacgagctgcggcagcggctcgccgaacgccgcatcaccgtcgaactcaccgacgccggccgggaagtgatcgcccaccagggctacgacccggtgtacggggcccggccgctgcgccgctacatctcccacgaggtcgagacactggtcggacgcgccctgctgcgcggcgacgtccaggacggcgcgacggtccgcgtcgacgccgagcacggagagctggtggtcacctacgaccagcccgaggacgtgaagggagcgtgggcggcatga

SEQ ID NO: 33909 - protein, 879 aa, Streptomyces avermitilis
MDMNRLTQKSQEALQEAQTAAGRMGHTEVDGEHLLLALLDQEDGLIPRLLQQAGTEPKELRAAVREELSHRPKATGPGAAPGQVFVTQRLARLLDAAEREAKRLKDEYVSVEHLLLALAEESSSTAAGLLLKQAGITRDSFLSALTQVRGNQRVTSANPEVAYEALEKYGRDLVLEARSGRLDPVIGRDAEIRRVTQILSRKTKNNPVLIGDPGVGKTAIVEGLAQRIVRGDVPEGLRDKTVFALDMGSLVAGAKYRGEFEERLKAVLSEVKAAEGRILLFVDELHTVVGAGAAEGAMDAGNMLKPMLARGELHMIGATTLDEYRKHIEKDAALERRFQQVLVDEPSVEDTISILRGLRERLEVFHGVKIQDTALVSAATLSHRYITDRFLPDKAIDLVDEACARLRTEIDSMPAELDEITRRVTRLEIEEAALSKESDPASKTRLEELRRELADLRGEADAKHAQWEAERQAIRRVQELRQELEQVRHEAEEAERAYDLNRAAELRYGRLQDLERRLAAEEEQLAAKQGENRLLREVVTEEEIAEIVAAWTGIPVARLQEGEREKLLRLDEILRERVIGQDEAVKLVTDAIIRARSGIRDPRRPIGSFIFLGPTGVGKTELAKTLARTLFDSEENMVRLDMSEYQERHTVSRLMGAPPGYVGYEEGGQLTEAVRRKPYSVVLFDEIEKAHTDVFNTLLQILDDGRITDAQGRTVDFRNTVIIMTSNIGSEHLLDGATAEGEIKPDARALVMGELRGHFRPEFLNRVDDIVLFKPLGERQIERIVELQFDELRQRLAERRITVELTDAGREVIAHQGYDPVYGARPLRRYISHEVETLVGRALLRGDVQDGATVRVDAEHGELVVTYDQPEDVKGAWAA

SEQ ID NO: 33910 - DNA, 2625 bp, Agrobacterium tumefaciens
  CDS (1)..(2625): transl_table=11
atgaatattgataaatactccgagcgcgttcgcggttttctgcaatcggcgcaaacctttgcgctcgccgaaaatcatcagcagttctcgcccgaacatgttctgaaagttctgcttgatgatgagcagggcatggccgcatcgctgatcgagcgtgcgggcggcgacgccaaggaagcgcgtctcgccaatgacgcggcccttgcaaaattgcccaaggtatccggcggcaatggcggcctttcgctgacggctccgctcgccaaggtattttcgaccgcagaagaccttgccaagaaggccggcgacagtttcgtgaccgtcgagcgtcttctgcaggcgcttgcgatcgaaagctccgcttccacctcggcttccctgaaaaaagcgggtgcgaccgcacaggcgctcaatcaggtcatcaacgacattcgcaagggccgcacggccgatagcgccaatgccgaacagggctttgacgcgctgaagaaatatgcgcgcgacctgacggaggaagcccgcgagggtagactcgaccccgtcatcggtcgtgacgacgaaattcgtcgcaccatccaggtcctgtcgcgccgcaccaagaacaatcccgtgctgatcggtgaaccgggcgtcggtaaaacggcgattgccgaaggccttgcgctgcgcatcgtcaatggcgacgtgccggagagcctgaaggacaaaaagctgatggcgctcgatatgggcgcgctgatcgccggtgcgaaatatcgcggtgagttcgaagagcgcctgaaggctgtgctgaacgaggtgcaggccgaaaatggcggcatcatcctgttcatcgatgagatgcacaccctggtcggcgccggcaaggccgatggcgccatggatgcgtccaacctgctgaaacctgcgcttgcccgcggtgagctgcactgcgtcggcgccaccacgctcgatgaatatcgcaagcatgtggagaaggatccagcccttgcccgccgtttccagcccgttctggtggatgaaccgaacgtcgaggatacgatctcgatcctgcgcggtctgaaggaaaaatacgaacagcaccacaaggtccgcatctcggattcggccctggttgcggctgcgacgctttccaaccgttacattaccgaccggtttctgcccgacaaggcaatcgacctgatggacgaggccgcttcgcgtcttcgcatgcaggtggattccaagccggaagaactggacgaactggatcgtcgcatcatccagctgaagatcgagcgcgaagccctgaagcaggaaacggaccagtcctccgtcgaccgtttgaggaagctcgaggacgaactggccgatacggaagaaaaggcagatgcgctgacggcccgctggcaggcggaaaagcagaagctcggccacgccgccgacctgaagaagcggctggatgaagcccgaaacgaactggcaatcgcccagcgcaatggccagttccagcgtgccggcgagttgacctacggcatcattcccggcctcgaaaaggaactggcagcggcggaagcccgcgatagcagcggtgccggttcgatggttcaggaagtggtgacgccggacaatattgcccatgtcgtctcccgctggaccggcattccggtcgacaagatgctggaaggccagcgcgaaaagctgttgcgcatggaagacgagctcgccaagtccgttgtcgggcagggtgaggccgttcaggcggtgtccaaggcggttcgccgttcgcgcgccggcctgcaggatcctaaccggccgatcggttcgttcatctttctcggcccgacgggtgtgggcaagaccgagctgaccaagtcgctcgcccgcttcctgttcgacgacgaaaccgcgatggtccgcctcgatatgtcggaatatatggagaaacactccgttgcccggctgatcggtgcacctccgggctatgtcggctacgaagagggcggtgccctgacggaagcggttcgccgccggccctatcaggtcgtgttgttcgatgagatcgaaaaagcgcatccggatgtcttcaacgtcctgctgcaggtgctggatgatggccgcctgaccgatggccagggccgcaccgtcgatttcaagaacaccatcatcatcatgacctcaaacctcggttcggaattcatgacgcagatgggcgacaacgacgatgtggattcggttcgcgaacttgtcatggaacgggttcggtcgcatttccggccggaattcctcaaccgcatcgacgatatcatcctgttccatcgcctgcggcgtgacgaaatgggtgcgatcgtggaaatccagttgaagcgccttgtctcgcttctggccgatcgcaagatcacgctcgaactggatgaggatgctcgcagctggcttgccaacaagggttacgatccggcttatggtgcgcggccgctgaagcgggtgatccagaaatcggttcaggaccggctggcggaaatgatcctcggcggtgaaatccccgatggttcgcgggtcaaggtaacttcgggcaccgaccggttgctgttcaaggtcaagcccgccaagggtgaggccgagactgaaacggccgatgcggcataa

SEQ ID NO: 33911 - protein, 874 aa, Agrobacterium tumefaciens
MNIDKYSERVRGFLQSAQTFALAENHQQFSPEHVLKVLLDDEQGMAASLIERAGGDAKEARLANDAALAKLPKVSGGNGGLSLTAPLAKVFSTAEDLAKKAGDSFVTVERLLQALAIESSASTSASLKKAGATAQALNQVINDIRKGRTADSANAEQGFDALKKYARDLTEEAREGRLDPVIGRDDEIRRTIQVLSRRTKNNPVLIGEPGVGKTAIAEGLALRIVNGDVPESLKDKKLMALDMGALIAGAKYRGEFEERLKAVLNEVQAENGGIILFIDEMHTLVGAGKADGAMDASNLLKPALARGELHCVGATTLDEYRKHVEKDPALARRFQPVLVDEPNVEDTISILRGLKEKYEQHHKVRISDSALVAAATLSNRYITDRFLPDKAIDLMDEAASRLRMQVDSKPEELDELDRRIIQLKIEREALKQETDQSSVDRLRKLEDELADTEEKADALTARWQAEKQKLGHAADLKKRLDEARNELAIAQRNGQFQRAGELTYGIIPGLEKELAAAEARDSSGAGSMVQEVVTPDNIAHVVSRWTGIPVDKMLEGQREKLLRMEDELAKSVVGQGEAVQAVSKAVRRSRAGLQDPNRPIGSFIFLGPTGVGKTELTKSLARFLFDDETAMVRLDMSEYMEKHSVARLIGAPPGYVGYEEGGALTEAVRRRPYQVVLFDEIEKAHPDVFNVLLQVLDDGRLTDGQGRTVDFKNTIIIMTSNLGSEFMTQMGDNDDVDSVRELVMERVRSHFRPEFLNRIDDIILFHRLRRDEMGAIVEIQLKRLVSLLADRKITLELDEDARSWLANKGYDPAYGARPLKRVIQKSVQDRLAEMILGGEIPDGSRVKVTSGTDRLLFKVKPAKGEAETETADAA

SEQ ID NO: 33912 - DNA, 2601 bp, Bacillus anthracis
  CDS (1)..(2601): transl_table=11
atggacttaaatcaaatgacaacaaaaacacaagaggcgattatgagtgcccaatctttagcggtatctcatcaccatcaagaagtagatactgttcatctcttgtttacattattagaagagcaggatgggctagcagtacgtatttttcaaaaaatgaatgtcgatatagaagcattaaaacaaggcgtagaaaatttaattaagaaaaagccttccgtaacgggaagcggtgcagaagcaggtaaattatatataacaggtgccctgcaacaactgcttgtaagagcaggaaaagaagcagagaaattgcaagatgattacatttcagtggaacatgtattacttgcttttactgaagaaaaaggcgatataagccaattgtttacaagatttcatattacgaaagacaacttattacagtctttaatgacagttcgggggaatcaaagagtgactagccaaaatccagaagcaacttatgaagcgttagaaaaatatggtcgtgatttagtggcggaagtgaaagcagggaaaattgaccctgttatcggccgcgatagtgaaattcgccgcgtaatccgcattctttcacgtaaaacgaaaaataaccctgttttaattggtgagccaggtgttggtaaaacagcaatcgttgaagggttagcacagcgtattgtgaagaaggatgtacctgaaggattaaaagatagaacaatctttgcgttagatatgagtgcgcttgtagctggtgcgaaattccgtggtgagttcgaagagcgtttgcaagctgtattaaatgaaattaaaaagagtgaaggtcgcattttactattcattgatgaacttcacacaatcgtcggcgctggaaaaacagaaggtgcgatggatgcagggaatatgttaaaaccgatgcttgcgcgtggtgaactgcattgtattggggcgacaaccctagatgaatatcgtaaatatattgagaaagatccagcactagaaagacgtttccaacaagtattagcagaagaaccaactgttgaagatacaatttctattttacgtggtttaaaagagcgttttgaaatttatcacggtgtaaatattcatgaccgcgcaattgtagcagcatcagttttatcagatcgatatatttcagatcgtttcttaccggataaagcaattgatcttgttgacgaagcgtgcgcaacaattcgtacagaaattgattctatgccgacagaattagatgaagtaacgcgccgcattatgcagctagaaattgaagaagcggctcttggaaaagagaaggactttggtagccaagaacgcctcaaaacattgcaacgtgaattatcggatttaaaagaagtggcaagtagcatgagagcgaaatgggagaaagaaaaagaagatattcacaaagttcgtgacttacgtgaacatttagagcgtctgcgccgtgaattagaagaagcagaaggtaattacgatttaaatagagcagcggaacttcgccacggaaaaattcctgcaattgaaaaagagttaaaagaagcagaagaaatgggcgcaaataataaacaagaaaatcgtttattacgtgaggaagtaagtgaagaagagattgctgatattgtttcacgctggactggtattcctgtcgcaaaactcgttgaaggtgaacgtgagaaattattacgcttagagcaaattttatcagaacgtgttatcggacaagaggaagcggtaagcttagtatcagatgcagttcttcgtgcgcgcgctggtattaaagacccgaaccgtccaattggttccttcatcttcttaggaccgactggtgttggtaaaacagagcttgccaaaacgttagcacagtctttatttgatagtgaagagcaaatgattcgtatcgatatgtctgagtatatggagaaacacgctgtgtcacgcttaattggtgcccctcctggatatgttggatatgaagagggcggtcaattaacagaagcagtaagacgtaaaccgtattccgttattttattagacgaaatcgaaaaagcgcatccagaagtattcaatattttattacaaatgttagatgacggacgcattacagattcgcaaggtcgtacagtggactttaaaaatacagttattattatgacttcaaatattggatctgctcatttattagatggattagaagaagatggctccattaaagaagaatcaagagaacttgtaatgggacaattgagaggacatttccgaccagagttcttaaaccgcgtcgacgaaattattttattcaaacctcttacaacgaatgaaattaaaggtattgttgataaaattgtaaaagaattacaaggtcgtttagctgaccgtcatattacggtaaaattaacagaagcagcgaaagaatttgttgtagaagctggctttgatccgatgtacggagctcgtccattaaaacgatatgtacagcgtcaagttgaaacgaaattagcgagagaattaattgcaggtacgattactgacaatagtcatgtagtggttgatgtagaaaataacgaattagtcgttcatgtgaaataa

SEQ ID NO: 33913 - protein, 866 aa, Bacillus anthracis
MDLNQMTTKTQEAIMSAQSLAVSHHHQEVDTVHLLFTLLEEQDGLAVRIFQKMNVDIEALKQGVENLIKKKPSVTGSGAEAGKLYITGALQQLLVRAGKEAEKLQDDYISVEHVLLAFTEEKGDISQLFTRFHITKDNLLQSLMTVRGNQRVTSQNPEATYEALEKYGRDLVAEVKAGKIDPVIGRDSEIRRVIRILSRKTKNNPVLIGEPGVGKTAIVEGLAQRIVKKDVPEGLKDRTIFALDMSALVAGAKFRGEFEERLQAVLNEIKKSEGRILLFIDELHTIVGAGKTEGAMDAGNMLKPMLARGELHCIGATTLDEYRKYIEKDPALERRFQQVLAEEPTVEDTISILRGLKERFEIYHGVNIHDRAIVAASVLSDRYISDRFLPDKAIDLVDEACATIRTEIDSMPTELDEVTRRIMQLEIEEAALGKEKDFGSQERLKTLQRELSDLKEVASSMRAKWEKEKEDIHKVRDLREHLERLRRELEEAEGNYDLNRAAELRHGKIPAIEKELKEAEEMGANNKQENRLLREEVSEEEIADIVSRWTGIPVAKLVEGEREKLLRLEQILSERVIGQEEAVSLVSDAVLRARAGIKDPNRPIGSFIFLGPTGVGKTELAKTLAQSLFDSEEQMIRIDMSEYMEKHAVSRLIGAPPGYVGYEEGGQLTEAVRRKPYSVILLDEIEKAHPEVFNILLQMLDDGRITDSQGRTVDFKNTVIIMTSNIGSAHLLDGLEEDGSIKEESRELVMGQLRGHFRPEFLNRVDEIILFKPLTTNEIKGIVDKIVKELQGRLADRHITVKLTEAAKEFVVEAGFDPMYGARPLKRYVQRQVETKLARELIAGTITDNSHVVVDVENNELVVHVK

SEQ ID NO: 33914 - DNA, 2670 bp, Bifidobacterium longum
  CDS (1)..(2670): transl_table=11
atggaacagaagttcaccactatggcccaagaagccgtcggcgacgcgattcagagtgcgtccgccgcaggaaacgcgcaggtcgagaccctgcacgtcatggatgcgctgctgcgccaggaaaacggcgtggcgcgctctctgatcgaggccgcgggcggggacccgcaggccatcggcgcggcggtgcgcaacgctttggtcgcgctgccgagcgcatccggatccagcacctcgcagccacaggccagccgccagctgaccgccgccatcgcccaggctgagaaggaaatgcagcagatgggcgacgaatacgtctccaccgaacatctgcttatcggcatcgcggccagcaagccgaaccagtcggccgaaatcctggagaagaacggcgtcaccgcagcctccctgcgcaaggccgtacccggcgtgcgtggtggcgcgaaggtcaccagcccggacgcggaaggctcgtacaaggccctggagaagtactccaccgacctgacggccgccgccaaggaaggcaagctggacccggtcatcggacgtgaccaggaaatccgccgcgtgattcagatcctctcccgtcgtaccaagaacaacccggtgctgatcggcgagcccggcgtcggcaagaccgccgtcgtggaaggcctggcccagcgtatcgtggcgggcgacgtgcccaccaccctgcaaggcaagaagctcatctcccttgacctaggctccatggtggccggctcgaagtaccgtggcgagttcgaggagcgcctgaagagcgtcctgaacgaaatcaagaacgcggacggccagatcatcaccttcatcgacgagattcacaccatcgtcggcgcgggtgcggccgaaggctcgatggacgccggcaatatgctgaagcctatgctggcccgtggcgagctgcgcctgatcggcgcgaccacgctggacgagtaccgcgagaacatcgaaaaggatccggcattggaacgccgtttccaacaggtgttcgtgggcgagccgagcgtggaagacaccatcgccatcctgcgtggcctgaagcagcgttacgaggcgcaccacaaggtgacgatcggcgatgacgcgctggtcgccgccgcgaccctctcgaaccggtacatctcaggccgtcagctgccggacaaggccatcgacctggtcgatgaggcggctgcccacctgcgtatggagctcgactcctcgcctgaggagatcgatgagctgcagcgcaaggtgacccgtcttgaaatggaggaaatgcagctcaagaaggccgaggatcctgcgtccaaggagcgtctgggcaagctgcaagccgaacttgcggacacccgtgagaagctcagcggtctcaaggcgcgttgggatgcggaacaggctggccacaacaaggtcggcgacctgcgtgccaagctcgacgacctgcgcgtgcaggcggataagtatacccgtgaaggcaacttggcggaggcctcgaagattctgtacggcgagattccgtccattcagaaggagcttgccgccgcggagagcgcggatgctgaatctgctgatgccagcgcggccaacccggccgatgagccgatggtcccggaccgtgtggacgccgactcggtggctgagatcgtctccgactggaccggcattcccgtcggccgcctgatgcagggcgaaaacgagaagctgctgcacatggaggactacctcggcaagcgtgtgatcggccagaaggaagccatcgccgccgtgtccgacgcggtgcgccgttcgcgtgccggcatctccgacccgaaccgtccgaccggatcgttcctgttcctcggccccaccggtgtgggcaagaccgaactggccaaggcgctcgccgacttcctgttcgacgacgagaaggccatggtccgcatcgacatgtccgaatacatggagaaggcttcggtctcgcgcctgattggcgcggcgccgggctacgtgggctacgagcagggcggccagctgaccgaggccgtgcgccgtcgcccgtattccgtggtgctgttcgacgaggtcgagaaggccaacccggagatcttcgacgtgctgctgcaggtacttgacgatggtcgcctgaccgatggccagggaaggaccgtggacttcaagaacacgatcctgattatgacctctaacctcggctcgcagttcctcgtgaacgaggacatggacgccgacgccaagaaaaaggccgtgatggacgctgtccacatgaacttcaagccggagttcctgaaccgtctggacgacatcgtcatgttccacccgcttacgcgcgaggagcttggcggcatcgtggatatccaggtggctggcgtgtcccagcgtctgaccgatcgccgcatcacgctggacgtcaccgactcggctcgcgaatggcttgccaacaccggttacgacccggcttatggcgctcgtccgctgcgccgcctggtacagaccgaagtgggcgaccagctggcccgtatgctgctggccggcaaggtccacgacggtgacaccgtgctcgtcgaccagaccggcggcgaacatctggagctctccgcttgggcgagcgaccagattgtctccgacaatccggacgtgagcgtggacaacgtcaccgaagacaagtga

SEQ ID NO: 33915 - protein, 889 aa, Bifidobacterium longum
MEQKFTTMAQEAVGDAIQSASAAGNAQVETLHVMDALLRQENGVARSLIEAAGGDPQAIGAAVRNALVALPSASGSSTSQPQASRQLTAAIAQAEKEMQQMGDEYVSTEHLLIGIAASKPNQSAEILEKNGVTAASLRKAVPGVRGGAKVTSPDAEGSYKALEKYSTDLTAAAKEGKLDPVIGRDQEIRRVIQILSRRTKNNPVLIGEPGVGKTAVVEGLAQRIVAGDVPTTLQGKKLISLDLGSMVAGSKYRGEFEERLKSVLNEIKNADGQIITFIDEIHTIVGAGAAEGSMDAGNMLKPMLARGELRLIGATTLDEYRENIEKDPALERRFQQVFVGEPSVEDTIAILRGLKQRYEAHHKVTIGDDALVAAATLSNRYISGRQLPDKAIDLVDEAAAHLRMELDSSPEEIDELQRKVTRLEMEEMQLKKAEDPASKERLGKLQAELADTREKLSGLKARWDAEQAGHNKVGDLRAKLDDLRVQADKYTREGNLAEASKILYGEIPSIQKELAAAESADAESADASAANPADEPMVPDRVDADSVAEIVSDWTGIPVGRLMQGENEKLLHMEDYLGKRVIGQKEAIAAVSDAVRRSRAGISDPNRPTGSFLFLGPTGVGKTELAKALADFLFDDEKAMVRIDMSEYMEKASVSRLIGAAPGYVGYEQGGQLTEAVRRRPYSVVLFDEVEKANPEIFDVLLQVLDDGRLTDGQGRTVDFKNTILIMTSNLGSQFLVNEDMDADAKKKAVMDAVHMNFKPEFLNRLDDIVMFHPLTREELGGIVDIQVAGVSQRLTDRRITLDVTDSAREWLANTGYDPAYGARPLRRLVQTEVGDQLARMLLAGKVHDGDTVLVDQTGGEHLELSAWASDQIVSDNPDVSVDNVTEDK

SEQ ID NO: 33916 - DNA, 2619 bp, Blochmannia floridanus
  CDS (1)..(2619): transl_table=11
atgagattagatcgttttgatcgaagttttcaattagcgttatctgatgcccaatctattgctattggtaaggataatcaatttatagaacctgttcatgtaatgtatacttttttaaaggaaaaaaaatataaatcgatacgtaatttgttaatacatgcaggatcaaatgtagatcaattatataaatctgtggaacaagtgtgtaatgatttgccacgggtagaaagtgttgatggagatagagaggtgcaatgctctcatgctttagtaaaaattttaaatttatgtgataaattagcgcaaaaatatcacagtaatattattttttcagaagtatttattatagctgctcttcaatcacaagatgttttaagtattttgttaaaaaaatctggtattgttaaagaattattagaaaaattagtacaatatgaacagagtaattattctattcatgatgatagttttaaaaatagaacacaaatattagaacaatttactgtagatataacttctcttgctgaacaaaataatcttgatcctgtaattggtagggatgaagaaattagaagaacaattcaagttttgcaaaggcgtactaaaaataatcctgttcttataggaaatccaggagtgggtaaaactgctattgtggaggggttggctcaacgtattatcaataaagaggttccagagggattaaaaaatagtcgaatattatctttagatatagccgcgttgttagctggtactaaatatcggggagaatttgaagagcgttttaaaaaagtattgtatgctgtatctaaagataataatactattttatttattgatgagttgcatgttatggttggagctggaaaaacagatggatctatggatgctagtaatatgattaaaccaaaattagcaagaggtgaattacattgtgttggtgcgactactcttgatgaatatagtagatatattgaaaaagatgctgctttagaaagacgttttcaaaaaatatttattattgaacctaatattgaaaatactatagctattttaagagggctgaaggaacgttatgagttgcatcataatgtacatatcactgatcctgcgatagtagccgcagctactttatcgaatagatatatttcagatcgtcaattaccagataaggctattgatttaattgatgaagcagcatctagtattcgtattcaaattgattctaaaccagaagatttggataggcttgatcgtcgtattatacaattgaaattagagtgtcaggcgttgaaaaaagagtcagatgagttaagcaaaaaacgtttagagattttaagtatggaattgtcacagaaagaacaggagtatagtgtacttgaatcagaatggaaacgtgaaaggagttctttatttgatattcaaaatataaaatcagatttagagaaagcaaagactattttagatcagtctcgtcgtattggcgatttggctcaaatgtcagaattacaatatggacgtataccagaattggaaaagaagttgtttaatgcaattcaatctagtaataaaaaaatgcgtctattgcgtaattatgtgtctgaggtagaaattgctgaggtgttgtccaaatggacaggtatacctatatctaggatattagcaaatgaaaagaataaattgttaaatatggagacaatattacatcagttagtaattgggcaagatgaggcagtacgagttatatcgaatgcgattcgtagaagtcgatctggattatcagatcctaagaggcctataggttcttttatgtttttaggaccaactggtgttggtaagactgagttatgtaaagcattatcacaatttttgtttgatactgacaatgctatggtgcgtattgatatgtctgaatttatggaaaaacattcggtttcaaaattacttggagctcctcccggttatattggttatgaaagtggagcttatttaactgaatctatacgtcgtcgcccttattctatagtattattagacgaaattgaaaaagctcatttagatgtttttaatattttattacaagttttagatgatggaagattaacagataatcaaggtcgtatggtggattttaataatactgttataattatgacatctaatttaggttcagatttgattcaaaaaaaatttgatatatcagattatgatactatgaagaaaactgtgttaaatgtagttaatcaatattttcgaccggaattcattaatagaatagatgaaatagtagtatttcatcctcttagcatcaaacatcttattgatattgcaaatattcaattgaagtatttatattctagattagaagagagaggttatcctagaactggtattaccaacaaagcattattatttttatctaaaattggttttgatcctatatatggtgcacgtcctttaaaacgtattatacaacaatacattgagaatccgttatctcaaaagatattatccgatgatttattaccgggaagaagtattactatagatgttcaaaatgataatattgtatttattcagaatgatgttatagatgataaggatatctatataaattga

SEQ ID NO: 33917 - protein, 872 aa, Blochmannia floridanus
MRLDRFDRSFQLALSDAQSIAIGKDNQFIEPVHVMYTFLKEKKYKSIRNLLIHAGSNVDQLYKSVEQVCNDLPRVESVDGDREVQCSHALVKILNLCDKLAQKYHSNIIFSEVFIIAALQSQDVLSILLKKSGIVKELLEKLVQYEQSNYSIHDDSFKNRTQILEQFTVDITSLAEQNNLDPVIGRDEEIRRTIQVLQRRTKNNPVLIGNPGVGKTAIVEGLAQRIINKEVPEGLKNSRILSLDIAALLAGTKYRGEFEERFKKVLYAVSKDNNTILFIDELHVMVGAGKTDGSMDASNMIKPKLARGELHCVGATTLDEYSRYIEKDAALERRFQKIFIIEPNIENTIAILRGLKERYELHHNVHITDPAIVAAATLSNRYISDRQLPDKAIDLIDEAASSIRIQIDSKPEDLDRLDRRIIQLKLECQALKKESDELSKKRLEILSMELSQKEQEYSVLESEWKRERSSLFDIQNIKSDLEKAKTILDQSRRIGDLAQMSELQYGRIPELEKKLFNAIQSSNKKMRLLRNYVSEVEIAEVLSKWTGIPISRILANEKNKLLNMETILHQLVIGQDEAVRVISNAIRRSRSGLSDPKRPIGSFMFLGPTGVGKTELCKALSQFLFDTDNAMVRIDMSEFMEKHSVSKLLGAPPGYIGYESGAYLTESIRRRPYSIVLLDEIEKAHLDVFNILLQVLDDGRLTDNQGRMVDFNNTVIIMTSNLGSDLIQKKFDISDYDTMKKTVLNVVNQYFRPEFINRIDEIVVFHPLSIKHLIDIANIQLKYLYSRLEERGYPRTGITNKALLFLSKIGFDPIYGARPLKRIIQQYIENPLSQKILSDDLLPGRSITIDVQNDNIVFIQNDVIDDKDIYIN

SEQ ID NO: 33918 - DNA, 2598 bp, Bordetella parapertussis
  CDS (1)..(2598): transl_table=11
atgcgattcgacaaacttaccaccaagttccagcaggccctggcggacgcgcaaagcctggccgcccgtaacgatcatccctatatcgagcccgtccatgtgctggcggccctgttgggcgaccccgacagcggcgcggccagcctgctggcgcgcgccggcgtcgccgtcaaccgcgtgcagccggccatcgacagcgccctgaagggcctgccgcaggtgcagggcgaggacaacgtccaggtcgggcgcgagctgcaaagcgtgctcgtgcgcaccgacaaggaggccgcgcggcgcggcgacacctacatcgccagcgagctgttcctgctggcgctggccgacgacaagggcgacgccggccgcatcctgcgcgaggcgggcctgcagaagaaggccctggaagcggccatcgacgccgtgcgcggcggcgagaacgtctcgggcgcggaaggcgagtccaaccgcgaggcgctgtccaagtacacgctggacctcaccgagcgcgcccgccagggcaagctggatccggtcatcggccgcgacgacgaaatccgccgcaccatacagatcctgcagcgccgcaccaagaacaaccccgtgctgatcggcgaacccggcgtcggcaagaccgccatcgtcgaagggctggcgcaacgcatcgtcaacgacgaggtgcccgagacgctgcgcggcaagcgcgtgctctcgctggacctggcggcgctgcttgccggcgccaagttccgtggcgagttcgaggaacgcctgaaggccgtgctcaaggagctggcccaggacgacggccagaacatcgtcttcatcgacgaactgcacaccatggtcggtgcgggcaaggccgaaggggccatggacgccggcaacatgctcaagccggcgctggcgcgcggcgagctgcattgcatcggcgccaccacgctggacgaataccgcaagtacatcgaaaaggatgccgcgctcgagcgccgcttccagaaggtgctggtcggcgagcccgacgtggaatccaccatcgccatcctgcgcgggctgcaggagcgctacgagctgcaccacggcgtcgagatcaccgatccggccatcgtggcggcggccgagctgtcgcaccgctacattaccgaccggttcctgcccgacaaggcaatcgacctgatcgacgaggccggcgcgcgcatccgcatggaaatcgactccaagcccgaagtgatggaccgcctggaccggcgcatcatccagctcaagatcgaacgcgaagccgtcaagaaggaaaccgacgacgcctccatgcgccgcctggccgtgatcgaggaagagctggagaagctgcagcgcgaatacaacgactacgaggaaatctggaaagccgagaaggccgccgtgcagggcacgcaggccatcaaggaagagatcgaccgcgtgcgcgccgagatggccgaactgcagcgcaagggccagttcgacaagctggccgagctgcaatacggcaagctgcccgagctcgaggcgcgcctgaaggccgccgacagcgccgagcgcgaggccggcgaatccgacagcggcaagccgcgcctgttgcgcacccaggtgggcgccgaggaaatcgccgaggtcgtctcgcgcgccaccggcatcccggtggccaagatgatgcagggcgaacgcgacaagctgctgcgcatggaagatttcctgcacaagcgcgtcgtgggccaggacgaagccgtgcggctggtttccgatgccatccggcgttcgcgcgcgggcctggcggatccgtcgcgtccgtatggttcgttcctgttcctcgggcccaccggcgtgggcaagacggagctgacccgtgccctggcggatttcctgttcgactccgaagagcacatgatccgcatcgacatgagcgagttcatggagaagcattccgtggcgcgcctgatcggcgcgccgccgggatacgtgggctacgaagaagggggctacctgaccgaggcggtgcgccgcaagccgtacagcgtgatcctgctcgacgaggtcgaaaaggcgcatcccgacgtgttcaacgtgctgctgcaggtgctcgacgacggccgcctgaccgacggccaggggcgcacggtggacttccgcaatacggtcatcgtcatgacgtccaaccttgggtcgcagcacatacaaagcatggcgggcaagccgtacgaggtcatcaaggaagtcgtgtgggacgagctcaagcatacgttccgccccgagttcctgaaccgtatcgatgaagtcgtggtcttccatggcctggaagcccagcacatcgagtccatcgcccggatccagctcaagcggctgggcgagcgtctcgagaagcaggagatgcgcctggacgtgtccgatgcggcgctggcggaaatcgcacgctcgggcttcgacccggtgttcggcgcccggccgctcaagcgggccgtccagcagcagatcgagaacccggtcgccaagctgattctcgaaggcgtgttcggaccgcgcgatgtggtgccggtcgactggcaggacggcaagttcgtcttcacgcgcactttgcaataa

SEQ ID NO: 33919 - protein, 865 aa, Bordetella parapertussis
MRFDKLTTKFQQALADAQSLAARNDHPYIEPVHVLAALLGDPDSGAASLLARAGVAVNRVQPAIDSALKGLPQVQGEDNVQVGRELQSVLVRTDKEAARRGDTYIASELFLLALADDKGDAGRILREAGLQKKALEAAIDAVRGGENVSGAEGESNREALSKYTLDLTERARQGKLDPVIGRDDEIRRTIQILQRRTKNNPVLIGEPGVGKTAIVEGLAQRIVNDEVPETLRGKRVLSLDLAALLAGAKFRGEFEERLKAVLKELAQDDGQNIVFIDELHTMVGAGKAEGAMDAGNMLKPALARGELHCIGATTLDEYRKYIEKDAALERRFQKVLVGEPDVESTIAILRGLQERYELHHGVEITDPAIVAAAELSHRYITDRFLPDKAIDLIDEAGARIRMEIDSKPEVMDRLDRRIIQLKIEREAVKKETDDASMRRLAVIEEELEKLQREYNDYEEIWKAEKAAVQGTQAIKEEIDRVRAEMAELQRKGQFDKLAELQYGKLPELEARLKAADSAEREAGESDSGKPRLLRTQVGAEEIAEVVSRATGIPVAKMMQGERDKLLRMEDFLHKRVVGQDEAVRLVSDAIRRSRAGLADPSRPYGSFLFLGPTGVGKTELTRALADFLFDSEEHMIRIDMSEFMEKHSVARLIGAPPGYVGYEEGGYLTEAVRRKPYSVILLDEVEKAHPDVFNVLLQVLDDGRLTDGQGRTVDFRNTVIVMTSNLGSQHIQSMAGKPYEVIKEVVWDELKHTFRPEFLNRIDEVVVFHGLEAQHIESIARIQLKRLGERLEKQEMRLDVSDAALAEIARSGFDPVFGARPLKRAVQQQIENPVAKLILEGVFGPRDVVPVDWQDGKFVFTRTLQ

SEQ ID NO: 33920 - DNA, 2640 bp, Bradyrhizobium japonicum
  CDS (1)..(2640): transl_table=11
atgaacatcgagaagtataccgaacgctccaggggcttcatccagtccgcgcagtcgcttgcggtgcgcgaggggcaccagcagttttcgaccctgcacgttctgaaagtgctgctggacgacaatgaggggctcgctgccggtctgatcgaccgtgccggcggcaactcccgcgcaattttgaaggcgaccgaggacgccctgaacaaggtgccgaaggtctccggcggcggcgccgggcagatctatctggcgcccgagctcgcacgcaccttcgatgccgccgaaaaggccggcgagaaggccggcgacagttttgtcaccgtcgagcggctgctgctcggcctcacgctggagaagaccagcgaggccggcacgatcctcagcaagggtggtgtcaccccgcaaaacctcaacgcggcgatcgaggccctgcgcaagggccgcacggccgactcggcgaccgccgagaacgcctatgacgcgctgaagaaatatgcccgcgacctgacccaggccgcgcgcgacggcaagctcgacccggtcatcggccgcgacgaggagatccgccgcaccatccaggtgctctcgcgccggaccaagaacaatcccgtcctgatcggtgagcccggcgtcggcaagaccgccatcgccgagggcctcgcgctgcgcatcgtcaacggtgacgtgccggagagcctgaaggacaagaagctgctctcgctcgacttgggcgcactgatcgccggcgcgaaataccgcggcgagttcgaggaacggctgaaggccgtgctccaggaggtgaccgggagcgagggcacctttatcctgttcatcgacgagatgcacacgctgatcggggccggcaagggcgacggcgcgatggacgcatcgaacctgctgaagccggcgctcgcccgcggcgagctgcactgcatcggcgcgaccacgctcgacgagtatcagaagcatgtcgagaaggacgcggcgctggcgcggcgcttccagccgatcttcgtcagcgagccctcggtcgaggacaccatctcgatcctgcgcggactgaaggacaagtacgagcagcaccatggcgtgcggatcaccgattccgcgcttgttgcctccgcgacattgtccaaccgctacatcaccgaccgcttcctgccggacaaggcgatcgacctcatggacgaggccgccgcgcgcctgaagatgcaggtcgattcgaagccggaggagctcgattcgatggatcgggaaatcatccggctgaagatcgaacaggaagcattgaagaaggagagcgacgccggttcgaagagccgcctgcagacgcttgaaaaggaactcgtcgagctcgaggaaaaatccgcgtcgttgacggcgcgctggagcgcggagaagaacaagctctccgatgcgcagaagctcaaggccgagctcgacggcttgcgtgtcgagctcgccaatgcccagcgccgcggcgaattccagaaggccggcgagctggcctatggccggatccccgagctcgaacggcagctcgcggacatcgaggccaaggagaactccggcgagatgatggaggaggcggtcaccgccaatcacatcgcgcaggtggtctcgcgctggaccggcgtgcccgtcgacaagatgctggagggcgagaaggacaagcttctgaagatggaggactccctcggcaagcgcgtcgtcggccaggccgaagccgtccatgcggtcgcaaccgccgtgcgccgctcccgcgccggcctccaggacccgaaccggccgatgggctcgttcatgttcttgggccccaccggcgtcggcaagaccgagctgaccaaggccctggcggagtacctgttcaacgacgagaccgcgatggtccgcctcgacatgtccgagtacatggagaagcattcggtctcgcggctgatcggcgcgcctccgggctatgtcggctatgacgagggcggcgcgctcaccgaagcggtgcggcgccggccctaccaggtcgtgctgttcgacgagatcgagaaggcgcatcctgacgtcttcaacgtcctgttgcaggtgctcgacgacggccgcctgaccgatggccagggccgcaccgtcgatttccgcaacacgctgatcatcatgacctcgaacctcggttcggagttcttggtgaatcaacccgagggcgaagacacgtcggccgtgcgcgagcaggtgatgggaatggtgcggggacatttccgccccgaattcctcaaccgtgtcgacgagatcatcctgttccatcgcttgcagaggagcgagatgggccggatcgtcgagatccagttcgcccggctgcagaagctgctgaccgatcgcaagatcgtgctgacgctcgacggcgcggcccgcgactggctcgccgccaagggctgggatcccgcctacggcgcacggccgctcaagcgggtgatccagcgctacctccaggacccgctcgccgagatgatcctggccggcgacgtcaaggacggcgacaacgtcgcgatctcgtccgaaggcaacgtgctgaccttcaacggcaaggccccgcaaaccgcggagatcgcccagttcgaggcgccggcgtcgaagcggaagctgaactga

SEQ ID NO: 33921 - protein, 879 aa, Bradyrhizobium japonicum
MNIEKYTERSRGFIQSAQSLAVREGHQQFSTLHVLKVLLDDNEGLAAGLIDRAGGNSRAILKATEDALNKVPKVSGGGAGQIYLAPELARTFDAAEKAGEKAGDSFVTVERLLLGLTLEKTSEAGTILSKGGVTPQNLNAAIEALRKGRTADSATAENAYDALKKYARDLTQAARDGKLDPVIGRDEEIRRTIQVLSRRTKNNPVLIGEPGVGKTAIAEGLALRIVNGDVPESLKDKKLLSLDLGALIAGAKYRGEFEERLKAVLQEVTGSEGTFILFIDEMHTLIGAGKGDGAMDASNLLKPALARGELHCIGATTLDEYQKHVEKDAALARRFQPIFVSEPSVEDTISILRGLKDKYEQHHGVRITDSALVASATLSNRYITDRFLPDKAIDLMDEAAARLKMQVDSKPEELDSMDREIIRLKIEQEALKKESDAGSKSRLQTLEKELVELEEKSASLTARWSAEKNKLSDAQKLKAELDGLRVELANAQRRGEFQKAGELAYGRIPELERQLADIEAKENSGEMMEEAVTANHIAQVVSRWTGVPVDKMLEGEKDKLLKMEDSLGKRVVGQAEAVHAVATAVRRSRAGLQDPNRPMGSFMFLGPTGVGKTELTKALAEYLFNDETAMVRLDMSEYMEKHSVSRLIGAPPGYVGYDEGGALTEAVRRRPYQVVLFDEIEKAHPDVFNVLLQVLDDGRLTDGQGRTVDFRNTLIIMTSNLGSEFLVNQPEGEDTSAVREQVMGMVRGHFRPEFLNRVDEIILFHRLQRSEMGRIVEIQFARLQKLLTDRKIVLTLDGAARDWLAAKGWDPAYGARPLKRVIQRYLQDPLAEMILAGDVKDGDNVAISSEGNVLTFNGKAPQTAEIAQFEAPASKRKLN

SEQ ID NO: 33922 - DNA, 2604 bp, Chlamydia muridarum
  CDS (1)..(2604): transl_table=11
atggagaagttttcagacgcggtcagcgaggccttagaaaaggcttttgagttagccaaagatgctaagcattcttatgtaacagaaaatcatttgctaaagagtcttttgcaaaacccaggttctttgttctgtttagttatcaaggatgtgcatgggaatctaggactattaacttctgctgtggatgacgctttgcatagagagccaactgtggttgagggtgcagctattcccaaaccatcgccaagtttacagcaattattgctaaacgctcaagaagaagctcgaagtatgggggatgaatatctctctggagatcacttgttattagctttttggaaaactaccaaagagccttttgcttcatggagaaaaacagtaaaaacttctccggaagctttgaaagaattaatcatcaaattaagacaaggaagtcgtatggactcgcccagtgccgaagaaaatctaaaagggttagagaaatactgtaaaaatctgactattcttgcaagagaaggcaaattggatcctgtgatcggtcgagatgaagagattaggcgtacgatacaggtcctttctagacgaaccaagaataatcccatgttgataggagagcctggggttggaaagactgcgattgccgaaggacttgctcttcggattgtgcaaggagatgttccagaaagtttaaaggataagcatctctacgtgctagatatgggagcgctgattgctggtgcgaaatatcgaggagaatttgaagagcgtttgaaaagcgttctgaaaggagtagaagcttcggaaggagcatgcattctatttatcgacgaggtacataccttagttggggcaggagccacagatggggctatggatgctgcaaatttattaaagccagctttagctcgaggaacgttgcactgtattggggcaacgactttgaatgaatatcagaagtacatcgaaaaggatgctgctttagaaagacgtttccaacctatttttgtcaccgagccctccttggaagatgccgtttttattcttcgaggattacgagaaaagtacgaaatttttcatggggtacgcattacagaaggagctttgaatgctgctgtagttctttcttatcgttatattacggatcgttttcttccagacaaggcgattgatttgatcgatgaggctgctagtttgattcgtatgcagataggaagtttacctttgcctatcgatgaaaaagagcgggaattgtcagctttgattgttaagcaagaggctattaagcgggagcaggctcctgcttatcaggaagaagccaatgaaatgcaaaaagctatcgatcgcgttaaagaagagctggcggctttacggttgcgctgggatgaagaaaaagggttaattgcgggattaaaagagaaaaaaaattctttagaaaatttaaaatttgcagaagaagaagctgagaggaccgcggactacaacagagtagcggaacttcgctatagtctcattccttcacttgaaaaagaaattcgtttggcggaagaagctttgaatcagagagatgggcgtcttttgcaggaagaggtggatgagcggttaattgctcaagttgttgccaattggactgggatccctgtgcaaaaaatgttagaaggagagtctgagaagttattagtcttggaagaatctttggaagaacgggtggtaggacagccgtttgcgattactgctgttagtgattctattcgatctgctcgagtaggtttaagcgatccacagcgtccactaggtgtgtttctctttttagggcctacaggagtcgggaaaacggaacttgctaaggccttagcagagcttttattcaataaagaagaagctatgattcggtttgatatgaccgaatatatggaaaaacattctgtttcaaaattaataggctctcctccaggatatgtaggttacgaagaggggggtagcctttccgaagccttaagaaggcgtccttattctgtagttctttttgatgagatagagaaagctgacaaagaagtatttaatattttgttacaaatttttgatgacggaattcttactgatagcaagaaacgtaaagtaaactgtaagaatgctcttttcattatgacatctaatattgggtcacaagaattggcggattattgtgcgaagaaggggactatagtcgataaagaggctgtgttatctgtcgttgctcctgcactaaaaaattattttagtccggaatttatcaaccggatagatgaaatccttccatttgttcctttgactacagaagatattgtcaaaatcgtaggcattcaaatgaatcgagtggctttgcgtttgttagaaagaagaatttcattaacttgggatgattctgtggttctatttcttagcgagcaaggttatgatggtgcttttggggctcgtcctttgaaacgtttgattcaacaaaaagtggtgactatgttgtctaaggctcttttgaagggggatattaaatccggcatgtcagtagagcttactatggccaaggatgttgttgtttttaaaactaaaacaaattctgtggtgtag

SEQ ID NO: 33923 - protein, 867 aa, Chlamydia muridarum
MEKFSDAVSEALEKAFELAKDAKHSYVTENHLLKSLLQNPGSLFCLVIKDVHGNLGLLTSAVDDALHREPTVVEGAAIPKPSPSLQQLLLNAQEEARSMGDEYLSGDHLLLAFWKTTKEPFASWRKTVKTSPEALKELIIKLRQGSRMDSPSAEENLKGLEKYCKNLTILAREGKLDPVIGRDEEIRRTIQVLSRRTKNNPMLIGEPGVGKTAIAEGLALRIVQGDVPESLKDKHLYVLDMGALIAGAKYRGEFEERLKSVLKGVEASEGACILFIDEVHTLVGAGATDGAMDAANLLKPALARGTLHCIGATTLNEYQKYIEKDAALERRFQPIFVTEPSLEDAVFILRGLREKYEIFHGVRITEGALNAAVVLSYRYITDRFLPDKAIDLIDEAASLIRMQIGSLPLPIDEKERELSALIVKQEAIKREQAPAYQEEANEMQKAIDRVKEELAALRLRWDEEKGLIAGLKEKKNSLENLKFAEEEAERTADYNRVAELRYSLIPSLEKEIRLAEEALNQRDGRLLQEEVDERLIAQVVANWTGIPVQKMLEGESEKLLVLEESLEERVVGQPFAITAVSDSIRSARVGLSDPQRPLGVFLFLGPTGVGKTELAKALAELLFNKEEAMIRFDMTEYMEKHSVSKLIGSPPGYVGYEEGGSLSEALRRRPYSVVLFDEIEKADKEVFNILLQIFDDGILTDSKKRKVNCKNALFIMTSNIGSQELADYCAKKGTIVDKEAVLSVVAPALKNYFSPEFINRIDEILPFVPLTTEDIVKIVGIQMNRVALRLLERRISLTWDDSVVLFLSEQGYDGAFGARPLKRLIQQKVVTMLSKALLKGDIKSGMSVELTMAKDVVVFKTKTNSVV

SEQ ID NO: 33924 - DNA, 2580 bp, Chromobacterium violaceum
  CDS (1)..(2580): transl_table=11
atgcgattcgacaagctgaccaccaagttccagcaggcgctgggggatgcccagagcctcgccgtggcgaacgacaacccatacatcgagccgcagcacctgctgctggccatgctggacgacgccgaagccggcgtcggcggcctgctggcgcgcgccggcgtcaacgtgccggcgctgaaggccggtctcaagcaggcgatcgaccgcctgccgcgggtgcagggccatggcggcgagatcaccgtgtcgcgcgatctggccaatctgctcaacatcgccgacaagatcgcgatgaagctgggcgacgaattcatcgccagcgagctgtatctgtccgcgctgtcacaggacaagggcgaggccggccgcttgctgaaagagcacggcggcaatcacgcgtccatccaggcggcgatagacgcggtgcgcggcggcgagagcgtcaacagcgccgacgccgaaggccagcgcgaggcgctgaagaaatacaccatggatctgaccgagcgcgcccgccagggcaagctggacccggtgatcggccgcgacgacgaaatccgccgcgcgatccaggtattgcagcgccgcaccaagaacaacccggtgctgatcggtgagccgggcgtgggcaagaccgccatcgtcgaaggtctggcgcagcggatcgtcaacggcgaagtgccggaaagcctgaagaacaagcgcctgctggtgctggacctggcggcgctgatcgccggcgccaagtaccgcggcgagttcgaggagcggctgaaggcggtgctgaacgacctctccaaggacgacggccagacgctgatcttcatcgacgaaatccacaccctggtgggcgcgggcaaggccgacggcgcgatggacgccggcaacatgctgaagccggcgctggcgcgcggcgagctgcactgcatcggtgccaccacgctggacgagtaccgcaagtacatcgagaaggacgccgcgctggagcgccgcttccagaaggtgctggtgggcgagccgtcggtggaggacaccatcgccatcctgcgcggcctgcaggaaaagtacgaaatccaccacggcgtggacatcaccgacccggccatcgtcgccgcggcggaactgtcccagcgctacatcaccgaccgcttcctgccggacaaggcgatcgacctgatcgacgaggccgccagccgcatcaagatggagctggactccaagccggaggcgatggacaagcttgaccgcaggctgatccaactgaagatcgagcgcgaagcggtgaacaaggaaagcgacgaagccagccagaaacggctgaagctgatcgaggacgagatcgccgagctgtcgcgcgaatacgccgacctggaagagatctggaaggccgagaaggccgcccagcagggctcgcagagcatcaaggaggagatcgaccgcctgaaggtggacatggaggagctcaagcgcaagggcgactggcagaaattggcagaactgcagtacggcaagctgccgcagctcgaggcgcggctgaaggaggccgagtccgccggcgacaagggcgaggccaagcccaaccgcctgctgcgcacccaggtgggcgccgaggagatcgccgaggtggtcagccgggccaccggcatcccggtgtccaagatgttgaccggcgagcgcgaaaagctgctgaagatggaggatgtgctgcaccagcgcgtggtcgggcaggacgaggcggtcagcgcggtggccgacgccatccgccgctcgcgctccggcctggccgatcccaacaagccgtacggctccttcctgttcctgggaccgaccggcgtcggcaagaccgagctgtgcaagacgctggccagcttcctgttcgacagcaaagaccacctgatccgcatcgacatgtccgagtacatggagaagcattcggtggcgcggctgatcggcgcgccgcccggttacgtcggctacgaggaaggcggctatctcaccgagcaggtgcgccgcaagccgtacagcgtgatcctgctggacgaggtggaaaaggcgcatccggacgtgttcaacgtgctgctgcaggtgctggacgacggccggctcacagatggccagggccgcaccgtggacttcaagaacacggtgatcgtgatgacgtcgaacatcggcagccagcagatccaggcgatggccaccgacgattaccaggtgatcaagctcgccgtgatggcggaagtgaagacgcagttccggccggaattcatcaaccgcatcgacgaggtggtggtgttccacggcctggacgagaaacacatccagtccatcgcccgcatccagttgaagagcctggaaaaccgcttggccaagctggagctgagcctgcagatcagcgacgaggcgctggcgctgttgtccgaagccggtttcgacccggtctacggcgcgcggccgctgaagcgggcgatccaggccgagctggaaaacccgctggccaaggccatcctggccggcaagtacccgccgaaagccacggtgatggtggaagcccggaacggacaactggctttcgcctga

SEQ ID NO: 33925 - protein, 859 aa, Chromobacterium violaceum
MRFDKLTTKFQQALGDAQSLAVANDNPYIEPQHLLLAMLDDAEAGVGGLLARAGVNVPALKAGLKQAIDRLPRVQGHGGEITVSRDLANLLNIADKIAMKLGDEFIASELYLSALSQDKGEAGRLLKEHGGNHASIQAAIDAVRGGESVNSADAEGQREALKKYTMDLTERARQGKLDPVIGRDDEIRRAIQVLQRRTKNNPVLIGEPGVGKTAIVEGLAQRIVNGEVPESLKNKRLLVLDLAALIAGAKYRGEFEERLKAVLNDLSKDDGQTLIFIDEIHTLVGAGKADGAMDAGNMLKPALARGELHCIGATTLDEYRKYIEKDAALERRFQKVLVGEPSVEDTIAILRGLQEKYEIHHGVDITDPAIVAAAELSQRYITDRFLPDKAIDLIDEAASRIKMELDSKPEAMDKLDRRLIQLKIEREAVNKESDEASQKRLKLIEDEIAELSREYADLEEIWKAEKAAQQGSQSIKEEIDRLKVDMEELKRKGDWQKLAELQYGKLPQLEARLKEAESAGDKGEAKPNRLLRTQVGAEEIAEVVSRATGIPVSKMLTGEREKLLKMEDVLHQRVVGQDEAVSAVADAIRRSRSGLADPNKPYGSFLFLGPTGVGKTELCKTLASFLFDSKDHLIRIDMSEYMEKHSVARLIGAPPGYVGYEEGGYLTEQVRRKPYSVILLDEVEKAHPDVFNVLLQVLDDGRLTDGQGRTVDFKNTVIVMTSNIGSQQIQAMATDDYQVIKLAVMAEVKTQFRPEFINRIDEVVVFHGLDEKHIQSIARIQLKSLENRLAKLELSLQISDEALALLSEAGFDPVYGARPLKRAIQAELENPLAKAILAGKYPPKATVMVEARNGQLAFA

SEQ ID NO: 33926 - DNA, 2550 bp, Corynebacterium diphtheriae
  CDS (1)..(2550): transl_table=11
atggctggttttaaccccacaacgaaaactcaagaggcattgcaagaggcgctgcagaaggcgtcggccgcaggtaatccggatatccgtccggagcacctccttgctgcgattttaggccaagaagatggcattgctattccggtattgcgcgctacgggcgtggaccccgatgtggttcgccgtgaagcagaagcattggtggccaagctgccaaaggctgaaggtgccaacttggcaaacccgaactttaaccgtgatgcgttaagcgttttaaacaacgcccaggagttggcgggtgagttaggcgacgagtacgtttctaccgaggtgctgctggctgcggtggcccgtgggactaacgatgctgccgagttgctgaccaagcgcggtgctacttacgacgtcatcaagggtgttttcccttcggtacgcggtaataagaaggtgactacggagtctccagaggatcagttccaagcattagagaagtactccactgacctgactgcgcgggcgcgggaaggcaaaattgatccggttattggccgtgatcaggagattaggcgtgtggttcaggtgctttctcgccgcactaagaacaatcctgttcttattggtgagcctggtgtgggcaagacggccatcgtcgaaggtcttgcgcgccgcattgtggcaggggatgtgccggagtcgctgaagggtaaaactctgattagcttggatcttggttccatggtggctggtgctaagtaccgtggtgaatttgaggagcgtttgaaggcggttctcgacgaaatcaagtctgctgagggcgagatcatcacctttatcgacgagctgcacaccattgtgggcgctggtgctaccggcgattccgctatggatgcaggcaatatgattaagccgctgttggctcgtggcgagctgcgtttggtgggtgctaccaccttggatgagtaccgcaaatacattgagaaggatgctgcgctggagcgtcgttttcagcaggtctttgtcggtgagccttcggtagaagatgccgtgggtattttgcgtggcttgaaggagcgctacgaggtgcaccatggtgtacggatccaggattcggcgttggtggctgctgctacgctgtcggatcgctatatcaccagcaggttcttgccggataaggctattgacttggtggatgaggctgcatcgcggttacgcatggagatcgattcttcgccgcaggagatcgatgagctggaacgtattgtgcgtcgccttgagattgaggaagtagcgctgtcgaaggaaacggacgctgcgtcgaaggatcgcttgatcaagttgcgtcaggagcttgccgacgagcgcgagaagctcggtgagcttgtggcacggtggaacaacgagaagggcgcgattaataaggttcgcgaagccaaggaagagctggagcggctgcgctcggagtcggaaatcgcggaacgcgacggcgactacggcaaggtagctgagctgcgctatggccggatccctgagctggaaaagcaggtcgctgaggccgaggaacacaccgtggaaaccaccatgctgagcgaggaggttactccagacaccattgctgaggtggtgtcggcgtggactggtattcctgccggcaagatgttgcagggtgagacggagaagctgctcaacatggaggctgagctaggcaaacgtgtggttggccagtcggaggctgtggttgcggtgtctgatgcggtgcgtcgtgcccgtgccggcgtggcggatccgaaccgtccgacaggttccttcctcttcctgggccctacgggcgtgggtaagacggagctagccaaggcccttgcggagttcatgtttgacgatgatcgtgcgatggtacgcattgatatgtcggagtatggcgagaagcatgcggtcgctcgtttggtcggtgcccctccaggatatgtgggttacgaccaaggcggtcagctcacagaggctgttcgacgtcgcccgtacaccgtcgttcttttcgacgaggtggaaaaggcacacccagatgtgtttgacatcctgctgcaggtcctcgacgagggccggttaacagatggccaaggccgcacagtggacttccgtaatacagtactgatcctgacgtctaacctaggtgccggtggcacaaaagacgagatgatggatgctgtaaagcgggcgtttaagccagagtttgtgaaccgccttgatgatgtggtgatctttgatccgctgagccaagagcagctcacacacattgtggagattcagattgcgcagctggcacagcgtcttgccgctcgtcgtttgacgttggcagtgtcggattctgcgaagttgtggcttgcggagcgcggttatgagccggcttacggtgctcgtccgttgcgtcgattgatccagcaggctattggcgatcagttggctaagaagctgttgtctggtgaggttcgcgatggtagcgaggttcatgtggatgcggatttggacaatgatgggttggttattagcgcctcgtag

SEQ ID NO: 33927 - protein, 849 aa, Corynebacterium diphtheriae
MAGFNPTTKTQEALQEALQKASAAGNPDIRPEHLLAAILGQEDGIAIPVLRATGVDPDVVRREAEALVAKLPKAEGANLANPNFNRDALSVLNNAQELAGELGDEYVSTEVLLAAVARGTNDAAELLTKRGATYDVIKGVFPSVRGNKKVTTESPEDQFQALEKYSTDLTARAREGKIDPVIGRDQEIRRVVQVLSRRTKNNPVLIGEPGVGKTAIVEGLARRIVAGDVPESLKGKTLISLDLGSMVAGAKYRGEFEERLKAVLDEIKSAEGEIITFIDELHTIVGAGATGDSAMDAGNMIKPLLARGELRLVGATTLDEYRKYIEKDAALERRFQQVFVGEPSVEDAVGILRGLKERYEVHHGVRIQDSALVAAATLSDRYITSRFLPDKAIDLVDEAASRLRMEIDSSPQEIDELERIVRRLEIEEVALSKETDAASKDRLIKLRQELADEREKLGELVARWNNEKGAINKVREAKEELERLRSESEIAERDGDYGKVAELRYGRIPELEKQVAEAEEHTVETTMLSEEVTPDTIAEVVSAWTGIPAGKMLQGETEKLLNMEAELGKRVVGQSEAVVAVSDAVRRARAGVADPNRPTGSFLFLGPTGVGKTELAKALAEFMFDDDRAMVRIDMSEYGEKHAVARLVGAPPGYVGYDQGGQLTEAVRRRPYTVVLFDEVEKAHPDVFDILLQVLDEGRLTDGQGRTVDFRNTVLILTSNLGAGGTKDEMMDAVKRAFKPEFVNRLDDVVIFDPLSQEQLTHIVEIQIAQLAQRLAARRLTLAVSDSAKLWLAERGYEPAYGARPLRRLIQQAIGDQLAKKLLSGEVRDGSEVHVDADLDNDGLVISAS

SEQ ID NO: 33928 - DNA, 2559 bp, Corynebacterium glutamicum
  CDS (1)..(2559): transl_table=11
atgagttcattcaatccaactaccaaaaccaatgaagccatgcaggctgctcttcagcaggcatcctcggctggcaaccctgatattcgtccagctcacctgttggctgccatcttggagcaaactgatggcgtagcagcgccagtcctcatggctactggtgtggatcctaaggagatcctcgcagaggccaagaagttggttgcttcttaccccaaggcttctggcgccaatatggctaatccaaacttcaaccgggatgccctcaatgcgttcactgcagctcaggagcttgccggtgagttgggcgatgagtacgtctcaaccgaagtacttcttgccggtatcgctcgcggaaagtctgatgctgcggatctgttgaccaacaagggtgcaacctatgacgccatcaaagaggctttcccttcggttcgtggatctcagcgtgtcaccactcaggatccagagggacagttccaggctttggaaaagtactccactgacctgaccaagcttgctcgtgaaggcaagattgatcctgttattggccgtgaccaggaaattcgtcgcgtcgttcaggtgcttagccgtcgtaccaagaacaaccctgttctgatcggtgagccaggtgtcggtaaaaccgccatcgtggaaggccttgcacgccgcatcgttgctggtgacgttccagaatccctcaagggcaaaactctgatcagtcttgatcttggttccatggttgccggcgctaagtatcgcggtgaattcgaggagcgactgaaggctgttctggatgagatcaagggagctaacggcgaagtcgttaccttcatcgatgagctgcacaccatcgtcggcgctggtgcttcgggtgaatccgccatggatgccggaaacatgattaagccactgcttgcccgcggtgagctgcgcttggttggtgccaccacgctgaatgagtaccgcaagtacatcgaaaaggacgctgccctggagcgtaggttccagcaggtttatgtcggtgagccaacggtagaagatgccatcggtattcttcgtggattgaaggaacgctacgaggtccatcacggtgtccgcatccaggactccgcactggtcgccgcagctgaactctcaaaccgctatatcaccagccgtttccttcctgataaggctattgacttagttgatgaggcagcatcacgcctgcgcatggagattgattcttcacctcaggaaatcgatgagctggagcgtatcgtccgccgcctcgagatcgaagagatggcgctgtccaaggaatccgatgcagcttccaaggaacgtctagaaaagctgcgctcggaacttgctgatgaacgcgaaaagctctctgagttgaaggctcgttggcagaatgagaaaactgctattgacgatgtccgtgagatgaaggaagagctggaagcgctgcgttctgagtcggatattgcagaacgtgacggcaattatggtcgtgtcgcagagctgcgctacggccgaatccctgagctggaaaagcagatcgaggatgcagaatccaaggtcgaggtcaatgaaaatgccatgctcactgaggaggtcacgccagacacgatcgccgatgtggtttccgcatggacgggcattcctgcaggcaagatgatgcagggtgagaccgagaagctgctcaacatggagcgcgtcttgggcaaccgtgtggtcggtcagctagaagcggtaactgcagtgtctgacgcggtgcgtcgttcacgcgcgggtgttgccgatccaaaccgtccaactggttccttcctgttccttggacctaccggcgtcggtaagactgagctggccaaggctgtcgcggagttcctcttcgatgatgatcgcgccatgatccgcatcgatatgtccgaatacggtgagaagcactcggttgctcgtctggtcggtgcccctccgggatacgtcggctatgaccagggcggtcaactcactgaggcagtgcgccgtcgtccgtacaccgtcgtgcttttcgacgaggtggagaaggctcaccctgatgtcttcgatatcctcctgcaggttctcgacgagggtcgcctcaccgacggccaaggccggaccgtggatttccgcaacaccatcttgatcctcacctctaacctgggcgcaggcggtactcgcgaacaaatgatggatgctgtgaagatggcattcaagcctgagttcgtgaaccgtctcgatgatgttgtgatcttcgatcgtttgtcccctgagcagctgaccagcatcgttgatatccagatcaagcagctgactgaccgtttggctggccgcaggcttaaccttcgagtcagcgacagcgcgaaggcttggctggcggagcgtggctacgaccctgcttatggtgctcgtccgttgcgcaggctgatccagcaggccatcggtgatactttggctaaggaactgctggcaggcaacgtccgtgatggcgatggtgtgcttgtcgacgtcgccgacggcggccagaagctcgacgtttccagggcggtctaa

SEQ ID NO: 33929 - protein, 852 aa, Corynebacterium glutamicum
MSSFNPTTKTNEAMQAALQQASSAGNPDIRPAHLLAAILEQTDGVAAPVLMATGVDPKEILAEAKKLVASYPKASGANMANPNFNRDALNAFTAAQELAGELGDEYVSTEVLLAGIARGKSDAADLLTNKGATYDAIKEAFPSVRGSQRVTTQDPEGQFQALEKYSTDLTKLAREGKIDPVIGRDQEIRRVVQVLSRRTKNNPVLIGEPGVGKTAIVEGLARRIVAGDVPESLKGKTLISLDLGSMVAGAKYRGEFEERLKAVLDEIKGANGEVVTFIDELHTIVGAGASGESAMDAGNMIKPLLARGELRLVGATTLNEYRKYIEKDAALERRFQQVYVGEPTVEDAIGILRGLKERYEVHHGVRIQDSALVAAAELSNRYITSRFLPDKAIDLVDEAASRLRMEIDSSPQEIDELERIVRRLEIEEMALSKESDAASKERLEKLRSELADEREKLSELKARWQNEKTAIDDVREMKEELEALRSESDIAERDGNYGRVAELRYGRIPELEKQIEDAESKVEVNENAMLTEEVTPDTIADVVSAWTGIPAGKMMQGETEKLLNMERVLGNRVVGQLEAVTAVSDAVRRSRAGVADPNRPTGSFLFLGPTGVGKTELAKAVAEFLFDDDRAMIRIDMSEYGEKHSVARLVGAPPGYVGYDQGGQLTEAVRRRPYTVVLFDEVEKAHPDVFDILLQVLDEGRLTDGQGRTVDFRNTILILTSNLGAGGTREQMMDAVKMAFKPEFVNRLDDVVIFDRLSPEQLTSIVDIQIKQLTDRLAGRRLNLRVSDSAKAWLAERGYDPAYGARPLRRLIQQAIGDTLAKELLAGNVRDGDGVLVDVADGGQKLDVSRAV

SEQ ID NO: 33930 - DNA, 2580 bp, Coxiella burnetii
  CDS (1)..(2580): transl_table=11
atgcgaattgataaattcaccacagcattccaaacggcgttagcagacgcgcaatctttggccgttggtcgcgatcatcaatttatagaacctgcgcatgtgatgaaagtattgctagaacaaacgcaaggcaccgtggcgccattgttagagcaatcaaaagtcaatttatcacgtttgattgatggcgttaacaaggccatcgacagctatcctcaagtagaaggaaccggcggagaagttcatgtgtcccgcgaattaagcaaaattttaacgctgatggataaatttgctcagcaaaataaggatcaatacatttcctcggaatggttcattcccgccgcgctcgaagccaaaggtcaattgcgagatgtgttaatagaggccggtgctgataaaaaagccattgaaaaaaatatcatgaacttgcgcaagggtgaacgagtgactgagcaaagcgctgaagatcaacggcaggcattggcgaaatacactattgatctcaccgaaaaagctgaaactggaaaactggatcccgtcattggacgcgacgaagaaattcgccgaacggtacaagtgctacagcggcgcaccaaaaataatcctgttctcatcggtgaaccgggcgtgggtaaaacagcgattgtggaagggttagcgcaacgtatcgtcaacggtgaagtgccggaaggtttgaaacagaaacgattactggcgctagatatgggcgcattaatcgccggggctaaatttcgaggagaatttgaagagcgtttaaaagccgtattaaaagatatcgctaaggaggaaggtcgggttattttatttatcgatgaattgcacaccatggtgggagcgggtaaggcggaaggtgcgatggatgccggtaatatgttaaaacccgcgttggcccgcggcgagcttcattgtgtgggtgcaaccaccttggatgaataccgcaaatacattgaaaaagatgccgcattagaacggcgatttcaaaaagtattggttgaggagccttcaacggaagatgccatcgctattttaagaggtttgaaggaacgttacgaagtgcatcatggcgttgaaattaccgatcctgcgattattgcagcagccacgttatctcaacgctatattaccgatcgaaatcttcccgacaaagcgattgatttaattgatgaagcagccagtcaaattcgtatggaaatggattccaaacctgtcgaactggatcgtttggagcgacggttaattcagctaaaaattgagcgtgaagctttaaaaaaagaaaccgatgaagcttcaaaaaaacggttgtccgatcttgaaaccgaaattaaaaacgttgaaaaagaatattctgatctcgaagaagtgtggaaaagtgaaaaagcttcattgcacggtactcaacaaattaaagaggaattggaacaggcgcggattgaattggaagccgctggacgtgctggtgatttggcgcgaatgtccgagctgcaatatggaatcatcccagagcttgataaaaaattaaaagcggcttcccagaaagaagagcaattccatgatcataaattattacgcagtcgagtgaccgaagaagaagtcgccgaagtcgtctcgaaatggacacatattcctgtgtcgaaaatgttggagggcgagcgcgagaaattattgcatatggaaactgaattgcataaacgcgtcattggtcaggacgaagccgtgaacgccgtggcaaatgcgattcgccgttctcgggcgggattgtccgaccctaatcgccccgtaggttcgtttttattcttaggcccgacaggggtggggaaaactgagctatgcaaagcattggccgtctttttgtttgatacggaagatgcgatggtgcggattgatatgtctgaatttatggaaaagcattcagtcgctcgattaatcggcgcaccgccaggatacgtgggttacgaagaggggggctatttaacagaggctatccgccgtcggccttattcggttattttattagatgaaattgaaaaagcacataacgacgtatttaacgttttgctgcaagtgttggatgacggtcgattaacggacggtcagggtcgaacggtggattttcgcaataccgtcattgtaatgacttctaatctcgggtctgatttgattcgggaattctcgggtgaaaactacgataaaatgaaagacgccgtgatggaagtggtcgcacaacatttccgacctgagtttattaatcgcattgatgaagctgttgtttttcattctttgaaaaaagagcaaattcgcaatattgcgattattcaaatcgatcgaattaaaaaacgcttgaaagaaaaagattatcagctcacgatcagtgatgacgcgctcgattatttatcagagctgggttacgatccggtttatggcgcacgaccgctaaaacgggtgctgcaacaacaactcgaaaatccactctcccagaaaatcttggaagggaaatttgtgcctggctcattaattaacattgagaaaaagggcgaacaattagaatttaaggaagcatga

SEQ ID NO: 33931 - protein, 859 aa, Coxiella burnetii
MRIDKFTTAFQTALADAQSLAVGRDHQFIEPAHVMKVLLEQTQGTVAPLLEQSKVNLSRLIDGVNKAIDSYPQVEGTGGEVHVSRELSKILTLMDKFAQQNKDQYISSEWFIPAALEAKGQLRDVLIEAGADKKAIEKNIMNLRKGERVTEQSAEDQRQALAKYTIDLTEKAETGKLDPVIGRDEEIRRTVQVLQRRTKNNPVLIGEPGVGKTAIVEGLAQRIVNGEVPEGLKQKRLLALDMGALIAGAKFRGEFEERLKAVLKDIAKEEGRVILFIDELHTMVGAGKAEGAMDAGNMLKPALARGELHCVGATTLDEYRKYIEKDAALERRFQKVLVEEPSTEDAIAILRGLKERYEVHHGVEITDPAIIAAATLSQRYITDRNLPDKAIDLIDEAASQIRMEMDSKPVELDRLERRLIQLKIEREALKKETDEASKKRLSDLETEIKNVEKEYSDLEEVWKSEKASLHGTQQIKEELEQARIELEAAGRAGDLARMSELQYGIIPELDKKLKAASQKEEQFHDHKLLRSRVTEEEVAEVVSKWTHIPVSKMLEGEREKLLHMETELHKRVIGQDEAVNAVANAIRRSRAGLSDPNRPVGSFLFLGPTGVGKTELCKALAVFLFDTEDAMVRIDMSEFMEKHSVARLIGAPPGYVGYEEGGYLTEAIRRRPYSVILLDEIEKAHNDVFNVLLQVLDDGRLTDGQGRTVDFRNTVIVMTSNLGSDLIREFSGENYDKMKDAVMEVVAQHFRPEFINRIDEAVVFHSLKKEQIRNIAIIQIDRIKKRLKEKDYQLTISDDALDYLSELGYDPVYGARPLKRVLQQQLENPLSQKILEGKFVPGSLINIEKKGEQLEFKEA

SEQ ID NO: 33932 - DNA, 2607 bp, Enterococcus faecalis
  CDS (1)..(2607): transl_table=11
atgaatattgaaaaaatgacaaccacgctacaagaggcgattgctgaagctcaaaaagttgcggtgacacgtcaacatcaagaaattgatatcgcacatttatggaaaatttttcttcaaccaaaccattttggacgtaatttttacacagatgctggtttagatgttgacgcatttgaacgagaagtagataacgcgttagatgaatatccaagtgtggcaggcggtaatgtgcaatatggtcaaaatttaagtcaaaatttgttccatttattgcaagaagctgattcacttcgagaagaattccaagatgaatttttatcaaccgaaattgtacttttagctttaatgaaattgaaaaattatcgtttaacaaaatatttaatgcaacaaggcattacggaaaaagagttaagaaaaaatattgaagagatgagaggaggagatcgtgtgacttctcaaaaccaggaagaacaatataaagcactagaaaaatacggtgttgacttagtacaacaagtaaaagcaggaaaacaagatccaatcattggtcgtgacgaagaaattcgtgacgttattcggattttatcaagaaaaactaaaaataatccagtcttaattggtgaaccaggtgttggtaaaacagcgattgttgaaggattagcacaacgaatcgttcgtaaagatgttcccgaaaacttaaaagataaaaccattttttctttagatatgggcgccttaattgcgggagcaaaattccgtggcgaatttgaagaacggttaaaagctgttttaaaagaagtgaaaaaaagtgatggcaaaatcattttattcattgatgaaattcataatatcgtcggagctggtaaaacagaaggcagtatggacgccggaaatttattaaaaccgatgctagcacgtggtgaattgcatttaatcggtgccacaacgcttgatgaatatcgccaatatatggaaaaagataaagccttagaacgtcgtttccaaaaagtattagtcaaagaaccaacagtagaagatacaatttctattttgcgtggcttaaaagaacgatttgaaattcaccacggcgtgaatattcatgacaatgctttagttgctgccgctactttatccgatcgctatattactgatcgtttcttaccagataaagcgattgacttagtcgatgaagcaagcgcaacgattcgagtggaaatgaattcgatgccaacagagctcgatcaagtaacacgtcggttaatgcaactagaaattgaagaagcggccttgaaaaaagaatcagatgatgcaagtaaaaaacggttagccaacttgcaagaagaattagcagatttgcgtgaagaagccaactcaatgaaaatgcaatgggaaacggaaaaagaagaagttaatgcggtttccaataaacgtgcagagattgataaagcaaaacacgaattagaagatgctgaaaataattatgatttagaacgagctgctgttttgcgtcatggaacaattccgcaattagaacatgaattgaaagaattggaagaaaagaacgctaaagataacgtcaaaatggtacaagaatcggttactgaaaacgaaattgcgcaagtggtcggtcgtttaactggcattcctgtgacaaaattagttgaaggcgaacgagaaaaattaatgaaactgaatgaaacattacacaaacgtgtgattggtcaagatgaagccgtcgatgctgttagtgatgcggtgattcgttcaagagcaggcttacaagatccaaatcgcccactcggttcgttccttttcctaggaccaactggtgttggtaaaacagaacttgctaaagctttagctgaagatttgtttgattctgaagatcatatggtacggattgacatgagtgaatacatggaaaaacatgccgtgtctcgtttggttggtgcccctccaggctatgttggttatgaagaaggtggccagttaacggaagctgttcgtcgaaacccttatacaattgtcttattagacgaaattgaaaaagcgcacccagatgtctttaatatcttattacaagttttagatgatggtcgtttgacagattctaaaggtcgggtcgttgattttaaaaatacagttttaattatgacaagtaacatcggctctcagcttttattggaaggtgtgacacctgaaggaacaattccagaagaagttgaaaatcaagtcatgaatattctaaaaggacactttaaaccagagttcttaaacagaattgatgataccattttatttacaccattaagcttggataatgtgaaaggaatcattggtaaaatgaccgcacaacttgctcatcgtttagagcaacaagaaattgtgttggaaatcactgatgaagctaaaacatggattgctgaaaatgggtatgagccagcttatggagctcgtccgttaaaacgtttcattactcgcgaagtcgaaacaccattagcaaaagaaattgtttctggacgagtaatgccaaaaacaaaagtcacgattagtctattagacaatcaattagtttttgaaaatgaaccgatagaagaagtgtaa

SEQ ID NO: 33933 - protein, 868 aa, Enterococcus faecalis
MNIEKMTTTLQEAIAEAQKVAVTRQHQEIDIAHLWKIFLQPNHFGRNFYTDAGLDVDAFEREVDNALDEYPSVAGGNVQYGQNLSQNLFHLLQEADSLREEFQDEFLSTEIVLLALMKLKNYRLTKYLMQQGITEKELRKNIEEMRGGDRVTSQNQEEQYKALEKYGVDLVQQVKAGKQDPIIGRDEEIRDVIRILSRKTKNNPVLIGEPGVGKTAIVEGLAQRIVRKDVPENLKDKTIFSLDMGALIAGAKFRGEFEERLKAVLKEVKKSDGKIILFIDEIHNIVGAGKTEGSMDAGNLLKPMLARGELHLIGATTLDEYRQYMEKDKALERRFQKVLVKEPTVEDTISILRGLKERFEIHHGVNIHDNALVAAATLSDRYITDRFLPDKAIDLVDEASATIRVEMNSMPTELDQVTRRLMQLEIEEAALKKESDDASKKRLANLQEELADLREEANSMKMQWETEKEEVNAVSNKRAEIDKAKHELEDAENNYDLERAAVLRHGTIPQLEHELKELEEKNAKDNVKMVQESVTENEIAQVVGRLTGIPVTKLVEGEREKLMKLNETLHKRVIGQDEAVDAVSDAVIRSRAGLQDPNRPLGSFLFLGPTGVGKTELAKALAEDLFDSEDHMVRIDMSEYMEKHAVSRLVGAPPGYVGYEEGGQLTEAVRRNPYTIVLLDEIEKAHPDVFNILLQVLDDGRLTDSKGRVVDFKNTVLIMTSNIGSQLLLEGVTPEGTIPEEVENQVMNILKGHFKPEFLNRIDDTILFTPLSLDNVKGIIGKMTAQLAHRLEQQEIVLEITDEAKTWIAENGYEPAYGARPLKRFITREVETPLAKEIVSGRVMPKTKVTISLLDNQLVFENEPIEEV

SEQ ID NO: 33934 - DNA, 2619 bp, Gloeobacter violaceus
  CDS (1)..(2619): transl_table=11
atgcagcccaacaacccgaaccaattcaccgagaaggcctgggatgcgatcgtccgcaccaccgaggtagctaaggagtaccgccagcagcagctggagagcgaacatctttttaaggcgctcctggatcaagacggggggttggccggttcgatttttaccaaggcgggtgtgaacctgacgaagcttggcgagcgggtcgagcagtttatcaaccgccagcccaaactcaccaaccccggccagagcgtctacctcggccgcagcctcgacgcgctgttggatcgcgccgagggtttccgcaaagagtacggcgacgattttatttcgatcgagcacctggtgctggccttcgccaaggacgtgcgcttcggacagcagattctgcgtgaattcagcctcgatgaagcgaagcttaaagcggtcgtggcccaggtgcgcggcaaccagaaggtgaccagccagaatcctgaaagcacctacgagtcgctcgataaatacggccgggatctgacccaattggcccgcgaaggcaagctcgatccggtgatcggccgcgacgaggagattcgccgcaccatccagattctctcgcgccgcaccaaaaataaccccgtactgattggcgaacccggcgtgggcaagacggccatcgccgaggggctcgcccagcgcatcgtcagcggcgatgtgcccgagtcgctccagggccgcaagctgatcgccctcgacatgggagcactgattgccggatctaagtaccggggcgaatttgaagaacggctcaaggcggtcctcaacgaggtgaccaagtccgaggggcagatcgtcctttttatcgacgaaattcacacggtcgtgggtgcgggtgccacccagggcgccatggacgcgggcaatttgctcaagccgatgctggcccgcggcgaactgcgctgcattggggctacgaccctcgatgaataccgcaaatacatcgagaaagacgctgccctggagcgccgcttccagcaggtctacgtcgatcaacccacggtcgaggacaccatttcgattctgcgcggcctcaaagagcgctacgaagtccaccacggtgtgcgcatctccgacagcgccctggtggcggcggcggtgctttctcatcgctacatcagcgaccgttttttgcccgacaaagcgatcgacttgatggacgaggcggcggccaagctcaagatggaaatcacctccaagcccgaggccctcgacgaggtcgaccgcaagatcctgcagctggagatggagcggctgtcgctggccaaggagtccgacgccgcctcgcgcgatcgtctggagcggcttgaaaaagaactggccgacctcaaagaagagcagcgctccctcaacgcccagtggcaggccgagaaggacatcatcgaccaggtccaggccgtcaaagaagaaatcgaccaagtcaacgtccagatccagcaggccgagcgcgactacgacctcaaccgcgccgccgaactgaaatacggcaaactgtccgaattgcaaaagcgcctcgacgcggccgacaaacaactgagcgagacccagaccagtggccggtcgctgttgcgcgaggaggtcaccgaggaggacatcgccgaaatcatctccaagtggaccggcatcccggtgagcaaactggtggcgagcgaacgcgagaagctgttgcacctcgaagacgagttgcacaagcgggtggtggggcaggaagaagcggtgcggattgtctctgaagccattcagcgatcgcgcgccggacttgcagacccgaaccggccgatcgcgagctttatttttctggggccgaccggcgtgggcaagaccgagcttgccaaggcgctcgcgtcgtttttgttcgacgacgagaatgccatggtgcgcatcgacatgtccgagtacatggagaagcacagcgtctcgcggctgattggtgcccccccaggctacgtgggctacgacgaaggcggccagctcaccgaggcggtgcgccgccggccctacgcggtggtgctctttgacgagatcgaaaaagcccacaacgacgtcttcaacgtgctgttgcaggtgctcgacgacgggcggatcaccgattcgcagggccgcacgatcgatttcaaaaacgcagtgatcatcatgaccagcaacatcggctccgatgcgatcttgcgcctgggcggcaacgacgcctactacgagcagatgcgcgaggaggtgatgcgcgccatgcaggtccacttccggccggaatttctcaaccgcgtcgatgacatcatcatcttccgcaacctgcgccgcgatcagctcgccgccatcgtcaagctgcagatcgcacggctggagaagcggctggccgatcgcaagatcaccctcaagctcagcgaggccgccatcgactacatcgtcgaggcgggctacgacccggtctacggtgcgcgccccctcaagcgggccatccagaatgaactggtcaacccgctcgcccggggattgctcaagggggattttaacgacggcgacaccatctttgtcgacatcgagaacgaaaggcccgtcttccgccgcctaagcgccatgccggttgtctag

SEQ ID NO: 33935 - protein, 872 aa, Gloeobacter violaceus
MQPNNPNQFTEKAWDAIVRTTEVAKEYRQQQLESEHLFKALLDQDGGLAGSIFTKAGVNLTKLGERVEQFINRQPKLTNPGQSVYLGRSLDALLDRAEGFRKEYGDDFISIEHLVLAFAKDVRFGQQILREFSLDEAKLKAVVAQVRGNQKVTSQNPESTYESLDKYGRDLTQLAREGKLDPVIGRDEEIRRTIQILSRRTKNNPVLIGEPGVGKTAIAEGLAQRIVSGDVPESLQGRKLIALDMGALIAGSKYRGEFEERLKAVLNEVTKSEGQIVLFIDEIHTVVGAGATQGAMDAGNLLKPMLARGELRCIGATTLDEYRKYIEKDAALERRFQQVYVDQPTVEDTISILRGLKERYEVHHGVRISDSALVAAAVLSHRYISDRFLPDKAIDLMDEAAAKLKMEITSKPEALDEVDRKILQLEMERLSLAKESDAASRDRLERLEKELADLKEEQRSLNAQWQAEKDIIDQVQAVKEEIDQVNVQIQQAERDYDLNRAAELKYGKLSELQKRLDAADKQLSETQTSGRSLLREEVTEEDIAEIISKWTGIPVSKLVASEREKLLHLEDELHKRVVGQEEAVRIVSEAIQRSRAGLADPNRPIASFIFLGPTGVGKTELAKALASFLFDDENAMVRIDMSEYMEKHSVSRLIGAPPGYVGYDEGGQLTEAVRRRPYAVVLFDEIEKAHNDVFNVLLQVLDDGRITDSQGRTIDFKNAVIIMTSNIGSDAILRLGGNDAYYEQMREEVMRAMQVHFRPEFLNRVDDIIIFRNLRRDQLAAIVKLQIARLEKRLADRKITLKLSEAAIDYIVEAGYDPVYGARPLKRAIQNELVNPLARGLLKGDFNDGDTIFVDIENERPVFRRLSAMPVV

SEQ ID NO: 33936 - DNA, 2571 bp, Haemophilus influenzae
  CDS (1)..(2571): transl_table=11
atgaacattgaaaaatttacgacaaaattccaagaagcgttaagcgaacgacaatcacttgctatcggaaaagacaatcaatttattgaacctgtgcatttattgaccgcacttttaaatcaacagggcggctctattgcgccaattttgacagcaagtggcgtaaatgtggctttattgcgtaatgaattaaagacagaactaaataaattgccgcaagtgattggcaatggcggtgatgtacaactttcacgccagcttattaatctacttaatttatgcgataaattcgcacagcaaaaccaagataaatttatttcgagcgaattgtttttgtttgcagctttagaagaacgaggaacgatcagcgatattttgaaaaagtgcggtgcgaaaaaagaacaaatttcgcaagctattcagcacattagagggggacaaaacgtgaacgatcaaaatgcagaagaaagcagacaagcgcttgaaaaatatacgattgatttaaccgctcgtgcagaaagtggcaaacttgatcctgtaattgggcgtgatgaagaaattcgtcgagccattcaagtattacaacgtcgtaccaaaaataaccctgtgttaattggtgaaccaggtgtagggaaaacggcgattgtcgaaggcttggcacagcgcatcgtaaacggcgaagtgccagaaggtttgaaaaataaacgtgtgctttcattagatatgggggcgttgattgctggtgcgaaatatcgtggtgaatttgaagaacgtttaaaagcagtactcaatgaactttcgaaagaagaaggtcgcgttatcctctttattgacgaaattcatactatggtcggcgcgggtaaaaccgatggtgcgatggatgcgggtaatttgttaaaaccaagtttggcacgaggcgaattacattgcgtgggtgcaactactttagatgaatatcgtcaatatatcgaaaaagatgccgcacttgaacgccgtttccaaaaagtctttgtggacgaaccaagtgtagaagataccattgcgatcttacgtggtttgaaagaacgttatgaaattcatcatcacgtggatattactgacccagcaattgtcgctgcagcaacgctttcacatcgttatatttccgatcgtcagttaccagataaagccattgatttgatcgatgaagcagcgtctagcattcgtatggaaatagattctaaacctgaaccgcttgatcgtcttgaacgtcgtattatccaattaaaattggaacaacaagcgttacaaaaagaagaagacgaagcaagtcgcaaacgtttagaaatgttagagaaagaattggctgaaaaagaacgtgaatacgccgaacttgaagaagtatggaaatctgaaaaagcaacgctttctggctctcaacatattaaacaagagttagatactgcaaaaaccgaactagaacaagctcgtcgcgcgggtgatttagcgaaaatgtctgagttgcaatatggccgcatccctgatcttgaaaagcaacttgagcaagctgaaaccagcgaaggaaaagaaatgacgcttttacgctatcgcgtcacagatgaagaaatcgcagaagtgctttctaaagccacaggcattcctgtatcaaaaatgatggaaggcgagaaagaaaaactcttgcgtatggaagatgaactacataaacgagtgattggtcaagaagaagcggttgatgcggtagcaaacgcgattcgtcgtagtcgtgcaggtctttccgatcctaatcgcccaattggttctttcttgttcctagggccaacaggtgttgggaaaacagagctttgcaaaactttggctaaattcttgtttgatagtgaagatgcgatggtgcgtattgatatgtcagagtttatggaaaaacacagtgtttctcgtttagttggtgcgcctccaggctatgtcggctatgaagaaggcggttatttaactgaagctgttcgtcgtcgtccatattcagtgatcttattagatgaagttgaaaaagcacacgcagatgtattcaatatcttattacaagtgttggatgatggtcgtttaactgatggtcaaggtcgtactgtggacttccgtaacactgtggttattatgacctctaacttgggttctgatttaatccaaggtaataaagacgaaagctatagcgaaatgaaagccttagtgatgtcagtggtaagccaacatttccgcccagaattcatcaaccgtattgacgaaaccgtggtattccatccacttggtaaagaaaatatccgtgcgattgcaagtatccaattagaacgcttagcaaaacgtatggaaactcgtggatacgaattggtgtttaccgatgctttattagacttcattggcgaagtgggatacgacccaatttatggtgcacgtccattgaaacgtgctattcaacaagaaattgaaaacagcttggcacaacaaattctatctggtgcgttattacctggtaaggttgttaccattgattatgccaacgcagaagttcaagcgagacaatag

SEQ ID NO: 33937 - protein, 856 aa, Haemophilus influenzae
MNIEKFTTKFQEALSERQSLAIGKDNQFIEPVHLLTALLNQQGGSIAPILTASGVNVALLRNELKTELNKLPQVIGNGGDVQLSRQLINLLNLCDKFAQQNQDKFISSELFLFAALEERGTISDILKKCGAKKEQISQAIQHIRGGQNVNDQNAEESRQALEKYTIDLTARAESGKLDPVIGRDEEIRRAIQVLQRRTKNNPVLIGEPGVGKTAIVEGLAQRIVNGEVPEGLKNKRVLSLDMGALIAGAKYRGEFEERLKAVLNELSKEEGRVILFIDEIHTMVGAGKTDGAMDAGNLLKPSLARGELHCVGATTLDEYRQYIEKDAALERRFQKVFVDEPSVEDTIAILRGLKERYEIHHHVDITDPAIVAAATLSHRYISDRQLPDKAIDLIDEAASSIRMEIDSKPEPLDRLERRIIQLKLEQQALQKEEDEASRKRLEMLEKELAEKEREYAELEEVWKSEKATLSGSQHIKQELDTAKTELEQARRAGDLAKMSELQYGRIPDLEKQLEQAETSEGKEMTLLRYRVTDEEIAEVLSKATGIPVSKMMEGEKEKLLRMEDELHKRVIGQEEAVDAVANAIRRSRAGLSDPNRPIGSFLFLGPTGVGKTELCKTLAKFLFDSEDAMVRIDMSEFMEKHSVSRLVGAPPGYVGYEEGGYLTEAVRRRPYSVILLDEVEKAHADVFNILLQVLDDGRLTDGQGRTVDFRNTVVIMTSNLGSDLIQGNKDESYSEMKALVMSVVSQHFRPEFINRIDETVVFHPLGKENIRAIASIQLERLAKRMETRGYELVFTDALLDFIGEVGYDPIYGARPLKRAIQQEIENSLAQQILSGALLPGKVVTIDYANAEVQARQ

SEQ ID NO: 33938 - DNA, 2604 bp, Lactobacillus plantarum
  CDS (1)..(2604): transl_table=11
atgaatccagaacaatttacagaaagtttacaacaagccttacaacaggcacaacaaatcgcacaaacacggcgccatcaagaaattggggtgccccatctatttaagtttttaacgcaaccaggcgaactggttcggcagatctttagtgaggccggcgctgatttagaccaattacaaacagagctcgaccgtgagctggatgacattgccgttgttagcggtggtaacgttcagtacggtggcagtatgagcagtagtctagctacgctgatgcaggctgccgatgctaagcgcaaagcgttaggtgatgattaccttgcgaccgacactttggctttagcgctgatggatcaaactggtgatcagttgaccaaatacttgaatcagcaaggcatcacggcaggacaagtcaagaatgccgttgatcgtattcgcgggggccaacgggtcacgtcacgtaatcaggaagatcagtatcaagctttggaaaagtacggcgtcgacttggttaagcaggcgcgccaggggaatcaagatccagtaattggccgggacgaagagattctggatgttattcggatcttgtcacgaaagacgaaaaataatcctgtcttgattggtgaaccgggagttgggaaaactgccatcgtggaaggcctagcgcaacgaattgttcgtggtgatgtgccggagaacttaaaagataagacgttgttctcgctagatatggggtccctgattgccggggcgaagtatcgtggtgaatttgaagaacgactcaaagccgtcctcaaggaaatcaagaagagcgatgggcagatcatcatgttcatcgatgaaatccataatatcgttggtgctggtaagacagaaggcagtatggacgccggtaacttgttgaaaccaatgttggcgcggggagaacttcatttgatcggggccacgacgttagatgaatatcgtcagtacatggaaaaggacaaggcgctcgagcggcggttccaaaaagtattggttgctgaaccgagtgttgaagatacaattagtattttacgtggcttaaaggaacgctttgaaatccatcatggtgttcggattcatgataacgccttagtggccgctgccaagttatctgatcgttatattacggatcgttacttgccagataaggccttagatttagtagatgaggcttctgctgaaattcgggtcgaaatgaactccaacccaacggaattagaccaagtcaaccgacaattaatgcgtttagaggtcgaggaagccgccttaaagaaggaaactgacgatgcctccgttaaacggctagcggatgtacaaaaagaactcgccagcgcaaaggaaaaacagcggactttatccgaacgctgggacagtgaaaagaagagtctccaagcgttaagcgacaaaaagtcggcgttagacaaagctaagcacgacttggaaaatgctgaaaataattatgatctggaacaagcagctaagttgcagcacgggacgattccaaagctggaacaagagttgaaggccatggaagccaatgatcatcatgaagattggttagttgaggaatccgtcacgccagatcagattgcaaacgtggtttcccggatgacaggaatcccagtagccaaactggttgccggtgagcgggagaaattattacacttggcggaccatttgcatgaacgagtggttggtcaggatgcggcggtcgatgccgtttcggatgccgtattacgttcgcgggccggtttgcaagatcctaatcgtcccctgggttcttttatgtttttaggcccaactggggttggtaagacggaattagcgaaagcattggctgagaatttgtttgacgccgatgatcatatggttcggatcgatatgagtgaatatatggagaaagagtccgtttcgcgattggtcggggcggcaccgggctacgttggttacgaagaaggcggtcagttgaccgaagctgtccggcgtaatccgtactcgatcgtgttattcgatgaaattgaaaaggcgcatccagatgtgtttaacatcttgttacaagtattggatgacggtcggttgacggatggtcaaggacggaccgtcgacttcaaaaataccatcttgattatgacgtcgaacttaggatcagagttgctactggcgggggttgatgaccagggtcacttgtcggccgacacccatcaacaggttatgcagctggttcaaagtcgattcaaaccggaatttttgaaccgaatcgatgacatcattatgttcacgccactacaattgggcgcgattgaggaaattgtggtgaaattgattgatcggttgtctgcccgtctccaagatcgtgagattacactgaaaatttctgacgaagcgaagaagtggatcgctaagcaggggtatgaaccggcatacggtgcccggccgctccggcgctttatcacgaatcacgtcgaaacaccgctggcaaaagagatcattgcggggcgcgtggcaccaaaatcgacagtcgccattaatttgatggacgatcacttagtcttcgaaaaccaatcgacccagccggcataa

SEQ ID NO: 33939 - protein, 867 aa, Lactobacillus plantarum
MNPEQFTESLQQALQQAQQIAQTRRHQEIGVPHLFKFLTQPGELVRQIFSEAGADLDQLQTELDRELDDIAVVSGGNVQYGGSMSSSLATLMQAADAKRKALGDDYLATDTLALALMDQTGDQLTKYLNQQGITAGQVKNAVDRIRGGQRVTSRNQEDQYQALEKYGVDLVKQARQGNQDPVIGRDEEILDVIRILSRKTKNNPVLIGEPGVGKTAIVEGLAQRIVRGDVPENLKDKTLFSLDMGSLIAGAKYRGEFEERLKAVLKEIKKSDGQIIMFIDEIHNIVGAGKTEGSMDAGNLLKPMLARGELHLIGATTLDEYRQYMEKDKALERRFQKVLVAEPSVEDTISILRGLKERFEIHHGVRIHDNALVAAAKLSDRYITDRYLPDKALDLVDEASAEIRVEMNSNPTELDQVNRQLMRLEVEEAALKKETDDASVKRLADVQKELASAKEKQRTLSERWDSEKKSLQALSDKKSALDKAKHDLENAENNYDLEQAAKLQHGTIPKLEQELKAMEANDHHEDWLVEESVTPDQIANVVSRMTGIPVAKLVAGEREKLLHLADHLHERVVGQDAAVDAVSDAVLRSRAGLQDPNRPLGSFMFLGPTGVGKTELAKALAENLFDADDHMVRIDMSEYMEKESVSRLVGAAPGYVGYEEGGQLTEAVRRNPYSIVLFDEIEKAHPDVFNILLQVLDDGRLTDGQGRTVDFKNTILIMTSNLGSELLLAGVDDQGHLSADTHQQVMQLVQSRFKPEFLNRIDDIIMFTPLQLGAIEEIVVKLIDRLSARLQDREITLKISDEAKKWIAKQGYEPAYGARPLRRFITNHVETPLAKEIIAGRVAPKSTVAINLMDDHLVFENQSTQPA

SEQ ID NO: 33940 - DNA, 2601 bp, Listeria monocytogenes serotype 4b
  CDS (1)..(2601): transl_table=11
atggatttacaaaaatttacgcaacaagtccagcaaacaattgcggacgctcaaaatttagcaattgcatccgaacatcaagaaatcgacgtcgctcatgtttttaaagtgttattaacagagagtgattttgccaaacgtgtatatgatgtagcagaagtagatatagatgcacttcaaaaaacagtagaagatgctttaacaaaaattcctgtggtctctggaagcggtgtaaactatggtcaagcaatgagccaagcactttttcagttgatgcgggatgccgaaaaagaacaaaaacaattagacgatgattttgtatcaacagaacatctaatcttagctgtcatggatcaaaaatcaaatccaataacaatgaatctaaaaaaacaacataaatctaaaaaacaaattcaagaagctattttaaaaatcagaggagggaaaaaagtgacttctcaaaatgcagaagaaaactatgaagccttaacaaaatatggacgtgatttagtcgcggaagttagaagtggtaaactcgatccagtaatcggacgcgatgcagaaattcgtaacgttatccgaattttatctagaaaaacaaaaaataatccagttctgataggtgaaccaggcgttggtaaaacagccattgtcgaaggtttagcacaacgaatcgttcgaaaagacgttccagaagggctgaaagataaaacgattatctcgcttgatatcggttcccttattgctggagctaaatatcgcggtgaatttgaagaacgtttgaaagcagtacttcaagaagtgaaacaaagtgacggtcaaattttactatttattgatgaaattcatacgattgtcggcgcaggtaaaacagatggcgcaatggacgccggaaatatgttaaaaccgatgcttgcccgcggtgaactacactgtatcggcgcaactacgttagatgaataccgccaatatattgaaaaagatgccgcactcgaaagacgtttccaaaaagtacttgtcccagaaccaacagtggaagatacagtatccattttacgtgggttaaaagaacgctttgaaattcatcatggggtaaatattcatgataatgctttagttgcagcagcgagtctttctaatcgttatattacggaccgcttcttaccagataaagcaatcgacttagtagatgaagcatgcgcaactattcgtgtcgaaattgactcgatgccaagtgaactcgacgaagtaacgagaaaagtaatgcaattagaaattgaggaagcggctttaaaagaagaaaaagatccagcgagtgaacgccgtttagaaatattgcaacgcgaactagctgactacaaagaagaagccaatcaaatgaaatcgaaatgggaatctgagaaaaacgaaattagtaaaattcgtgaggtccgagaacaaatcgatcatttgcgtcacgaattagaagaagcagaaaataattatgatttaaataaagcagcagaattacgacacggtaaaatcccggctgtggaaaaagaattactagagttagaagcagaaaatcgcgaaaaaactgcacaagaagaccggattttacaagaagaagtaacagaaaatgaaattgcagaaatcgtcggacgttggacaggaattccagtgaccaagttagtagaaggagaacgcgaaaaactgcttaaattagcagatgaacttcatcaaaaagtaattggtcaagatgacgctgttcaattagttagtgatgctgtacttcgtgcacgcgctggtattaaagatccgaaacgcccaattggctcattcattttcttagggccaacaggtgtgggtaaaacagaacttgccaaagcactcgcatttaatatgtttgattcagaagatcatatgattcgaattgatatgtctgaatacatggagaaacattccgtatcaagacttgtcggagctcctccaggctatgttggctatgaagaaggcggtcaacttactgaagctgtaagacgaaatccttattcaatcgtcctacttgatgaaatagaaaaagctcatccagatgtatttaacatactattacaagtacttgatgatggacgtatcacggattcgcaaggccgattaatcgattttaaaaatacagtaattattatgacgtcaaatattggctctaatttattacttgaaagaaccgaagaaggcgaaatttcaccggaattagaatcggatgtaatgcaaattttacaaagtgaattcaaaccggaattcttaaaccgcgtagatgatattattctatttaaaccactaacactagctgatattaaaggcattgtggagaaattagtagaagaacttcaaatccgtttagccgaccaagaaattacgattactatttccgataatgcaaaagcatttattgcggaagaagcatatgatccggtatatggcgcacgaccacttaaacgctatattgtgcgtcatgttgaaacgccacttgctagagaaattgtatcaggtaaaatcatgccacattcatctgtagaaattgatttagcagataaagaatttacttttaaagtcacagaataa

SEQ ID NO: 33941 - protein, 866 aa, Listeria monocytogenes serotype 4b
MDLQKFTQQVQQTIADAQNLAIASEHQEIDVAHVFKVLLTESDFAKRVYDVAEVDIDALQKTVEDALTKIPVVSGSGVNYGQAMSQALFQLMRDAEKEQKQLDDDFVSTEHLILAVMDQKSNPITMNLKKQHKSKKQIQEAILKIRGGKKVTSQNAEENYEALTKYGRDLVAEVRSGKLDPVIGRDAEIRNVIRILSRKTKNNPVLIGEPGVGKTAIVEGLAQRIVRKDVPEGLKDKTIISLDIGSLIAGAKYRGEFEERLKAVLQEVKQSDGQILLFIDEIHTIVGAGKTDGAMDAGNMLKPMLARGELHCIGATTLDEYRQYIEKDAALERRFQKVLVPEPTVEDTVSILRGLKERFEIHHGVNIHDNALVAAASLSNRYITDRFLPDKAIDLVDEACATIRVEIDSMPSELDEVTRKVMQLEIEEAALKEEKDPASERRLEILQRELADYKEEANQMKSKWESEKNEISKIREVREQIDHLRHELEEAENNYDLNKAAELRHGKIPAVEKELLELEAENREKTAQEDRILQEEVTENEIAEIVGRWTGIPVTKLVEGEREKLLKLADELHQKVIGQDDAVQLVSDAVLRARAGIKDPKRPIGSFIFLGPTGVGKTELAKALAFNMFDSEDHMIRIDMSEYMEKHSVSRLVGAPPGYVGYEEGGQLTEAVRRNPYSIVLLDEIEKAHPDVFNILLQVLDDGRITDSQGRLIDFKNTVIIMTSNIGSNLLLERTEEGEISPELESDVMQILQSEFKPEFLNRVDDIILFKPLTLADIKGIVEKLVEELQIRLADQEITITISDNAKAFIAEEAYDPVYGARPLKRYIVRHVETPLAREIVSGKIMPHSSVEIDLADKEFTFKVTE

SEQ ID NO: 33942 - DNA, 2592 bp, Nitrosomonas europaea
  CDS (1)..(2592): transl_table=11
atgcggtttgacaaattcaccaccaagtttcaacaggcactcgccgatgcgcaaagcatggcgctgggtcaggatcatccctatatcgaaccgcagcatctgctgctcgccctgatgcagcaggatgacggcagcatcacttctctgctgcagcgcgccggtgtgaatgcccaaccattgcgccaagcactgacgcaaagcctcaaacttctgcctaaagtggaaggtacgggcggagaaatcaatgtttcccgcgatctggccaatctgctcaatctgacggacaaggaagcgcagaaaagaggagatcagtacatcgcctcggaaatgttcctgctggcagcgctggaagacaaaggagaaaccggacgattgctgaaacaatatggagcgacacgtgctgcgctggaacaggcggtcgattccgtgcgtggcggagaaaaggtgaccgatgccgaagcagaaggcagtcgtgaagcattgaagaaatacacattggatctgactgagcgtgctcggtcaggcaagctcgatcccgtgatcggacgcgatgatgaaatccggcgcacgattcaggtgctgcagcggcgcaccaaaaataacccggtcctgattggcgagcccggggtcgggaaaacggcaatcgtggaaggattggcacagcgcatcgtcaacggggaagtacctgaaacactgaaaaacaagcgggtgctgtcactggatatggcagcgctgctggcaggtgccaaataccgcggagaattcgaggaacgattgaaagccgtgctgaaagaattggcgcaggatgaaggccgcaccatcgtgttcatcgatgaactgcatacgatggtgggagccggcaaggcggaaggtgccatggatgcgggcaacatgctcaaaccggcgctggcacgcggagaactgcactgcgtaggcgcaaccacactggatgaatatcgcaaatatgttgaaaaggacgccgcactggaacgccgtttccagaaagtgctggtggatgagcccggcgttgaagcaacgattgccattctgcgcggtctgcaggagaaatatgaattgcaccacggcgtggaaatcaccgatccggctatcgtggcagcagccgaactctcccatcgctatatcactgaccgctttctgccggacaaagccatcgatctgattgacgaagctgcagcacgcattcgcatggagcaggattccaaaccggaagtcatggataagctcgaccggcgtctgatccagctgaaaatcgaacgtgaggctgtcaggaaagaaaaggatgatgcttctaaaaaacgcctggcattgcttgaagaagaaatcagcaaactggaacgggaatatgctgatctggatgaaatactgaaagcagagaagtcccgtgcaaaaggctcacaggaaatcaaggaagaactggataaactacgccgtgaagaggaagctgcccgacgcaagggagatctgcagagagcttctgaattactgtatggccgtattccgcaattggaagcacagcttgccgaacagctccatcacgccgaatcggccgaggaagctgtacaaccaaagttattccgtacccaggtaggtgccgaagaaatcgccgaagtcgtttcgcgtgcaaccggcattccggtttccaagatgatgcagggtgagcgtgagaaattgctgttcatggaagacaagttgcatgaacgtgtcatcggccaggatgaagccgtccgcctggtttccgatgcaatccgccgctcacgctccgggcttgctgatcccaatcgcccgtatgggtctttcctgtttctggggccgaccggggtgggcaagaccgagctgtgcaaagcactggcaggatttctgttcgattccgaggaacacctgatccgggtagatatgtccgaattcatggagaaacattcggtcgcacgcctgatcggtgcgccaccgggatatgtcggctatgaggagggcggttatctgactgaacaggtgcggcgcaaaccctattccgtcattttgctcgatgaagtggaaaaagcgcatccggatgtattcaatgtcctgctgcaggtgctggatgacggacggatgacggatggtcagggccgtaccgtggatttcaagaatacggttatcgtcatgacttccaacctgggttcacaaatgatccagcaaatgagcggagacgattaccaggtcatcaaactggcagtgatgggagaggttaaaacctatttccggcctgaattcatcaatcgtatcgacgaagtagtcgttttccatgcactgggtgaagcgcatatcaaatcgattgcccggattcagctgagcaacctgggcaaaagactggcacaaatggaaatgaaactggtagtttcagaaccggcactgaccaaactggccgaagtcgggttcgatccggtattcggtgcacggccgctgaaacgagccattcaggctcagatcgaaaatccgttggcgaaagagctgctggaaggccatttttctgccggagatactattctggtggaatacagtaacggccacatgcaatttaccgcacaacgttaa

SEQ ID NO: 33943 - protein, 863 aa, Nitrosomonas europaea
MRFDKFTTKFQQALADAQSMALGQDHPYIEPQHLLLALMQQDDGSITSLLQRAGVNAQPLRQALTQSLKLLPKVEGTGGEINVSRDLANLLNLTDKEAQKRGDQYIASEMFLLAALEDKGETGRLLKQYGATRAALEQAVDSVRGGEKVTDAEAEGSREALKKYTLDLTERARSGKLDPVIGRDDEIRRTIQVLQRRTKNNPVLIGEPGVGKTAIVEGLAQRIVNGEVPETLKNKRVLSLDMAALLAGAKYRGEFEERLKAVLKELAQDEGRTIVFIDELHTMVGAGKAEGAMDAGNMLKPALARGELHCVGATTLDEYRKYVEKDAALERRFQKVLVDEPGVEATIAILRGLQEKYELHHGVEITDPAIVAAAELSHRYITDRFLPDKAIDLIDEAAARIRMEQDSKPEVMDKLDRRLIQLKIEREAVRKEKDDASKKRLALLEEEISKLEREYADLDEILKAEKSRAKGSQEIKEELDKLRREEEAARRKGDLQRASELLYGRIPQLEAQLAEQLHHAESAEEAVQPKLFRTQVGAEEIAEVVSRATGIPVSKMMQGEREKLLFMEDKLHERVIGQDEAVRLVSDAIRRSRSGLADPNRPYGSFLFLGPTGVGKTELCKALAGFLFDSEEHLIRVDMSEFMEKHSVARLIGAPPGYVGYEEGGYLTEQVRRKPYSVILLDEVEKAHPDVFNVLLQVLDDGRMTDGQGRTVDFKNTVIVMTSNLGSQMIQQMSGDDYQVIKLAVMGEVKTYFRPEFINRIDEVVVFHALGEAHIKSIARIQLSNLGKRLAQMEMKLVVSEPALTKLAEVGFDPVFGARPLKRAIQAQIENPLAKELLEGHFSAGDTILVEYSNGHMQFTAQR

SEQ ID NO: 33944 - DNA, 2430 bp, Oceanobacillus iheyensis
  CDS (1)..(2430): transl_table=11
atgatgtttggacgctttacagaaagagcacaaaaagtactcgcactatcacaggaagaagcagtacgtttaggacataataacattggtacagaacacattttgctaggacttgtacgagaaggagaaggaattgcagcaaaagctctacaatctctaggtctagaagtatccaaaatacaagaagaagtagagaaattaatcggagtaggaaaacaacctacacaatcgattcactatacacctcgtgccaaaaaagtagttgaactttctcaagatgaagcacgaaaactaggtcactcttatgtaggtacagagcatattctacttggattgattagagaaggagaaggagtagctgctagagtacttaataatctaggtgtaagtcttaataaagcaagacaacaagttctccaactactaggtagcaatgaatcacaagctggtcgtcaagggcgttcaggacaacagtcaaatgcaagcacaccaacattggattcattagctcgagatttaacagttagtgccaaagagggcaaaattgacccagtaattggtcgctctaaagaaattgaacgagtgattcaagtgcttagccgtcgtacaaagaacaatcctgttttgataggggaacctggtgtaggtaaaacggctgtcgccgaaggacttgcacaacaaattatagacaatgaagttccagaaaccttacgtgataaacgagtaatgacattagacatggggacagttgttgccggtacaaaatatcgtggtgaattcgaagaccgcttgaagaaagtaatggaagaaattcgccaggcaggtaatattattctattcattgatgagttacacacgcttatcggagctggaggagcagaaggggctattgatgcttcaaacatcctcaaaccatctcttgcacgtggagaattacaatgtattggtgcaactacacttgatgaatatcggaaatatattgaaaaagacgctgcattagaacgacgtttccaaccaattcaagtagatgaaccaacattggaagaaaccattcaaattctaaatggattacgtgatcgttatgaagcgcatcaccgtgtaaccattactgacgaagcgatcgaagcagcagcttcactatctgatcgttatattaccgatcgattcttgccagataaagcgattgacttaatcgacgaagcaggatcaaaagtaaggttacgctcttatactgttccaccaaacttaaaagagttggaacagaaactagatgaagttcgtaaagaaaaagacgcggcggtacaaagccaagaatttgaaaaagctgcatctttacgagattcggagcaacgtttccgcgaagaattagaaacaacgaaaaatcaatggaaagaaaaacaagggcaaacagattcagaagttaccatggaagatattgctgcagttgtgtctacatggacgggagtacctgtttctaaattaacaaaagatgaaactgatcgacttctaaatatggaaaaaatccttcatgaccgcgttatcgggcagtcggaagcggttaatgcagttgctaaagcaatacgacgtgctcgtgcaggtttaaaagatccaaaacgtccaattggttcgtttattttcttaggaccaacgggtgtaggtaaaacggaacttgctcgtgcgttagcagaagtaatgtttgcagatgaagatgcgatgatccgtattgatatgtctgagtatatggagagacatgcaacttcacgcttggttggttcaccaccaggatatgttggatacgacgaaggtggacaattaactgaaaaagttcgtcgtaagccttactctgttgttctattagatgaggtggaaaaagcacatccagaagtatttaatattcttttacaagtgctagaagatggtcgcttaactgattcaaaaggaagagtggttgatttccgtaatacagttatcatcatgacgtccaatgttggggcaagcgaattaaaacgtaataaatatgttggtttcgctttagataatgaggaaaaagactataaagatatgaaatcaaaagtgatcgaagaattgaagaaagctttccgtccagagtttttaaatcgtattgatgaaacaattgtcttccattctttagaaaaagagcatatgaaagatattgtgacattgatggtacaacaattacaaaaacgactaaaagaacaagaccttcacctatcattaacagataaggcgattgaaaaaatagctaatgaaggcttcgatccagaatacggtgctcgacctttacgtcgatccattcaaaaaaatatcgaagacttattgtcagaagagctattaagaggagccattgaaaaagagcaacaggttaaaattggtttaaataataaaggtgaatttattgttttaccatag

SEQ ID NO: 33945 - protein, 809 aa, Oceanobacillus iheyensis
MMFGRFTERAQKVLALSQEEAVRLGHNNIGTEHILLGLVREGEGIAAKALQSLGLEVSKIQEEVEKLIGVGKQPTQSIHYTPRAKKVVELSQDEARKLGHSYVGTEHILLGLIREGEGVAARVLNNLGVSLNKARQQVLQLLGSNESQAGRQGRSGQQSNASTPTLDSLARDLTVSAKEGKIDPVIGRSKEIERVIQVLSRRTKNNPVLIGEPGVGKTAVAEGLAQQIIDNEVPETLRDKRVMTLDMGTVVAGTKYRGEFEDRLKKVMEEIRQAGNIILFIDELHTLIGAGGAEGAIDASNILKPSLARGELQCIGATTLDEYRKYIEKDAALERRFQPIQVDEPTLEETIQILNGLRDRYEAHHRVTITDEAIEAAASLSDRYITDRFLPDKAIDLIDEAGSKVRLRSYTVPPNLKELEQKLDEVRKEKDAAVQSQEFEKAASLRDSEQRFREELETTKNQWKEKQGQTDSEVTMEDIAAVVSTWTGVPVSKLTKDETDRLLNMEKILHDRVIGQSEAVNAVAKAIRRARAGLKDPKRPIGSFIFLGPTGVGKTELARALAEVMFADEDAMIRIDMSEYMERHATSRLVGSPPGYVGYDEGGQLTEKVRRKPYSVVLLDEVEKAHPEVFNILLQVLEDGRLTDSKGRVVDFRNTVIIMTSNVGASELKRNKYVGFALDNEEKDYKDMKSKVIEELKKAFRPEFLNRIDETIVFHSLEKEHMKDIVTLMVQQLQKRLKEQDLHLSLTDKAIEKIANEGFDPEYGARPLRRSIQKNIEDLLSEELLRGAIEKEQQVKIGLNNKGEFIVLP

SEQ ID NO: 33946 - DNA, 2568 bp, Pasteurella multocida
  CDS (1)..(2568): transl_table=11
atgaatatcgaaaaatttacgacaaaatttcaacaagcactgcaagaggcgcaatctttagccattggcaaagataaccaatttattgaacccgtccatttactcaccgccttgttaaatcaacaaggtggttccactgcgccaattttaacagcaagtggggcaaacttaccgctcttgcgtaatgaattaaatgccgagctcagtaaattaccacaagtgtcaggcagcggtggtgatgtacaagtttcacggagtttagtgaatctattaaacttgtgcgacaagttagcacagcaacgccaagataaatttatttcctctgaattgtttttactggcagcgttagaagacaaaacacttggtgatgtgttgaaaaagtgcggtgtgaaaaaagaaaatttacaacaggcaatagagaaagtccgtggcggacaaaatgtgaatgatccaaatgcggaagaaagtcgccaagcgttagaaaaatatacgattgatttaaccgcgcgtgcagaaagcggcaaacttgaccccgtgattgggcgtgatgaagaaattcgtcgtgccattcaagtattacaacgccgtaccaaaaacaacccagtgttaatcggtgaaccgggcgtggggaaaactgcgattgtcgaagggctggcgcaacgcattgttaatggtgaagtacccgaaggcttgaaaaataagcgcgttctgtctttagatatgggggcattgattgccggtgcaaaataccgtggtgaatttgaagaacgtttaaaagcggtgttaaatgaactgtcaaaagaagaaggacgcgtgattctctttattgatgaaattcacaccatggtgggggcagggaaaaccgatggcgcgatggatgccggtaacttgctcaaaccaagcttagcccgtggggaattacactgcgtgggggcgacaacactagatgaatatcgtcaatacatagagaaagatgccgcccttgagcgtcgtttccaaaaagtgtttgttggtgagccaacggtggaagataccattgcgatcttacgtgggttaaaagaacgttacgaaatccaccaccatgttcaaattactgaccctgcgattgtggcggcagcgaccctttctcatcgttatgtatctgatcgtcagctacctgataaagcgattgatttaattgatgaagcagcatcgagcattcgtatggaaattgactctaaacctcagccgttagatcgtttagagcgccgtatcattcaattaaaattagagcaacaagcgctacaaaaagaagatgatgatgcgagtcgtaaacgtttagcaatgcttgaaaaagaattaggtgaaaaagaacgtgaatatgcagaattagaagatgtttggaaagctgaaaaagccgccctttcaggtacacagcatattaaagcggagctagacagtgccaaaacacaaatggaacaagctcgccgtgccagtgacttcgcaaaaatgtcggaattacaatacggagtgatccccgcgctagaaaaacaattggcgcaagcagaatccgctgaaggcaaagaaatgactttactgcgctatcgtgtgaccgacgaggaaattgccgaagtgctttcgcgtgcaactggtattcctgtggcgaagatgatggaaggggaaaaagaaaaactcttacgtatggaagaagaattgcacaaacgagtgattggtcaacatgaagccattgaagcagtatcgaatgcaattcgccgtagccgtgccgggttatccgatccaaatcgtccaattggatcgttcttgttcttaggtccaaccggggtcgggaaaacagaactttgtaaaacccttgccaatttcctgtttgatgacgaaaacgcgatggtgcgtattgatatgtcagaatttatggaaaaacacagtgtttcacgcttagtgggcgcccctccgggttatgtgggttacgaagaaggaggctatttaaccgaagccgttcgtcgtcgcccttattccgtgatcttgcttgatgaagtggaaaaagcacaccatgatgtgtttaacattttattacaagtgttagatgatggacgcttaactgatggacaagggcgcactgtggatttccgcaatactgtagtaatcatgacatctaacttaggctcacacttgatccaagaaaacagtacattggattacccaagtatgaaagagttagtgatgtctgtggtgggacaacatttccgcccagaatttatcaaccgtattgatgaaaccgtcgtcttccacccattaggtaaagaaaacattcgtgagattgcgacaatccaacttgctcgcttaatcaaacgtatggaaagccatggttatcaattacacttcaccgatgcttgcttagacttcattggcgaagtaggttacgatccggtgtatggcgcacgtccgttaaaacgtgcaattcaacaagaaattgagaacccgttggcacaacaaattctgtcaggcaaattattaccgaatcaattagtcaccattgactatgttgacggaaaagtgattgccaatcagtaa

SEQ ID NO: 33947 - protein, 855 aa, Pasteurella multocida
MNIEKFTTKFQQALQEAQSLAIGKDNQFIEPVHLLTALLNQQGGSTAPILTASGANLPLLRNELNAELSKLPQVSGSGGDVQVSRSLVNLLNLCDKLAQQRQDKFISSELFLLAALEDKTLGDVLKKCGVKKENLQQAIEKVRGGQNVNDPNAEESRQALEKYTIDLTARAESGKLDPVIGRDEEIRRAIQVLQRRTKNNPVLIGEPGVGKTAIVEGLAQRIVNGEVPEGLKNKRVLSLDMGALIAGAKYRGEFEERLKAVLNELSKEEGRVILFIDEIHTMVGAGKTDGAMDAGNLLKPSLARGELHCVGATTLDEYRQYIEKDAALERRFQKVFVGEPTVEDTIAILRGLKERYEIHHHVQITDPAIVAAATLSHRYVSDRQLPDKAIDLIDEAASSIRMEIDSKPQPLDRLERRIIQLKLEQQALQKEDDDASRKRLAMLEKELGEKEREYAELEDVWKAEKAALSGTQHIKAELDSAKTQMEQARRASDFAKMSELQYGVIPALEKQLAQAESAEGKEMTLLRYRVTDEEIAEVLSRATGIPVAKMMEGEKEKLLRMEEELHKRVIGQHEAIEAVSNAIRRSRAGLSDPNRPIGSFLFLGPTGVGKTELCKTLANFLFDDENAMVRIDMSEFMEKHSVSRLVGAPPGYVGYEEGGYLTEAVRRRPYSVILLDEVEKAHHDVFNILLQVLDDGRLTDGQGRTVDFRNTVVIMTSNLGSHLIQENSTLDYPSMKELVMSVVGQHFRPEFINRIDETVVFHPLGKENIREIATIQLARLIKRMESHGYQLHFTDACLDFIGEVGYDPVYGARPLKRAIQQEIENPLAQQILSGKLLPNQLVTIDYVDGKVIANQ

SEQ ID NO: 33948 - DNA, 2652 bp, Plectonema boryanum
  CDS (31)..(2652): transl_table=11
  misc_feature (311)..(311): n is a, g, c or t
atgcacgatcgacatagaagggggaacacgatgcagccgaccaactcagaaaaatttaccgaaaaagtctgggaagcaatctaccgaactcaagagatgtataaacaggcgcaacaacagcagatcgagacggagcatctgatgaaagctctgctcgaacaagatggcttagcaatcagcatcttcaacaaactcgctgtccccgtcgatcgagtgcgcgatcgtaccgatgattttattcgtcgtcagcccaaagtttctggaagtggaacctcggtatactgggggcgccgcgccgatgccttgctcgntcgggctgaagaatatcgcaagcaattcgaggacagctttatctcgatcgaacatcttttgctaggttacgcccaagatagtcggttcggaaaagcattgctgtcagaatttagataccccgatgaagcaaaattaagaaacgcgatcgaacaagttcggggaaatcaaaaagtgaccgaccagactcctgaaaacaaatacgaatccctagaaaaatacgggcgtgatttgacccagtatgctcgcgaagggaaactcgatccggtcattggacgagacgacgaaatccgacgcacgatccagatcttgtcccgtcgcaccaaaaacaatccggttttgatcggtgaacccggtgttggtaaaaccgcgatcgctgaaggtcttgctcagcgaattctcagtggagatgtcccgcaatccctaaaagaccgcaaactgatcgccctagatatgggcgcactgattgcaggtgcaaaataccgaggcgaatttgaggaacgcttgaaagccgttctcaaagaagtcaccgattctcgtggcaacatcattctgtttatcgacgaaattcataccgtggttggtgcaggtgcaactcaaggcgcgatggatgccggaaacctgctgaagccgatgctggcacgaggcgagttgcgctgtatcggtgcaacgaccttagacgaatatcgcaaatacatcgagaaagatgcagccttagagcggcgcttccagcaagtcttcgtcgatcagccgagtgttgaagacacgatctcgattctgcgcggactaaaagagcggtacgaagttcaccacggggtgaaaatctccgactctgcgttagttgctgctgcaaccctttcgactcgatatatcagcgatcgcttccttcccagcaaagcgatcgacctcgtagacgaagcggctgccaaactcaaaatggagattacgtcgaagccagaagaactcgatgaagtcgatcgtaaagttctccagcttgagatggaacgactttcgttgcagaaagagaacgatgcaggatctcgcgatcgcttagaacgattagagcgtgaacttgccgatttcaaagaagatcagtccaagttaaatgctcaatggcaagccgagaaaagcgtcatcacagatcttcagaagctcaaagaagaaatcgatcgagtcaaccttgaaatccagcaagccgaacgcgattacgatctcaaccgcgcggctgaactgaagtacggcaagctcaacgaactcaatcgtaaagttgaagaaacggaatcccaactgtctcaaatacagaaatcgggagcgacgctgctccgtgaagaagttcttgaatcagacattgctgaaatcatttccaaatggacgggtatccccgttagtaaactcgttgaatctgaaatgcaaaagctcttgcagcttgacgatgttttacatcagcgcgtgattggacaagacgaagcggtgacggcagtttccgatgcaattcagcgatcgagagccggactttctgatccaaatcgtccaacggctagcttcattttcttaggaccaacaggagttggtaaaactgagcttgcaaaagcactcgctgctttcttattcgacaccgaagaagcaatggttcggatcgacatgtccgaatacatggagaagcattctgtttctcgcttaattggtgcgcctcctggatatgtcggctatgaagaaggcggacaactcacggaagcggttcgtcgtcgtccttactcggtgattctgtttgatgaaatcgagaaagcccatcccgatgtcttcaatgtgatgctgcaaattctcgatgatggtcgcgtgacagactcccaaggtcgcaccgtagatttcaagaacacaattatcatcatgacctcgaacatcggttcgcagtacatctttgaatacggtggtgatgacgatcgctatgaggaaattctatcgagagtgatggaagcaatgctatcgaacttccgtcctgagttcttgaaccggattgatgagatcatcatcttccacagtctgcaaaaggctcaactccgcgagatcgtcaagattcaaacgcatcgcttagaaagtcgcttagcaaggaagatgtccctgaagctctccgatgcagcactcgatttcttagcagagggctttgatccagtttacggagcacgtccactgaagcgggcaattcagcgggagttggaaacaacgatcgccaaagaaattctacgcagcaacttcactgaaggcgatactatcttcgtcgatgtcggtgaaacggagcgcttagaattcaaacgcttgccttctgaagtgttgaccacgcaatag

SEQ ID NO: 33949 - protein, 873 aa, Plectonema boryanum
  misc_feature (94)..(94): The Xaa at location 94 stands for Ala, Asp, Gly, or Val.
MQPTNSEKFTEKVWEAIYRTQEMYKQAQQQQIETEHLMKALLEQDGLAISIFNKLAVPVDRVRDRTDDFIRRQPKVSGSGTSVYWGRRADALLXRAEEYRKQFEDSFISIEHLLLGYAQDSRFGKALLSEFRYPDEAKLRNAIEQVRGNQKVTDQTPENKYESLEKYGRDLTQYAREGKLDPVIGRDDEIRRTIQILSRRTKNNPVLIGEPGVGKTAIAEGLAQRILSGDVPQSLKDRKLIALDMGALIAGAKYRGEFEERLKAVLKEVTDSRGNIILFIDEIHTVVGAGATQGAMDAGNLLKPMLARGELRCIGATTLDEYRKYIEKDAALERRFQQVFVDQPSVEDTISILRGLKERYEVHHGVKISDSALVAAATLSTRYISDRFLPSKAIDLVDEAAAKLKMEITSKPEELDEVDRKVLQLEMERLSLQKENDAGSRDRLERLERELADFKEDQSKLNAQWQAEKSVITDLQKLKEEIDRVNLEIQQAERDYDLNRAAELKYGKLNELNRKVEETESQLSQIQKSGATLLREEVLESDIAEIISKWTGIPVSKLVESEMQKLLQLDDVLHQRVIGQDEAVTAVSDAIQRSRAGLSDPNRPTASFIFLGPTGVGKTELAKALAAFLFDTEEAMVRIDMSEYMEKHSVSRLIGAPPGYVGYEEGGQLTEAVRRRPYSVILFDEIEKAHPDVFNVMLQILDDGRVTDSQGRTVDFKNTIIIMTSNIGSQYIFEYGGDDDRYEEILSRVMEAMLSNFRPEFLNRIDEIIIFHSLQKAQLREIVKIQTHRLESRLARKMSLKLSDAALDFLAEGFDPVYGARPLKRAIQRELETTIAKEILRSNFTEGDTIFVDVGETERLEFKRLPSEVLTTQ

SEQ ID NO: 33950 - DNA, 2595 bp, Prochlorococcus marinus
  CDS (1)..(2595): transl_table=11
atggatataaaaactgacaatttcactgaagaatcatggtcttcaatacttcaagcacaatcaaatgcaaaaggatttcaccatcaatacatagaaactgagcatcttttaaaatccttaattcaagagaatgatcttgcaaaaagcattattaaaaaatgcaatggatcaatagatcaaattaaaatgcatttaaatgattttataaagaatcagcctaaattaaaagaacgtcctgaaaatttattcattggtaaacatcttcagaagacaataaatgaatcagatcaaataaagcagtcttttgacgatgactttatttctattgaacacttgttaattgctctctcaaaagatcaaagatgctgcaataaaatacttattcatgaaaaaatagaccctgaaatacttttaaaatcaatagcagaaatcagagggaatcaaaaggtgaccgatcaaaatccggaatcaaaatatgaatctcttaagaagtatggcagagatcttacttctgcagcccgagaaggaattctagatccagtaataggaagagatgacgaaattagaagaactattcaaatccttagtcgcagaactaaaaataaccctgtattaataggtgagcctggcgttgggaaaactgcaatagtggaaggcctcgcacaaagaattatcaatggtgatgtaccgtcggctctacaaaatcgtcaattaatcgctctggatatgggagctcttattgcaggtgcaaagtatcgaggagagtttgaagaaagattaaaggcagtcctaaaagaagtgacatcatcacaaggacaaattgtcctttttatagatgaaattcatacagttgttggagctggtgctacagggggcgcaatggatgcaagcaatctgcttaagccaatgctcgcaagaggggaattgcgctgcataggtgcaacaacaataaatgaacatcgccaacatattgagaaagatccagcattagaaagacgtttccaacaagtcttaataagcgaaccatccattgaagatacaatatcaattcttaggggattaaaagaaaaatatgaagttcaccatggagtaagaatatcggatagtgctttagttgcagcagctgtgctaagcaatagatatatatcagagcgttatctgcctgataaagcaatagacctaatagatgaatctgcttctaaattaaaaatggaaatcacatcaaagccagaagagttagatgagatagaccgtaaaataattcaattgcaaatggaaaagctttcattaaaaagagaatcaaatttagcaagtcaagaaaaattaaatgcaatagacaatggattgaacgaactgaagagtaagcaaagttctttaaataagcaatggcaagaagaaaaagagtctataaatactctttcgttcttaaaagaagaaatcgaaaaagttcaacttcaaattgaacaggccaagagagattatgatttaaacagagcagcagaacttgaatatggaactttaaactccttacaaaataaattaaagcaaaaagaggatttaattatggtcaataataataatgatcaaaaaagtctacttttaagagaggaagtaactgaaaatgatataaccgaagtgatcgcaaaatggacatcaatacccttaacaaaacttttaaaatcagatatagaaaagctattagatcttgaagacaaattaaactcaaaagtaattggtcaaaagcaagcagttcaagctgtagcagattcaatacagcgctcaaggactggtcttagtgatccaagtaggcctatgggaagctttttacttctagggcctacgggtgtaggcaagactgagttatctaaatctctagctaaagaattatttgatagtgaaaaagcaatgattagaattgatatgtctgaatacatggaaaaacattctattagtcgactaataggagcaccccctggatatgtgggatatgagtcaggaggacaattgtcagaggctgttagaagaaacccttattcagtaattctttttgatgaagtagaaaaagcaaattctgatgtattaaacataatgcttcaaatacttgacgaaggaagattaactgatggtaaaggtaaaaatataaactttaaaaatacaattattattcttacaagcaatgtgggtagtgaatcaataatagaaatgaccaataagaaaaacgaatacgaactgatagaagaagttgtgaggaatcaattaaaaaattattttaagcctgaatttctaaatagattagatgaacaaattatctttaaaagtcttaagaaagaagatttaaaaaaaattgttaaattacaaatagacaaagtaaaagcgagattgaaagacaagggattagaaatcgaattaaatgaaaaagtaatagattggattgccgataaaggatataatcctatatatggtgccaggccaattaaaagaataattcagacaaaattagaaactaaactggctaaaatgatacttaaaagcaaatcagaggaacgctcacattatcaattagatattattgacgatcaaatagtctttaactaa

SEQ ID NO: 33951 - protein, 864 aa, Prochlorococcus marinus
MDIKTDNFTEESWSSILQAQSNAKGFHHQYIETEHLLKSLIQENDLAKSIIKKCNGSIDQIKMHLNDFIKNQPKLKERPENLFIGKHLQKTINESDQIKQSFDDDFISIEHLLIALSKDQRCCNKILIHEKIDPEILLKSIAEIRGNQKVTDQNPESKYESLKKYGRDLTSAAREGILDPVIGRDDEIRRTIQILSRRTKNNPVLIGEPGVGKTAIVEGLAQRIINGDVPSALQNRQLIALDMGALIAGAKYRGEFEERLKAVLKEVTSSQGQIVLFIDEIHTVVGAGATGGAMDASNLLKPMLARGELRCIGATTINEHRQHIEKDPALERRFQQVLISEPSIEDTISILRGLKEKYEVHHGVRISDSALVAAAVLSNRYISERYLPDKAIDLIDESASKLKMEITSKPEELDEIDRKIIQLQMEKLSLKRESNLASQEKLNAIDNGLNELKSKQSSLNKQWQEEKESINTLSFLKEEIEKVQLQIEQAKRDYDLNRAAELEYGTLNSLQNKLKQKEDLIMVNNNNDQKSLLLREEVTENDITEVIAKWTSIPLTKLLKSDIEKLLDLEDKLNSKVIGQKQAVQAVADSIQRSRTGLSDPSRPMGSFLLLGPTGVGKTELSKSLAKELFDSEKAMIRIDMSEYMEKHSISRLIGAPPGYVGYESGGQLSEAVRRNPYSVILFDEVEKANSDVLNIMLQILDEGRLTDGKGKNINFKNTIIILTSNVGSESIIEMTNKKNEYELIEEVVRNQLKNYFKPEFLNRLDEQIIFKSLKKEDLKKIVKLQIDKVKARLKDKGLEIELNEKVIDWIADKGYNPIYGARPIKRIIQTKLETKLAKMILKSKSEERSHYQLDIIDDQIVFN

SEQ ID NO: 33952 - DNA, 2565 bp, Pseudomonas aeruginosa
  CDS (1)..(2565): transl_table=11
atgcgaatagaccgtttgaccagcaagctgcaactggcgctctccgacgcccagtccctggccgttggccatgaccatccggccatcgagccggtgcacctgctttccgccctgctcgagcagcaaggcggttcgatcaagcccctgctgatgcaggtcggcttcgatatcgccgccctgcgcagcggcctcaacaaagaactcgacgcgctgccgaagatccagagcccgaccggcgacgtgaacctgtcccaggatctcgcacgcctgctcaaccaggctgaccgcctggcccagcagaagggcgaccagttcatctccagcgagctggtattgctggccgcgatggacgagaacaccaggctcggcaagctgctgctcggccagggcgtgtcgcgcaaggcgctggagaatgccgtggccaacctgcgtggcggcgaagcggtgaacgacccgaacgtcgaggagtcgcgccaggcgctggacaagtacaccgtcgacatgaccaagcgcgccgaggaaggcaagctcgacccggtgatcggtcgcgacgacgagatccgccggaccatccaggtcctgcagcggcggaccaagaacaacccggtgctgatcggcgaacccggcgtcggcaagaccgccatcgtcgagggcctggcccagcgcatcatcaacggcgaagtgccggacggcctcaaggacaagcgcctgctggccctggacatgggggcgctgatcgccggtgccaagttccgcggcgagttcgaggaacgcctgaaggcggtcctcaacgaactgggcaagcaggaaggccgggtcatcctgttcatcgacgaactgcacaccatggtcggcgccggcaaggcggaaggtgccatggacgccggcaacatgctcaagccggctctggcgcgcggcgagctgcactgcgtcggtgctactaccctcgacgagtatcgccagtacatcgagaaggatgccgcgctggagcgccgcttccagaaggtgctggtggacgaaccgagcgaggaagacaccatcgccatcctccgtggcctcaaggaacgctatgaagtgcaccacggggtgagcatcaccgacggcgcgatcatcgccgcggccaagctgtcgcaccgctacatcaccgatcggcaactgccggacaaggccatcgacctgatcgacgaggccgccagccgcatccgcatggagatcgactccaagccggaggaactggatcgtctcgaccgtcgcctgatccagctgaagatcgagcgcgaggcgctgaagaaggaagacgacgaagccaccaggaagcgcctggccaagctggaggaggatatcgtcaagctcgagcgcgaatacgccgacctcgaggagatctggaagtccgagaaggccgaggtgcagggctcggcgcagatccagcagaagatcgagcaggccaagcaggagatggaggcggcgcggcgcaagggcgacctcgagagcatggcgcgcatccagtaccagaccatcccggacctggaacgcagcctgcagatggtcgaccagcacggcaagaccgagaaccagttgctgcgcaacaaggtgaccgacgaggaaatcgccgaagtggtttccaagtggaccggtatcccggtgtcgaagatgctcgagggcgagcgcgagaagctgctgcgcatggagcaggagctgcatcggcgagtgatcggccaggacgaggcggtagtcgccgtgtccaacgccgtgcgccgttcgcgcgccggcctcgccgatccgaaccggccgagcggctcgttcctcttcctcggcccgaccggggtgggcaagaccgagttgtgcaaggcgctggccgagttcctcttcgataccgaggaggcgctggtgcggatagatatgtccgagttcatggagaaacactcggtggcccgcctgatcggcgcgcctccgggctacgtcggcttcgaggaaggcggctacctgaccgaggcgatccgccgcaagccctactcggtggtgctgctggacgaggtggagaaggcccatccggatgtattcaacattctcctccaggtgctcgaggacggacgcctgaccgacagtcacgggcgtacggtggacttccgcaacaccgtggtggtgatgacctccaacctcggttcggcgcagatccaggagctggccggcgaccgcgaggcgcaacgtgccgcagtgatggacgcggtcaatgcgcacttccgtccggaattcatcaaccggatcgacgaagtggtggtgttcgagccgctggctcgcgagcagatcgccggcatcgccgagatccagctcggtcgcctgcgcaagcgcctggccgagcgcgagctgagcctggaactgagccaggaggcgctggacaagctgattgccgtcggcttcgacccggtctatggcgcacgcccgctgaagcgggccatccagcgctggatcgagaacccgctggcgcaactgatcctggccggcaaattcgcgccgggtgccagtatctcggcgaaggtggaaggcgacgagatcgtcttcgcctga

SEQ ID NO: 33953 - protein, 854 aa, Pseudomonas aeruginosa
MRIDRLTSKLQLALSDAQSLAVGHDHPAIEPVHLLSALLEQQGGSIKPLLMQVGFDIAALRSGLNKELDALPKIQSPTGDVNLSQDLARLLNQADRLAQQKGDQFISSELVLLAAMDENTRLGKLLLGQGVSRKALENAVANLRGGEAVNDPNVEESRQALDKYTVDMTKRAEEGKLDPVIGRDDEIRRTIQVLQRRTKNNPVLIGEPGVGKTAIVEGLAQRIINGEVPDGLKDKRLLALDMGALIAGAKFRGEFEERLKAVLNELGKQEGRVILFIDELHTMVGAGKAEGAMDAGNMLKPALARGELHCVGATTLDEYRQYIEKDAALERRFQKVLVDEPSEEDTIAILRGLKERYEVHHGVSITDGAIIAAAKLSHRYITDRQLPDKAIDLIDEAASRIRMEIDSKPEELDRLDRRLIQLKIEREALKKEDDEATRKRLAKLEEDIVKLEREYADLEEIWKSEKAEVQGSAQIQQKIEQAKQEMEAARRKGDLESMARIQYQTIPDLERSLQMVDQHGKTENQLLRNKVTDEEIAEVVSKWTGIPVSKMLEGEREKLLRMEQELHRRVIGQDEAVVAVSNAVRRSRAGLADPNRPSGSFLFLGPTGVGKTELCKALAEFLFDTEEALVRIDMSEFMEKHSVARLIGAPPGYVGFEEGGYLTEAIRRKPYSVVLLDEVEKAHPDVFNILLQVLEDGRLTDSHGRTVDFRNTVVVMTSNLGSAQIQELAGDREAQRAAVMDAVNAHFRPEFINRIDEVVVFEPLAREQIAGIAEIQLGRLRKRLAERELSLELSQEALDKLIAVGFDPVYGARPLKRAIQRWIENPLAQLILAGKFAPGASISAKVEGDEIVFA

SEQ ID NO: 33954 - DNA, 2565 bp, Pseudomonas putida
  CDS (1)..(2565): transl_table=11
atgcgaatagaccgtttaaccagcaagctgcaacttgcaatatccgatgcccagtctttggccgttggcatggaccaccctgccatcgagcccgtgcacctgttacaggcgctgctcgaacagcagggcggctccatcaaaccgctgctgatgcaggtaggcttcgacatcaatggcctgcgccaggggctggtgaaagagctcgaccaactgccgaaaatacagaaccctaccggcgacgtgaacatgtcgcaggacttggcacgtctgcttaaccaggcagaccgcctggcacagcagaagggcgaccagttcatttccagcgagctggtgctgttggccgccatggacgaaaacagcaagctcggcaagctgctgctgagccagggcgtgagcaagaaagcgctggaaaatgccatcaacaacctgcgtggcggcgcggcagtgaatgacgccaacgccgaggaatcgcgccaggcgctggacaaatacaccgtcgacctgaccaagcgtgccgaagagggcaagctggacccggtcattggccgtgacgatgaaatccgccgtaccgtgcaggtgctgcaacgccgtaccaagaacaacccggtgctgatcggtgagcctggcgtgggtaaaaccgccatcgccgaaggcctggcccagcgcatcatcaatggtgaagtgcccgacggcctcaaaggcaagcgcctgttggcgctggacatgggcgcgctaattgccggtgccaagtaccgcggtgagttcgaagagcgcttgaaaagcctgctgaacgaactgtccaagcaggaaggccagatcatcctgttcatcgacgaactgcacaccatggtcggcgccggcaaaggcgagggcgccatggacgccggcaacatgctcaagccggccctggcccgcggcgagctgcattgcgtaggtgccaccacgctgaacgagtaccgccagttcatcgaaaaggacgccgccctggagcgccgtttccagaaggtgctggtcgaggagccgagcgaggaagacaccatcgccatcctgcgtggcctgaaagagcgctatgaagtgcaccacaaggtggccatcaccgacggtgcaatcatcgctgcggccaagctcagccatcgctacatcaccgaccgccagctgccggacaaggccattgacctgatcgacgaagcggccagccgcatccgcatggagatcgactccaagccggaagtgctcgaccgccttgatcgccgcctgatccagctgaaggtggagtcgcaggcgctgaagaaagaagaagacgaagcggcgaaaaagcgcctggagaagctgaccgaggaaatcgagcggctggagcgtgagtattccgacctggaagaaatctgggcttcggagaaagctgaagtgcagggctcggcgcagatccagcaaaagatcgagcagtctcgccaggagctggaagccgcccgtcgcaaaggcgacctgaaccgcatggccgaactgcagtacggggtgatcccggacctggagcgcagcctgcagatggtcgaccagcacggcaagaccgacaaccagttgctgcgcaacaaggtcaccgaggaagaaattgccgaagtggtatcgaaatggaccggcattcctgtggccaagatgctcgaaggcgagcgtgagaagctgctgaagatggaagagctgctgcaccagcgcgtgattggccagagcgaggcggtaaccgccgtagccaacgccgtacgccgctcgcgtgccgggctgtccgacccgaaccggccaagtggttcgttcctgttcctcggcccgaccggtgtgggcaagaccgaactgtgcaaggcgctggccgagttcctgttcgacaccgaagaggcgatggtgcgcatcgacatgtccgaattcatggagaagcactccgtcgcgcgcctgatcggtgcaccaccaggctatgtagggtatgaagagggcggttacctgaccgaggccgtgcggcgcaagccttactcggtggtgctgctggacgaggtggaaaaagcccacccggatgtgttcaacgtgctgttgcaggtgctggaagacggccgcctgaccgacagccacgggcgcaccgtggacttccgcaacaccgtgatcgtgatgacctccaacctgggctcggcgcagattcaggaactggtgggtgaccgcgaggcacagcgtgcggcagtgatggatgcggtgggggcgcacttccgtccggaattcatcaaccgcatcgacgaagtggtggtgttcgagcctttgggccgcgagcagattgccggtattacagaaatccagctcggccgcctgcgcagccgcctgctggagcgcgaactgtcgttgagcctgagcccagaggcgttggacaagctgattgccgtgggttatgacccggtgtacggcgcgcggccgctgaagcgtgcgatccagcgctggatcgagaacccgctggcgcagctgattctggccggcaagttcctgcccggtacggcgatcaccgccaaggtggaaggcgacgaaatcgtctttggctga

SEQ ID NO: 33955 - protein, 854 aa, Pseudomonas putida
MRIDRLTSKLQLAISDAQSLAVGMDHPAIEPVHLLQALLEQQGGSIKPLLMQVGFDINGLRQGLVKELDQLPKIQNPTGDVNMSQDLARLLNQADRLAQQKGDQFISSELVLLAAMDENSKLGKLLLSQGVSKKALENAINNLRGGAAVNDANAEESRQALDKYTVDLTKRAEEGKLDPVIGRDDEIRRTVQVLQRRTKNNPVLIGEPGVGKTAIAEGLAQRIINGEVPDGLKGKRLLALDMGALIAGAKYRGEFEERLKSLLNELSKQEGQIILFIDELHTMVGAGKGEGAMDAGNMLKPALARGELHCVGATTLNEYRQFIEKDAALERRFQKVLVEEPSEEDTIAILRGLKERYEVHHKVAITDGAIIAAAKLSHRYITDRQLPDKAIDLIDEAASRIRMEIDSKPEVLDRLDRRLIQLKVESQALKKEEDEAAKKRLEKLTEEIERLEREYSDLEEIWASEKAEVQGSAQIQQKIEQSRQELEAARRKGDLNRMAELQYGVIPDLERSLQMVDQHGKTDNQLLRNKVTEEEIAEVVSKWTGIPVAKMLEGEREKLLKMEELLHQRVIGQSEAVTAVANAVRRSRAGLSDPNRPSGSFLFLGPTGVGKTELCKALAEFLFDTEEAMVRIDMSEFMEKHSVARLIGAPPGYVGYEEGGYLTEAVRRKPYSVVLLDEVEKAHPDVFNVLLQVLEDGRLTDSHGRTVDFRNTVIVMTSNLGSAQIQELVGDREAQRAAVMDAVGAHFRPEFINRIDEVVVFEPLGREQIAGITEIQLGRLRSRLLERELSLSLSPEALDKLIAVGYDPVYGARPLKRAIQRWIENPLAQLILAGKFLPGTAITAKVEGDEIVFG

SEQ ID NO: 33956 - DNA, 2565 bp, Pseudomonas syringae pv
  CDS (1)..(2565): transl_table=11
atgcgtatcgacagattgaccagtaaattacagttagcgttatcggattcccagtcgctggccgtcggcctcgaccatcccgccatcgagcctgcgcatttgatgcaggcactgctcgaacagcagggcggttccatcaagccattgctgctgcaagtcggcttcgatatcaacagcctgcgcaaggaactgagcgctgagctggaccgactgcccaaaatccagaacccgaccggcgacgtgaatatgtcgcaggacctggcgcgcctgctcaatcaggccgaccgcctggcgcagcagaagggcgatcagttcatttccagcgagctggtgctgctcgctgcaatggatgagaacagcaagctcggcaagttgttgctggggcagggcgtcagcaagaaggccctggaaaatgccatcaataacctgcgcggcgaaggtgccgtcaatgacccgaacatcgaagagtcgcgtcaggcgctcgacaagtacaccgttgacctgaccaagcgcgccgaagagggcaagctagacccggtgattggccgtgatgacgagatccgtcgcaccattcaggttctgcaacgccgaaccaaaaacaatccggtgctgatcggtgagcccggtgtgggtaaaaccgccatcgccgaaggtctggcgcagcgcatcatcaatggcgaggtgccggatggcctgcgcggcaagcgtctgctgtcgctggacatgggcgcactgattgccggtgccaagtaccgtggcgagttcgaagagcgcttgaagtcgctgctcaacgagctgtccaagcaggaaggccagatcatcctgttcatcgacgaattacacaccatggtcggcgcgggcaagggcgagggctcgatggacgcgggcaacatgctcaagccggcactggctcggggcgagttgcactgcgtcggcgccaccacgctcaacgagtaccgccaatatatcgagaaggacgccgcgcttgagcgtcgtttccagaaagtgctggtggacgagccgagcgaagaggacaccattgcaattctgcgtggcctgaaagagcgctatgaagtgcatcacaaggttgcgatcaccgacggcgcgatcatcgctgcggccaagctgagccatcgctacatcaccgatcgtcagttgccggacaaggccattgacctgattgacgaagcggccagccgcattcgcatggagatcgactccaagcccgaagtgctcgaccgtcttgagcgacgtctgattcagctgaaagtcgaagctcaggcgctcaagaaggaaaaggacgaggcagccatcaaacgcctggaaaaactccaggaagaaatcgtgcgccttgagaaggaatacgccgatctcgaagaaatctggacttcggaaaaagccgaagtcaccggttctgcgcagatccagcagaaaatagagcagtcccgtcaggaactggaagcggcgcgtcgccgtggcgacctgaaccgcatggccgagttgcagtacggcatcatcccggacctggaacgcagcctgcaaatggtcgatcagcacggcaagcccgagaaccagttgctgcgcagcaaagtgaccgaagaagaaattgccgaagtcgtctccaaatggaccggtattcctgtgtcgaagatgctggagggcgagcgcgagaagctgttgcgcatggaaaccctgctgcataaccgggtgatcggtcaggaagaggcggtagtggcggtttccaacgccgtgcggcgctcgcgtgccgggttgtccgaccctaatcgcccaagcggctcgttcatgttcctcggccccaccggcgtgggtaaaaccgaactgtgcaaggcgctggccgaatttctgttcgacaccgaagaggcgatggtgcgaatcgacatgtccgagttcatggagaaacattccgtggctcgcctgatcggtgcaccacccggctatgtcggttacgaagagggcggctacctgaccgaagccgtgcgtcgcaagccgtactcggtgatcctgctcgatgaggtggagaaggcgcactccgatgtcttcaacatcctgctgcaggtgcttgaagacggacgcctgaccgacagccacgggcggacagtggatttccgtaataccgtgatcgtcatgacctccaacctgggctcggcgcagatccaggaactggtgggtgatcgcgaggcgcagcgtgcggcggtaatggacgcagtcagcacgcacttccgtccggagttcgtcaaccggatcgacgaggtggtgatcttcgagcccttggcgcgtgatcagattgccggtatcaccgatatccagcttggccgtctgcgcaagcgtctggccgagcgcgagctgacaatggtgctgagccccgaggcgctcgacaagctgattgccgtcggttacgacccggtctatggcgcacggccactcaagcgcgccattcagcgctggatcgaaaacccgctggcgcaactgatcctctcgggtggcttcgagccgggcagcagcatcaccggcaaggtggtcgacgacgagatcgtgtttggctga

SEQ ID NO: 33957 - protein, 854 aa, Pseudomonas syringae pv
MRIDRLTSKLQLALSDSQSLAVGLDHPAIEPAHLMQALLEQQGGSIKPLLLQVGFDINSLRKELSAELDRLPKIQNPTGDVNMSQDLARLLNQADRLAQQKGDQFISSELVLLAAMDENSKLGKLLLGQGVSKKALENAINNLRGEGAVNDPNIEESRQALDKYTVDLTKRAEEGKLDPVIGRDDEIRRTIQVLQRRTKNNPVLIGEPGVGKTAIAEGLAQRIINGEVPDGLRGKRLLSLDMGALIAGAKYRGEFEERLKSLLNELSKQEGQIILFIDELHTMVGAGKGEGSMDAGNMLKPALARGELHCVGATTLNEYRQYIEKDAALERRFQKVLVDEPSEEDTIAILRGLKERYEVHHKVAITDGAIIAAAKLSHRYITDRQLPDKAIDLIDEAASRIRMEIDSKPEVLDRLERRLIQLKVEAQALKKEKDEAAIKRLEKLQEEIVRLEKEYADLEEIWTSEKAEVTGSAQIQQKIEQSRQELEAARRRGDLNRMAELQYGIIPDLERSLQMVDQHGKPENQLLRSKVTEEEIAEVVSKWTGIPVSKMLEGEREKLLRMETLLHNRVIGQEEAVVAVSNAVRRSRAGLSDPNRPSGSFMFLGPTGVGKTELCKALAEFLFDTEEAMVRIDMSEFMEKHSVARLIGAPPGYVGYEEGGYLTEAVRRKPYSVILLDEVEKAHSDVFNILLQVLEDGRLTDSHGRTVDFRNTVIVMTSNLGSAQIQELVGDREAQRAAVMDAVSTHFRPEFVNRIDEVVIFEPLARDQIAGITDIQLGRLRKRLAERELTMVLSPEALDKLIAVGYDPVYGARPLKRAIQRWIENPLAQLILSGGFEPGSSITGKVVDDEIVFG

SEQ ID NO: 33958 - DNA, 2589 bp, Ralstonia solanacearum
  CDS (1)..(2589): transl_table=11
atgcgtttggacaaactgaccacccgcttccaggaagcgttggccgacgcgcaaagcctggcgttgggcaacgacaatccgtatatcgaaccgctccatctgctgctggcgatgctgcgccagcccgacggggccaccaagaacctgctggcgcgcgcgggcgtcaacgccaaggggctcgagatcgcgctcgacaacgcgatcaagcgcctgccgcaagtgcagggcggcgaacaggtgcaggtcggccgggacctgggcagcctgctgcaggccacggagaaagagggcatcaagcgcggtgaccagttcatcgcgagcgagctgttcctgctggccgtggccgacgacaagggcgaggccggccgcgtcgcgcgcgagcacgggctggcgcgccgtgcgctggaggcggccatcgatgccgtgcgcggcggccagaccgtcggcagcgccgaggccgagagccagcgcgaggcgctcaagaagtacaccatcgacctgaccgagcaggcgcgcatcggcaagctcgacccggtcattggccgcgacgacgagatccgccgcgcgatccagatcctgcagcgccgcaccaagaacaacccggtgctgatcggcgagccgggcgtgggcaagaccgccatcgtcgagggcctggcgcagcgcatcatcaacggcgaggtgcccgagagcctgaagaacaagcgcgtgctggtgctcgacatggcgggcctgctggccggcgccaagtaccgcggcgagttcgaggagcggctgaaggccgtgctcaacgatatcgccaaggaagagggccagaccatcctcttcatcgacgagatccacaccatggtgggcgcgggcaaggccgagggcgcgatcgatgccggcaacatgctcaagccggcgctggcgcgcggcgagctgcactgcatcggcgcgaccacgctggatgagtaccgcaagtacatcgaaaaggatgccgcgctggagcgccgcttccagaaggtgttggtcgacgagccgagcgtggaggcgaccatcgccatcctgcgcggcctgcaggagaaatacgagctgcaccacggcgtggagatcaccgacccggcgatcgtggcggcggccgagctgagccatcgctacatcaccgaccgcttcctgcccgacaaggccatcgacctgatcgacgaggcggccgcgcgcatcaagatggaaatcgactcgaaacccgaggcgatggacaagctcgaccgccggctgatccagctgaagatcgagcgcgaggcggtgaagaaggaaaccgacgaggcgtcgcagaagcggctggagctgatcgagcaggaaatcgagcggctgcagaaggagtacgccgacctcgaagagatctggaaggccgagaagggcgcggcgcagggcgcggcggcggtgaaggaagagatcgaccgggtcaagctggagatcgcccggctgcagcgcgagggcaagctcgacaaggtggccgagctgcagtacggcaggctgcccgagctggaaggcaagctgaaggccgccaccgcggcggaagccagcggccagaggccgcccaacaagctgctgcgcacgcaggtgggcgccgaagagattgccgaggtggtcagccgcgccacgggcatccccgtgtcgaagatgatgcagggcgagcgcgacaagctgctgcgcatggaagaccgcctgcacgagcgcgtggtcggccaggacgaggcggtgcggctggtgtcggacgccatccggcgctcgcgcgcgggcatcgcggacgagaacaagccttacggctcgttcctgttcctgggcccgacgggcgtgggcaagaccgaactgtgcaaggcgctggccggcttcctgttcgactcggaggagcacctgatccgcatcgacatgagtgagttcatggagaagcattcggtgagccgcctgatcggcgcgccgccgggctacgtcggctacgaggagggcggctacctgaccgaggccgtgcgccgcaagccgtacagcgtggtgctgctggacgaggtcgagaaggcgcatccggatgtgttcaacatcctgctgcaggtgctggacgacggccgcctgaccgatggccagggccgcacggtggacttcaagaacacggtgatcgtgatgacgtccaacctgggctcgcagctgatccagcagatggcgtccgagtcgcccgatgtgatcaaaggtgcggtgtggcaggaggtgaagacgcatttccggcccgagttcctgaaccgcatcgacgaggtggtggtgttccacgcgctcgaccagggccacatcgagtcgatcgcgcgcatccagctgcagcggctggcggcccgcctggcgcacatggacctgacgctggagatcagcgacccggcggtcgccaagctggcctcggcggggtacgacccggtgttcggcgcgcggccgctcaagcgcgcgatccagcagcagatcgagaacccggtcgcgcggatgatcctggaaggccggttcacgccgaaggacgtggtgccggtggattaccacgacggccacttcaccttcgatcgtgtcgtgcgctga

SEQ ID NO: 33959 - protein, 862 aa, Ralstonia solanacearum
MRLDKLTTRFQEALADAQSLALGNDNPYIEPLHLLLAMLRQPDGATKNLLARAGVNAKGLEIALDNAIKRLPQVQGGEQVQVGRDLGSLLQATEKEGIKRGDQFIASELFLLAVADDKGEAGRVAREHGLARRALEAAIDAVRGGQTVGSAEAESQREALKKYTIDLTEQARIGKLDPVIGRDDEIRRAIQILQRRTKNNPVLIGEPGVGKTAIVEGLAQRIINGEVPESLKNKRVLVLDMAGLLAGAKYRGEFEERLKAVLNDIAKEEGQTILFIDEIHTMVGAGKAEGAIDAGNMLKPALARGELHCIGATTLDEYRKYIEKDAALERRFQKVLVDEPSVEATIAILRGLQEKYELHHGVEITDPAIVAAAELSHRYITDRFLPDKAIDLIDEAAARIKMEIDSKPEAMDKLDRRLIQLKIEREAVKKETDEASQKRLELIEQEIERLQKEYADLEEIWKAEKGAAQGAAAVKEEIDRVKLEIARLQREGKLDKVAELQYGRLPELEGKLKAATAAEASGQRPPNKLLRTQVGAEEIAEVVSRATGIPVSKMMQGERDKLLRMEDRLHERVVGQDEAVRLVSDAIRRSRAGIADENKPYGSFLFLGPTGVGKTELCKALAGFLFDSEEHLIRIDMSEFMEKHSVSRLIGAPPGYVGYEEGGYLTEAVRRKPYSVVLLDEVEKAHPDVFNILLQVLDDGRLTDGQGRTVDFKNTVIVMTSNLGSQLIQQMASESPDVIKGAVWQEVKTHFRPEFLNRIDEVVVFHALDQGHIESIARIQLQRLAARLAHMDLTLEISDPAVAKLASAGYDPVFGARPLKRAIQQQIENPVARMILEGRFTPKDVVPVDYHDGHFTFDRVVR

SEQ ID NO: 33960 - DNA, 2607 bp, Rhizobium loti
  CDS (1)..(2607): transl_table=11
atgaaccttgagaagtactccgagcgcgtgcgcggcttcatccagtccgcgcagacgatggcgctctcccgtaatcaccagcaattcacccccgaacacattttgaaggtgctcgtcgacgatgacgagggcctggccgcctcgctgatcgagcgcgccggcggcaatgtccgtgacgtcaagctcggcgtcgagacggcactcgaggcaatgccaaaggtcgaaggcggcaacggccagctctatctggcgcagccgctggccaaggtgttctcgacggccgaagaactggccaagaaggccggtgacagcttcgtcacggtcgagcggctgctgcaggcgctcaccatggagaagtcggcaaagaccgccgacatcctggccaaggctggcgtcaccgcgcaggcgcttaaccaggtcatcaacgatgtccgcaagggccgcaccgccgattcggccagtgccgagcaaaactatgacgcgctgaagaagtacgcacgtgatctcacggctgatgcccgtgcgggcaagctggacccggtgatcggccgtgacgacgagatccgccgcaccatccaggtgctctcgcgccgaaccaagaacaatccggtgctgatcggcgagccaggcgtcggcaagacggcgatcgccgaaggcctggcgctgcgcatcgtcaatggcgacgtgccggaatcgctgaaggacaagcaactgatggcgctcgacatgggcgcgctgatcgccggcgccaaatatcgcggcgaattcgaggagcggctgaaggctgtgctctccgaagtgacctcggccaatggcaacatcatcctgttcatcgacgagatgcacacgctggtcggcgccggcaaggcggatggcgcgatggatgcgtcgaacctgttgaagccggcgctggcgcgcggtgaactgcactgcgtcggcgcgaccacgctcgatgaataccgcaaacatgtcgagaaggatccggcactggcacgccgcttccagcccgtcttcgtcgacgagccgacggttgaggacaccgtctccatcctgcgcggcttgaaggaaaaatacgagcagcaccacaaggtgcgtatctcggactcggcgctggtggcggcggcaacgctgtccaaccgctatatcgccgaccgcttcctgccggacaaggcgatcgacctggtcgacgaagccgcttcgcggctcaggatgcaggtcgattccaagcccgaggcgctggatgagatcgaccgccgcatcatgcagctcaagatcgagcgcgaggcgctgaaggtcgagacggacgatgcctcgaaggaccggctcgtccgcctggagaaggagcttgtcggccttgaggaggaatcgaccgagatcaccgccaagtggcaggccgagaagcagaagctcgggcttgcggccgacttgaagaagcagctcgacgaggcacgcaacgagctcgccattgcccagcgcaagggcgagttccagcgcgccggcgagctcgcctatggcaagatcccggaactggaaaagaagctgaaggaagccgaagcccaggacggcaaggccggcatggtcgaggaagtggtcacccccgaccacgtcgcccatatcgtctcgcgctggaccggcattccagtcgacaagatgctgcagggcgagcgcgacaagttgctgcgcatggaagacgagatcggcaagcgggttgttggccagggcgaggcggtgcaggccgtttccaaggcggtgcggcgcgcccgtgccggcctgcaggatccgaaccggccgatcggctcgttcatcttcctggggccgacgggcgtcggcaagaccgaactgaccaaggcgctggcaagcttcctgttcgacgacgacagcgccatggtgcgcatcgacatgtcggagttcatggagaagcactcggtcgcccggctgatcggcgcgcctcccggctatgtcggctatgaggagggtggtgcgctgaccgaagcggtgcggcgccggccctatcaggtcgtgctgttcgacgaaatcgagaaggcgcatcccgatgtcttcaacgtgctcttgcaggtgctggacgacggccggctcaccgacgggcagggccgcacggtcgatttccgcaacacgctgatcatcatgacgtcgaacctcggcgccgaatatcttgtcaatctcggcgaagaccaggatgtcgatgccgtgcgcgacgaggtgatgggcgtggtcagggcatcgttccggccggaattcctcaaccgcgtcgacgaggtgatcctgttccaccggctgcgccgcaaggacatggaccgcatcgtcgagatccagttcaagcggctggaaagcctgctcgtcgatcgcaagatcacgctgtcgctggatcacgaggcaatcgagtggctggcggccaagggctacgacccggcctatggcgcgcggccgttgaagcgggtgatgcagaaggaactgcaggatccgctggcggagaagatcctgctcggcgagattctcgacggttcgaccgtcaaggtcacgtccggttccgaccggctgaacttccgctcgaagccgacggtcgtcgcgaccgaagcggcggcctga

SEQ ID NO: 33961 - protein, 868 aa, Rhizobium loti
MNLEKYSERVRGFIQSAQTMALSRNHQQFTPEHILKVLVDDDEGLAASLIERAGGNVRDVKLGVETALEAMPKVEGGNGQLYLAQPLAKVFSTAEELAKKAGDSFVTVERLLQALTMEKSAKTADILAKAGVTAQALNQVINDVRKGRTADSASAEQNYDALKKYARDLTADARAGKLDPVIGRDDEIRRTIQVLSRRTKNNPVLIGEPGVGKTAIAEGLALRIVNGDVPESLKDKQLMALDMGALIAGAKYRGEFEERLKAVLSEVTSANGNIILFIDEMHTLVGAGKADGAMDASNLLKPALARGELHCVGATTLDEYRKHVEKDPALARRFQPVFVDEPTVEDTVSILRGLKEKYEQHHKVRISDSALVAAATLSNRYIADRFLPDKAIDLVDEAASRLRMQVDSKPEALDEIDRRIMQLKIEREALKVETDDASKDRLVRLEKELVGLEEESTEITAKWQAEKQKLGLAADLKKQLDEARNELAIAQRKGEFQRAGELAYGKIPELEKKLKEAEAQDGKAGMVEEVVTPDHVAHIVSRWTGIPVDKMLQGERDKLLRMEDEIGKRVVGQGEAVQAVSKAVRRARAGLQDPNRPIGSFIFLGPTGVGKTELTKALASFLFDDDSAMVRIDMSEFMEKHSVARLIGAPPGYVGYEEGGALTEAVRRRPYQVVLFDEIEKAHPDVFNVLLQVLDDGRLTDGQGRTVDFRNTLIIMTSNLGAEYLVNLGEDQDVDAVRDEVMGVVRASFRPEFLNRVDEVILFHRLRRKDMDRIVEIQFKRLESLLVDRKITLSLDHEAIEWLAAKGYDPAYGARPLKRVMQKELQDPLAEKILLGEILDGSTVKVTSGSDRLNFRSKPTVVATEAAA

SEQ ID NO: 33962 - DNA, 2607 bp, Rhizobium meliloti
  CDS (1)..(2607): transl_table=11
atggatatcgaaaaatattcggaacgcgtccgcggtttcctgcagtcggcccagacctatgcgctggccgaagggcaccagcaatttacgccggagcacgttctcaaggtattgctcgacgacgatcagggcatggcggcttcgcttatcgagcgcgccggcggcaatgcgcgggaagccaaggtcggtacggccgcagctttggcgaagcttccgaaggtgaccggcggcaacggctcggtctatctgtcgcagccgctcgccaaggttttcaccgcagccgaagatgcggccaagaaggccggcgacagcttcgtaaccgtcgaacgcctgctcctggcgctggcgatcgaaagctcggccgcgacggcgtcgatcctctccaaggccggcgtcacgccgacgaagctcaaccaggtcatcaacgaaatccgcaagggccgcaccgccgacagcgccaatgccgaacaaggcttcgattcgctcaagaaatatgcgcgcgatctgaccgccgaggcgagggaaggcaagctcgatccggtgatcggccgcgacgacgagattcgccgaacgatccaggtgctctcgcgccggacgaagaacaatcccgtgctgatcggcgagccgggcgtcggcaagaccgccatcgcggaaggcctggcgctcaggatcgtcaacggcgatgtgcctgaaagcctgaaggacaagcgcctgatggcgctcgacatgggcgcgctgatcgccggtgcgaagttccgcggtgaattcgaagagcggctcaaggccgtgctgaacgaagtgcgctcggaaggtggcgagatcatcctcttcatcgatgaaatgcacacactggtcggtgcaggcaaggcggacggggctatggatgcctcgaacctcctgaagcccgcgcttgcccgcggcgaactgcactgcgtcggcgcgacgacgctcgacgaataccgcaagcatgtcgagaaggacgcagcccttgcccgccggttccagccggtgatggtcgaggaaccgacggtcgaggatacgatctcgatcctgcgcggcctgaaggaaaaatacgagcagcaccacaaggtgcggatctccgattccgcgctggttgcggctgcggcactttccaaccgctacatcaccgatcgtttccttccggacaaggcgatcgacctcatggacgaggcagcctcgcgcctcaggatgcaggtcgattcgaagccggaagaactcgacgaactcgacaggcgcgtcattcaactgaagatcgaacgtgaggccttgaaaaaggagaccgacgtttcctccaaggatcgccttgccaagctcgaactcgatctgtcttcgctcgaagaggaggcagccgcattgacggcgcgctggcaggccgagaagcagaagctcgggcaggccgccgatctcaagaaacagctcgacgaagcgcgcaacgagctgcagatcgcacagcgcaagggcgaattccagcgggcaggggagcttgcctacggggtgatcccgaatctcgaaaaggaactggccgaagcggaaagccaggatggtgccagcgccaacccgatggtgcaggaggtcgtgacccctgacaacatcgcccatatcgtgtcacgctggaccggcattccggtcgacaagatgctggaaggcgagcgcgacaagctgctcaggatggaagacgagctggcgaaatgggtcgtcggtcagggtgatgccgtgcaggctgtctcgcgggcggttcgccgttcgcgcgcagggcttcaggatccgaaccggccgatcggctccttcatcttcctgggtccgaccggcgtcggcaagacggagctcaccaaggcgcttgcccgcttcctcttcgacgacgaaaccgcgctgatgcggatcgacatgtccgagtacatggagaagcattcggtcgcccgcctgatcggcgcgcctcccggctatgtcggttacgaggagggtggggcgctgacggaatcggtccgccgccggccctatcaggtcgtgctgttcgacgagatcgagaaggcgcatccggatgtctttaacgtgcttctgcaggtgcttgacgatgggcgtctgaccgatggtcaggggcgcacggtcgacttcaagaacacgatgatcatcatgacctccaacctcggtgcggaatacctgaccgcactcggcgaaaacgaggacagcgatgcggttcgcgatcaggtcatggaagtggtgagagccgctttccgtccggaatttctgaaccgcgtcgacgagatcatactgttccaccggctgcgccgctcggaaatgggcgcgatcgtcgacattcagctcgaaaggctgcgcaagctcctctcggatcgcaagatcacgctcgagctcgaggacgatgcccgcgttttcctggcggacaggggctacgatccggcctacggcgctcgccccctgaagcgggcgatccagaaatacgttcaggacccgctggccgaaaaagtgctgcagggcgagttcccggatggctcggtgatcaaggtcgttgccggttccgaccgtctgaacttcaagcgcggggcaggggcgaacaaggaagccgcgtaa

SEQ ID NO: 33963 - protein, 868 aa, Rhizobium meliloti
MDIEKYSERVRGFLQSAQTYALAEGHQQFTPEHVLKVLLDDDQGMAASLIERAGGNAREAKVGTAAALAKLPKVTGGNGSVYLSQPLAKVFTAAEDAAKKAGDSFVTVERLLLALAIESSAATASILSKAGVTPTKLNQVINEIRKGRTADSANAEQGFDSLKKYARDLTAEAREGKLDPVIGRDDEIRRTIQVLSRRTKNNPVLIGEPGVGKTAIAEGLALRIVNGDVPESLKDKRLMALDMGALIAGAKFRGEFEERLKAVLNEVRSEGGEIILFIDEMHTLVGAGKADGAMDASNLLKPALARGELHCVGATTLDEYRKHVEKDAALARRFQPVMVEEPTVEDTISILRGLKEKYEQHHKVRISDSALVAAAALSNRYITDRFLPDKAIDLMDEAASRLRMQVDSKPEELDELDRRVIQLKIEREALKKETDVSSKDRLAKLELDLSSLEEEAAALTARWQAEKQKLGQAADLKKQLDEARNELQIAQRKGEFQRAGELAYGVIPNLEKELAEAESQDGASANPMVQEVVTPDNIAHIVSRWTGIPVDKMLEGERDKLLRMEDELAKWVVGQGDAVQAVSRAVRRSRAGLQDPNRPIGSFIFLGPTGVGKTELTKALARFLFDDETALMRIDMSEYMEKHSVARLIGAPPGYVGYEEGGALTESVRRRPYQVVLFDEIEKAHPDVFNVLLQVLDDGRLTDGQGRTVDFKNTMIIMTSNLGAEYLTALGENEDSDAVRDQVMEVVRAAFRPEFLNRVDEIILFHRLRRSEMGAIVDIQLERLRKLLSDRKITLELEDDARVFLADRGYDPAYGARPLKRAIQKYVQDPLAEKVLQGEFPDGSVIKVVAGSDRLNFKRGAGANKEAA

SEQ ID NO: 33964 - DNA, 2574 bp, Salmonella typhi
  CDS (1)..(2574): transl_table=11
atgcgtctggatcgtcttactaacaaattccagcttgctcttgccgatgcccagtcgctcgcgctggggcacgacaaccaattcatcgaacctcttcatttaatgagcgccttgctgaaccaggaagggggatcgatacgtcctttattaacctccgccggcattaatgctggccagttgcgcactgctatcgatcaggcgctgagccgtttaccgcaggtggaaggcaccggcggcgacgtacagccttcttcggaactggtacgcgtactgaacctttgcgacaagctggcgcaaaaacggggggacaattttatttcgtcagagctgtttgttctggcggcgcttgagtctcgcggcacgttaaccgatctgctgaaatcagccggtgcgactacggccaatatcactcaggcaattgaacagatgcgcggaggtgaaagcgtgaacgatcaaggggctgaagaccaacgtcaggccttgaaaaaatataccgtcgatctgaccgagcgggctgaacaaggtaagcttgacccggtaattggtcgtgatgaagaaattcgccgtaccattcaggtattgcaacgtcgtactaaaaacaacccggtgttaatcggtgagccaggcgtaggtaaaaccgccattgttgaagggctggcgcaacgtattatcaacggtgaagtaccggaaggcctgaaaggccgtcgcgtgctggcgctggatatgggcgcgctggtggccggggcgaaatatcgcggcgaatttgaagagcgtctgaaaggcgtgctgaacgacctcgcaaaacaggaaggcaacgtcatcctgtttatcgacgagctgcacaccatggttggcgcaggtaaagctgatggcgccatggatgccggtaacatgctgaaaccggcgctggcacgtggggaactgcactgtgtgggcgccaccacgctggacgaatatcgtcagtacatcgaaaaagacgcggcgctggaacgtcgattccagaaagtgttcgtggcagagccgtcggtggaagacaccattgcgattttgcgtggtctgaaagagcgttatgaactgcatcaccatgtgcagatcactgacccggcgattgtggcggcggcaacattatctcaccgctatatcgccgaccgtcagttaccggataaagctatcgacctcatcgatgaagcggcatccagcattcgtatgcagattgactcgaagccggaggagctggacaggctcgaccgccgcattattcagctcaaactggaacagcaggcgttgatgaaagagtctgacgaggcgagtaaaaaacgtctcgatatgctgaatgaagaactggacgataaagagcgtcagtactctgagttagaagaagagtggaaagcggaaaaagcgtcgctctctggtacgcaaactattaaagcggagctggagcaggcgaagatcgccatcgagcaggcgcgtcgcgttggcgacctcgcgcgaatgtctgaactgcagtacggcaaaattccggagctggaaaaacagctggaagccgcgacccagtcggaaggtaaaaccatgcgtctgttacgtaacaaagtaacggatgcggaaattgccgaagtgctggcgcgctggaccggtattccggtttccagaatgctggaaggcgaacgtgaaaaactgttgcgtatggaacaagagttacacagccgtgtgatcgggcagaatgaagccgttgaagcagtatcgaacgccatacgccgtagccgcgcggggctgtccgatccgaaccgtccgattggttccttcctgttccttgggccgaccggggtcggtaaaaccgaactgtgtaaagcgctggctaactttatgttcgacagcgacgacgcgatggtgcgtatcgacatgtctgagtttatggagaaacactccgtgtctcgtttggtcggggcgcctccaggatatgtcggctatgaagaaggcggttatttgacggaagcggtgcgccgtcgcccttattccgtcatcttgttggatgaagtggaaaaagcgcatccggatgtattcaacattctgttgcaggtgctggacgacggtcgactgactgacgggcaggggagaacggtcgacttccgtaatacggtggtcattatgacttctaacctcggttccgatctcattcaggagcgctttggcgaactggattacggtcgaatgaaagagatggtgctgggtgtggttagccaaaacttccgtccggaatttatcaaccgtattgatgaagttgtggtattccatccgttaggtgagcaacacatcgcttctattgctcagatccagctgcagcgtctgtacaaacgtctggaagaacgtggttatgaaatccatatctccgacgaggcgctgaaactgttgagcgccaacggttacgatccggtctacggggcgcgtccgttaaaacgtgctattcaacagcagatcgaaaacccactggcgcagcaaatcctgtctggtgaactggttcctggcaaagtgattcgccttgaagccaatgatgatcgtattgtggcagtgcagtaa

SEQ ID NO: 33965 - protein, 857 aa, Salmonella typhi
MRLDRLTNKFQLALADAQSLALGHDNQFIEPLHLMSALLNQEGGSIRPLLTSAGINAGQLRTAIDQALSRLPQVEGTGGDVQPSSELVRVLNLCDKLAQKRGDNFISSELFVLAALESRGTLTDLLKSAGATTANITQAIEQMRGGESVNDQGAEDQRQALKKYTVDLTERAEQGKLDPVIGRDEEIRRTIQVLQRRTKNNPVLIGEPGVGKTAIVEGLAQRIINGEVPEGLKGRRVLALDMGALVAGAKYRGEFEERLKGVLNDLAKQEGNVILFIDELHTMVGAGKADGAMDAGNMLKPALARGELHCVGATTLDEYRQYIEKDAALERRFQKVFVAEPSVEDTIAILRGLKERYELHHHVQITDPAIVAAATLSHRYIADRQLPDKAIDLIDEAASSIRMQIDSKPEELDRLDRRIIQLKLEQQALMKESDEASKKRLDMLNEELDDKERQYSELEEEWKAEKASLSGTQTIKAELEQAKIAIEQARRVGDLARMSELQYGKIPELEKQLEAATQSEGKTMRLLRNKVTDAEIAEVLARWTGIPVSRMLEGEREKLLRMEQELHSRVIGQNEAVEAVSNAIRRSRAGLSDPNRPIGSFLFLGPTGVGKTELCKALANFMFDSDDAMVRIDMSEFMEKHSVSRLVGAPPGYVGYEEGGYLTEAVRRRPYSVILLDEVEKAHPDVFNILLQVLDDGRLTDGQGRTVDFRNTVVIMTSNLGSDLIQERFGELDYGRMKEMVLGVVSQNFRPEFINRIDEVVVFHPLGEQHIASIAQIQLQRLYKRLEERGYEIHISDEALKLLSANGYDPVYGARPLKRAIQQQIENPLAQQILSGELVPGKVIRLEANDDRIVAVQ

SEQ ID NO: 33966 - DNA, 2574 bp, Streptomyces albus G
  CDS (1)..(2574): transl_table=11
gtggacgcagagctgaccaacaggagccgggacgcgctgaacgcggcgaccacccgggcggtttcggcgggcaacccggacctgaccccggcccacctgctcctggccctcctggaggggcaggacaacgagaacctggtcgacctcctggccgccgtcgagcggcgaccaggcggcgggtccgcgcgggcaccgagcgcgtccctcggctcgctccccggcgtcaccggctcgaccgtcgccccgccgcagcccaaccgggacctgctcgcggtcatcgccgacgccggccggcgcgccaaggacctgggcgacgagttcctctccaccgagcacctgctgatcggcatccggccaacggccaggccgccgaggtgctcaccgggcagggcgccgacgcccgagaagctgctggaggcattccagaacacacgaggaggacgccgggtgaccacgccccgacccgaggggcagtacaaggcgctggagaagttcggtacggacttcacggccgccgcccgtgagcggaagctcgacccggtcatcggccgggaccaggagatccgccgcgtcgtgcaggtgctctcgcggcgcaccaagaacaacccggtcctcatcggcgagcccggcgtcggcaagaccgccgtcgtggaggggctggcccagcgcatcgtcaagggcgacgtccccgagtcgctgaaggacaagcggctcgtctcgctcgacctcggcgcgatggtcgcgggcgccaagtaccgcggcgagttcgaggagcggctgaagacggtcctctccgagatcaaggagagcgacggccagatcgtcaccttcatcgacgagctgcacaccgtggtcggcgcgggcgcggcggactccgccatggacgcggggaacatgctcaagcccatgctggcccgcggcgagctgcgcatggtcggcgcgacgacgctcgacgagtaccgcgagcggatcgagaaggacccggcgctggagcgccgcttccagcaggtgctggtggccgagcccagcgtcgaggactccatcgcgatcctgcgcggcctcaagggccggtacgaggcgcaccacaaggtgcagatcgcggacagcgcgctggtggccgccgcgaccctctccgaccggtacatcacctcccggttcctgcccgacaaggccatcgacctggtcgacgaggcggcctcccggctgcgcatggagatcgactcctcgccgctggagatcgacgagctccagcgctcggtcgaccggctgaagatggaggagctggcgctcgaccgggagaccgacccggcctcccggcagcggctggagaagctccgccgcgacctcgccgaccgcgagaggagctgcgcggctcaccgcccgtgggagaaggagaagcagtccctcaaccgcgtcggcgagctgaaggagcgcctggacgaactgcgcggccaggccgaacgcgcccagcagcacggcgacttcgacaccgcctccaagctgctctacggcgagatccccaccctggagcgggacctgaggtggcgtccagccgaggaggaggccgccaaggacaccatggtcaaggaggaggtcggccccgacgacatcgcggacgtggtcggttcctggaccggcatcccggccgggcgcctgctggagggcgagacgcagaagctgctgcggatggaggccgagctgggccgccgcctgatcggccagagcgaggccgtccaggccgtctcggacgcggtgcgcacccgggccgggatcgccgacccggaccgcccgaccggctcgttcctcttcctcggcccgaccggcgtcggcaagaccgagctggccaaggcgctcgccgacttcctcttcgacgacgagcgggccatgatccgcatcgacatgagcgagtacggcgagaagcactcggtggcccgcctggtcggcgcgcctcccggctacgtcgggtacgaggagggcggccagctcaccgaggccgtgcggcgccgtccgtacagcgtggtgctgctggacgaggtggagaaggcgcaccccggagtcttcgacatcctgctccaggtgctggacgacgggcggctcaccgacgggcagggccggacggtcgacttccggaacaccatcctggtgctgaccagcaacctcggcagccagtacctggtcggctccgcgcccgaggaggagaagcggcggcaggtcatggaggtggtccgctcctccttcaagccggagttcctcaaccggctggacgacctggtgatcttctccgccctggacgaggacgagctggcccggatcgccgggctccagatcgccgggctggccaggcgcctcgccgaccgccgcctgagcctggacgtgacgcccgaggcgctggcctggctggccaaggaggggttcgacccggcgtacggcgcccggccgctgcgccgcctgatccagacggccatcggcgaccggctcgccaaggagatcctggccggcgaggtccgcgacggcgacacggtccgcgtcgaccgcgtcgaggacggcctcctcgtcggccgcgccgagggctga

SEQ ID NO: 33967 - protein, 857 aa, Streptomyces albus G
MDAELTNRSRDALNAATTRAVSAGNPDLTPAHLLLALLEGQDNENLVDLLAAVERRPGGGSARAPSASLGSLPGVTGSTVAPPQPNRDLLAVIADAGRRAKDLGDEFLSTEHLLIGIRPTARPPRCSPGRAPTPEKLLEAFQNTRGGRRVTTPRPEGQYKALEKFGTDFTAAARERKLDPVIGRDQEIRRVVQVLSRRTKNNPVLIGEPGVGKTAVVEGLAQRIVKGDVPESLKDKRLVSLDLGAMVAGAKYRGEFEERLKTVLSEIKESDGQIVTFIDELHTVVGAGAADSAMDAGNMLKPMLARGELRMVGATTLDEYRERIEKDPALERRFQQVLVAEPSVEDSIAILRGLKGRYEAHHKVQIADSALVAAATLSDRYITSRFLPDKAIDLVDEAASRLRMEIDSSPLEIDELQRSVDRLKMEELALDRETDPASRQRLEKLRRDLADRERSCAAHRPWEKEKQSLNRVGELKERLDELRGQAERAQQHGDFDTASKLLYGEIPTLERDLRWRPAEEEAAKDTMVKEEVGPDDIADVVGSWTGIPAGRLLEGETQKLLRMEAELGRRLIGQSEAVQAVSDAVRTRAGIADPDRPTGSFLFLGPTGVGKTELAKALADFLFDDERAMIRIDMSEYGEKHSVARLVGAPPGYVGYEEGGQLTEAVRRRPYSVVLLDEVEKAHPGVFDILLQVLDDGRLTDGQGRTVDFRNTILVLTSNLGSQYLVGSAPEEEKRRQVMEVVRSSFKPEFLNRLDDLVIFSALDEDELARIAGLQIAGLARRLADRRLSLDVTPEALAWLAKEGFDPAYGARPLRRLIQTAIGDRLAKEILAGEVRDGDTVRVDRVEDGLLVGRAEG

SEQ ID NO: 33968 - DNA, 2598 bp, Streptomyces coelicolor
  CDS (1)..(2598): transl_table=11
gtggacgccgagctgaccaaccggagccgggacgcgatcaacgcggccagcaaccgggccgtgaccgagggaaacgccgacctcacccccgcccacctgctcctcgccctgctccaggggcaggacaacgagaacatcaccgacctgctcgccgccgtcgaggccgacctcgccgccgtgcgcaccggcgccgagcgcatcgtcgccgggctgcccagcgtgaccgggtccaccgtcgcacccccgcaacccagccgtgagatgctcgccgtggtcgccgacgcccaggcacgcgccaaggaactcggggacgagtacctctccaccgagcacctgctcctcggcatcgccgcgaagggcggcgcggccggagaggtactggaggggcagggagccagtgcgaagaagctgcaggaggccttccgcaaggccaggggagggcgtcgcgtgaccaccgccgaccccgagggccagtacaaggccctggagaagttcggtaccgacctcaccgccgcagcccgggacgggaagctcgaccccgtcatcggacgggaccaggagatccggcgggtggtccaggtgctcagccggcggaccaagaacaaccccgtcctcatcggcgagcccggcgtcggcaagaccgccgtcgtcgaagggctcgcccagcggatcgtcaagggggacgtgcccgagtcgctgaaggacaagcggctggtcgcgctggacctcggcgccatggtcgccggggccaagtaccgcggtgagttcgaggagcggctgaagaccgtgctcgccgagatcaaggactccgacgggcaggtcgtcaccttcatcgacgagctgcacaccgtcgtgggcgccggcgccggcggggactccgccatggacgccgggaacatgctcaagcccatgctcgcgcgcggcgagctgcgcatggtgggcgccaccaccctcgacgagtaccgagagcggatcgagaaggaccccgccctggagcggcgcttccagcaggtgctggtcgccgagccgaccgtcgaggactccatcgccatcctgcgcggactcaagggacgctacgaggcccaccacaaggtgcagatcgcggacagcgcgctggtggccgccgcgagcctctccgaccggtacatcacctcgcgcttcctgcccgacaaggccatcgacctggtcgacgaggccgcctcccggctgcgcatggagatcgactcctctcccgtcgagatcgacgaactccagcgctccgtcgaccggctgaagatggaggagctggcgatcggcaaggagaccgacgccgcctccctggagcgcctggagcggctgcggcgcgacctcgccgacaaggaggaggagctgcgcggcctcaccgcccgctgggagaaggagaagcagtccctcaaccgggtcggcgagctgaaggagaagctcgacgaactgcgcgggcaggccgagcgcgcccagcgcgacggcgacttcgacaccgccagcaagctgctctacggcgagatcccggacctggaacgggacctggaggccgcctccgaggccgaggaagaggtcgcccgggacaccatggtcaaggaggaggtcggcgccgacgacatcgccgacgtcgtcgcctcctggaccggcatccccgccgggcgcctgctcgaaggggagacgcagaagctgctgcgcatggaggacgagctgggcaagcggctcatcggccagacccaggccgtgcgggccgtctccgacgccgtacggcgcagccgggccgggatcgccgacccggaccgcccgacgggttccttcctcttcctcggccccaccggcgtcggcaagaccgagctggccaaggcgctcgccgacttcctcttcgacgacgagcgggccatggtccgcatcgacatgtcggagtacagcgagaagcacagcgtggcccggctggtcggcgccccgcccgggtacgtcggctacgaggagggcggccagctcaccgaggccgtgcggcggcggccgtacaccgtcgtactgctcgacgaggtggagaaggcgcaccccgaggtcttcgacatcctgctccaggtgctggacgacggccggctcacggacggccagggccgcaccgtcgacttccgcaacaccatcctggtgctcacctccaacctgggcagccagtacctggtcgacccgacgaccggcgaggcggagaagaagcagcaggtcctggaggtggtccggtcctccttcaagccggagttcctcaaccggctcgacgacctggtggtcttctcggccctcagccaggaggagctgagccggatcgcacggctccagatcaacggcctggcccggcggctcgccgaacgccgcctcaccctggaggtcaccgacgaggccctcgcctggctggccgaggagggcaacgatccggcctacggcgcccgcccgctgcgccgcctcgtgcagaccgcgatcggcgaccggctcgcccgggagatcctctccggcgagatcaaggacggcgacacggtccgcgtggaccgcttcggcgacgagctgatcgtggggccggcgagcggcaagacgctgtag

SEQ ID NO: 33969 - protein, 865 aa, Streptomyces coelicolor
MDAELTNRSRDAINAASNRAVTEGNADLTPAHLLLALLQGQDNENITDLLAAVEADLAAVRTGAERIVAGLPSVTGSTVAPPQPSREMLAVVADAQARAKELGDEYLSTEHLLLGIAAKGGAAGEVLEGQGASAKKLQEAFRKARGGRRVTTADPEGQYKALEKFGTDLTAAARDGKLDPVIGRDQEIRRVVQVLSRRTKNNPVLIGEPGVGKTAVVEGLAQRIVKGDVPESLKDKRLVALDLGAMVAGAKYRGEFEERLKTVLAEIKDSDGQVVTFIDELHTVVGAGAGGDSAMDAGNMLKPMLARGELRMVGATTLDEYRERIEKDPALERRFQQVLVAEPTVEDSIAILRGLKGRYEAHHKVQIADSALVAAASLSDRYITSRFLPDKAIDLVDEAASRLRMEIDSSPVEIDELQRSVDRLKMEELAIGKETDAASLERLERLRRDLADKEEELRGLTARWEKEKQSLNRVGELKEKLDELRGQAERAQRDGDFDTASKLLYGEIPDLERDLEAASEAEEEVARDTMVKEEVGADDIADVVASWTGIPAGRLLEGETQKLLRMEDELGKRLIGQTQAVRAVSDAVRRSRAGIADPDRPTGSFLFLGPTGVGKTELAKALADFLFDDERAMVRIDMSEYSEKHSVARLVGAPPGYVGYEEGGQLTEAVRRRPYTVVLLDEVEKAHPEVFDILLQVLDDGRLTDGQGRTVDFRNTILVLTSNLGSQYLVDPTTGEAEKKQQVLEVVRSSFKPEFLNRLDDLVVFSALSQEELSRIARLQINGLARRLAERRLTLEVTDEALAWLAEEGNDPAYGARPLRRLVQTAIGDRLAREILSGEIKDGDTVRVDRFGDELIVGPASGKTL

SEQ ID NO: 33970 - DNA, 2574 bp, Vibrio cholerae
  CDS (1)..(2574): transl_table=11
atgcgtcttgacagatttacgagcaaatttcagatcgcgatttccgatgcccagtcattagcgctcggccgtgatcatcaatatatcgaacctgtgcacctgatggtggctctgctggatcaaaacggcagcccgatccgcccattactcaccatgcttaatgtggatgtgatgcaactgcgctccaaacttggcgaaatgctcgatcgtttacccaaagtcagtggtattggtggtgatgtacagctctcttcggcgcttggctcgctgtttaatctgtgtgataaggttgcgcaaaagcgtcaagatgcctacatctcctctgaaatctatctacttgctgcgattgaggacaaagggccactgggtcacttactcaaagagtttggactgaccgagaaaaaagtctctgaagcaatagagaagattcgtggtggacaaaaggttaatgacccgaatgcggaagagctgcgtcaagcgttggaaaaattcaccatcgatctgactgaacgcgctgagcagggcaaactcgatcctgtgatcggtcgtgatgatgaaattcgccgcaccattcaagtgctgcaacgccgtaccaagaacaatccggtgatcatcggtgaacccggtgtgggtaaaactgcgattgtggaaggcttggcgcagcgcatcattaataatgaagtaccagaaggcctgcgtggacggcgagtgttgtctttagatatgggcgcgctagtggcaggggcgaaataccgcggcgaatttgaagagcgcttgaaatcagtactcaatgagctagcgaaagaagaaggcaatatcatcctcttcattgatgagctgcacaccatggttggtgcggggaaaggcgaaggctcgatggatgccggcaacatgctcaaacccgctttggcgcgtggagaattgcactgtgtcggcgcaaccactttagatgagtaccgccaatacatcgaaaaagatccagcgttagagcgccgcttccaaaaagtgttggtggatgagcccacggtggaagataccatcgccatcttgcgtggattgaaagagcgttatgaactgcatcaccatgtcgaaatcacagatccagcgattgtggcggcagcgagcctatcgcatcgctatatttccgatcgccagttgcctgataaagcgatcgatttgatcgatgaagcggcttcaagcatccggatgcagattgactccaaaccagaagctctggataagcttgagcgcaaaatcatccaactgaaaatcgagcagcaagcgctctctaatgagcacgatgaagccagtgaaaaacgcttggcgatcttaaatgaagagctgcaagagaaagagcgtgattacgcggagttggaagaagtgtggaaagctgaaaaggcggcactctccggcacgcaacatattaaagcggcacttgaacaagcgcggatggatctggaagtcgctcgccgtgcgggggatttgaaccgcatgtcagagctgcaatatggtcgcattccagagctagaaaagcagcttgatctggctgcgcaagccgaaatgcaggaaatgactctgctacgtaataaagtgacggatgcagaaattgccgaagtgctttcaaaacagactggcattccagtatcaaaaatgctcgaagctgagaaagaaaagttgctgcgcatggaagacgtgctgcataaacgcgtgattggtcaaaaagaagcggtggaagtggtcgcgaatgcgatccgccgcagtcgcgcagggctttctgatccaaatcgtccgattggctccttcttattcttggggccaacaggggtcggtaaaaccgagctgtgtaaaaccttggctaacttcctgtttgacagtgaagatgccatggtacgtgtggatatgtcggaatttatggagaaacactcggttgctcgtttagtcggtgcgcctccaggttatgtcggctatgaagaaggtggctacttaacggaagctgtacgccgtaaaccttactcggtgattttgctcgatgaagtggaaaaggcgcacccagatgtcttcaatattctgctgcaagtcttggatgatggccgcttgacggacggacaagggcgcacggtcgattttcgaaataccgttgtgatcatgacctccaacttgggttcaagccgtatccaagaaaattttgcaaggttggattatcaaggtatcaaagaacaagtgatggacgtagtcagcaaacacttccgtcctgagttcttgaaccgagtggatgaaagtgtggtattccacccattaggacaagagcatatcaagtcgatcgcttctattcagttggcccgcctacgtcaacgtttggcagagcgagattaccaactagaggttgatgatgaggcgctggatctgattgctcatgtcggcttcgatccggtttatggtgctcgtccactgaaacgcgcgattcaacaaaatgtggaaaacccactggccaaatcgattctggctggtaagttcctgcctggttcacctattttactatcggtaaaagacgggaatattttcgcaagccagtag

SEQ ID NO: 33971 - protein, 857 aa, Vibrio cholerae
MRLDRFTSKFQIAISDAQSLALGRDHQYIEPVHLMVALLDQNGSPIRPLLTMLNVDVMQLRSKLGEMLDRLPKVSGIGGDVQLSSALGSLFNLCDKVAQKRQDAYISSEIYLLAAIEDKGPLGHLLKEFGLTEKKVSEAIEKIRGGQKVNDPNAEELRQALEKFTIDLTERAEQGKLDPVIGRDDEIRRTIQVLQRRTKNNPVIIGEPGVGKTAIVEGLAQRIINNEVPEGLRGRRVLSLDMGALVAGAKYRGEFEERLKSVLNELAKEEGNIILFIDELHTMVGAGKGEGSMDAGNMLKPALARGELHCVGATTLDEYRQYIEKDPALERRFQKVLVDEPTVEDTIAILRGLKERYELHHHVEITDPAIVAAASLSHRYISDRQLPDKAIDLIDEAASSIRMQIDSKPEALDKLERKIIQLKIEQQALSNEHDEASEKRLAILNEELQEKERDYAELEEVWKAEKAALSGTQHIKAALEQARMDLEVARRAGDLNRMSELQYGRIPELEKQLDLAAQAEMQEMTLLRNKVTDAEIAEVLSKQTGIPVSKMLEAEKEKLLRMEDVLHKRVIGQKEAVEVVANAIRRSRAGLSDPNRPIGSFLFLGPTGVGKTELCKTLANFLFDSEDAMVRVDMSEFMEKHSVARLVGAPPGYVGYEEGGYLTEAVRRKPYSVILLDEVEKAHPDVFNILLQVLDDGRLTDGQGRTVDFRNTVVIMTSNLGSSRIQENFARLDYQGIKEQVMDVVSKHFRPEFLNRVDESVVFHPLGQEHIKSIASIQLARLRQRLAERDYQLEVDDEALDLIAHVGFDPVYGARPLKRAIQQNVENPLAKSILAGKFLPGSPILLSVKDGNIFASQ

SEQ ID NO: 33972 - DNA, 2562 bp, Wolbachia pipientis wMel
  CDS (1)..(2562): transl_table=11
atggacttaaataaatttaccgaaaaagcaaaaagtctaattcaaagtgctcaaatgaaagcgttgggagctgggcatcagatttttatgcctgagcatttactaaaagtgatgcttgaagatgaatcaggtttagttcaggatttgataaacgcttgtggtggaaatgtgcagagtatttccgatgctgtggatagtgcaataaaaaagttgccagtaattgaaggtccaggaagtggtggccttcaactttcaagagaaatagcaaaagtttttgaagattcaattggtattgcaaagagaaataaagattcatttgttgctgtcgagcgtttactgcagggcctcactgcacaaaaagatgatactgtaggcaaaattctggcagagaatggtgtgactccacaaaaactgaactcagttgttgcagaaatgagaaagggcagcagtgcggactcgccaaacagtgaggaaaaattaaatgcggcaaagaaatatacaaaagatgttacagagcttgctatgcaaggaaagcttgatcctgtaattggtcgtgatgaagagatcagaagaactatgcaggtatcactgaggcggacaaaaaataatccagtgctgatcggtgaacctggtgttggaaaaactgcaatagttgaggggcttgcaaatagaattgttgcaaacgatgtaccacttggtttgcatgatgcaaaggtcttagctttggatcttggagcactaattgctggcactaagtttagaggagaatttgaagaaaggttaaaagcagttattaatgagctttcgagagcggagggaaaagttatcttgtttatagatgagcttcatactttagttggagcaggagcaacaagtggtgcaatggatgcctcgaatctgctgaagcctgctcttgcgcgtggagaagttcgctgtataggagccacaactttagatgaatatcgtcagcatatagaaaaagatcctgcacttgcaaggcgttttcagcctgtgtttatctctcaaccaactgaaactgataccatttcaatactcaggggtttgaaggaaagatatgaggtgcatcatggtataagaattacagacggtgcaataattgctgctgcaacgttatccaatagatatataacagataggtttttacctgataaagcaattgatttgattgatgaagcagcaagtagggtgagaattgaaatggatagcaagcctgaagttattgatgaacttgagagaaaggttatacagctaaagattgaagcagaggctctaaaaaaagaaagtgatgaaaattctaaacagcgtttaaaaaagataaatgaagagatcgaaaatctaaacagtaaatttgctgacttgaacagcaaatggcagatggaaaagaataaaatagctagaatacaagaaacagccgaaaaattagataacgctagaaaagagttggaattagttcagcgtagtgggaatttgggaagggcaggagagctgatgtatggtgtgatccctcagcttgagaatgaattaaaaaatcaggaaaaggttactgatagtttcttaaagaaagaagtgactggagatgatattgcaaacattgtttcaaagtggacgggaattccagttgataatatgatgcatagtgaaaaggaaaaactccttaacatggagaatgaaataggaagaagagtaatagggcagaaagatgcaatagaagcgataagtaatgcagttaggcgctcccgctctggggtgcaagataccaataagccttttggttcatttttatttttaggtccaactggagttggtaaaaccgaacttgcgaaagccttagctgaatttctgtttgacgatcaatcagcgcttttgcgttttgatatgtcagaatatatggaaaaacattctgtttcaaagttaattggcgcgcctccagggtatgttggctatgaacaaggtggcagattaactgaagcggtaagaagaaggccatatcaggttattctgtttgatgaaatcgagaaagcaaatccagatatatttaatctattgctgcaaatcttggatgagggtagactcactgatagtcatggtaaattaattgattttcgcaacaccatactgattttaacttctaatcttggcgctgagataatgctaaaagggaatgttgattctgtaagaaatgaagtgatgcaaatagttaaatcagcatttcgtccagaatttttaaacaggctggatgaaattattatattccacagtttaaccagagatgacatctataaaattatagatgttcaattttcttatttacaaaaaacacttgctaagcgtaaactgagtataagtttgttgcaggaagctaaagaactaatagcacaaactggctatgaccctgaatatggagcaaggcccttaaaaagggttatacaagagtgtattcaaaataatttagctaaattagttttatcaggggaagtagtagaaaatgatgagctaatagtgtacgctcttgataatgaaatcttagttaaaaaggtttaa

SEQ ID NO: 33973 - protein, 853 aa, Wolbachia pipientis wMel
MDLNKFTEKAKSLIQSAQMKALGAGHQIFMPEHLLKVMLEDESGLVQDLINACGGNVQSISDAVDSAIKKLPVIEGPGSGGLQLSREIAKVFEDSIGIAKRNKDSFVAVERLLQGLTAQKDDTVGKILAENGVTPQKLNSVVAEMRKGSSADSPNSEEKLNAAKKYTKDVTELAMQGKLDPVIGRDEEIRRTMQVSLRRTKNNPVLIGEPGVGKTAIVEGLANRIVANDVPLGLHDAKVLALDLGALIAGTKFRGEFEERLKAVINELSRAEGKVILFIDELHTLVGAGATSGAMDASNLLKPALARGEVRCIGATTLDEYRQHIEKDPALARRFQPVFISQPTETDTISILRGLKERYEVHHGIRITDGAIIAAATLSNRYITDRFLPDKAIDLIDEAASRVRIEMDSKPEVIDELERKVIQLKIEAEALKKESDENSKQRLKKINEEIENLNSKFADLNSKWQMEKNKIARIQETAEKLDNARKELELVQRSGNLGRAGELMYGVIPQLENELKNQEKVTDSFLKKEVTGDDIANIVSKWTGIPVDNMMHSEKEKLLNMENEIGRRVIGQKDAIEAISNAVRRSRSGVQDTNKPFGSFLFLGPTGVGKTELAKALAEFLFDDQSALLRFDMSEYMEKHSVSKLIGAPPGYVGYEQGGRLTEAVRRRPYQVILFDEIEKANPDIFNLLLQILDEGRLTDSHGKLIDFRNTILILTSNLGAEIMLKGNVDSVRNEVMQIVKSAFRPEFLNRLDEIIIFHSLTRDDIYKIIDVQFSYLQKTLAKRKLSISLLQEAKELIAQTGYDPEYGARPLKRVIQECIQNNLAKLVLSGEVVENDELIVYALDNEILVKKV

SEQ ID NO: 33974 - DNA, 2586 bp, Xanthomonas campestris pv
  CDS (1)..(2586): transl_table=11
atgcggatggacaagctcacctcgcggttccagcaggcgctggccgacgcgcaatcgctggccgtgggccgcgaccacaacatcatcgaacccgtgcacgtgctggccgccttgctcgaccagagcggcggcagcacgcgcccgctgctgtcgcagtccggcgtcaacgtgccggcactgcgcgagcgcctgggcgaagcgctggacaccctgcccaaggtgtccgggcaggaaggcaacctgtcgatcggcaacgatctcaatcgcctgctcaaccagaccgacaagctcgcccagcaacatggcgatgccttcatcgccagcgagtggttcgtgctggccgctgccgacgatgccagcccgctgggcgtggccttgcgcgcggccggtggcgacaagaagaagatcgaagcggccatcgataaattgcgcggtggcgaaacggtgcaatcggaaaatgccgaggagcagcgccaggcgctggagaagtacaccatcgacctgaccgcgcgcgcggagagcggcaagctcgatccggtgatcggccgcgacgaagaaatccgccgcaccatccaggtgttgcagcgacgcaccaaaaacaacccggtgctgatcggcgaaccgggcgtgggcaagaccgccattgtcgaaggcctggcgcaacgcatcatcaacggcgaggtgcccgaaggcctgcgcggcaagcgcgtgctgtcgctggacatgggcgcgctgattgccggtgccaaattccgcggcgaattcgaagaacgcctgaaggcggtgctcagcgacctgtccaagaacgaaggccagatcatcctgttcatcgatgagctgcacaccatggtcggcgccggcaaggccgatggcgcgatggatgccggcaacatgctcaagccggcgctggcgcgcggcgagctgcattgcatcggcgccaccacgctggacgaataccgcaagtacatcgaaaaagacgctgcgctggagcgccgtttccagaaagttttcgtgggcgagccgacggtggaagacaccatcgccatcctgcgcggcttgaaggagcgctacgcggtgcatcacggcgtggagatcaccgacccggcgatcgtggccgcggccaccttgtccaaccgctacatcaccgaccgtcagttgccggacaaggccatcgacctgatggacgaagccgcatcgcgcatccgcatggagatcgattccaagcctgaagagctcgaccgcctggagcgccgcctgatccagctcaagatccagcgcgagatgctcaagaaggaaaaggacgaggcctcgcggcaacgtctggccgatctggaaagcgacatcgacaagctcgagcgcgaattctccgacctcaacgaagtgtggaagtcggagaaggccgcgctgcagggcaccaccaagatcaaggagcagatcgagcacgccaagctggagctggaagcggcgcagcggcgccaggactacgccaagatgagcgagatccagtacggcgtattgccgcagctggaaaagcagatgctgctggccaacgaagtggagcatcacgacttcaagctggtgcaggaccgcgtgaccgccgaagaaatcgccgaggtggtgtcgcgttggaccggtatcccggtcaacaagatgctcgaaggcgagcgcgacaaactgctgcgcatggaagacgaactgcaccgccgcgtggtggggcaggaagaggcgatcaaggtggtgtccgatgcggtgcgccgctcgcgtgccggcctgtccgatcccaatcgtccgagcggttcgttcctgttcctgggcccgaccggcgtgggcaagaccgagctgtgcaaggcgttggcggatttcctgttcgacagcaccgaggccatgatccgcatcgacatgagcgagttcatggagaagcattcggtctcgcgcctgatcggtgcgcctccgggctatgtgggctacgaggagggcggttacctcaccgaggcggtgcggcggcgcccgtattcgctgatcctgctcgacgaagtggagaaggcgcacgccgatgtcttcaacatcctgttgcaggtgctcgacgatggccgcctcaccgacggccagggacgtaccgtggacttccgcaataccgtcatcgtgatgacctccaacctgggctcgcaccagatccaggagttgtccggcgacggcagcgccgaggcctacacgcagatgaaggcggcggtgatgggcgtggtgcaggcgcacttccgcccagaattcatcaaccggctcgacgacatcgtggtgttccatccgctggacaaggcgcagatcaagtcgatcgcgcgcatccagttgcagggcctggaaaagcgcctggccgaacgcggcctcaagctggacctggacgacccggcgctggaattgctgggcaatgtcggcttcgacccggtgtatggcgcgcgcccgctgaagcgtgcgatccagtcgcaggtggaaaacccgctggcccagcagattctctccggccagtacaccagcggcgacaccgtgcgtgtacgcaccgaaggtggacatctggcgtttaccaagggctga

SEQ ID NO: 33975 - protein, 861 aa, Xanthomonas campestris pv
MRMDKLTSRFQQALADAQSLAVGRDHNIIEPVHVLAALLDQSGGSTRPLLSQSGVNVPALRERLGEALDTLPKVSGQEGNLSIGNDLNRLLNQTDKLAQQHGDAFIASEWFVLAAADDASPLGVALRAAGGDKKKIEAAIDKLRGGETVQSENAEEQRQALEKYTIDLTARAESGKLDPVIGRDEEIRRTIQVLQRRTKNNPVLIGEPGVGKTAIVEGLAQRIINGEVPEGLRGKRVLSLDMGALIAGAKFRGEFEERLKAVLSDLSKNEGQIILFIDELHTMVGAGKADGAMDAGNMLKPALARGELHCIGATTLDEYRKYIEKDAALERRFQKVFVGEPTVEDTIAILRGLKERYAVHHGVEITDPAIVAAATLSNRYITDRQLPDKAIDLMDEAASRIRMEIDSKPEELDRLERRLIQLKIQREMLKKEKDEASRQRLADLESDIDKLEREFSDLNEVWKSEKAALQGTTKIKEQIEHAKLELEAAQRRQDYAKMSEIQYGVLPQLEKQMLLANEVEHHDFKLVQDRVTAEEIAEVVSRWTGIPVNKMLEGERDKLLRMEDELHRRVVGQEEAIKVVSDAVRRSRAGLSDPNRPSGSFLFLGPTGVGKTELCKALADFLFDSTEAMIRIDMSEFMEKHSVSRLIGAPPGYVGYEEGGYLTEAVRRRPYSLILLDEVEKAHADVFNILLQVLDDGRLTDGQGRTVDFRNTVIVMTSNLGSHQIQELSGDGSAEAYTQMKAAVMGVVQAHFRPEFINRLDDIVVFHPLDKAQIKSIARIQLQGLEKRLAERGLKLDLDDPALELLGNVGFDPVYGARPLKRAIQSQVENPLAQQILSGQYTSGDTVRVRTEGGHLAFTKG

SEQ ID NO: 33976 - DNA, 2574 bp, Yersinia pestis
  CDS (1)..(2574): transl_table=11
atgcgtctggatcgtcttaccagtaaattccagcttgccctcgccgatgcccagtctttagctcttgggcgcgacaaccagtttattgaaccgttacatttgatgagcgcactgcttaatcaggatggggggacggttcgccctttattgacctcggcagggattaatgttgcacgtttacgtagcgacattgagcaagctttaggtcgtcttcctcaagttgaaggcaccggcggtgatgttcaaccatcaaacgagctggttcgtgtattaaatctttgcgacaaattagcgcagaaacgttcggataagtttatctcttccgagctgttcgtcctggccgtacttgaagatcgtggcacgttaactgacatgttaaaggctgcaggtgcaaccgtcgctataatagataaggcaattgaaaccatgcgtggtggtgacaaagtcgatgatcagggtgctgaagatcagcgccaggcgttgaaaaaattcactatcgacctgactgagcgtgccgagcaaggcaaactcgatccggttattggccgtgatgaagaaattcgccgtactattcaggtattacaacgtcgaaccaaaaataacccagtgttgattggtgagcctggggtgggtaaaaccgctattgtggaaggtttggcgcaacgcattgtgaacggcgaagtgccagaaggcttgaagcataagcgtgtactctcattagatatggggtcgctgattgccggtgccaaatatcgtggtgaatttgaagagcgtttgaaaggcgtactgaacgacttatcaaaacaagaaggcagtgtgatcttgtttattgatgagttgcataccatggtcggtgccggtaaaggcgatggggcgatggatgccggtaacatgctgaaacctgcattagcgcgaggtgagttacattgtgtgggggccactaccctcgatgaataccgtcaatatatagagaaagatgctgcgctcgagcggcgtttccaaaaagtgtatgttgcggaaccaacggtagaagacactatcgctattttacgtgggctgaaagagcgctacgaactgcaccatcacgtgcagatcactgacccagctattgtggcagccgcaacattgtcacaccggtatatttctgatcgtcagttaccggataaagctatcgacctcattgatgaggcaggttccagcatccgtatgcaaatggattcaaaacccgaatcattggatcgtctagagcgccggattattcagcttaaactggaacagcaggccctaaaaaaagagtcagatgacgccagtaaaaaacggttggaaatgctcaatactgagttagagcaaaaagagcgtgaatattctgaactggaagaagagtggaaagcagaaaaagcttcactcaccgggactcagaatatcaagacggagttggaacaagctaaaatcaccttagaacaagctcgtcgagtaggtgatctggctcggatgtcagaacttcagtacggtacaatccctgagctggaaaaacagctggcggcggcaaccgcgctagaagggaaaaccatgaagttgctgcgtaaccgtgtcacagaaatcgaagttgctgaagtcctggctcgctggaccggtatcccggtatctcgcatgttgaaaagtgagcgggataagctgctacgtatggaacaggacttgcatcaacgagtcattgggcaagatgaagctgttgaagccgtctccaacgctatccgtcggagtcgcgcagggttgtctgatccaaaccgaccaattggttcgttcttattcttagggccaacgggggttggtaaaactgaattgtgtaaagcgttggcaacgttcttgttcgacagtgacgatgccatggtgcgaatcgacatgtccgagtttatggagaaacattccgtatcgcggttggtcggtgcacctcctggctatgttgggtatgaagaaggtggctatctgacggaagcggttcgtcgtcgtccttattctgtgattttgctggatgaagttgaaaaagcacatccagatgttttcaacatattgttacaggtattggatgatggtcgtttgaccgacgggcaggggagaactgtcgactttcgtaacacggtagtcattatgacctctaaccttggttcagatttgattcaggaacatttcggccaaatgaattacagcgaaatgaagacagtggttatggatgttgttagtcaccacttccgtcctgaatttattaaccgtatagatgaggttgttgtcttccacccacttggtcgggcgcacttggcttctattgccaacattcaactggagcgtttgtataaacgtctggaagaacgtggctatgaagtgaagattactcagcctgcattggaattcttgggtgaagctggcttcgaccctgtttatggggcgcggccattaaaacgtgcaattcagcaggaaattgagaacccgctggcacagcagatactttctggcaaactaataccgggaatccccgtgactttagatgttgaaaatgggcatattattgctaagcagtaa

SEQ ID NO: 33977 - protein, 857 aa, Yersinia pestis
MRLDRLTSKFQLALADAQSLALGRDNQFIEPLHLMSALLNQDGGTVRPLLTSAGINVARLRSDIEQALGRLPQVEGTGGDVQPSNELVRVLNLCDKLAQKRSDKFISSELFVLAVLEDRGTLTDMLKAAGATVAIIDKAIETMRGGDKVDDQGAEDQRQALKKFTIDLTERAEQGKLDPVIGRDEEIRRTIQVLQRRTKNNPVLIGEPGVGKTAIVEGLAQRIVNGEVPEGLKHKRVLSLDMGSLIAGAKYRGEFEERLKGVLNDLSKQEGSVILFIDELHTMVGAGKGDGAMDAGNMLKPALARGELHCVGATTLDEYRQYIEKDAALERRFQKVYVAEPTVEDTIAILRGLKERYELHHHVQITDPAIVAAATLSHRYISDRQLPDKAIDLIDEAGSSIRMQMDSKPESLDRLERRIIQLKLEQQALKKESDDASKKRLEMLNTELEQKEREYSELEEEWKAEKASLTGTQNIKTELEQAKITLEQARRVGDLARMSELQYGTIPELEKQLAAATALEGKTMKLLRNRVTEIEVAEVLARWTGIPVSRMLKSERDKLLRMEQDLHQRVIGQDEAVEAVSNAIRRSRAGLSDPNRPIGSFLFLGPTGVGKTELCKALATFLFDSDDAMVRIDMSEFMEKHSVSRLVGAPPGYVGYEEGGYLTEAVRRRPYSVILLDEVEKAHPDVFNILLQVLDDGRLTDGQGRTVDFRNTVVIMTSNLGSDLIQEHFGQMNYSEMKTVVMDVVSHHFRPEFINRIDEVVVFHPLGRAHLASIANIQLERLYKRLEERGYEVKITQPALEFLGEAGFDPVYGARPLKRAIQQEIENPLAQQILSGKLIPGIPVTLDVENGHIIAKQ

SEQ ID NO: 33978 - DNA, 2433 bp, Bacillus subtilis
  CDS (1)..(2433): transl_table=11
atgatgtttggaagatttacagaacgagctcaaaaagtactggcgctagcacaggaagaagcacttcggttaggtcataataacattggcactgagcatattttattaggactggtaagagaaggagagggcattgctgctaaagctcttcaagcgcttggactcggttcagaaaaaattcagaaagaagtagaaagtttgatcgggcgcgggcaggaaatgtctcaaacgattcattatactcctagagctaaaaaagtcattgagctttcaatggatgaggcaagaaaactcggtcattcttatgtgggaacagaacatattcttcttggtctgattcgtgaaggagaaggtgttgctgcgagagttctgaataatctcggtgtcagcttaaataaagcaagacagcaggtgctccagcttctaggaagtaatgaaacaggatcatcagcggcaggaacaaacagcaatgcgaatacgcctacgcttgacagcttggcaagagacttaactgctattgcgaaggaagacagccttgaccctgtaatcggcagaagcaaggagatccagcgtgtcattgaagtgttaagccgcagaacgaaaaacaaccctgttctcattggggaaccaggtgtaggtaaaacggctatcgcagaaggtttggcacagcaaattatcaataatgaagtacccgaaattttgcgtgataaacgtgtgatgacattagacatgggaacagttgttgccggcacaaaataccgcggagaatttgaggatcgcctgaagaaggtcatggatgaaattcgccaggcaggaaatatcattctattcatcgatgagctccatacattaatcggggcaggcggagcagaaggtgctattgatgcatctaatattttaaaaccttcacttgctcgtggcgaactccaatgtattggtgcaacgactcttgatgagtaccgtaaatatattgaaaaagatgcagcactggaacgccgttttcagccgattcaggttgatcagccatctgtagatgaaagtattcaaattttacaaggtctgcgtgacagatacgaagcccaccaccgcgtttctatcactgatgatgccattgaagctgcggttaagctttctgacagatatatttctgaccgcttccttccggataaagcaattgacttgatcgatgaagcgggttcaaaggtgagactgcgctcatttacaacgcctcctaacttaaaagagcttgagcagaagcttgatgaggttcgtaaagagaaggatgcggcagtgcaaagccaagagtttgaaaaagctgcttccttgcgtgatactgaacaacgcctgcgcgagcaagtagaggatacgaagaaatcatggaaagagaagcaagggcaggaaaactcagaggttactgtggatgatattgcgatggttgtatccagctggaccggtgtgcctgtatctaaaatcgcccaaactgaaactgataagcttctcaatatggaaaacattcttcactcccgtgtcatcggccaggatgaagcagttgtagcggttgcaaaagccgtcagacgtgcaagagcaggattgaaagatcctaaacgcccaatcggctcattcattttcttaggccctacaggtgtaggtaaaacagaacttgcacgagcacttgctgaatccatttttggcgatgaagaatccatgatcagaattgatatgtctgaatacatggaaaaacattcaacttcaagacttgttggttcacctccgggttatgtgggatatgatgaaggcggtcaattgacagagaaagtcagaagaaaaccttactctgtcgtgcttcttgatgagatcgagaaagcgcaccctgatgtcttcaatatccttctgcaagttcttgaagacggacgattgactgattctaaaggacgcacagtcgatttccgcaataccattctgatcatgacatcaaacgtcggagcaagtgagctaaaacgcaataaatatgtcggctttaacgttcaggatgaaactcaaaatcataaagacatgaaagataaagtgatgggtgaattaaaacgagcgttcagacctgagttcatcaaccgtattgatgaaatcattgtcttccattcacttgagaaaaaacatctcactgagattgtgtcattaatgtctgatcaattaacgaaacgcctgaaagaacaagatctttctatcgaattgacagatgctgcaaaagcgaaagtcgcggaagagggcgttgacctggaatacggtgcccgtccgttaagaagagcgatccaaaaacatgtcgaggatcgtttatctgaagaactcctcagaggaaatattcataaaggacagcatattgttcttgatgtagaagatggcgaatttgtcgtaaaaacgactgctaaaacgaattaa

SEQ ID NO: 33979 - protein, 810 aa, Bacillus subtilis
MMFGRFTERAQKVLALAQEEALRLGHNNIGTEHILLGLVREGEGIAAKALQALGLGSEKIQKEVESLIGRGQEMSQTIHYTPRAKKVIELSMDEARKLGHSYVGTEHILLGLIREGEGVAARVLNNLGVSLNKARQQVLQLLGSNETGSSAAGTNSNANTPTLDSLARDLTAIAKEDSLDPVIGRSKEIQRVIEVLSRRTKNNPVLIGEPGVGKTAIAEGLAQQIINNEVPEILRDKRVMTLDMGTVVAGTKYRGEFEDRLKKVMDEIRQAGNIILFIDELHTLIGAGGAEGAIDASNILKPSLARGELQCIGATTLDEYRKYIEKDAALERRFQPIQVDQPSVDESIQILQGLRDRYEAHHRVSITDDAIEAAVKLSDRYISDRFLPDKAIDLIDEAGSKVRLRSFTTPPNLKELEQKLDEVRKEKDAAVQSQEFEKAASLRDTEQRLREQVEDTKKSWKEKQGQENSEVTVDDIAMVVSSWTGVPVSKIAQTETDKLLNMENILHSRVIGQDEAVVAVAKAVRRARAGLKDPKRPIGSFIFLGPTGVGKTELARALAESIFGDEESMIRIDMSEYMEKHSTSRLVGSPPGYVGYDEGGQLTEKVRRKPYSVVLLDEIEKAHPDVFNILLQVLEDGRLTDSKGRTVDFRNTILIMTSNVGASELKRNKYVGFNVQDETQNHKDMKDKVMGELKRAFRPEFINRIDEIIVFHSLEKKHLTEIVSLMSDQLTKRLKEQDLSIELTDAAKAKVAEEGVDLEYGARPLRRAIQKHVEDRLSEELLRGNIHKGQHIVLDVEDGEFVVKTTAKTN

SEQ ID NO: 33980 - DNA, 2769 bp, Pisum sativum
  CDS (1)..(2769)
atggctagagttttggctcagtcacttagtgttcctggcctagtggctgggcacaaggacagtcaacataagggatcgggaaaatctaagagatcagtcaagacgatgtgtgctttgcgaacaagcggattaagaatgtcaggtttctcaggacttcgtactttcaatcatttgaatactatgatgagacctggactggattttcactcaaaggtatcaaaggcagtttcttcacggcgggcaagggctaagagattcattcctagagccatgtttgagcgtttcaccgagaaagcaatcaaagtgataatgctagctcaggaggaagcaagacgtcttggtcacaattttgtcggaactgagcagattcttttgggtcttattggtgaaggcactggtatcgccgccaaggttttaaagtctatgggaatcaaccttaaagatgcacgtgttgaagtggagaagataattggaaggggtagtggatttgttgctgtcgagattccatttactccccgtgcaaagcgtgtattggaactttcacaggaggaagctcgccaacttggtcacaattatattggatcagagcacttgcttctaggtcttcttcgagagggtgagggtgtagcagcacgtgttcttgaaaacttgggcgctgatcctactaatattcgcacacaggttattcgcatggtgggtgagagtgctgacagtgttaccgctactgttggctcaggaagtagtaacaacaaaacgccaactttggaggagtatggaaccaatttgaccaagctagcagaagagggaaagttggatcctgttgtgggaaggcagccacagattgagcgtgtcacccaaattttaggccgccgcaccaaaaataatccttgtcttattggagagcctggtgttgggaagacagcaattgctgaaggtcttgctcagcggattgctaatggtgatgtacctgaaacaatcgaaggaaaaaaggttataaccctcgatatgggtctgcttgtagctggaaccaaataccgtggtgagtttgaggagaggttgaagaaactgatggaagaaatcaaacaaagtgatgatattatactttttatcgatgaagtgcacactctaattggagcaggagcagctgaaggtgctattgatgctgctaacatactaaaaccagctcttgcaagaggtgaactacagtgtattggggccacaacattggacgaatacaggaagcatattgaaaaagacccagatttggagagacgattccagccagttaaagtaccagaaccaactgtagatgaaaccatacaaatactgaaaggacttagagaacgttatgagattcaccacaagctccgctatactgatgaggctcttatagctgctgcgcaactttcgtaccagtatatcagtgatcgatttttgcctgacaaagctatagatttggttgatgaagctggttcacgagtccgtcttcaacatgcacagttgccagaagaggcaaaagaacttgacaaggaggtcaggaagattgttaaggagaaagaggaatatgttcgcaaccaagactttgaaaaggctggagaactgcgtgataaagaaatggatctcaaggcacagatctcagcacttatagagaaaggcaaggagatgagcaaagcagagactgagacagcagatgaaggtcccattgtgactgaagttgacattcaacatattgtgtcctcctggacaggcattcctgttgataaagtctcagcagatgaatctgatcgtctcctcaagatggaagatactttacacaagcgaatcattggtcaggatgaagcagtgcaagccattagccgtgctatccgtcgagcccgagttggattgaagaaccctaatcgtccaattgccagcttcatcttttctggtccaactggtgtggggaagtctgaattggccaaagcattggctgcatactactttggctctgaagaagccatgattcgtcttgacatgagtgaatttatggaaaggcacacagtctccaaacttattggttcacctccaggatatgttggttacaccgaaggcggtcaattgactgaagcagttcgacgtcgtccttacactgttgtactctttgatgagattgagaaagcccatcctgatgtattcaacatgatgcttcaaatccttgaagatggaagactaacagacagcaagggtagaactgtggatttcaagaacacacttcttataatgacatcaaatgttggaagcagtgtgattgagaaaggaggccgccgaattggatttgatttggattacgatgagaaagatagcagttataatagaatcaagagcttggtgactgaggagctaaaacaatacttcaggccagagtttttgaataggttggatgaaatgattgttttcagacaactcacaaaattggaagtgaaggagatagcagacataatgctcaaggaggtgtttcaaagacttaagaccaaagaaattgaacttcaagtcacagaaagatttagggacagggtggttgatgaaggttataatcctagttacggagctaggcctctaagaagagccataatgcgacttttggaggatagcatggctgagaagatgctcgccagagagatcaaagagggtgattctgtcatagtggatgttgattctgatggtaaagtgattgttctcaacggtagcagcggcactccagagtcgttaccagaggctctttctatataa

SEQ ID NO: 33981 - protein, 922 aa, Pisum sativum
MARVLAQSLSVPGLVAGHKDSQHKGSGKSKRSVKTMCALRTSGLRMSGFSGLRTFNHLNTMMRPGLDFHSKVSKAVSSRRARAKRFIPRAMFERFTEKAIKVIMLAQEEARRLGHNFVGTEQILLGLIGEGTGIAAKVLKSMGINLKDARVEVEKIIGRGSGFVAVEIPFTPRAKRVLELSQEEARQLGHNYIGSEHLLLGLLREGEGVAARVLENLGADPTNIRTQVIRMVGESADSVTATVGSGSSNNKTPTLEEYGTNLTKLAEEGKLDPVVGRQPQIERVTQILGRRTKNNPCLIGEPGVGKTAIAEGLAQRIANGDVPETIEGKKVITLDMGLLVAGTKYRGEFEERLKKLMEEIKQSDDIILFIDEVHTLIGAGAAEGAIDAANILKPALARGELQCIGATTLDEYRKHIEKDPDLERRFQPVKVPEPTVDETIQILKGLRERYEIHHKLRYTDEALIAAAQLSYQYISDRFLPDKAIDLVDEAGSRVRLQHAQLPEEAKELDKEVRKIVKEKEEYVRNQDFEKAGELRDKEMDLKAQISALIEKGKEMSKAETETADEGPIVTEVDIQHIVSSWTGIPVDKVSADESDRLLKMEDTLHKRIIGQDEAVQAISRAIRRARVGLKNPNRPIASFIFSGPTGVGKSELAKALAAYYFGSEEAMIRLDMSEFMERHTVSKLIGSPPGYVGYTEGGQLTEAVRRRPYTVVLFDEIEKAHPDVFNMMLQILEDGRLTDSKGRTVDFKNTLLIMTSNVGSSVIEKGGRRIGFDLDYDEKDSSYNRIKSLVTEELKQYFRPEFLNRLDEMIVFRQLTKLEVKEIADIMLKEVFQRLKTKEIELQVTERFRDRVVDEGYNPSYGARPLRRAIMRLLEDSMAEKMLAREIKEGDSVIVDVDSDGKVIVLNGSSGTPESLPEALSI

SEQ ID NO: 33982 - DNA, 2838 bp, Arabidopsis thaliana
  CDS (1)..(2838)
atggaggtgttatctacttcctcacctctaacgcttcactcccaccgactcctctctgcttcttcttcttcttcacatgtcacctccatcgccgcttcttcactttcttcattcgcttcttcatatctcggaatctccctttctaaccgcacgatccaccgcttctccacaactccgacgaacttaagacgatttcctcaaagaaaacggaagaaattcactccgatttcagcggttttcgaacggttcaccgaacgagcgatcagagctataatcttctctcagaaggaagctaaatcgttgggaaaagatatggtttacacgcagcatcttctcttaggtttgatcgctgaggatcgtgatcctcaaggcttccttggatccggtatcaccatcgacaaggctcgtgaagctgtttggagtatttgggacgaagctaattccgattcgaaacaggaggaagcttcttctacttcgtattcaaaatcgacggacatgcctttctctatcagcacgaaacgagtctttgaagctgcggttgagtactctaggactatggattgtcaatatatcgcaccggagcatatagccgttggactcttcaccgttgatgatggtagcgccggcagagttctcaagagattgggagcaaatatgaatttgctcacagctgcagcacttacaagacttaaaggagagattgctaaagatggaagagagccatcttcttcatctaaagggagcttcgagtctcctcctagtggtcgaattgctggttctggacctggtggaaaaaaagcgaaaaatgtactggaacagttctgtgtggatctgacagcacgtgctagtgagggtcttattgatcctgttattggtcgggaaaaagaggttcaaagagttatccagatactttgccgcagaactaaaaacaacccaattcttcttggtgaagctggtgttgggaagactgccattgctgaaggactagcgattagtattgcagaagccagtgctcctggatttctcttgacgaaacgcatcatgtccctggatataggattgctaatggccggtgcaaaagaaaggggagagctggaggctcgagtcactgctttgataagcgaggttaaaaaatcaggtaaggtcattctcttcatagatgaagtgcatacacttattgggtctggcacagttggaagagggaacaaagggtctgggcttgacattgctaacctcttgaaaccatcacttggaaggggtgaacttcagtgcattgcatccacaacccttgacgaatttaggagtcagtttgagaaggacaaagcccttgcaaggagatttcagccagtgttgattaacgagccaagcgaggaagatgcggtgaagattttgttgggccttcgtgaaaaatatgaagcccatcacaattgcaaatatactatggaagccatagatgctgcagtgtacctttcatcacgatatatcgctgatagatttcttccagataaagctattgatctcattgacgaggcaggaagcagagctcgtattgaagcttttaggaagaaaaaggaggatgcaatctgtatcctatcgaagccacctaatgattactggcaagagatcaaaacagttcaggccatgcacgaagtggttctctcaagcaggcaaaagcaggatgacggtgatgccatttcagatgagtctggtgaactagttgaagagtcttctttgccacctgcagcaggcgacgatgagcctatactggtgggacctgatgatattgcagccgttgcatcggtttggtctggaattccagttcagcagatcactgcagatgaaagaatgcttcttatgagtctagaagatcagcttagaggcagagttgttggtcaagatgaggcggtagctgccatatctagagctgtgaagaggtcccgggttggcttaaaagatcccgaccgtccaattgctgctatgcttttctgtggaccaacaggggttggaaaaacggagcttacaaaagctctggcagcaaattattttggctcggaagaatccatgctgagattggacatgagtgaatacatggagcgtcatactgtgagcaagctgataggctctcctcctggttatgttggctttgaagaaggtggaatgcttacagaagctatcaggagacgtccttttacagtggttttgttcgatgaaatagagaaagcacatccggatatcttcaatattcttctccagctgttcgaagatggccatctaactgattcacagggaaggagagtatcttttaagaacgcattgatcataatgacctctaatgtcggatcattggccattgcaaagggaagacatggttcaatagggtttatcctcgatgatgatgaagaggcagcatcttataccggaatgaaagctttggtagtcgaagaactcaagaactatttccgtccagagttgttgaaccgaatagacgaaatcgtcattttccgacagctagagaaggctcagatgatggagatcttgaacctgatgctacaagacttgaagtcgaggctcgtggcactcggagttggtttagaggtgtctgaacccgtcaaggagctcatatgcaaacaaggctatgatccagcttacggtgcacgaccactccggagaactgtcacagagattgttgaagatccactcagtgaagcctttcttgccgggagcttcaagcctggtgatacggcttttgtagttcttgatgataccggaaacccatcggttcggaccaaaccagattcttccactatacgagttacagacaaaacatcgatcgcatag

SEQ ID NO: 33983 - protein, 945 aa, Arabidopsis thaliana
MEVLSTSSPLTLHSHRLLSASSSSSHVTSIAASSLSSFASSYLGISLSNRTIHRFSTTPTNLRRFPQRKRKKFTPISAVFERFTERAIRAIIFSQKEAKSLGKDMVYTQHLLLGLIAEDRDPQGFLGSGITIDKAREAVWSIWDEANSDSKQEEASSTSYSKSTDMPFSISTKRVFEAAVEYSRTMDCQYIAPEHIAVGLFTVDDGSAGRVLKRLGANMNLLTAAALTRLKGEIAKDGREPSSSSKGSFESPPSGRIAGSGPGGKKAKNVLEQFCVDLTARASEGLIDPVIGREKEVQRVIQILCRRTKNNPILLGEAGVGKTAIAEGLAISIAEASAPGFLLTKRIMSLDIGLLMAGAKERGELEARVTALISEVKKSGKVILFIDEVHTLIGSGTVGRGNKGSGLDIANLLKPSLGRGELQCIASTTLDEFRSQFEKDKALARRFQPVLINEPSEEDAVKILLGLREKYEAHHNCKYTMEAIDAAVYLSSRYIADRFLPDKAIDLIDEAGSRARIEAFRKKKEDAICILSKPPNDYWQEIKTVQAMHEVVLSSRQKQDDGDAISDESGELVEESSLPPAAGDDEPILVGPDDIAAVASVWSGIPVQQITADERMLLMSLEDQLRGRVVGQDEAVAAISRAVKRSRVGLKDPDRPIAAMLFCGPTGVGKTELTKALAANYFGSEESMLRLDMSEYMERHTVSKLIGSPPGYVGFEEGGMLTEAIRRRPFTVVLFDEIEKAHPDIFNILLQLFEDGHLTDSQGRRVSFKNALIIMTSNVGSLAIAKGRHGSIGFILDDDEEAASYTGMKALVVEELKNYFRPELLNRIDEIVIFRQLEKAQMMEILNLMLQDLKSRLVALGVGLEVSEPVKELICKQGYDPAYGARPLRRTVTEIVEDPLSEAFLAGSFKPGDTAFVVLDDTGNPSVRTKPDSSTIRVTDKTSIA

SEQ ID NO: 33984 - DNA, 2736 bp, Arabidopsis thaliana
  CDS (1)..(2736)
atgaatccagagaaattcacacacaagacaaacgagacaattgctacagctcatgagctagctgtgaatgcaggacatgctcaattcactcctttgcatttagctggtgctttgatctctgatcccaccggtatatttcctcaagcaatctctagtgccggtggcgagaacgcagctcaatctgctgaaagagtgatcaatcaagccttgaagaagcttccttcacaatctcctccacctgatgatattccagcgagttctagtcttattaaggtcattcgtcgtgctcaagctgctcagaagtcacgaggtgatactcatttggctgttgaccagttgattatgggtcttcttgaagattctcaaatcagggatttgttgaacgaagtcggtgtagcgacggcgagggtaaagtctgaggttgagaagcttcgtgggaaagaagggaagaaagttgagagtgcttcaggggacacaaattttcaagctttaaagacttatggaagagatttggttgagcaagcagggaagcttgatcctgtgattggtcgtgatgaggagattagaagagtcgtgaggattctttcgaggagaacgaagaacaatcctgtgcttattggagagccaggagttggtaaaacagctgtggttgaaggtttagcacaaaggattgtgaaaggagatgtgcccaacagtcttactgatgtgagattaatttcgttggacatgggtgcgttagttgctggtgctaaataccgaggagagtttgaagaaaggttgaaatctgttttgaaagaagttgaggacgctgaaggcaaagtgattctctttattgatgagattcatttggttcttggtgctggcaaaactgaagggtcgatggatgcagctaatctgttcaagcccatgttagctagagggcagcttcgatgcattggtgctacaacgcttgaagaatacaggaaatatgttgagaaagatgctgcctttgagaggaggttccaacaagtctatgttgcggagccaagtgtgcctgacaccattagtatccttagaggactcaaggagaagtatgagggacatcatggtgtgcgaatccaagacagagctcttataaatgctgctcagctgtctgctcgttacataactggtcggcatttaccggataaagcaattgatttggttgatgaggcttgtgcgaatgtgagagtccagcttgatagtcaacctgaagagattgataaccttgaaaggaagaggatgcagctggaaattgaacttcacgccttggaaagggagaaggataaagccagcaaagctcgacttatagaggtgcggaaagagcttgatgacctgagagacaagcttcagcctctcacgatgaaatacagaaaggagaaagagagaattgatgagattcgaaggcttaaacagaaaagagaagagctcatgttttctttgcaggaggcagaacgaagatatgaccttgcaagagctgctgatctaagatatggcgcaattcaagaagtggaatctgcaattgcccaacttgaaggaacttcttctgaagagaatgtgatgctcacagaaaacgttgggcctgaacacattgctgaggttgtgagccgttggacagggattccagtgacgagacttggccaaaatgagaaggagaggttgattggtcttgctgataggttgcataagcgggttgtgggacagaatcaagcggtaaatgcagtttctgaggcaattctaaggtcaagggcaggacttggaaggccacaacagccaactggatcattcttattccttggaccaactggtgttggcaaaactgagctcgccaaggctcttgctgagcagctgtttgatgatgaaaacctcttagttcggattgatatgtcggaatatatggaacaacactctgtctctcgcctcattggggcaccaccagggtatgttggtcacgaggaaggtggacaactaactgaggctgtgaggaggcgaccttattgtgtcatactctttgatgaagtggagaaggctcatgttgctgtcttcaacactctgctccaagttttggatgatggtcgattgacagacgggcaaggcaggacagtcgatttcaggaactcggtgataatcatgacatcaaaccttggtgctgaacacctccttgcagggctaactgggaaagtaacaatggaagtggcccgggactgtgtgatgcgggaggtgaggaaacacttcagaccagagctcttgaacaggcttgacgagattgtggtgttcgaccccctttcacatgaccagttgaggaaagtagctcggcttcaaatgaaagacgttgctgtccggcttgctgaaagaggagttgctttggcagtcactgatgctgctttggactatatcttggcagagagttatgacccggtgtatggtgctaggcctataaggagatggatggagaagaaggtggtgacagaactgtcaaagatggttgtgcgtgaggaaatcgatgaaaactccactgtttacatagatgcaggcgctggtgatcttgtgtaccgggtagaaagtggaggtctagtggacgcttcaacaggcaagaagtcagatgtgctgattcatattgctaacgggccaaagagaagtgatgcagctcaggcggtgaagaagatgaggatcgaggaaatagaagatgacgataatgaggaaatgatcgaggattaa

SEQ ID NO: 33985 - protein, 911 aa, Arabidopsis thaliana
MNPEKFTHKTNETIATAHELAVNAGHAQFTPLHLAGALISDPTGIFPQAISSAGGENAAQSAERVINQALKKLPSQSPPPDDIPASSSLIKVIRRAQAAQKSRGDTHLAVDQLIMGLLEDSQIRDLLNEVGVATARVKSEVEKLRGKEGKKVESASGDTNFQALKTYGRDLVEQAGKLDPVIGRDEEIRRVVRILSRRTKNNPVLIGEPGVGKTAVVEGLAQRIVKGDVPNSLTDVRLISLDMGALVAGAKYRGEFEERLKSVLKEVEDAEGKVILFIDEIHLVLGAGKTEGSMDAANLFKPMLARGQLRCIGATTLEEYRKYVEKDAAFERRFQQVYVAEPSVPDTISILRGLKEKYEGHHGVRIQDRALINAAQLSARYITGRHLPDKAIDLVDEACANVRVQLDSQPEEIDNLERKRMQLEIELHALEREKDKASKARLIEVRKELDDLRDKLQPLTMKYRKEKERIDEIRRLKQKREELMFSLQEAERRYDLARAADLRYGAIQEVESAIAQLEGTSSEENVMLTENVGPEHIAEVVSRWTGIPVTRLGQNEKERLIGLADRLHKRVVGQNQAVNAVSEAILRSRAGLGRPQQPTGSFLFLGPTGVGKTELAKALAEQLFDDENLLVRIDMSEYMEQHSVSRLIGAPPGYVGHEEGGQLTEAVRRRPYCVILFDEVEKAHVAVFNTLLQVLDDGRLTDGQGRTVDFRNSVIIMTSNLGAEHLLAGLTGKVTMEVARDCVMREVRKHFRPELLNRLDEIVVFDPLSHDQLRKVARLQMKDVAVRLAERGVALAVTDAALDYILAESYDPVYGARPIRRWMEKKVVTELSKMVVREEIDENSTVYIDAGAGDLVYRVESGGLVDASTGKKSDVLIHIANGPKRSDAAQAVKKMRIEEIEDDDNEEMIED

SEQ ID NO: 33986 - DNA, 2727 bp, Saccharomyces cerevisiae
  CDS (1)..(2727)
atgaacgaccaaacgcaatttacagaaagggctctaacgattttgacgttggctcaaaaattggcttcggatcatcaacatccacaattacaacctatacatattctagctgccttcattgaaacgccagaagatggatcagtcccttacctacagaatctaattgagaagggccgttacgactatgatcttttcaagaaagtggttaatagaaatctagtaagaattcctcaacagcaacctgcacctgcggagataactccaagttatgctttggggaaagtccttcaagacgctgctaagattcaaaaacaacagaaggactcatttatagcgcaagaccatatattgtttgctctattcaatgattcgtctattcagcaaatatttaaggaagctcaagtagatattgaggccatcaagcaacaagctcttgaacttcgtggtaacactagaattgactctcgtggcgctgatacgaacacacctttggaatatttatcaaagtacgccattgatatgactgagcaggctcgtcaaggtaaacttgaccctgtcatcggccgtgaagaagaaataagaagcactattagagttttagcaagaagaattaagtccaacccatgtttaattggtgagccaggtatcggtaagaccgctattattgaaggtgttgctcaaagaatcattgacgatgacgttcccactatcttacaaggcgctaaattgttcagtctagatttggccgcattaaccgcaggtgctaaatacaaaggtgatttcgaagaaagattcaaaggtgttttgaaggaaatcgaagaatcaaagactctaattgtgttattcattgatgaaattcacatgttaatgggtaatggtaaggacgacgctgctaacatcttgaagccagctttgtccagaggccaattgaaggtcatcggtgccaccaccaataacgaatatagatctattgtggaaaaggatggtgcctttgaaagaagattccagaaaattgaagtcgctgaaccaagtgtgagacaaacagtggccatattgagaggtctgcaaccaaagtatgaaatacatcatggtgtaaggattctggatagcgccttagtcactgctgctcaattagccaagcgttacttgccatatagaagattgccagattctgctttggatttagttgatatttcttgtgctggtgtcgccgtcgcaagagattctaagccagaagaattggattccaaggaacgtcaattgcaattgattcaagtagagataaaagctctagagagagatgaagatgccgactccaccactaaagatagattaaagttagctaggcagaaggaagcttcattgcaagaagaattggaacctctaagacaacgttacaatgaagaaaagcatggccatgaagaattgacacaagctaaaaagaaattggatgaactggaaaacaaggcccttgatgctgaacgtagatatgatactgctaccgccgctgatttaaggtacttcgccatcccagatatcaaaaagcaaatcgaaaagcttgaagatcaggttgctgaggaagagagacgtgctggtgccaactccatgatccaaaatgtggtcgattcagacaccatttctgaaacagctgcaagattgactggtatccctgttaagaagttgtcagaatctgaaaatgaaaaattgattcatatggaacgtgacttatcatctgaagtcgtgggccaaatggatgccattaaagctgtttccaatgccgttagattgtctagatcaggtttagctaatccaaggcaaccagcatccttcttatttttaggtttgtccggttccggtaaaactgaattggctaaaaaagttgctggatttttgtttaatgatgaggacatgatgatcagggtcgattgttctgaattaagcgagaagtatgcggtctctaagttgttgggtaccacggcaggttatgtcgggtacgatgaaggtggctttttaactaaccaactgcaatacaaaccatactccgttttgttattcgatgaagtagaaaaggcacatcctgatgttttgactgtcatgctacaaatgttggatgacggtagaattacttctggtcaaggtaagacgatcgactgttccaattgtattgtcatcatgacttccaatctaggtgctgaatttatcaattctcaacaaggatcaaagatccaagaatctaccaagaatttggtcatgggtgctgttaggcaacatttcagaccagaatttttgaacagaatttctagtatagtcattttcaacaagctatctagaaaagctattcataagatcgtggatattcgtttgaaggaaattgaagagagattcgagcaaaatgataaacattacaagttgaatttaactcaagaggccaaggacttcttggccaaatatggttattccgatgatatgggtgcacgtccactgaacaggttaattcaaaacgaaattttgaacaaactggcactaaggatcttaaagaatgaaatcaaggataaggaaactgtcaatgtcgtcttgaagaagggtaaatctcgtgatgaaaatgttcctgaggaagctgaagaatgtctggaagttctaccaaatcacgaagctactataggggctgacacgttaggtgatgacgataatgaggacagtatggaaattgatgatgacctagattaa

SEQ ID NO: 33987 - protein, 908 aa, Saccharomyces cerevisiae
MNDQTQFTERALTILTLAQKLASDHQHPQLQPIHILAAFIETPEDGSVPYLQNLIEKGRYDYDLFKKVVNRNLVRIPQQQPAPAEITPSYALGKVLQDAAKIQKQQKDSFIAQDHILFALFNDSSIQQIFKEAQVDIEAIKQQALELRGNTRIDSRGADTNTPLEYLSKYAIDMTEQARQGKLDPVIGREEEIRSTIRVLARRIKSNPCLIGEPGIGKTAIIEGVAQRIIDDDVPTILQGAKLFSLDLAALTAGAKYKGDFEERFKGVLKEIEESKTLIVLFIDEIHMLMGNGKDDAANILKPALSRGQLKVIGATTNNEYRSIVEKDGAFERRFQKIEVAEPSVRQTVAILRGLQPKYEIHHGVRILDSALVTAAQLAKRYLPYRRLPDSALDLVDISCAGVAVARDSKPEELDSKERQLQLIQVEIKALERDEDADSTTKDRLKLARQKEASLQEELEPLRQRYNEEKHGHEELTQAKKKLDELENKALDAERRYDTATAADLRYFAIPDIKKQIEKLEDQVAEEERRAGANSMIQNVVDSDTISETAARLTGIPVKKLSESENEKLIHMERDLSSEVVGQMDAIKAVSNAVRLSRSGLANPRQPASFLFLGLSGSGKTELAKKVAGFLFNDEDMMIRVDCSELSEKYAVSKLLGTTAGYVGYDEGGFLTNQLQYKPYSVLLFDEVEKAHPDVLTVMLQMLDDGRITSGQGKTIDCSNCIVIMTSNLGAEFINSQQGSKIQESTKNLVMGAVRQHFRPEFLNRISSIVIFNKLSRKAIHKIVDIRLKEIEERFEQNDKHYKLNLTQEAKDFLAKYGYSDDMGARPLNRLIQNEILNKLALRILKNEIKDKETVNVVLKKGKSRDENVPEEAEECLEVLPNHEATIGADTLGDDDNEDSMEIDDDLD

SEQ ID NO: 33988 - DNA, 2439 bp, Candida albicans
  CDS (1)..(2439): transl_table=12
atgttatcatctagaataccaaaaggtaaactattaaaacaaacttctgccacaagctacttgaatctagctaaaagtataccaataacaactgctagatacagacccaaccagtattatgcaaatgaattagctaaacctaatgtatttaccattcacaacataccatcaccatgcttttcacaagttagaaatttccacctgtcatttcccaggaaacttcaaatgcaacagaccgaacaaggtgacaatcgaccagcgttagagaagtttggttctgatttgacccagttggccaaagaaggcaagttggatccagttattgggagagatcacgaaatccgccgtaccattcaaatattatcacgtcgaacaaagaataatcccgtcttgattggtaatgccggtactggtaaaactgcagtaatggagggtttggcacaaagaattattcgtggtgaagttcccgattcaatgaaagacaaacaaattattactttagatttggctggtatcattagtggagctaagtatcgtggggatttcgaaagtaaactcaaatcaatattgaaagaagtcgaggaaaagaatggcaaggttatcttgtttattgatgagttccatttattgatgggtttaggtaaagccgagggatcaatcgacgcttcaaatttgttgaagcctgccttggcaagaggtaaattgtcgatgtgtggagcaactaccatcgaagagtatagaaaatatgtggaaaaagatgctgctttagccagaagattttctcctgtcactgtgaatgaacctactggtgaagataccatatcaattttgcgaggtttaaaggaacgttatgaagttcaccatggggttcgtatcatggactcagcattagtcactgctgcattatattccaatagatatataacagacagatttttgccagataaagccattgatttagttgatgaagcaagttcaacattgcggttgcaacatgaatctcgaccagatgcaattgcaactttggaccgtcaaataatgactattgaaattgaattagaatctttgcggaaagaagaggatcaactttctattgatagaaaacacaaattggaaaaggaattggaggtgaagaaaagtgagttgaaggaattaacagaccaatgggagtcagaaaagcgtgcaatcgatgcagtgaaaaacgcaaagtctgagttagagaaagcaaaatacgagttggaacaggctacaagagaaggagattacgccagggcttccagaatccagtatgctagtattcctgaattacaagacaagatccaagagttgagcaaaaatgaacttgctgccaaatcatcgaatcttttgcatgactctgtgacgtccgaggatattgccggtgttatatcaaagatgacggggatccctgtgaacaatttgttgaaaggtgagaaggacaagttgttagatatgaatatacttttacgccaatcagttgttgggcaggacgaagccattgatgcagtctccgatgcagtcagattgcaacgtgcaggtttgaccagtgagaatcgtccaattgcatcctttatgtttttgggtcctactggtacaggaaaaacggaattgacaaaatcattagcacaattcttgtttaacgataagaacgctgtggttagattcgatatgtctgagttccaagaaaagcataccatttcgagattgataggttctcctcctgggtacgtgggatacgaagaaagtggtgagttgactgaagctgttagaagaaaaccatattcggtagtcttatttgatgagtttgagaaagcacacccagatctttccaaattattattacaagtattggatgaaggttcgttaacagattctcatggtaaaaagattgatttcaagaatacaattattgtaatgacatccaacattggccaagagattttgcttgctgataaaaacacctatgaggatggtcatatcaacagcgaagtcaaactgcaagttttagaaaatttgagacaccattatgctccagaattcttgaaccgtattgatgatatcgtggtctttaacagattgtcaaagacagctttgaaagaaattttagacatccgtttgagagaaatcggtgatcgtttggtcgacaaacgtattatattacaattaactgatgaagcaaaaacattgttgtgcgacatgggctatgatccaacttatggtgctcgtccacttaatagagtattgagaaagaaattgttagatccattggctatgcgtttgatcaagggacaagttcaagagaatgaaactgtcaaagtagaagtgaaagatcacaaaatttatgttgttccaaaccacagtgaagggacggttattgaaaaggaagaagactattttaaagaagataaggatgacaattaa

SEQ ID NO: 33989 - protein, 812 aa, Candida albicans
MLSSRIPKGKLLKQTSATSYLNLAKSIPITTARYRPNQYYANELAKPNVFTIHNIPSPCFSQVRNFHSSFPRKLQMQQTEQGDNRPALEKFGSDLTQLAKEGKLDPVIGRDHEIRRTIQILSRRTKNNPVLIGNAGTGKTAVMEGLAQRIIRGEVPDSMKDKQIITLDLAGIISGAKYRGDFESKLKSILKEVEEKNGKVILFIDEFHLLMGLGKAEGSIDASNLLKPALARGKLSMCGATTIEEYRKYVEKDAALARRFSPVTVNEPTGEDTISILRGLKERYEVHHGVRIMDSALVTAALYSNRYITDRFLPDKAIDLVDEASSTLRLQHESRPDAIATLDRQIMTIEIELESLRKEEDQLSIDRKHKLEKELEVKKSELKELTDQWESEKRAIDAVKNAKSELEKAKYELEQATREGDYARASRIQYASIPELQDKIQELSKNELAAKSSNLLHDSVTSEDIAGVISKMTGIPVNNLLKGEKDKLLDMNILLRQSVVGQDEAIDAVSDAVRLQRAGLTSENRPIASFMFLGPTGTGKTELTKSLAQFLFNDKNAVVRFDMSEFQEKHTISRLIGSPPGYVGYEESGELTEAVRRKPYSVVLFDEFEKAHPDLSKLLLQVLDEGSLTDSHGKKIDFKNTIIVMTSNIGQEILLADKNTYEDGHINSEVKSQVLENLRHHYAPEFLNRIDDIVVFNRLSKTALKEILDIRLREIGDRLVDKRIILQLTDEAKTLLCDMGYDPTYGARPLNRVLRKKLLDPLAMRLIKGQVQENETVKVEVKDHKIYVVPNHSEGTVIEKEEDYFKEDKDDN

SEQ ID NO: 33990 - DNA, 2436 bp, Saccharomyces cerevisiae
  CDS (1)..(2436)
atgttaagacaagctacaaaagcaccaatacaaaaatatttacagagaacgcaactattaaggcgaagtactccacgaatatacactattgtacagtgtaaaagatctatttgcagttttaatgcaagacctcgagtagccaataaacttctatcagatataaaaacaaatgcattaaatgaagtcgctatttcaacctgcgccctcaagagctcatatggattgcccaatttcaaaagaacgtacgtccaaatgaggatggatcccaatcagcaaccggaaaagccagctttagaacaatttggtacaaacttgacaaaattagcgcgcgacggtaaattagaccctgtcattggcagagacgaagaaatcgcaagagctattcaaattttatcaagaagaacaaaaaataatccatgtttgatcggtcgagctggtgtcggtaaaaccgcccttattgatgggttagctcaaagaattgttgctggggaggtccctgactcgttgaaagataaagatctagtagctttggatttgggatctttgattgctggcgccaaatatagaggtgaattcgaagaacgtttaaaaaaggttttagaagaaattgacaaggccaatggtaaggttattgttttcattgatgaagttcatatgctgcttggcttaggtaaaactgatggtagtatggatgcttctaacatcttaaagccaaaactggcccgtgggctacgttgtatctctgcaaccactcttgatgaattcaaaatcattgaaaaagatccggctttatcgagaaggtttcagcctatcttattgaatgagccgagcgtctccgatacgatttctatactaagaggtttaaaagaaaggtacgaggttcatcatggtgtaaggatcactgatacagctttagtgtctgctgcagttctttcaaatcgttatataacagacaggtttctacctgataaagccattgatctagttgacgaagcttgtgctgtactacgtttacaacatgaatccaaaccggatgaaatacagaaactggatcgtgctattatgaaaatacaaatagaactggaatctttaaagaaagagaccgaccctgtttccgtggaaagaagagaagcgttggaaaaggacctagaaatgaaaaatgatgaattaaacagattaacaaaaatatgggacgctgaaagagctgaaattgaatctatcaaaaatgctaaggcaaatttggaacaagcaagaattgagttggaaaagtgtcagagagagggtgattacactaaagcatccgagttgcgatattccagaattcctgacttggagaagaaggtagctttaagcgagaagagtaaggacggagataaagtaaatttacttcatgattcagttacttctgacgatatttctaaggttgttgccaaaatgactggtattcctacagaaacggtgatgaaaggcgacaaggaccgcctactgtatatggaaaattctttaaaagaaagagtcgttggccaagacgaggccattgctgctatttctgatgctgtacgtcttcaaagggctggtttgaccagtgaaaagagacctattgccagctttatgttcttaggtcctactggtactggtaaaacagaattgaccaaggctttagctgaattcctatttgatgacgaatcaaatgtgattcgttttgacatgtcagaatttcaagagaagcatactgtctctcgtttaatcggtgcacctccaggttacgtcttaagcgaatctggtggccaattaactgaggctgtcagaagaaagccttatgctgtcgttttatttgatgaatttgaaaaagcgcaccccgatgtttccaaactactgttgcaagtgttggatgaaggtaagctgaccgattccctaggccatcatgttgatttccgtaacacgatcattgtgatgacctcaaacattggacaagatattttattaaacgacacaaagttgggtgatgatggtaagattgacaccgcaaccaagaataaagttatcgaagcaatgaaaagatcctatccacctgagttcatcaatcgtattgatgatattctagttttcaataggctatccaagaaagttttgaggtcaattgttgatattagaattgcagaaattcaagatcgtttggccgaaaaaagaatgaaaattgatttaactgatgaagcgaaggattggctaactgacaaaggctacgatcaattatatggtgcaaggccattgaatagattaattcatagacagattttgaactccatggcaactttcttattaaaaggtcaaattagaaacggcgaaactgttagagtggtggttaaagatactaagcttgtcgtgctaccaaatcatgaagaaggcgaagttgttgaagaggaagctgaaaagtaa

SEQ ID NO: 33991 - protein, 811 aa, Saccharomyces cerevisiae
MLRQATKAPIQKYLQRTQLLRRSTPRIYTIVQCKRSICSFNARPRVANKLLSDIKTNALNEVAISTCALKSSYGLPNFKRTYVQMRMDPNQQPEKPALEQFGTNLTKLARDGKLDPVIGRDEEIARAIQILSRRTKNNPCLIGRAGVGKTALIDGLAQRIVAGEVPDSLKDKDLVALDLGSLIAGAKYRGEFEERLKKVLEEIDKANGKVIVFIDEVHMLLGLGKTDGSMDASNILKPKLARGLRCISATTLDEFKIIEKDPALSRRFQPILLNEPSVSDTISILRGLKERYEVHHGVRITDTALVSAAVLSNRYITDRFLPDKAIDLVDEACAVLRLQHESKPDEIQKLDRAIMKIQIELESLKKETDPVSVERREALEKDLEMKNDELNRLTKIWDAERAEIESIKNAKANLEQARIELEKCQREGDYTKASELRYSRIPDLEKKVALSEKSKDGDKVNLLHDSVTSDDISKVVAKMTGIPTETVMKGDKDRLLYMENSLKERVVGQDEAIAAISDAVRLQRAGLTSEKRPIASFMFLGPTGTGKTELTKALAEFLFDDESNVIRFDMSEFQEKHTVSRLIGAPPGYVLSESGGQLTEAVRRKPYAVVLFDEFEKAHPDVSKLLLQVLDEGKLTDSLGHHVDFRNTIIVMTSNIGQDILLNDTKLGDDGKIDTATKNKVIEAMKRSYPPEFINRIDDILVFNRLSKKVLRSIVDIRIAEIQDRLAEKRMKIDLTDEAKDWLTDKGYDQLYGARPLNRLIHRQILNSMATFLLKGQIRNGETVRVVVKDTKLVVLPNHEEGEVVEEEAEK

SEQ ID NO: 33992 - DNA, 3132 bp, Oryza sativa
  CDS (1)..(3132)
atgtcacgcgccaccgccgtgtccaggctcgcgcgcgccgcccgcgccgcggcggcggcgcggcgccaccacgctggcggccgggacccgctccgcgccctcgcgtcgctcgctggagacgcttccgcttccgctggtggtggggcgaggaggcccgcgtggttcgcgccgcccatgggccggctcggtggaggcgggctgctggttccgccgccgccgccgcagcggaggctgttccaccccacgcaggcggcgaggtacagcacctcgtcgtcgtctcagataactccaggagaatttactgagatggcctgggagggggttgtcggcgcggttgatgcagctagaatgtcgaagcaacaagtagtggaagcagagcacctgatgaaagctcttctggagcagaaggatggtttagcgcgcagaatattttcgaaagctggaatagataacacatctgtcctgcaagctactgatgagttcatctcgagacagccaaaggttgttggcgatacaagtggaccgatcattgggtcaagctttgtatcaattttggataatgcaaggaagcataagaaagaatatgctgatgagtttgtatctgttgagcacatattgcgagcattcacagaagataagaggtttggacaacagctgttcagagatctcaaaattggggagaatgagttgaaggaagctatctccgctgtacgtggcagtcagcgggtcacagatcagattgtttttctacagaggtatctctttgttcagctctctattcacaacttgaggggagactctgccaatggcaatggttttgtttcagccagatggtttttcatgttagcattaaaatgtacccagtgtgactgtttgataaccttaggaatcataactctttttatggtgctgcttccagatccggaggggaagtaccaggctctagagaagtatggtattgacatgacagaattagctcgacgtggaaaactggatcctgttattggccgtgatgatgaagtgcgacgatgcattcagatcctttgcaggagaactaagaataatcctgtaattattggtgagccaggagtcggcaaaactgctatcgctgaaggattggcacagcgtattgtgcggggagatgttcctgaacctttacagaatagaaagcttatttcattggacatgggagcattacttgctggggctaaattccaaggtcaatttgaagagagacttaaggctgttctgaaggagatcactgcctcgaatgggcagatcatcttgttcattgatgagatccacactattgttggtgcaggagcagcaggtggggcaatggatgctggtaatttgctgaagccaatgttaggtcggggtgaactccgttgcattggagcaacaacactagatgagtacaggaagtacattgagaaggatgctgctctggagcgtaggttccagcaggtttattgtggtgagccagcagttgaggatacaatctctatactgcgtggcctaagagagcggtatgaactgcaccatggtgtcaaaatatcagatggagctcttgtttctgcggctgttttatcagatcgctacatcactggacgttttttgcctgataaagctattgacctagttgatgaagcagctgctaagctgaaaatggagataacatcgaaacctattgaattggatgaggtagatagggaaatcataaggcttgaaatggagaagctctcattgaagaatgataccgataaagcctccaaacagcgactgagcaagcttgaagctgatctagaatctctgaagcagaagcagaaaaacctttcagaacattgggaatatgagaagtccttgatgactcgcataagatcgatcaaggaagagactgacagagttaacctggagattgaagctgctgagagagagtatgatttgaaccgtgcagctgagctcaagtacggaacacttctgtcgctacaaaaacagcttgaagaggctgagaacaaactcatggaattccagcagtcaggcaagtcaatgcttcgagaagaggtgactgatgttgacattgctgagattgttagcaagtggactggtattccagtgtcaaaccttcaacaatctgaaaaggaaaagctactgctattggaagatgtactccacaagagggttattggccaagatattgcagtgaagtcagtggctaatgcaatccgtcgttctagggcaggcctatcagaccctaaccgtcccatagcaagcttaatgtttatgggtccaacaggtgtaggaaagaccgaactggggaaaacactagctgaattccttttcaacacagagaatgctctaatacggattgatatgagcgagtacatggaaaagcatgccgtctcccgtttggttggagcccctcctggctatattggttatggggaagggggccaactgacagaagctgttcgtcgtaggccttattctgtggttcttttcgatgaaattgagaaagcgcaccaggatgtgttcaacatcttattgcaacttttggatgatggaagaataaccgactctcagggcagaacagtcagctttactaactgtgttatcatcatgacttcaaacattgggtcgccattgattcttgatacgcttagaaacacatcagacagcaaggaggcagtttatgaaataatgaagaagcaagtgattgacatggctcggcagtcattccggccagagtttttgaataggatagatgagtacattgtattccagccgctggacaccacagagataaatcgcatcgtggagatccagctgaaccgagtcaagaaccggctgaggcaacagaagattcatctgcagtacacaccagaagctgtggagcatcttggctctctcggctttgaccctaactacggtgctaggcctgtgaagagggtgatccagcagatggtagagaacgagatcgccctcagtgtcctgaagggcgacttcaaagaagacgacaccgtcctcgtcgacgtgagctccgtggcgatcgcgaaaggccttgctccacagaagaagcttgtcctccagaggttagagaatgcaaacttagagttagtcgccaatgactag

SEQ ID NO: 33993 - protein, 1043 aa, Oryza sativa
MSRATAVSRLARAARAAAAARRHHAGGRDPLRALASLAGDASASAGGGARRPAWFAPPMGRLGGGGLLVPPPPPQRRLFHPTQAARYSTSSSSQITPGEFTEMAWEGVVGAVDAARMSKQQVVEAEHLMKALLEQKDGLARRIFSKAGIDNTSVLQATDEFISRQPKVVGDTSGPIIGSSFVSILDNARKHKKEYADEFVSVEHILRAFTEDKRFGQQLFRDLKIGENELKEAISAVRGSQRVTDQIVFLQRYLFVQLSIHNLRGDSANGNGFVSARWFFMLALKCTQCDCLITLGIITLFMVLLPDPEGKYQALEKYGIDMTELARRGKLDPVIGRDDEVRRCIQILCRRTKNNPVIIGEPGVGKTAIAEGLAQRIVRGDVPEPLQNRKLISLDMGALLAGAKFQGQFEERLKAVLKEITASNGQIILFIDEIHTIVGAGAAGGAMDAGNLLKPMLGRGELRCIGATTLDEYRKYIEKDAALERRFQQVYCGEPAVEDTISILRGLRERYELHHGVKISDGALVSAAVLSDRYITGRFLPDKAIDLVDEAAAKLKMEITSKPIELDEVDREIIRLEMEKLSLKNDTDKASKQRLSKLEADLESLKQKQKNLSEHWEYEKSLMTRIRSIKEETDRVNLEIEAAEREYDLNRAAELKYGTLLSLQKQLEEAENKLMEFQQSGKSMLREEVTDVDIAEIVSKWTGIPVSNLQQSEKEKLLLLEDVLHKRVIGQDIAVKSVANAIRRSRAGLSDPNRPIASLMFMGPTGVGKTELGKTLAEFLFNTENALIRIDMSEYMEKHAVSRLVGAPPGYIGYGEGGQLTEAVRRRPYSVVLFDEIEKAHQDVFNILLQLLDDGRITDSQGRTVSFTNCVIIMTSNIGSPLILDTLRNTSDSKEAVYEIMKKQVIDMARQSFRPEFLNRIDEYIVFQPLDTTEINRIVEIQLNRVKNRLRQQKIHLQYTPEAVEHLGSLGFDPNYGARPVKRVIQQMVENEIALSVLKGDFKEDDTVLVDVSSVAIAKGLAPQKKLVLQRLENANLELVAND

SEQ ID NO: 33994 - DNA, 2817 bp, Oryza sativa
  CDS (1)..(2817)
atggaggtgtgctgctgctcgacgtcatcggccgtgcccgggaggaggttcgcggcggccggggcggcggcggcggcggtggcggcgaggtggggcgccgtgggggtcgggagggcggtggtgctggcgcacccgctgcgcccggcgccgcgcggcgggcacgcgcacgcgcagcaggcgggcgcgcggcgggcgcggcgcgcggtcgtcagggcggtgttcgagcggttcacggagcgggcggtgaaggcggtggtgctgtcgcagcgggaggccaaggggctcggggagggcgccgtggcgccgcgccacctgctgctggggctcatcgccgaggaccggtcggcgggcgggttcctctcgtcggggatcaacatcgagcgcgcgcgcgaggagtgccgcggcatcggcgccagggacttgacccccggcgcgccgtcgccgtccggctccgggctggaaatggacatacccttctccggcagctgcaagcgggtgttcgaggtcgccgtggagttctcccggaacatgggctgcagcttcatctccccggagcacctcgccctcgcgctcttcaccctcgacgatcccaccaccaacagcctcctcaggagcttgggagcggatccgagtcaactagcatcagtagcgcttacccgactccaagcggagcttgcgaaagattgcagagaacctgcaggagcatcatctttcaaagtacccaagaaatctcctgctggagctggaagatctgccttctcgaaatctttaaattcaaagaaagaaaagggtgcgcttgatcaattttgtttagatctgaccacacaagctagtggcgggtttattgatcctatcattggccgtgaggaggagattgaaagagtagttcagataatatgccgacggacaaagaacaatcctattcttttgggtgaggcaggtgttggcaaaactgcaatcgctgaagggttggctcttcgaattgcaaatggagatgtccccatttaccttgtggcaaagcgtataatgtcattggacgttggtctacttattgctggtgcaaaagaaagaggtgaactggagtccagggttactagtttaattcgtgaagtccgggaagcaggggatgttattcttttcattgatgaggttcacaatcttattggatctggcactgttggaaagggtaagggtgctggccttgacattggcaacttgctgaagcccccacttgctagaggtgaattgcagtgcattgcagctacaactctagatgaacacagaatgcattttgagaaggataaggctttggctcgccgcttccagccagtattagtagaggagcctagtcaggatgatgctgtgaagatattacttggtcttcgtgaaaaatatgaaacatatcacaaatgcaaatttaccttagaagccatcaatgcagcagtttatctgtcagcaagatatattcctgacaggcagctccctgacaaggccatcgatctgattgatgaagctggcagtagagctcgaatggaatcatttaataggaagaaagaagggcagtcttcaatcctcttaaagtcgccagatgaatactggcaagagataagagctgctcaaaacatgcatgaagtggtgtcatcaaaccagatgaagtattcccctcgtcaagagaatggcagtgctgccattaaagcaccaagcgaggacatgaatgagttgacatctgaactccaagttgaggaaccaattgtagttggaacagaggaaattgcaagagttgcctcattgtggtcagggataccagtccagcagttaactgctgatgatagaaagcttctcgtaggactagatggtgaactcagaaagcgtgtgattggtcaagatgatgctgttatggcaatatctagagcggtgaagagatcacgtgttggcctcaatgatcctgacagacctattgccactctacttttctgtggtccgacaggagttggtaaaactgagcttactaaagctctagcagctagttattttggatcggaatctgctatgcttagattagacatgagcgagtatatggagaggcacactgtgagcaagctcataggctctcctccagggtacatcggatatggtgaaactggtactctgacagaagctgtcaggagaaagccatttactgtagtattacttgatgagatagagaaagctcaccctgatattttcaacattcttctccaaatttttgaagatgggcatctgtcggactcacagggccgcagagtgtccttcaagaacacattgattgtcatgacatcaaatattggttctacatcaatttcaaagggaagacgaagcatgggtttcatgacagaagatactgaatcaagctcatatgttgcaatgaaatctctagtaatggaagagttgaaggcatttttccgtccagaattgctcaacagaatcgatgagatggttgtattccgtcccttagagaaaactcagatgctagcaattcttgatatcatcctacaagaagtgaagggtaggctgttagcccttggaataggcctcgaggtgtccgatgcaatgaaggacctgatttgcgaagaaggctatgacaagagctacggtgcgcggccactgaggagagccgtcacccacctgattgaggatgtgatcagcgaagcaattctatttggcgaatacaagcctggggacacgatactgatggatattgatgccggggggaaactttgcatgagccacctgaatgagaaggttgtccagttgtctgatccgacacggacattctga

SEQ ID NO: 33995 - protein, 938 aa, Oryza sativa
MEVCCCSTSSAVPGRRFAAAGAAAAAVAARWGAVGVGRAVVLAHPLRPAPRGGHAHAQQAGARRARRAVVRAVFERFTERAVKAVVLSQREAKGLGEGAVAPRHLLLGLIAEDRSAGGFLSSGINIERAREECRGIGARDLTPGAPSPSGSGLEMDIPFSGSCKRVFEVAVEFSRNMGCSFISPEHLALALFTLDDPTTNSLLRSLGADPSQLASVALTRLQAELAKDCREPAGASSFKVPKKSPAGAGRSAFSKSLNSKKEKGALDQFCLDLTTQASGGFIDPIIGREEEIERVVQIICRRTKNNPILLGEAGVGKTAIAEGLALRIANGDVPIYLVAKRIMSLDVGLLIAGAKERGELESRVTSLIREVREAGDVILFIDEVHNLIGSGTVGKGKGAGLDIGNLLKPPLARGELQCIAATTLDEHRMHFEKDKALARRFQPVLVEEPSQDDAVKILLGLREKYETYHKCKFTLEAINAAVYLSARYIPDRQLPDKAIDLIDEAGSRARMESFNRKKEGQSSILLKSPDEYWQEIRAAQNMHEVVSSNQMKYSPRQENGSAAIKAPSEDMNELTSELQVEEPIVVGTEEIARVASLWSGIPVQQLTADDRKLLVGLDGELRKRVIGQDDAVMAISRAVKRSRVGLNDPDRPIATLLFCGPTGVGKTELTKALAASYFGSESAMLRLDMSEYMERHTVSKLIGSPPGYIGYGETGTLTEAVRRKPFTVVLLDEIEKAHPDIFNILLQIFEDGHLSDSQGRRVSFKNTLIVMTSNIGSTSISKGRRSMGFMTEDTESSSYVAMKSLVMEELKAFFRPELLNRIDEMVVFRPLEKTQMLAILDIILQEVKGRLLALGIGLEVSDAMKDLICEEGYDKSYGARPLRRAVTHLIEDVISEAILFGEYKPGDTILMDIDAGGKLCMSHLNEKVVQLSDPTRTF

SEQ ID NO: 33996 - DNA, 2937 bp, Oryza sativa
  CDS (1)..(2937)
atggccgcagcgccgccgctcgccgcggggctccggcccgccatggcggcggcacaggcgccggtcgtcgccgcggcgtggggcgtgggcgctaggaggggggcggccttgtcgtcgtcggctcggtgtagggcgcttcggttgtcgagaggaggaggaggagggcgagatgggtgggtgcctcctcccgtggtggggaggatgccgccgcggacgctctccgtcaggtgcgccgccagcaatgggaggattacacaacaagagttcactgagatggcatggcaatcgattgtttcgtcgcctgaagtagcgaaagagagtaaacaccagattgtggagactgaacatctgatgaaatcattgctggagcaaaggaatgggctcgcccgtcgaatcttttctaaagctggagttgataatacaaggcttcttgatgccacagagaagttcatccagcggcagcctaaggtgttgggtgaagatcctggttccatgttgggacgtgacttggaagctctgatacaaagagcacgagactttaaaaaagagtatggtgattcatttgtttcggttgagcatctggtccttggttttgcggaggataaacgatttggaagacagctgttcaaggatttccagattaccgtacagtccttgaaaactgccattgaatcaataagagggaaacaaaatgtgattgatcaagatcctgagggaaaatatgaagctttggacaagtatggcaaggacctcacagccatggcacgtcaggggaaacttgacccggttataggaagagatgatgaaattcgtagatgcattcaaattttatctcggagaacaaagaataatccagttttgattggtgaacctggtgtggggaaaactgctatagctgaagggcttgctcagaggatagtgcaaggagatgttccgcaagctctaacaaaccgcagactaattgcacttgacatgggtgctttgattgctggggcaaaatatcgtggggaatttgaggataggctgaaggctgtactcaaggaagtcacagattctgatggacaaaccattcttttcattgatgagattcacactgttgttggagcaggtgcaacaaatggtgccatggacgctggtaatcttctaaaaccgatgcttggtaggggagagctacgttgtatcggtgccacaacccttgacgagtaccgcaaatatattgagaaggatcctgcattggagcgtcgcttccaacaagtttatgttgatcaaccttcagttgaagatacaatctcaatactccgtggattacgggagagatatgaattgcaccatggggtacgcatatcagacagtgcacttgtggcagcagctcttctctcagaccgttacattagtggacgatttctgccggacaaagcaattgatttggttgatgagtcagctgccaaattgaaaatggagataacttccaagccaactgctctagatgagattgatcgtgctgtaataaagcttgaaatggaacgtctctcactaacaaacgatacagacaaagcatcaagggacagactatctcgaattgaagcagaactgtcactattgaaagaaaagcagaaggacctgactgagcagtgggagcgtgagaagtcggtgatgactaagattcaatctattaaagaagagattgatagggtcaatgtggagatccagcaggccgaacgtgagtatgatctcaatcgtgctgctgaactgaagtatggcagtctgaacgcattgcagcgccagcttcaaacaacagagaaagagctagatgaatatcaaagttctgggaaatccatgctaagagaagaggtcacccaagatgatattgcagaaatagtgagcaggtggactggtattccagtatctaaactaaagcaatctgatagggagaagttgctgtatctagaggaagaactgcacaagcgtgttgttgggcaggatcctgcagtcaaagcagtttctgaggctattcagagatccagggctggtttgtccgatccaaatcgccccattgccagtttcatgttcatgggccctacaggagttggcaaaacggaactagcaaaagcccttgctgcttttatgttcaacactgaggaagctgttgttaggattgacatgagtgaatacatggagaagcattctgtctcaagactgattggtgcaccaccaggctatgttgggtatgaagagggtggtcagcttacggaagctgttcgtcggaggccatattccattatcttgtttgatgagattgagaaagcccatggagatgtattcaatgttttccttcaaatattggacgatggaagggttactgactcgcagggcaggaaagtgagcttcaccaacagtatcattatcatgacatccaatgttggttcacagttcatactaaacatggatgaagaaggtgggtcaactgattcagcctatgagaatataaagaagagggtgatggatgctgcaagatctgttttccgtccggagttcatgaatcggattgatgagtacattgtcttcaagccacttgagagggaacagatcaacagcattgtcaaattacagcttgcaagagtacaaaaaagaattgccgatcgcaagatcaaactcgaagtgtcgcctggagcagtcgaattcctgggaagccttggttacgatccgaattacggtgccaggccagtgaagcgagtgattcaacagtatgtggagaacgagctggcgaagggtatcctgagaggtgatttcaaggacgaggacagcatcctggtagacacccaggtcaccgtgccatctaatggtcagctccctcagcaaaagctcgttttccacaaaatgagtgaagaatccgcaccagctgctgctgaagacgagaaatttttgccggctgtttga

SEQ ID NO: 33997 - protein, 978 aa, Oryza sativa
MAAAPPLAAGLRPAMAAAQAPVVAAAWGVGARRGAALSSSARCRALRLSRGGGGGRDGWVPPPVVGRMPPRTLSVRCAASNGRITQQEFTEMAWQSIVSSPEVAKESKHQIVETEHLMKSLLEQRNGLARRIFSKAGVDNTRLLDATEKFIQRQPKVLGEDPGSMLGRDLEALIQRARDFKKEYGDSFVSVEHLVLGFAEDKRFGRQLFKDFQITVQSLKTAIESIRGKQNVIDQDPEGKYEALDKYGKDLTAMARQGKLDPVIGRDDEIRRCIQILSRRTKNNPVLIGEPGVGKTAIAEGLAQRIVQGDVPQALTNRRLIALDMGALIAGAKYRGEFEDRLKAVLKEVTDSDGQTILFIDEIHTVVGAGATNGAMDAGNLLKPMLGRGELRCIGATTLDEYRKYIEKDPALERRFQQVYVDQPSVEDTISILRGLRERYELHHGVRISDSALVAAALLSDRYISGRFLPDKAIDLVDESAAKLKMEITSKPTALDEIDRAVIKLEMERLSLTNDTDKASRDRLSRIEAELSLLKEKQKDLTEQWEREKSVMTKIQSIKEEIDRVNVEIQQAEREYDLNRAAELKYGSLNALQRQLQTTEKELDEYQSSGKSMLREEVTQDDIAEIVSRWTGIPVSKLKQSDREKLLYLEEELHKRVVGQDPAVKAVSEAIQRSRAGLSDPNRPIASFMFMGPTGVGKTELAKALAAFMFNTEEAVVRIDMSEYMEKHSVSRLIGAPPGYVGYEEGGQLTEAVRRRPYSIILFDEIEKAHGDVFNVFLQILDDGRVTDSQGRKVSFTNSIIIMTSNVGSQFILNMDEEGGSTDSAYENIKKRVMDAARSVFRPEFMNRIDEYIVFKPLEREQINSIVKLQLARVQKRIADRKIKLEVSPGAVEFLGSLGYDPNYGARPVKRVIQQYVENELAKGILRGDFKDEDSILVDTQVTVPSNGQLPQQKLVFHKMSEESAPAAAEDEKFLPAV

SEQ ID NO: 33998 - DNA, 2445 bp, Oryza sativa
  CDS (1)..(2445)
atgttgggacgtgacttggaagctctgatacaaagagcacgagactttaaaaaagagtatggtgattcatttgtttcggttgagcatctggtccttggttttgcggaggataaacgatttggaagacagctgttcaaggatttccagattaccgtacagtccttgaaaactgccattgaatcaataagagggaaacaaaatgtgattgatcaagatcctgagggaaaatatgaagctttggacaagtatggcaaggacctcacagccatggcacgtcaggggaaacttgacccggttataggaagagatgatgaaattcgtagatgcattcaaattttatctcggagaacaaagaataatccagttttgattggtgaacctggtgtggggaaaactgctatagctgaagggcttgctcagaggatagtgcaaggagatgttccgcaagctctaacaaaccgcagactaattgcacttgacatgggtgctttgattgctggggcaaaatatcgtggggaatttgaggataggctgaaggctgtactcaaggaagtcacagattctgatggacaaaccattcttttcattgatgagattcacactgttgttggagcaggtgcaacaaatggtgccatggacgctggtaatcttctaaaaccgatgcttggtaggggagagctacgttgtatcggtgccacaacccttgacgagtaccgcaaatatattgagaaggatcctgcattggagcgtcgcttccaacaagtttatgttgatcaaccttcagttgaagatacaatctcaatactccgtggattacgggagagatatgaattgcaccatggggtacgcatatcagacagtgcacttgtggcagcagctcttctctcagaccgttacattagtggacgatttctgccggacaaagcaattgatttggttgatgagtcagctgccaaattgaaaatggagataacttccaagccaactgctctagatgagattgatcgtgctgtaataaagcttgaaatggaacgtctctcactaacaaacgatacagacaaagcatcaagggacagactatctcgaattgaagcagaactgtcactattgaaagaaaagcagaaggacctgactgagcagtgggagcgtgagaagtcggtgatgactaagattcaatctattaaagaagagattgatagggtcaatgtggagatccagcaggccgaacgtgagtatgatctcaatcgtgctgctgaactgaagtatggcagtctgaacgcattgcagcgccagcttcaaacaacagagaaagagctagatgaatatcaaagttctgggaaatccatgctaagagaagaggtcacccaagatgatattgcagaaatagtgagcaggtggactggtattccagtatctaaactaaagcaatctgatagggagaagttgctgtatctagaggaagaactgcacaagcgtgttgttgggcaggatcctgcagtcaaagcagtttctgaggctattcagagatccagggctggtttgtccgatccaaatcgccccattgccagtttcatgttcatgggccctacaggagttggcaaaacggaactagcaaaagcccttgctgcttttatgttcaacactgaggaagctgttgttaggattgacatgagtgaatacatggagaagcattctgtctcaagactgattggtgcaccaccaggctatgttgggtatgaagagggtggtcagcttacggaagctgttcgtcggaggccatattccattatcttgtttgatgagattgagaaagcccatggagatgtattcaatgttttccttcaaatattggacgatggaagggttactgactcgcagggcaggaaagtgagcttcaccaacagtatcattatcatgacatccaatgttggttcacagttcatactaaacatggatgaagaaggtgggtcaactgattcagcctatgagaatataaagaagagggtgatggatgctgcaagatctgttttccgtccggagttcatgaatcggattgatgagtacattgtcttcaagccacttgagagggaacagatcaacagcattgtcaaattacagcttgcaagagtacaaaaaagaattgccgatcgcaagatcaaactcgaagtgtcgcctggagcagtcgaattcctgggaagccttggttacgatccgaattacggtgccaggccagtgaagcgagtgattcaacagtatgtggagaacgagctggcgaagggtatcctgagaggtgatttcaaggacgaggacagcatcctggtagacacccaggtcaccgtgccatctaatggtcagctccctcagcaaaagctcgttttccacaaaatgagtgaagaatccgcaccagctgctgctgaagacgagaaatttttgccggctgtttga

SEQ ID NO: 33999 - protein, 814 aa, Oryza sativa
MLGRDLEALIQRARDFKKEYGDSFVSVEHLVLGFAEDKRFGRQLFKDFQITVQSLKTAIESIRGKQNVIDQDPEGKYEALDKYGKDLTAMARQGKLDPVIGRDDEIRRCIQILSRRTKNNPVLIGEPGVGKTAIAEGLAQRIVQGDVPQALTNRRLIALDMGALIAGAKYRGEFEDRLKAVLKEVTDSDGQTILFIDEIHTVVGAGATNGAMDAGNLLKPMLGRGELRCIGATTLDEYRKYIEKDPALERRFQQVYVDQPSVEDTISILRGLRERYELHHGVRISDSALVAAALLSDRYISGRFLPDKAIDLVDESAAKLKMEITSKPTALDEIDRAVIKLEMERLSLTNDTDKASRDRLSRIEAELSLLKEKQKDLTEQWEREKSVMTKIQSIKEEIDRVNVEIQQAEREYDLNRAAELKYGSLNALQRQLQTTEKELDEYQSSGKSMLREEVTQDDIAEIVSRWTGIPVSKLKQSDREKLLYLEEELHKRVVGQDPAVKAVSEAIQRSRAGLSDPNRPIASFMFMGPTGVGKTELAKALAAFMFNTEEAVVRIDMSEYMEKHSVSRLIGAPPGYVGYEEGGQLTEAVRRRPYSIILFDEIEKAHGDVFNVFLQILDDGRVTDSQGRKVSFTNSIIIMTSNVGSQFILNMDEEGGSTDSAYENIKKRVMDAARSVFRPEFMNRIDEYIVFKPLEREQINSIVKLQLARVQKRIADRKIKLEVSPGAVEFLGSLGYDPNYGARPVKRVIQQYVENELAKGILRGDFKDEDSILVDTQVTVPSNGQLPQQKLVFHKMSEESAPAAAEDEKFLPAV

SEQ ID NO: 34000 - DNA, 2757 bp, Oryza sativa
  CDS (1)..(2757)
atggaggggtcgctagtccagtccgcgattgctccgaccatatacaggaggagcggcaccgcgcggttccgcgtgcgcgcgagggccacgatgatgcgtaccatgccaacacggaccctcaccctggggggtttccagggcctgcggcagacgaatttcctggactcgaggtcggtgattaagcgtgacttcggctctattgtcgcgagccagatttcacgcccccgagggttggggtcaagaggggtggtccgcgccatgtttgagcgcttcacggagaaggcaatcaaggtgatcatgcttgcacaggaagaagcgaggcgcctgggccacaactttgttgggacggagcaaattctactgggccttatcggtgagggcacaggaatcgcggcaaaggttctcaagtctatgggtatcaaccttaaggatgcccgtgtggaagttgagaagatcattggacgtggtagcgggtttgtggctgttgagatcccattcacgcctcgtgcaaagcgtgtcttggaactgtcacttgaagaagctcgccagctagggcataactatataggatctgagcacttacttctggggctacttcgtgagggtgaaggtgtagcagcacgggtactggaaagtcttggtgctgatccaaacaacattcgtacccaggtcataagaatggttggtgaaagcacagaagctgttggtgctggagttggtggcggaagcagtggccagaagatgcctacactcgaagagtatggcactaatttgactaagctggcagaagagggtaaactagacccagttgttggcaggcaggatcaaattgagcgtgtaactcaaattttgggaaggcggacaaagaacaacccttgcctaattggagaacctggtgttggaaagactgctattgctgaggggcttgcacaacgtatttccaatggtgacgttccagaaacaattgaaggaaagaaggttattactcttgacatggggctccttgttgctggtaccaagtaccgtggagagttcgaagaaagactgaagaaacttatggaggaaatcaaacaaaatgatgacattattctctttattgatgaagtgcacacgctaattggagcaggtgctgctgaaggtgcaattgatgctgccaacatcttgaaaccagctcttgctagaggtgaactgcagtgcattggtgccacaacacttgatgagtacaggaaacatattgagaaagatccagctttagagcgacggtttcaaccagttaaggttccagagccaactgttgatgaaacaatacaaatcttaagaggacttcgtgagcgatatgaactgcatcataagctgcgatacacagatgattctttaattgctgcagcacaattgtcataccagtatatcagtgatcgcttcctgcctgataaggctattgacttgattgatgaagcaggatctcgtgttaggctcaggcatgcacagctccctgatgaagccaaggagctggacaaagagcttcgacaggtaaccaaagacaagaacgaggctgtacgtggccaagattttgaaaaggctggggaattaagagatcgggaaatggaattgaaggcccaaattacagccattattgacaagagcaaggaaatggttaaagcagagactgaatccggtgaagtcggtccccttgttactgaggcagatattcagcatatcgtgtcctcttggactggaatacctgtggagaaagtctcatctgatgagtctgaccgtctccttaagatggaggagacactccatacgcgtatcattggtcaggatgaggctgtcaaagctattagccgtgccatccgccgtgctcgtgttggcctcaagaacccaaatcggcctattgctagcttcatcttctctggaccaactggtgtcggtaaatcagagttagcaaaggctcttgcagcctactactttggctcagaagaggccatgatcagactagacatgagtgagttcatggagaggcatacagtctccaagctcattggatcacctccaggttatgttggttacactgagggtggtcaactgacagaagcagttcgccgccgaccatacactgttgttctcttcgatgagattgaaaaggcacatcctgatgtcttcaacatgatgcttcagatcttagaagatggaagactaactgacagcaagggtcggactgttgatttcaagaacacactgttgatcatgacatcaaatgttggaagcagtgtcattgagaagggaggacggaagattggatttgaccttgactatgatgagaaagacaccagctacaataggattaagagcttggtgactgaagagctgaagcagtacttccgacctgagttcttaaacagattggacgagatgattgtgttccggcagcttaccaagctggaggttaaggagattgctgatattatgctcaaagaagtgtttgacaggctcaaggcaaaggacatcgacctccaggtgacagagaagttccgggatagagttgtcgacgaaggttacaacccaagctatggtgccaggcctctgcggcgtgctattatgaggcttctggaggacagcttggcggagaagatgttggctggcgaggtcaaggaaggtgactctgctattgttgatgtggattcagagggcaaggtgatagttcttaacggtggtagtggtgttccggaaccactggcacctgctctgagtgtctaa

SEQ ID NO: 34001 - protein, 918 aa, Oryza sativa
MEGSLVQSAIAPTIYRRSGTARFRVRARATMMRTMPTRTLTLGGFQGLRQTNFLDSRSVIKRDFGSIVASQISRPRGLGSRGVVRAMFERFTEKAIKVIMLAQEEARRLGHNFVGTEQILLGLIGEGTGIAAKVLKSMGINLKDARVEVEKIIGRGSGFVAVEIPFTPRAKRVLELSLEEARQLGHNYIGSEHLLLGLLREGEGVAARVLESLGADPNNIRTQVIRMVGESTEAVGAGVGGGSSGQKMPTLEEYGTNLTKLAEEGKLDPVVGRQDQIERVTQILGRRTKNNPCLIGEPGVGKTAIAEGLAQRISNGDVPETIEGKKVITLDMGLLVAGTKYRGEFEERLKKLMEEIKQNDDIILFIDEVHTLIGAGAAEGAIDAANILKPALARGELQCIGATTLDEYRKHIEKDPALERRFQPVKVPEPTVDETIQILRGLRERYELHHKLRYTDDSLIAAAQLSYQYISDRFLPDKAIDLIDEAGSRVRLRHAQLPDEAKELDKELRQVTKDKNEAVRGQDFEKAGELRDREMELKAQITAIIDKSKEMVKAETESGEVGPLVTEADIQHIVSSWTGIPVEKVSSDESDRLLKMEETLHTRIIGQDEAVKAISRAIRRARVGLKNPNRPIASFIFSGPTGVGKSELAKALAAYYFGSEEAMIRLDMSEFMERHTVSKLIGSPPGYVGYTEGGQLTEAVRRRPYTVVLFDEIEKAHPDVFNMMLQILEDGRLTDSKGRTVDFKNTLLIMTSNVGSSVIEKGGRKIGFDLDYDEKDTSYNRIKSLVTEELKQYFRPEFLNRLDEMIVFRQLTKLEVKEIADIMLKEVFDRLKAKDIDLQVTEKFRDRVVDEGYNPSYGARPLRRAIMRLLEDSLAEKMLAGEVKEGDSAIVDVDSEGKVIVLNGGSGVPEPLAPALSV

SEQ ID NO: 34002 - DNA, 2739 bp, Oryza sativa
  CDS (1)..(2739)
atgaatccggacaacttcacgcacaagaccaacgaggcgctcgtggcggcgcacgagatagcgtcggaggcggggcacgcgcagctgacgccgctgcacctggtggcggcgctggcggcggacaagggcgggatactccggcaggcgatctcgcaggcgtccggcggggacgccggcgcgccggactcgttcgagcgcgtggtgagcggggcgctcaagaagctgccctcgcagtcgccgccgccggacagcgtgccggcgtccacggcgctgatcaaggtcatccgccgcgcgcagtccgcgcagaagaagcgcggggactcccacctcgccgtcgaccagctgctgctgggcctcctggaggactcgctaatctccgactgcctcaaggaggccggcgtgtccgcggcgcgggtgcgcgccgagctcgagaagctccgtggcggggagggccgcaaggtggagtccgcgtccggcgacaccaacttccaggcgctcaagacctacggccgcgacctcgtcgagcaggccggtaagctcgaccccgtcattggccgcgacgaggagatccgccgcgtcgtgcgcatcctgtcgcgccgcacgaagaacaaccccgtactcatcggcgagcccggcgtcggcaagacggccgtcgtggagggcctcgcgcagcgcatcgtgcgcggggacgtgcccagcaacctgctcgacgtccgcctcatcgcgctcgacatgggcgcgctcgtcgccggcgccaagtaccgcggcgagttcgaagaacggctcaaggccgtgctcaaggaggtggaggaggccgagggcaaggtgatcctcttcatcgacgagatacacctcgtcctcggcgccgggaggacggagggctccatggacgcggccaacctgttcaagccaatgctcgcgaggggccagctccggtgcatcggcgccacgacgctggaggagtaccgcaagtacgtcgagaaggacgccgcgttcgagaggcggttccagcaggtgttcgtcgcggagccgagcgtcccggacaccatcagcatcctgcgaggcctcaaggagaagtacgaggggcaccacggtgtgaggatccaggaccgcgcgctcgtcgtcgccgcgcagctctcggcgaggtacatcatgggacgccacctgcctgacaaagcgatcgacctcgtcgacgaggcctgcgcgaacgtgagggtgcagctggacagccagccagaggagatcgacaacctcgagaggaagaggattcagctggaggtggagcaccacgcgctggagaaggagaaggacaaggcaagcaaggcccggcttgtcgaggtcaagaaagagctggacgatctgagggacaagctgcagccattgacgatgaagtacaggaaggagaaggagaggatcgacgagatcaggaagctgaagcagcgccgcgaggagctccagttcacgctgcaggaggccgagcgccggatggacctcgcccgcgtcgccgacctcaagtacggcgcgctccaggagatcgacgtcgccatcgcgaagctcgagagcgagacgggggagaacctgatgctcaccgagaccgtcggccccgagcagatcgccgaggtggtgagccgctggaccggcatcccggtgacccggctcggccagaacgacaaggagaggctcgtcggcctcgccgacaggctgcaccagagggtggtcggccaggcggaggccgtgagcgccgtcgccgaggcggtgctgaggtcgcgcgccggacttggccggccgcagcagcccaccggctcgttcctcttcctcggtcccaccggcgtcggcaagaccgagctcgccaaggccctcgccgagcagctgttcgacgacgagaacctgctcgtccgcatcgacatgtccgagtacatggagcagcactccgtcgctcgcctcatcggagcaccacctggctacgtcggccatgaggaaggtgggcagctgacggagcaagtgcggcggcggccgtacagcgtgatcctgttcgacgaggtcgagaaggcgcacgtcgcggtgttcaacactctgctccaggttctcgacgacgggaggctcaccgacgggcaaggccgcacggtggacttcaggaacaccgtgatcatcatgacctccaacctcggcgccgagcacctcctcgccggcatggtcggcaagaactccatgaaggtcgcccgtgaccttgtcatgcaggaggtgaggaggcacttccgtcctgagctcctgaaccggctcgacgagattgtgatattcgatcccctgtcccacgagcaactcaggaaggtcgcccgtctccagatgaaggacgtcgccgtccggctcgccgagaggggtgtcgccctggccgtcaccgacgccgcgctggacgtcattctgtctctgtcctatgatccggtttatggcgcgaggccgatcaggaggtggatcgagaagagggtggtgacgcagctgtccaagatgctgatccaggaggagatcgacgagaactgcacggtgtacatcgacgcggcgccgcacaaggacgagctggcctacagggtggacaaccgcggggggttggtgaacgccgagacggggcagaagtcggacatcctcatccaggtgcccaacggcgccgccaccgggagcgacgccgcgcaggcggtgaagaagatgaggatcatggaggacgaggacggcatggacgaagagtag

SEQ ID NO: 34003 - protein, 912 aa, Oryza sativa
MNPDNFTHKTNEALVAAHEIASEAGHAQLTPLHLVAALAADKGGILRQAISQASGGDAGAPDSFERVVSGALKKLPSQSPPPDSVPASTALIKVIRRAQSAQKKRGDSHLAVDQLLLGLLEDSLISDCLKEAGVSAARVRAELEKLRGGEGRKVESASGDTNFQALKTYGRDLVEQAGKLDPVIGRDEEIRRVVRILSRRTKNNPVLIGEPGVGKTAVVEGLAQRIVRGDVPSNLLDVRLIALDMGALVAGAKYRGEFEERLKAVLKEVEEAEGKVILFIDEIHLVLGAGRTEGSMDAANLFKPMLARGQLRCIGATTLEEYRKYVEKDAAFERRFQQVFVAEPSVPDTISILRGLKEKYEGHHGVRIQDRALVVAAQLSARYIMGRHLPDKAIDLVDEACANVRVQLDSQPEEIDNLERKRIQLEVEHHALEKEKDKASKARLVEVKKELDDLRDKLQPLTMKYRKEKERIDEIRKLKQRREELQFTLQEAERRMDLARVADLKYGALQEIDVAIAKLESETGENLMLTETVGPEQIAEVVSRWTGIPVTRLGQNDKERLVGLADRLHQRVVGQAEAVSAVAEAVLRSRAGLGRPQQPTGSFLFLGPTGVGKTELAKALAEQLFDDENLLVRIDMSEYMEQHSVARLIGAPPGYVGHEEGGQLTEQVRRRPYSVILFDEVEKAHVAVFNTLLQVLDDGRLTDGQGRTVDFRNTVIIMTSNLGAEHLLAGMVGKNSMKVARDLVMQEVRRHFRPELLNRLDEIVIFDPLSHEQLRKVARLQMKDVAVRLAERGVALAVTDAALDVILSLSYDPVYGARPIRRWIEKRVVTQLSKMLIQEEIDENCTVYIDAAPHKDELAYRVDNRGGLVNAETGQKSDILIQVPNGAATGSDAAQAVKKMRIMEDEDGMDEE

SEQ ID NO: 34004 - DNA, 2799 bp, Oryza sativa
  CDS (1)..(2799)
atggagagaaccctactgaacccgccgccgtctctccgatcgccggcatgccgtaccaccaccgccaccaggatcaggccctcctcctccatggctactatgatcccaacgcctccgccgatgcggcacgcccgcctcgtcaaggcatcggccgcgggccggcgagagctccacgctcccccgatcgcgccgccaatattactcggcctccgttcacccgcggcggcgtcgtacgggcgtgcgagcggcggcggcgggaggaggaggggggcgcgggtggtggcgaggatggggttcgacatgttcacggacaaggcgatcaaggcgatcatgatggcgcaggaggaggcgcggcggctggggcaccacgccgccggcagcgagcagctcctcctcggcgtcatcggggagggcaccggcatcggcgccaaggtgctcaggggcgccgggctcagcctcaaggcggcgcgcgccgaggtggagaagatggccgggaggggccccggcatggtccccatggagatcaagttcacccccgccgccaagaacgtcctccaggcctcccaagaagaagcgcaccagctagggcataactatgttggatctgaacacctcctacttgggttgctccgtgagcatggtgccgcgcttgttgtgctgaagaactttcaggctgatcccagcaacatccgcagtgaggttatccgaatgatcagtgacacctctgaagatcatcaacctgttagtgctgcagttgggggaggaagcagtacaactaagatacccacacttttagagtatggtactaatctgacaaaactagcagaggaggggaagctggatcctgttgtcggaaggcaaaaccaggttgaccgtgtagtgcagattctcggcaggcggaccaagaacaacccctgcctgattggagagcctggagtagggaaaacagcgatcgcggaagggctcgcgcagcgcattgctgcaggaaatgtgcctgaaacaatcgatgggaaaacggttatcacccttgatatgggtctacttgttgctggtacaaaataccgtggtgagtttgaggagagattgaagaagctgatggacgaagtgaagcagaatggtgagataattctcttccttgatgaagttcacaccctggtgggtgctggagcagctgaaggggccatcgacgctgccaacatcctgaagccagcgctagcaagaggtgaactacagtgtattggagccactaccattgatgaatacagaaagcacattgagaaagacccagcactggagaggcgttttcagcctgtcaaggtccctgagccaactgttgatgagaccataggaattctcaaaggtctccgggagcgatatgagatccatcataaggtccagtatactgatgagtcgttgatcgcagctgctcggctctcataccagtacatcagtgatcgtttcctcccggataaagcaattgacttggttgatgaagcaggttctcttgtcaggctgcgaaatgcccagctacctgatgaagctaaagaactcgagaagaagctcaagaagatcatggcagagaagagcgaagccatccgaagccaagacttcgagaaggcgggagcgcttcgcggcgaggaggtggagctcaagtcggagatcatgtcgctggtcgacaagagcaaggagatgagcaaggcggcggtggactccggcgagtcgccggggccgacggtgacggaggcggacgtccagcacatcgtctccagctggaccggcgtccccgtggagaaggtcaccgtcgacgagtcgagccgtctcctcgccatggagtcgtcgctgcaccggcgcatcgtcggccaggacgaggccgtgacggcgatcagccgcgccatccgccgcgcccgcgtcgggctccgcgacccgcgccgcccgatcgcgagcttcatcttcgccgggccgacgggggtcggcaagtcggagctcgccaaggcgctggcggcgtactactacggctcgccggaggccatggtgcggctcgacatgagcgagttcatggagaagcacacggtggcgaagctggtgggctcgccgccggggtacgtcggctacgccgagggcggccagctgacggaggcgatccggcggcgcccctacgccgtcgtgctgttcgacgaggtcgagaaggcgcaccccgacgtgttcaacatgatgctccagatcctcgacgatggccggctcacggacagcaaggggaggacggtggatttcaagaactcgctcatcatcatgacatccaacgtcggcagcggcgtcatcgagaagggcgggaggcagctcgggttcgccggcgatggcagcggcgacggcgggtacggggtgatcaagaacatggtggaggaggagatgaagcgctacttcaggccggagttcctgaaccggctggacgagatgatcgtgttccggcagctgacgaagctggaggtgaaggagatcgccgggatcatgctcgccgaggtcaccgggcggatcggcgggaaggggatcgggctgcaggtgacggagaggttcaaggagctcgtcgtcgagcaaggcttcgacccgagctacggcgcgcggccgctgcgccgggccatcatgcggctgctggaggacacgctcacggacaagatgctcgccggggagatctgcgccggcgactcggtgatcgtcgacgccgacggtgacgggaacgtcgtcgtggtcggccggcgcagcgccggcttgccggacctgaaatcgccggcgtttactgtctag

SEQ ID NO: 34005 - protein, 932 aa, Oryza sativa
MERTLLNPPPSLRSPACRTTTATRIRPSSSMATMIPTPPPMRHARLVKASAAGRRELHAPPIAPPILLGLRSPAAASYGRASGGGGRRRGARVVARMGFDMFTDKAIKAIMMAQEEARRLGHHAAGSEQLLLGVIGEGTGIGAKVLRGAGLSLKAARAEVEKMAGRGPGMVPMEIKFTPAAKNVLQASQEEAHQLGHNYVGSEHLLLGLLREHGAALVVLKNFQADPSNIRSEVIRMISDTSEDHQPVSAAVGGGSSTTKIPTLLEYGTNLTKLAEEGKLDPVVGRQNQVDRVVQILGRRTKNNPCLIGEPGVGKTAIAEGLAQRIAAGNVPETIDGKTVITLDMGLLVAGTKYRGEFEERLKKLMDEVKQNGEIILFLDEVHTLVGAGAAEGAIDAANILKPALARGELQCIGATTIDEYRKHIEKDPALERRFQPVKVPEPTVDETIGILKGLRERYEIHHKVQYTDESLIAAARLSYQYISDRFLPDKAIDLVDEAGSLVRLRNAQLPDEAKELEKKLKKIMAEKSEAIRSQDFEKAGALRGEEVELKSEIMSLVDKSKEMSKAAVDSGESPGPTVTEADVQHIVSSWTGVPVEKVTVDESSRLLAMESSLHRRIVGQDEAVTAISRAIRRARVGLRDPRRPIASFIFAGPTGVGKSELAKALAAYYYGSPEAMVRLDMSEFMEKHTVAKLVGSPPGYVGYAEGGQLTEAIRRRPYAVVLFDEVEKAHPDVFNMMLQILDDGRLTDSKGRTVDFKNSLIIMTSNVGSGVIEKGGRQLGFAGDGSGDGGYGVIKNMVEEEMKRYFRPEFLNRLDEMIVFRQLTKLEVKEIAGIMLAEVTGRIGGKGIGLQVTERFKELVVEQGFDPSYGARPLRRAIMRLLEDTLTDKMLAGEICAGDSVIVDADGDGNVVVVGRRSAGLPDLKSPAFTV

SEQ ID NO: 34006 - DNA, 2760 bp, Oryza sativa
  CDS (1)..(2760)
atggcaggcaccctgctccagccggttgccctcggaacaacttttgcaggccgtgtaagtggtcagcgatggaagtctcatggcacaaggaggcctccctcaatgttggcgatgtccttgagccgcccagttaagatggccgcatttgtcggtctgagatcggtgcatagcttctcagtcacgcctgtcaccaacttcagatcgacggttgcatcttacagatcaagacggggaaggcgtgctcgctttgtaaccagatcgatgtttgagaggttcactgagaaagctattaaggttataatgcttgcgcaagaagaggcaaggcggttgggccacaactttgtcggtactgagcaaattctcttgggtctgattggagaagggactggtattgctgctaaggtgctcaagtcaatgggcataaatctcaaggatgcacgtgtggaagtggagaagatcattgggaggggcaatggtttcgttgctgtcgaaataccattcacaccacgtgcaaaacgtgttttggagctttcattggaagaagctcgtcagctaggacacaactatattggatctgagcacttgcttcttggactgctccgtgagggtgaaggtgtagcagcccgtgtgctcgaaagccttggagccgatcctagcaatattcgcacgcaggttatccgaatgattggcgagactacagaagctgttggtgcaggagttggaggagggagtagtggcaataaaatgccaacacttgaggagtacggaactaatttaacaaaattagcagaggagggaaagctagatcctgttgttggaaggcaaccccagattgagcgtgtcgtacaaattctgggcagacgaacaaagaacaacccatgcttaattggagagcctggtgttggaaagacagcaattgcagaaggccttgctcaacgcatttctactggtgatgtgcctgaaacaattgaaggaaagaaggtcattacccttgatatgggacttcttgttgctggtacaaaataccgtggagaatttgaagaaagattaaagaagctgatggaagaaatcaagcagagtgatgagataatactatttattgatgaagtccacactctcataggagcaggagcagctgagggtgctattgacgctgctaacattttaaagccagcattagcaagaggagaactacagtgtattggagccaccacacttgatgaatacaggaagcatattgagaaagacccagcattagaaagacgtttccagcctgtaagagtgccagagccaacagttgatgaaaccatagaaattctcagagggcttcgggaacgatatgagatccatcataaacttcgttacactgatgatgctctgatttcagctgccaagctatcttatcaatacatcagtgatcgtttcctcccagataaagcaattgatttgattgatgaagcaggttcacgtgtaaggcttcgacatgcccaggttcctgaagaagctagagagcttgacaaggagctcaagcaaatcacaaaagataagaatgaagctgtccgtagccaggacttcgaaaaggctggagagttacgtgatcgtgaaatggaattgaaggcccagataacagctctcattgacaagagcaaggagatgagcaaagcagagactgaatcaggggagacagggccactggtcaatgaagcagatatccagcacattgtatcctcgtggactggtattccagtagagaaggtatcaagtgacgagtccgataagcttcttaagatggaagagactttgcatcagcgtgtcattggtcaagatgaggctgtgaaagccataagtcgctccatccgccgtgctcgtgtgggcctcaagaacccgaacaggccgattgcaagcttcattttcgcaggtccaaccggtgttggtaaatccgagctcgcaaaagcacttgcagcatattactttggatctgaggaggccatgatcaggcttgatatgagtgaattcatggagaggcacactgtatccaagttgattggttcacccccagggtatgttgggtacacggagggtggacagctgactgaggcagttcgacgcaggccatacacagtcgtgcttttcgacgagatcgaaaaggcgcatccagatgtattcaacatgatgctccagatcttggaagatggaaggctgactgacagcaagggaagaacagtggacttcaagaacacacttctcataatgacttcgaacgtcggaagcagcgtcatcgagaagggtggtcggaagataggtttcgatctcgattacgatgagaaggacagcagctacagcaggatcaagagccttgtcgtcgaggagatgaagcagtacttccgccccgagttcctcaaccgtctcgacgagatgatcgtcttcaggcaactcaccaagctggaggtcaaggagatcgccgagatcatgctcaaggaggtctttgacaggctcaaggccaaggacattgacctccaggtcaccgagaagttcaaggagcgtatcgttgacgaaggcttcaacccgagctatggtgcgaggccgctaaggagggccatcatgaggctcctggaggacagcctcgcggagaagatgctagctggggaggtgaaggagggtgattctgccattgtcgatgtggattccgaggggaaggtgattgtactgaatggccaaagtgggttgcctgagctttcaactccggctgtcactgtgtag

SEQ ID NO: 34007 - protein, 919 aa, Oryza sativa
MAGTLLQPVALGTTFAGRVSGQRWKSHGTRRPPSMLAMSLSRPVKMAAFVGLRSVHSFSVTPVTNFRSTVASYRSRRGRRARFVTRSMFERFTEKAIKVIMLAQEEARRLGHNFVGTEQILLGLIGEGTGIAAKVLKSMGINLKDARVEVEKIIGRGNGFVAVEIPFTPRAKRVLELSLEEARQLGHNYIGSEHLLLGLLREGEGVAARVLESLGADPSNIRTQVIRMIGETTEAVGAGVGGGSSGNKMPTLEEYGTNLTKLAEEGKLDPVVGRQPQIERVVQILGRRTKNNPCLIGEPGVGKTAIAEGLAQRISTGDVPETIEGKKVITLDMGLLVAGTKYRGEFEERLKKLMEEIKQSDEIILFIDEVHTLIGAGAAEGAIDAANILKPALARGELQCIGATTLDEYRKHIEKDPALERRFQPVRVPEPTVDETIEILRGLRERYEIHHKLRYTDDALISAAKLSYQYISDRFLPDKAIDLIDEAGSRVRLRHAQVPEEARELDKELKQITKDKNEAVRSQDFEKAGELRDREMELKAQITALIDKSKEMSKAETESGETGPLVNEADIQHIVSSWTGIPVEKVSSDESDKLLKMEETLHQRVIGQDEAVKAISRSIRRARVGLKNPNRPIASFIFAGPTGVGKSELAKALAAYYFGSEEAMIRLDMSEFMERHTVSKLIGSPPGYVGYTEGGQLTEAVRRRPYTVVLFDEIEKAHPDVFNMMLQILEDGRLTDSKGRTVDFKNTLLIMTSNVGSSVIEKGGRKIGFDLDYDEKDSSYSRIKSLVVEEMKQYFRPEFLNRLDEMIVFRQLTKLEVKEIAEIMLKEVFDRLKAKDIDLQVTEKFKERIVDEGFNPSYGARPLRRAIMRLLEDSLAEKMLAGEVKEGDSAIVDVDSEGKVIVLNGQSGLPELSTPAVTV

SEQ ID NO: 34008 - DNA, 2769 bp, Glycine max
  CDS (1)..(2769)
atggctagggttttggctcagtctattaatgtccctggtctattggctgagcataggcatggtcagcaaaaggaatcaggaaaattaaaaagatcgaccaaaatgatgagtgctttacgaacaaatggattaagaatgtcaggtttctcagggcttcgtactttcaatcctttggatactatgttgagacctggaatagattttcattctaaggtatccattgcaacttcttcacggcgagcaagagctaccagatgcgtgcccaaagccatgtttgagcgtttcactgagaaagcaatcaaagtaattatgctagcccaggaggaagcaagacgtcttggtcacaattttgttggaacagagcaaattctattgggtcttatcggcgaaggaactggtattgctgctaaggtgctaaagtcaatggggatcaacctcaaagatgcacgagtggaagtagaaaaaataattggaaggggtagtggatttgtggctgttgaaattccgtttactccccgggcaaagcgtgttttagaactttcactggaggaagctcgccaacttggtcacaattatattggatctgagcacctgcttctgggtcttcttcgagagggcgagggtgtagcagcacgtgttctggaaaatctgggtgctgatcctactaatattcgcacacaggttattcgcatggtgggtgagagtgctgacagtgttactgcaactgttggctcaggaagtagtggtaataagatgccaactttggaggagtatggtaccaatttgaccaagctagcagaagagggaaaattggatcctgttgtgggaaggcagccgcaaattgaacgcgtgactcaaattttaggtcgtcggactaaaaataatccttgtcttattggagaacctggtgttgggaagacagcaattgctgaaggtctcgctcagcggattgcaaatggtgatgtacctgaaaccatagagggaaaaaaggtcataacccttgacatgggtctgcttgttgccggaactaaatatcgtggtgagtttgaggagaggttgaagaaactgatggaagaaatcaaacaaagtgatgagataatactttttatcgatgaagtgcacactttgattggagcaggagcagcggaaggggcaattgatgctgctaacatactaaagccagctcttgcaagaggtgaactacagtgtattggagccacaacattagacgagtataggaagcacattgaaaaagatcctgctttggagagacgattccagccagttaaagtgccagagccaactgtagatgaaaccatacaaatactgaaaggacttagagagcgatatgaaattcaccacaagctccgctatactgatgaggctcttgtagctgctgcacagctgtcctaccagtatatcagtgatcgatttttgccagacaaagctatagatttgattgatgaagctggttcacgagtccggcttcaacatgcacagttacctgaagaagcaagagaacttgacaaggaggtcaggcagattattaaggagaaagaagaagctgttcgcaaccaagactttgaaaaggctggagagctacgtgatagagagatggatcttaaggcacagatctcaacacttgtagagaaaggcaaggagatgagcaaggcagagactgaggcaggggatgaaggtcctattgtgactgaagctgacatacagcatattgtctcatcctggactggtattcctgttgagaaagtctcaacagatgaatctgatcgcctcctgaagatggaagagactttacataagcgagtcattggtcaggatgaagcagttaaagccattagtcgggctatccgtcgagctcgggttggactaaaaaatcctaatcgtcccattgccagcttcatcttttctggtccaactggtgtggggaagtctgaattggccaaagcattggctgcatactactttggctccgaagaagctatgattcggcttgacatgagtgaattcatggaaaggcacactgtctccaaacttattggttcacctcctggatatgttggttacactgaaggtggtcaattgaccgaggcagttcggcgtcgtccttacactgttgtactgtttgatgagattgagaaagcccatcctgatgtgttcaacatgatgcttcagatcctggaagatggaagactaacagacagtaagggcagaacagtggatttcaagaacacacttcttataatgacatcaaatgttggaagcagtgtgattgagaaaggaggccgcaaaattggatttgatctggattacgatgagaaggatagcagttataacagaatcaagagcctggtaactgaggagctaaaacaatacttcaggccagaatttttgaatagattggatgaaatgattgtcttcaggcagctcacaaaactggaggtgaaggagattgctgacataatgctcaaagaggtgtttgatagactgaaggtgaaagatattgaacttcaagtgacagaaagattcagggacagagtggtggaggaaggttataaccctagttatggagctagacctctaagaagagccataatgcgacttttggaggacagcatggctgagaagatgcttgccagagagatcaaggagggcgactctgttatagtggatgttgattctgatggtaatgtgattgtgctcaatggtagcagcggagcccccgaatccttgccagagacgcttcctgtataa

SEQ ID NO: 34009 - protein, 922 aa, Glycine max
MARVLAQSINVPGLLAEHRHGQQKESGKLKRSTKMMSALRTNGLRMSGFSGLRTFNPLDTMLRPGIDFHSKVSIATSSRRARATRCVPKAMFERFTEKAIKVIMLAQEEARRLGHNFVGTEQILLGLIGEGTGIAAKVLKSMGINLKDARVEVEKIIGRGSGFVAVEIPFTPRAKRVLELSLEEARQLGHNYIGSEHLLLGLLREGEGVAARVLENLGADPTNIRTQVIRMVGESADSVTATVGSGSSGNKMPTLEEYGTNLTKLAEEGKLDPVVGRQPQIERVTQILGRRTKNNPCLIGEPGVGKTAIAEGLAQRIANGDVPETIEGKKVITLDMGLLVAGTKYRGEFEERLKKLMEEIKQSDEIILFIDEVHTLIGAGAAEGAIDAANILKPALARGELQCIGATTLDEYRKHIEKDPALERRFQPVKVPEPTVDETIQILKGLRERYEIHHKLRYTDEALVAAAQLSYQYISDRFLPDKAIDLIDEAGSRVRLQHAQLPEEARELDKEVRQIIKEKEEAVRNQDFEKAGELRDREMDLKAQISTLVEKGKEMSKAETEAGDEGPIVTEADIQHIVSSWTGIPVEKVSTDESDRLLKMEETLHKRVIGQDEAVKAISRAIRRARVGLKNPNRPIASFIFSGPTGVGKSELAKALAAYYFGSEEAMIRLDMSEFMERHTVSKLIGSPPGYVGYTEGGQLTEAVRRRPYTVVLFDEIEKAHPDVFNMMLQILEDGRLTDSKGRTVDFKNTLLIMTSNVGSSVIEKGGRKIGFDLDYDEKDSSYNRIKSLVTEELKQYFRPEFLNRLDEMIVFRQLTKLEVKEIADIMLKEVFDRLKVKDIELQVTERFRDRVVEEGYNPSYGARPLRRAIMRLLEDSMAEKMLAREIKEGDSVIVDVDSDGNVIVLNGSSGAPESLPETLPV

SEQ ID NO: 34010 - DNA, 2853 bp, Glycine max
  CDS (1)..(2853)
atgcaagtttcatcctcatggctcggaacaatagtactttccaaccgctactcacgcaaccgctccctccctctggaaccgtgttccaccacaaccacatcatcggtttctgctacctcgtaccctcctctattcacgcgcccctatagttctctttcgtttctcgtctctcaaagaaaaggcttcaccctcacctcgctgtcaccgatcagaacaaataagaagagaagaagagcgtcgttgagggtttccgcggtgttcgagaggttcaccgagagagctataaaggccatagttttgtcgcagagggaagccaaagcgctcggaagcgaattagtttacacgcagcatcttcttctggggctcatagccgaggaggatcgttcctccgatgggtttctcgcgtctggtgtcaccgtcgagaaggcgcgtgaaattgtgcgcagcgtctggcttcggaatgcatcagcacgtgccggctctggtgccgcacgtgctggggttgatgatgacggtagcaaagcgagtgccacgcaagttccgttttctgttaacgcgaagcgcgtgtttgaggctgcgtttgagtattccaagtctctgggacacaagttcgttggccccgtacacattttgttcacaaaggtcaaagtagatgatggaagtgttagtagggtcctttacagattggggacaaatggaagccagttggcatctgtggcattctccagactacaaaaagagattgctaaagatggtagagaaccgaatgtgatttccaagggggtgcctaacaaatcgatttctagaaaaggttctgatgcaggagcctctgccacaacaggagaggagagtgctctatcacaattttgtgtggatctcactgcccgtgcgagtgaaggaagaattgatccagttgttggccgagaagttgaggttcagagaattattcaaattctatgccgaaaaacaaaaagcaatcccattcttcttggtgaagctggagttggaaaaacagctattgcagaggggatggcgcttcgcattgctaaggcagatgttgctccttttttattgacaaagcgtgtgatgtccttggatatagccctattaatggctggagcaaaagaaagaggagaactagaggaacgggttacaaaattagtaaaagacataataaagtcaggtgatgtcattctcttcattgatgaagttcacatacttgttcaggcagggacaattgggagaggaaataagggatctggccttgacatagctaatttacttaaacctgcacttggaaggggtcaatttcagtgtattgcatcaaccaccctagatgaatacagactttattttgagaaagacacggcattggctcgacggtttcaacctgtttgggttgatgagccgagtgaggatgacgcaatcaagatacttatgggtctacgtgagaaatatgaggcacatcacaaatgcagatacactgcagaggctataaaggctgcagttgatttgtcagcgagatacatagttgataggtatctacctgataaagctattgacctcatagatgaagcaggaagtagagcttgtattgaagcctttaagaagaaaaaggagcacgaaactggaatcctttctaagtgcccagctgattactggcaagaaattaaagatgttaagtccatgcatgaaatggagaacaagcttaaatactatggcgcttctagcattgacgataccaatgaactcatactggactcatatttatcttctacaaccaccgataatgaacctatagaagttgggccagaagatatagcagcagttgcttccctctggtcaggaattcctgtacagaagctcacagctgatcaaagaattcttctgttagatcttgagaatcaacttcggaagcgtgtgattggacaagaggaggctgttgctgccatttctagagctgtgaagagatcccgggttggcctaaaggatcctgatagacccatagctgctatgttattctgtggcccaaccggtgttgggaaaacagaactcgcaaaatctttggcggcgtgttactttggatcggaggcagccatggtacgattagacatgagcgaatatatggaacggcatacagtgagcaaattgataggatctcccccaggttatgttggttatggagagggtggcgttttaacagaagcaattagaagaaaaccattcacactgttattgctggacgaaatagaaaaagctcatccagatatattcaacattcttcttcaaattttagaagatggtcaacttactgattctcagggtcggagagtttcatttaaaaatgcattggtggtgatgacttcaaatgtggggtctagtgccattgctaagggtcgacacaactccataggtttcttgattccagatgataaaacaacatcatacaatggcttgaaatcgatggtaattgaagaactgaggtcatattttcgtccagaattgctcaacaggatagatgaagtggtagtgtttcaaccccttgaaaagtcacagttgctccaaatattggatttgctactgcaagacatgaagaaacgggtattgtccctaggagtccatgtaaaggtgtctgaagcagtcaagaaccttgtgtgccagcaaggctataacccaacatatggtgctcgccctctgagaagggcaattacatcactaatagaagatccattgagtgaggcattcctttatggagagtgcaagcaaggagacactgtcctcattgatttggatgctaatggaaacccctttgttacgaatcagcttgatcagattgttaacttatctgactga

SEQ ID NO: 34011 - protein, 950 aa, Glycine max
MQVSSSWLGTIVLSNRYSRNRSLPLEPCSTTTTSSVSATSYPPLFTRPYSSLSFLVSQRKGFTLTSLSPIRTNKKRRRASLRVSAVFERFTERAIKAIVLSQREAKALGSELVYTQHLLLGLIAEEDRSSDGFLASGVTVEKAREIVRSVWLRNASARAGSGAARAGVDDDGSKASATQVPFSVNAKRVFEAAFEYSKSLGHKFVGPVHILFTKVKVDDGSVSRVLYRLGTNGSQLASVAFSRLQKEIAKDGREPNVISKGVPNKSISRKGSDAGASATTGEESALSQFCVDLTARASEGRIDPVVGREVEVQRIIQILCRKTKSNPILLGEAGVGKTAIAEGMALRIAKADVAPFLLTKRVMSLDIALLMAGAKERGELEERVTKLVKDIIKSGDVILFIDEVHILVQAGTIGRGNKGSGLDIANLLKPALGRGQFQCIASTTLDEYRLYFEKDTALARRFQPVWVDEPSEDDAIKILMGLREKYEAHHKCRYTAEAIKAAVDLSARYIVDRYLPDKAIDLIDEAGSRACIEAFKKKKEHETGILSKCPADYWQEIKDVKSMHEMENKLKYYGASSIDDTNELILDSYLSSTTTDNEPIEVGPEDIAAVASLWSGIPVQKLTADQRILLLDLENQLRKRVIGQEEAVAAISRAVKRSRVGLKDPDRPIAAMLFCGPTGVGKTELAKSLAACYFGSEAAMVRLDMSEYMERHTVSKLIGSPPGYVGYGEGGVLTEAIRRKPFTLLLLDEIEKAHPDIFNILLQILEDGQLTDSQGRRVSFKNALVVMTSNVGSSAIAKGRHNSIGFLIPDDKTTSYNGLKSMVIEELRSYFRPELLNRIDEVVVFQPLEKSQLLQILDLLLQDMKKRVLSLGVHVKVSEAVKNLVCQQGYNPTYGARPLRRAITSLIEDPLSEAFLYGECKQGDTVLIDLDANGNPFVTNQLDQIVNLSD

SEQ ID NO: 34012 - DNA, 2763 bp, Hordeum vulgare
  CDS (1)..(2763)
atggcagggaccttagtcctgccggttgctcttgagacaacttttgcaggccgtacaggcggtcgacactggaagtctcatggaaccaggaggactccctcaatgttggcaatgtcattaaaccgtcctgtaaggatggcagcatttgtcggtctgagatcggtacatagcttctcagctatgcgctcgtccaacttcaggtcaacagttgcatcttacagattctctagacggggaaggcgtgcttcttttgtaaccagagcgatgttcgagagatttactgagaaagctataaaggtcataatgctcgcacaagaggaagcgagacgcctgggtcacaactttgtcggaactgagcaagttctattgggtctggttggagaaggcactggtattgcggcgaaggtgcttaagtccatgggtataaatctgaaggatgcccgtgtggaagtggagaagatcattgggaggggcaacggttttgttgctgtcgaaataccattcacaccacgtgcaaaacgtgttttagagctttcattggaggaagctcgccagctaggacacaactatattgggtccgagcacttgcttcttggattgcttcgtgagggggaaggagtggcagctcgcgtacttgagtctcttggtgctgaccccagcaatattcgtacccaggttgtccggatgattggtgagacaacagaagctgttggtgctggagttgggggagggagcagtggtaacaagatgccgacacttgaggagtatgggactaatttaacaaaactagccgaggagggaaagctagatcctgttgttgggagggaaccacagattgaacgtgttgtacaaattttgggcagaagaaccaagaacaatccctgcttaattggagaacctggtgttggtaagacagctattgcagaagggcttgctcagcgcatttctaatggcgatgtgcctgagacgatagaggggaagaaggtcattacccttgatatgggacttcttgttgctggtacgaaataccgtggagaatttgaagaacggttgaagaaactgatggaagaaatcaaacagagcgatgagatcattctcttcatcgatgaagttcacaccctcataggagcaggagccgccgaaggtgctattgatgctgctaatattctaaagccagcattagcaagaggagaacttcagtgtattggagccaccacacttgatgaatacaggaagcatgttgagaaagacccagcattagaaagacgtttccagccagtaaaggtaccagagccaactgttgatgaaaccatagaaattctcagagggcttcgggaacgctatgagatccatcataaacttcgttacactgatgattctttgattgcggctgctaagctatcttatcaatatatcagtgatcgtttcctcccagataaagcaattgatttgatcgatgaagcaggttcacgtgttaggcttcgacatgcccaggttcctgaggaagccagagagcttgacaaggagcttaagcaaataacgaaagataaaaatgaagctgtccgtggccaggattttgagaaggctggagagttgcgagatcgtgaaatggaattgaaggcccagataacgaccttgattgacaagagcaaggagatgactaaagcggagactgagtcgggagagaccgggccgatggtgaatgaatcagatatccagcacattgtgtcgtcatggactggtatcccggtggagaaagtctcaactgacgaatctgataaacttcttaagatggaagagacattgcataagcgtgtcatcgggcaagatgaggctgtgaaagcaataagtcggtctgttcgccgtgctcgtgtaggactcaagagccccaaccgaccaattgcgagcttcatttttgcaggtcccacgggtgttgggaaatcagagcttgcaaagactctggcatcatattacttcggctctgaagaagccatgatccggctggatatgagtgagttcatggagaggcacactgtgtccaagttgatcggttcaccaccaggctatgtgggatacactgaaggtgggcagctgacggaggcggttcgacggcgaccatacagcgttgtgctttttgatgagattgaaaaagcgcatccggatgtgttcaacatgatgctccagatcctggaagatggaaggttaactgacagcaaggggagaacagtggacttcaagaacacgcttctgataatgacatcaaatgttggaagcagcgtgattgagaagggagggaggaagattgggttcgacctcgactcagacgagaaggacagcagctatggcaggatcaagagcttggtggtcgaggagatgaagcagtacttccgaccggagtttctcaaccgtctcgacgagatgatcgtcttcagacagctgaccaagctggaagtcaaagagatcgcgaacataatgctgcaggaggttttcaccaggctgaagagcaaggacatcaacctgcaggtgacggagaagttcaaggagcgggtcgtggacgaagggtacaaccctagctacggagcgcggccattgaggagggcgatcatgaggcttctggaggacagccttgcggagaagattttgggcggcgaggtcaaggagggcgactctgtgattgttgatgtggactcggaggggaaagtcattgtgctgaatggcgagaaccgactgccggaacttccaaccccggcggatgctgtataa

SEQ ID NO: 34013 - protein, 920 aa, Hordeum vulgare
MAGTLVLPVALETTFAGRTGGRHWKSHGTRRTPSMLAMSLNRPVRMAAFVGLRSVHSFSAMRSSNFRSTVASYRFSRRGRRASFVTRAMFERFTEKAIKVIMLAQEEARRLGHNFVGTEQVLLGLVGEGTGIAAKVLKSMGINLKDARVEVEKIIGRGNGFVAVEIPFTPRAKRVLELSLEEARQLGHNYIGSEHLLLGLLREGEGVAARVLESLGADPSNIRTQVVRMIGETTEAVGAGVGGGSSGNKMPTLEEYGTNLTKLAEEGKLDPVVGREPQIERVVQILGRRTKNNPCLIGEPGVGKTAIAEGLAQRISNGDVPETIEGKKVITLDMGLLVAGTKYRGEFEERLKKLMEEIKQSDEIILFIDEVHTLIGAGAAEGAIDAANILKPALARGELQCIGATTLDEYRKHVEKDPALERRFQPVKVPEPTVDETIEILRGLRERYEIHHKLRYTDDSLIAAAKLSYQYISDRFLPDKAIDLIDEAGSRVRLRHAQVPEEARELDKELKQITKDKNEAVRGQDFEKAGELRDREMELKAQITTLIDKSKEMTKAETESGETGPMVNESDIQHIVSSWTGIPVEKVSTDESDKLLKMEETLHKRVIGQDEAVKAISRSVRRARVGLKSPNRPIASFIFAGPTGVGKSELAKTLASYYFGSEEAMIRLDMSEFMERHTVSKLIGSPPGYVGYTEGGQLTEAVRRRPYSVVLFDEIEKAHPDVFNMMLQILEDGRLTDSKGRTVDFKNTLLIMTSNVGSSVIEKGGRKIGFDLDSDEKDSSYGRIKSLVVEEMKQYFRPEFLNRLDEMIVFRQLTKLEVKEIANIMLQEVFTRLKSKDINLQVTEKFKERVVDEGYNPSYGARPLRRAIMRLLEDSLAEKILGGEVKEGDSVIVDVDSEGKVIVLNGENRLPELPTPADAV

SEQ ID NO: 34014 - DNA, 2739 bp, Zea mays
  CDS (1)..(2739)
atgaatccggacaacttcacccacaagacgaacgaggcgatcgtgggggcgcacgagattgcggtggaggccggccacgcgcagctcacgccgctgcacctggccgcagtgctggctgcggacaagggcggcatcctgcggcaggccatcacgggggcgtcggggggcgacggagcggccggggactcgttcgagcgcgtgctgaacaactcgctcaagaagctgccgtcgcagtccccgccgccggactccgtcccggcgtccacggcactgatcaaggtcatccgccgggcgcagtccgcgcagaaaaaacgcggggactctcacctcgccgtcgaccagctgctgctcggcctgctcgaggactcgcagatctccgactgcctcaaggaggccggcgtgtccgcggcgcgggtgcgcgccgagcttgagaagctccgcggcggggaggggcgccgcgtggagtccgcgtcgggggacactaacttccaggcgctcaagacatacggccgggacctcgtcgagcaggccgggaagcttgatcccgtcatcggccgcgacgaggagatccgccgcgtggtgcgcatcctctcgcgccgcactaagaacaaccccgtcctcatcggcgagcccggcgttggcaagacggccgtcgtggagggcctcgcgcagcgcatcgttcgcggcgacgtgcccagtaacctcctcgacgtccgcctcatcgcgctcgacatgggcgcgctcgtcgcgggcgccaagtaccgcggcgagttcgaggagcggctcaaggccgtgctcaaggaggtggaagaggccgaggggaaggtcattctcttcatcgacgagatacacctcgtcctgggcgcgggcaggacggagggttccatggacgcggccaacctgttcaagccaatgctggcgaggggacagctcaggtgcatcggcgccaccacgctggaggagtaccgcaagtacgtggagaaggacgcagcgttcgagcggcggttccagcaggtgttcgtcgcggagccgagcgtgcccgacaccgtcagcattctgaggggactcaaggagaagtacgaggggcaccatggcgtgaggatccaggaccgcgccctcgtggtcgcggcacagctatccgcgaggtacatcatgggtcggcacctgcctgacaaagccatagacctggtggacgaggcctgcgccaatgtgagggtgcagctcgacagccagccggaggagattgataacctggagaggaagagaatccagcttgaggttgagctccacgcgctcgagaaggagaaggacaaggccagcaaagcccggctgatcgaggtcaggaaggaattggacgatctgagggacaagctgcagcccctgaccatgaagtacaggaaggagaaggagagaatcgatgagatcaggaagctgaagcagcgccgcgaggagctccagttcaccctgcaggaggccgagcgccggatggacctggcccgtgtggccgacctcaagtacggcgccctccaggaaatcgacgccgcgatctccaagctggagagcgaaacaggggagaacctgatgctcaccgaaaccgtcggccctgaacaaattgcagaggtggtgagccgttggacgggtattccagtgacccggcttggccagaacgacaaggagaggctggtcggcctggctgacaggcttcaccagagggtggtcggccagacagaggctgtgagcgccgtcgcagaggcggtgctgaggtcgagggccggtcttggcaggccacaacagcccactggctcgttcctgttcctgggtccgactggcgtggggaaaactgagctagccaaggccctagccgaacagctgttcgacgacgagaaccttcttgtccgcatcgacatgtcggagtacatggagcagcactcggttgctcgcctcatcggagcaccgcctggctacgtcggccatgaagagggtgggcagctgactgaacaagtgaggaggaggccgtacagcgtgatcctgttcgacgaggtcgagaaggcccatgtcgccgtgttcaacaccctgctccaggtcctcgacgacggcaggttgacggatgggcaaggcaggacggtggacttcaggaacaccgtgatcatcatgacatcgaacctcggcgccgagcacctcctcgctgggatggtgggcaagaactccatgaaggtcgctcgcgatctggtcatgcaggaggtgaggaggcacttccgacccgagctgctgaaccgtctcgacgagatcgtgatcttcgatcctctgtcccacgagcagctgaggaaggtcgctcgccttcagatgaaggatgtggccgtccgtcttgccgaaaggggcatcgctctggctgtgaccgacgccgcattggacatcatcttgtctctctcttacgatccggtgtatggcgcgcggccaatcaggaggtggatcgagaagagggtggtgacgcagctgtcgaagatgctgatccaggaggagatcgacgagaactgcacggtctacatcgacgccgcgcccggcaaggacgagctggtctacagggtggaccggagcggcggtctggtgaacgctgagacggggatgaagtcggacatcctgatccaggtccccaacagctcccccaggagcgacgctgcgcaggccgtcaagaagatgaggatcatggaggaggacgaggacggcatggacgaggagtaa

SEQ ID NO: 34015 - protein, 912 aa, Zea mays
MNPDNFTHKTNEAIVGAHEIAVEAGHAQLTPLHLAAVLAADKGGILRQAITGASGGDGAAGDSFERVLNNSLKKLPSQSPPPDSVPASTALIKVIRRAQSAQKKRGDSHLAVDQLLLGLLEDSQISDCLKEAGVSAARVRAELEKLRGGEGRRVESASGDTNFQALKTYGRDLVEQAGKLDPVIGRDEEIRRVVRILSRRTKNNPVLIGEPGVGKTAVVEGLAQRIVRGDVPSNLLDVRLIALDMGALVAGAKYRGEFEERLKAVLKEVEEAEGKVILFIDEIHLVLGAGRTEGSMDAANLFKPMLARGQLRCIGATTLEEYRKYVEKDAAFERRFQQVFVAEPSVPDTVSILRGLKEKYEGHHGVRIQDRALVVAAQLSARYIMGRHLPDKAIDLVDEACANVRVQLDSQPEEIDNLERKRIQLEVELHALEKEKDKASKARLIEVRKELDDLRDKLQPLTMKYRKEKERIDEIRKLKQRREELQFTLQEAERRMDLARVADLKYGALQEIDAAISKLESETGENLMLTETVGPEQIAEVVSRWTGIPVTRLGQNDKERLVGLADRLHQRVVGQTEAVSAVAEAVLRSRAGLGRPQQPTGSFLFLGPTGVGKTELAKALAEQLFDDENLLVRIDMSEYMEQHSVARLIGAPPGYVGHEEGGQLTEQVRRRPYSVILFDEVEKAHVAVFNTLLQVLDDGRLTDGQGRTVDFRNTVIIMTSNLGAEHLLAGMVGKNSMKVARDLVMQEVRRHFRPELLNRLDEIVIFDPLSHEQLRKVARLQMKDVAVRLAERGIALAVTDAALDIILSLSYDPVYGARPIRRWIEKRVVTQLSKMLIQEEIDENCTVYIDAAPGKDELVYRVDRSGGLVNAETGMKSDILIQVPNSSPRSDAAQAVKKMRIMEEDEDGMDEE

SEQ ID NO: 34016 - DNA, 2793 bp, Triticum aestivum
  CDS (1)..(2793)
atgttcgtttgggacaacttacttttgaccatggcagggaccttagtcctgccggttgctcttgagacaacttttgcaggccgaacaggcggtcggcactgcaagtctcatggaaccaggaggactccctcaatgttggcaatgtcattgaaccgtcctgtaaggatggcagcatttgtcggtctgagatcggtacatagcttctcagccatgcgctcgtccaacttcaggtcaacagttgcatcttacagattctctagacagggaaggcgtgcttcttttgtaaccagagcaatgttcgagaggtttactgagaaagctataaaggtcataatgcttgcgcaagaggaagcgaggcgcctgggccacaactttgtcggaaccgagcaagttctattgggtctggttggagaaggcactggtattgcggcaaaggtgcttaagtccatgggtataaatctgaaggatgcccgtgtggaagtggagaagatcattgggaggggcaatggttttgttgctgtcgaaataccattcacaccacgtgcaaaacgtgttttagagctttcattggaggaagctcgccagctaggacacaactatattgggtccgagcacttgcttcttggattgcttcgtgagggggaaggggtggcagctcgcgtacttgagtctcttggtgctgaccccagcaatattcgtacccaggttgtccggatgattggtgagacaacagaagctgttggtgctggagttgggggagggagcagtggtaacaagatgccgacacttgaggagtatgggactaatttaacaaaattagccgaggagggaaagctagatcctgttgttgggagggaaccacagattgaacgtgtcgtacaaattttgggcagaagaaccaagaacaatccctgcttaattggagaacctggtgttgggaaaacagctattgcagaagggcttgctcaacgcatttctagtggcgatgtgcctgagacgatagaggggaagaaggtcattacccttgatatgggacttcttgttgctggtacgaaataccgtggagaatttgaagaacggttgaagaaactgatggaagaaatcaaacagagcgatgagataatactcttcatcgatgaagttcacaccctcataggagcaggagcagccgaaggtgctattgatgctgctaatattttaaagccagcattagcaagaggagaactacagtgtattggagccaccacacttgatgaatacaggaagcatgttgagaaagacccagcattagaaagacgtttccagccagtaaaggtaccggaaccatcagttgatgagaccatagaaattctcagagggctccgggagcgatatgagatccatcataaacttcgttacactgatgattctttgattgcagctgctaagctatcttatcaatatatcagtgatcgtttcctcccagataaagcaattgatttgattgatgaagcaggttcacgtgttaggcttcgacatgcccaggttcctgaggaagccagagagcttgacaaggagcttaagcaaataacgaaagataaaaatgaagctgtccgtggccaggattttgagaaggctggagagttgcgagatcgtgaaatggaattgaaggcccagataacagccctgattgacaagagcaaggagatgaacaaagcagagactgagtcgggagagacggggccgatggtgcatgaatcagatatccagcacattgtgtcatcatggactggtattccagtggagaaagtctcgactgacgaatctgataaacttcttaagatggaagagacattgcataagcgtgtcatcggccaagatgaggctgtgaaagcaataagccggtccgttcgccgtgctcgtgtgggcctcaagagccccaacagaccaattgcgagcttcatttttgcaggtcccactggtgttgggaaatcagagcttgcaaagactctggcatcatattacttcggctctgaagaagccatgatccggctggatatgagtgagttcatggagaggcacactgtgtccaagttgatcggttcaccaccaggctatgtgggatacactgaaggtgggcagctgacggaggcggttcgacggcggccatacagcgttgtgctttttgatgagattgagaaggcgcatccggatgtgttcaacatgatgctccagatcctggaagacggaaggttaaccgacagcaaggggagaacagtggacttcaagaacacgctcctgataatgacatcaaatgttgggagcagcgtgattgagaagggggggaggaagatcgggttcgacctcgactccgacgagaaggacagcagctatggcaggatcaagagcttggtgatcgaggagatgaagcagtacttccgaccggagtttctcaaccgtctggacgagatgatcgtcttcagacagctgaccaagctggaagtcaaagagatcgcggacataatgctgcaggaggttttcaccaggctcaagaccaaggacatcaacctgcaggtgacggagaagttcaaggagcgggtcgtggacgaagggtacaaccctagctacggagcgcggccgctgaggagggccatcatgaggctcctggaggacagcctcgcggagaagatgcgagctggggaggtcaaggagggcgactctgccatcgtcgatgtggattccgaggggaaggtgattgtactgaatggccaaagtgggttgcctgagctttcaactccggctgtcactgtgtag

SEQ ID NO: 34017 - protein, 930 aa, Triticum aestivum
MFVWDNLLLTMAGTLVLPVALETTFAGRTGGRHCKSHGTRRTPSMLAMSLNRPVRMAAFVGLRSVHSFSAMRSSNFRSTVASYRFSRQGRRASFVTRAMFERFTEKAIKVIMLAQEEARRLGHNFVGTEQVLLGLVGEGTGIAAKVLKSMGINLKDARVEVEKIIGRGNGFVAVEIPFTPRAKRVLELSLEEARQLGHNYIGSEHLLLGLLREGEGVAARVLESLGADPSNIRTQVVRMIGETTEAVGAGVGGGSSGNKMPTLEEYGTNLTKLAEEGKLDPVVGREPQIERVVQILGRRTKNNPCLIGEPGVGKTAIAEGLAQRISSGDVPETIEGKKVITLDMGLLVAGTKYRGEFEERLKKLMEEIKQSDEIILFIDEVHTLIGAGAAEGAIDAANILKPALARGELQCIGATTLDEYRKHVEKDPALERRFQPVKVPEPSVDETIEILRGLRERYEIHHKLRYTDDSLIAAAKLSYQYISDRFLPDKAIDLIDEAGSRVRLRHAQVPEEARELDKELKQITKDKNEAVRGQDFEKAGELRDREMELKAQITALIDKSKEMNKAETESGETGPMVHESDIQHIVSSWTGIPVEKVSTDESDKLLKMEETLHKRVIGQDEAVKAISRSVRRARVGLKSPNRPIASFIFAGPTGVGKSELAKTLASYYFGSEEAMIRLDMSEFMERHTVSKLIGSPPGYVGYTEGGQLTEAVRRRPYSVVLFDEIEKAHPDVFNMMLQILEDGRLTDSKGRTVDFKNTLLIMTSNVGSSVIEKGGRKIGFDLDSDEKDSSYGRIKSLVIEEMKQYFRPEFLNRLDEMIVFRQLTKLEVKEIADIMLQEVFTRLKTKDINLQVTEKFKERVVDEGYNPSYGARPLRRAIMRLLEDSLAEKMRAGEVKEGDSAIVDVDSEGKVIVLNGQSGLPELSTPAVTV

SEQ ID NO: 34018 - DNA, 2754 bp, Triticum aestivum
  CDS (1)..(2754)
atgaacccggacaacttcacgcacaagaccaacgaggcgctggtggcggcgcacgaggcggcgtcggaggccggccacgcgcagatcacgccgctgcacctggcggcggcgctggcggcggacaggtcgggcatcctgcggcaggcggtggcgggggcgtccggcgggaacgcgtccgcgggggactcgttcgagcgcgtgctctccgccgcgctcaagaagctgccgtcgcagtcgccgccgccggactccgtgccggcctccacggcgctcatcaaggccatccgccgcgcgcagtcggcgcagaagaagcgcggggactcgcacctcgccgtcgaccagctgctcatgggcctcctcgaggacgcgcagatcgccgactgcctcaaggaggccggcgtgtccgcctcgcggatgcgcgccgagctcgagaagctccgcggcggggacaacgcgcgcaaggtcgagtccgcctccggcgacaccaacttccaggccctcaagacgtacggccgcgacctcgtcgaggtggccggcaagctcgaccccgtcatcggccgcgacgaggagatccggcgcgtggtgcggatcctgtcgcggcgcaccaagaacaaccccgtcctcatcggcgagcccggcgtgggcaagaccgccgtcgtggaggggctcgcgcagcgcgtcgtgcgcggcgacgtccccagcaacctcctggacgtgcgcctggtcgcgctggacatgggcgcgctcgtggccggcgccaagtaccgcggcgagttcgaggagcggctcaaggccgtgctcaaggaggtggaggaggccgaggggaaggtgatactgttcatcgacgagatacacctggtgctcggcgccgggcggacggaggggtccatggacgccgccaacctgttcaagccgatgctggcgagggggcagctcaggtgcatcggcgccacgaccctcgaggagtacagcaagtacgtggagaaggacgcggcgttcgagaggcggttccagcaggtgttcgtggcagagcccagcgtcgccgacaccatcagcatcctgcgagggctcaaggagaagtacgaggggcaccacggcgtgcgcatccaggaccgcgccatcgtcgtcgcggcgcagctctcggcgaggtacatcatgggccgccacctgccggacaaggccatcgacctggtggacgaggcgtgcgccaacgtgagggtgcagctggacagccagccggaggagatcgacaatctggagcggaagcggattcagctggaggtggagctgcacgcgctggagaaggagaaggacaaggccagcaaggcccggctggtggaggtgaggaaggagctggacgacctgagggacaagctgcagccgctgaccatgaagtacaggaaggagaaggagcggatcgacgagatccggaagctgaagcagcggcgggaggagctgcagttcacgctgcaggaggccgagcggcgcatggacctggcacgcgtcgccgacctcaagtacggcgccctccaggagatcgacgccgccattgcgaagctggagggagagaccggcgagaacctgatgctcaccgagaccgtcggccccgagcagatcgcggaggtggtgagccggtggaccggcatcccggtgacccggctcgggcagaacgacaaggagcgcctggtcggcatggcggacaggctgcacacgagggtggtcgggcagacggaggccgtgaacgccgtcgccgaggcggtgctgaggtccagggcggggcttggacggccgcagcagcccaccgggtcgttcctcttcctgggcccgaccggcgtaggcaagaccgagctcgccaaggccctcgccgagcagctgttcgacgacgagaacctgctcgtccgcatcgacatgtccgagtacatggagcagcactccgtcgctcgcctcatcggagcgccacctggctatgtcgggcacgaggagggcgggcagctgacggagcaggtgaggaggcggccgtacagcgtgatcctgttcgacgaggtggagaaggcgcacgtggcggtgttcaacacgctcctccaggtgctggacgacggccggctgaccgacgggcaaggcaggacggtggacttccggaacaccgtgatcatcatgacctccaacctcggcgccgagcacctcctcgccgggatggtcggcaagaactccatgaaggtcgcgcgcgacctcgtcatgcaggaggtgaggaggcacttcaggccggagctgctgaaccggctggacgagatcgtcgtcttcgacccgctgtcccacgagcagctgaggaaggtcgctcgcctgcagatgaaggacgtggccgtccggctcgccgagcgcggcgtcgccctggccgtcaccgacgccgcgctggacgtcatcctgtcgctggcctacgatccagtgtatggcgctcggccgatcaggaggtggatcgagaagcgggtggtgacgcagctgtccaagatgctgatccaggaggagatcgacgagaactgcacggtgtacatcgacgccgccaacaaggacgagctggcctaccgggtggaccgcagcggcgggctggtgaacgccgagacggggcagaggtccgacatcctcatccaggtgcccaacggcgccctcggcggcggcggcggcgaggcggccaaggccgtgaagaagatgagggtgatggaggacggggacgaggacagcatggacgaggatgtttga

SEQ ID NO: 34019 - protein, 917 aa, Triticum aestivum
MNPDNFTHKTNEALVAAHEAASEAGHAQITPLHLAAALAADRSGILRQAVAGASGGNASAGDSFERVLSAALKKLPSQSPPPDSVPASTALIKAIRRAQSAQKKRGDSHLAVDQLLMGLLEDAQIADCLKEAGVSASRMRAELEKLRGGDNARKVESASGDTNFQALKTYGRDLVEVAGKLDPVIGRDEEIRRVVRILSRRTKNNPVLIGEPGVGKTAVVEGLAQRVVRGDVPSNLLDVRLVALDMGALVAGAKYRGEFEERLKAVLKEVEEAEGKVILFIDEIHLVLGAGRTEGSMDAANLFKPMLARGQLRCIGATTLEEYSKYVEKDAAFERRFQQVFVAEPSVADTISILRGLKEKYEGHHGVRIQDRAIVVAAQLSARYIMGRHLPDKAIDLVDEACANVRVQLDSQPEEIDNLERKRIQLEVELHALEKEKDKASKARLVEVRKELDDLRDKLQPLTMKYRKEKERIDEIRKLKQRREELQFTLQEAERRMDLARVADLKYGALQEIDAAIAKLEGETGENLMLTETVGPEQIAEVVSRWTGIPVTRLGQNDKERLVGMADRLHTRVVGQTEAVNAVAEAVLRSRAGLGRPQQPTGSFLFLGPTGVGKTELAKALAEQLFDDENLLVRIDMSEYMEQHSVARLIGAPPGYVGHEEGGQLTEQVRRRPYSVILFDEVEKAHVAVFNTLLQVLDDGRLTDGQGRTVDFRNTVIIMTSNLGAEHLLAGMVGKNSMKVARDLVMQEVRRHFRPELLNRLDEIVVFDPLSHEQLRKVARLQMKDVAVRLAERGVALAVTDAALDVILSLAYDPVYGARPIRRWIEKRVVTQLSKMLIQEEIDENCTVYIDAANKDELAYRVDRSGGLVNAETGQRSDILIQVPNGALGGGGGEAAKAVKKMRVMEDGDEDSMDEDV

SEQ ID NO: 34020 - DNA, 2925 bp, Zea mays
  CDS (1)..(2925)
atggccgccgcgccgccgctgtccgccgacgtactctccttcctaacctccgcccccgccgcgccgacgccggtcgtagccgcggcgtggggcgcggcgagggcgggtcctgtgaggggtaaggcggcactaaggacgacgagaggaggaaggggcggggtactggctccgctggtcgggaagaggccccgccggacgccgctctccgtgcgctgcaacgccaccagccgggacggcaggattacacaacaagagttcactgagatggcgtggcaagcaattgtctcatcccccgaggtggcaaaggagagcaaacaccagattgtggagactgaacatatgatgaaatccctgctggagcaacggaatggccttgcccgccgcatcttttctaaggcaggagttgacaatacaaggcttctcgatgccacggagaagttcatccagagacagcctaaggtattaggtgaagaacctggatctatgttggggcgtgacttagaagctctgatacaaagagcccgggacttcaagaaagagtacggcgattcatatgtctcagttgagcatctagtccttggctttgctgaagataagcggtttgggaaacagctgttcaaggattttcagattactgtgaagacgttgaaatcagccattgaatcgattagagggaagcaaaatgtaatcgatcaagatcctgagggaaagtacgaagccttggagaaatatggaaaggatctgacagctatggcacgtcaagggaagcttgatccagttattggaagagatgatgagattcgaagatgtatacagattttatcacgaagaacaaagaacaatccagttctgattggtgaacctggtgtagggaaaacagctatagctgaagggttagctcagaggatcgttcaaggagatgtcccacaagctctgacaaaccgtcgactaattgcacttgatatgggtgcattgattgctggtgcaaaatatcgtggagagttcgaggatagactcaaggctgttctcaaagaagttacagattctgatgggcagaccgttcttttcattgatgagattcacacagttgttggagcaggtgccacagatagctccacggatgctggtaatcttctcaaaccaatgcttgggagaggagatctacggtgcattggtgcaacaacccttgatgaataccgcaaatatattgagaaagatccagcactggagcggcgcttccaacaagtttttgttgatcagccttcagttgaagatacaatttcaatactccgagggctaagagagagatatgagttgcaccatggtgtacgaatatctgacagtgcccttgtagctgcagctgttctttcagaccgctatatcagtggacgattcttgcctgacaaagcaattgatctggttgatgaatcagctgccaagttaaaaatggagataacatcaaaacctactgctctggatgagattgatcgtgctgtcttgaagcttgagatggagcgtctctcacttacaaatgatacagacaaagcatcaagggacagactgtcccgccttgaagcagaactatcactcttgaaggataaacaacgtcaattgactgagcagtgggagcatgagaaagcagtaatgactaaaattcaatctatcaaagaagagattgacagggtaaatgtggagatacagcaggcagaacgtgagtacgaccttaatcgtgctgctgaactgaaatatggcagtctgaatgccttgcagcgccagcttcaagcgacagagaaggagcttgatgaatatcagagttctgggaaatccatgctaagggaagaggtgacccaagatgatattgcagaaatagtgagcaggtggacaggaattccagtttctaaactaaagcaatctgatagggagaaattgttgtatctggaggatgagctgcacaagcgagttgtcggtcaggatcctgctgtaaaagcagttgcagaggccattcagagatccagggctggattatccgacccaaaccgtcccattgctagtttcatgttcatgggacctacaggagttggcaaaacagagttagcgaaagcccttgcagcttttatgttcaacactgaggaagctgttgtcaggattgacatgagcgagtacatggagaagcattcagtctcaaggttgattggtgctccaccaggttatgttgggtatgaagagggtggtcaactaacagaagctgttcgtcgtaggccatattccgtcgtcttgtttgatgagatcgagaaagctcattcggatgtgttcaatgtcttccttcaaatactggacgacggtagggttaccgactctcaaggacggaaagtgagcttcaccaacaccataattatcatgacgtccaacgttgggtcgcagtatatactaaacatggacgaagaagttggatcatctgattcagcctatgagaacataaagaggagggtgatggatgctgcaagatctgtgttccgtccagagttcatgaatcgtgtagatgagtatattgtcttcaagcctctcgagagagaacagatcaacagcattgtcaaattacagctcgcaagagtacagaagaggatcgcagaccgcaaaatcaagctggaagtctcacccggtgctattgaattcttgggaagcctggggtatgacccgaactatggcgcgaggccggtgaagagagtgattcaacagcacgtggagaacgaactcgcgaagggcatcctcagaggtgatttcaaggacgaggacagcatctttgtggacacccaggtcacggtgccctctaacggccagcttccgcaacagaagctagttttccggaaagtgggtgagcaatcgaagcccgctgctgaaggcgagaagttcttgccggctgtctga

SEQ ID NO: 34021 - protein, 974 aa, Zea mays
MAAAPPLSADVLSFLTSAPAAPTPVVAAAWGAARAGPVRGKAALRTTRGGRGGVLAPLVGKRPRRTPLSVRCNATSRDGRITQQEFTEMAWQAIVSSPEVAKESKHQIVETEHMMKSLLEQRNGLARRIFSKAGVDNTRLLDATEKFIQRQPKVLGEEPGSMLGRDLEALIQRARDFKKEYGDSYVSVEHLVLGFAEDKRFGKQLFKDFQITVKTLKSAIESIRGKQNVIDQDPEGKYEALEKYGKDLTAMARQGKLDPVIGRDDEIRRCIQILSRRTKNNPVLIGEPGVGKTAIAEGLAQRIVQGDVPQALTNRRLIALDMGALIAGAKYRGEFEDRLKAVLKEVTDSDGQTVLFIDEIHTVVGAGATDSSTDAGNLLKPMLGRGDLRCIGATTLDEYRKYIEKDPALERRFQQVFVDQPSVEDTISILRGLRERYELHHGVRISDSALVAAAVLSDRYISGRFLPDKAIDLVDESAAKLKMEITSKPTALDEIDRAVLKLEMERLSLTNDTDKASRDRLSRLEAELSLLKDKQRQLTEQWEHEKAVMTKIQSIKEEIDRVNVEIQQAEREYDLNRAAELKYGSLNALQRQLQATEKELDEYQSSGKSMLREEVTQDDIAEIVSRWTGIPVSKLKQSDREKLLYLEDELHKRVVGQDPAVKAVAEAIQRSRAGLSDPNRPIASFMFMGPTGVGKTELAKALAAFMFNTEEAVVRIDMSEYMEKHSVSRLIGAPPGYVGYEEGGQLTEAVRRRPYSVVLFDEIEKAHSDVFNVFLQILDDGRVTDSQGRKVSFTNTIIIMTSNVGSQYILNMDEEVGSSDSAYENIKRRVMDAARSVFRPEFMNRVDEYIVFKPLEREQINSIVKLQLARVQKRIADRKIKLEVSPGAIEFLGSLGYDPNYGARPVKRVIQQHVENELAKGILRGDFKDEDSIFVDTQVTVPSNGQLPQQKLVFRKVGEQSKPAAEGEKFLPAV

SEQ ID NO: 34022 - DNA, 2841 bp, Zea mays
  CDS (1)..(2841)
atggaggtgtgctgctgctccacctcgtcgtccgtcctcaccgccgggggccgcggcgccgcggcgcggaggctggccgcgccggcggctcgctggggcgcggcggggtacgggagggcggtggcggcggtgctggcgcacccgctcccgcgcccggcacccaggccggccacgcggcgggcgcgcagggggggcgtcggcgtcgtcagggcggtgttcgagcggttcacggagcgggccgtcaaggcggtcgtgctgtcgcagcgggaggcccgggggctcggggagcccgccgtggcgccgagccacctcctcctcggcctggtcgccgaggaccgatcctcgggcggcttcctctcgtcggggatcaacatcgagcgcgcgcgcgaggagtgccgcggcatcgctgccagtgccagggacgcggactcggccaccgcgacgtctaggcccgggtcgtcggggctcgacacggacgtgcccttcgccgcgcccaccaagcaggtcttcgacgtggccgtcgtgctctccaagaacatgggctccagcttcgtctcgcccgagcacctcgccatcgcactcttctccctcgacgatccaaccaccaacaacctcctaaggagtttgggagcggatcccagtcatctagcatcggttgcagtcgaccgtctccaagcagagcttgcgaaagatggcagagatcctgctgaaccatcatctttcaaagttccaaagaaagcccctgctgcagccggaagatctgccttctcccagtccttgactaaaaagaaagataagggtgcgctggatcaattttgtttggatttgaccacacaagctagtggaggtttcattgatcctattattggccgtgaagaagagattgaaagagtagttcagatagtatgccggcggacgaagaacaaccctattcttttgggtgaggcaggtgttggcaaaactgcaattgccgagggtctggctcttcgaattgcaaatggagatgtccccatttaccttgtggcaaagcgcatattgtcgctagatgtcggtctacttattgctggtgcaaaggagaggggtgaactggagtctagggttactaatataatccgcgaggtccgggaagcaggcgatgttattctttttattgatgaggtccacaaccttattggatctggaactgttggaaagagtaagggttctggtcttgacattggcaacttgctgaagcccgcgcttgctagaggtgaattgcagtgcattgctgctacaactctagatgaacaccggatgcattttgagaaggataaggctttggcccgccgcttccagccagtactagtagatgagcctagtcaggaagatgctgtgaagatattactgggtcttcgtgaaaaatatgaagcttaccataaatgcaaattcacattggaagccatcaatgcagcagtttatttgtcagcaagatacattcctgacagacagcttcctgataaggctattgatctgattgatgaggctggaagtagagctcggatggaatcatttaataggaagaaggaagggcagtcttcgattctcttgaagtcaccagatgaatactggcaagagataagagctgctcaggcgatgcatgaagtggtgttatctaacaaggaaaaatattctccaaatgagaatgctgaagagagtggtagttctaacgttgaagcaccacgccgagacaatattgagtcaacatctacttcatcactctcagctgacgaaccagttgtagttgggacagaggaaattgcaagggttgcctcattatggtctgggataccagtacagcagttgactgctgacgataagaaacttctagtaggactggacgacgaactcagaaaacgtgtcattggccaagatgatgctgttgtggccatatctcgtgcagtgaagagatcacgtgttggccttaacgatcctgatagacctattgctacgctgcttttctgtggtccaacaggagttggtaaaacagagctcaccaaagctctagcagctagttattttggatcggaatctgctatgcttaggttagacatgagcgagtatatggagaggcacactgtgagcaagctcataggctctcctccagggtacattgggtatggtgaaactggtactttgacagaagcagtcaggagaaaaccatttactgtggtattgttggatgagatagagaaagctcaccctgatattttcaacatccttctccaaatatttgaggatggacatttgacagactcacagggtcgcagggtttccttcaaaaatacgttgattgtcatgacttcgaatgttggttcgacatcaatttcaaaaggaagacagagcataggtttcttgaaggaagataccgagtcaggctcatacttcgcaatgaaatccttagtgatggaagagctcaaggcatttttccgtccagagttgctcaatagaatcgacgagatggttgtgttccgtcctctggagaagactcagatgctggccattcttgatatcatcctaaaggaagtcaagggccgacttttggccctcgggataggtttggaggtgtctgatgcaatgaaggacctgatatgccaagagggctacgacaaaagctatggcgctcggcctctgaggagagctgtcacccacattatcgaggatgtcatcagcgaagcgattctttttggcgagttcaagcccggtgacacgatactgatggacatcgatgcagaggggaagccatgcatgggccatctggaccaacagatcgtccaggtctctgacccaacacgggcaatctga

SEQ ID NO: 34023 - protein, 946 aa, Zea mays
MEVCCCSTSSSVLTAGGRGAAARRLAAPAARWGAAGYGRAVAAVLAHPLPRPAPRPATRRARRGGVGVVRAVFERFTERAVKAVVLSQREARGLGEPAVAPSHLLLGLVAEDRSSGGFLSSGINIERAREECRGIAASARDADSATATSRPGSSGLDTDVPFAAPTKQVFDVAVVLSKNMGSSFVSPEHLAIALFSLDDPTTNNLLRSLGADPSHLASVAVDRLQAELAKDGRDPAEPSSFKVPKKAPAAAGRSAFSQSLTKKKDKGALDQFCLDLTTQASGGFIDPIIGREEEIERVVQIVCRRTKNNPILLGEAGVGKTAIAEGLALRIANGDVPIYLVAKRILSLDVGLLIAGAKERGELESRVTNIIREVREAGDVILFIDEVHNLIGSGTVGKSKGSGLDIGNLLKPALARGELQCIAATTLDEHRMHFEKDKALARRFQPVLVDEPSQEDAVKILLGLREKYEAYHKCKFTLEAINAAVYLSARYIPDRQLPDKAIDLIDEAGSRARMESFNRKKEGQSSILLKSPDEYWQEIRAAQAMHEVVLSNKEKYSPNENAEESGSSNVEAPRRDNIESTSTSSLSADEPVVVGTEEIARVASLWSGIPVQQLTADDKKLLVGLDDELRKRVIGQDDAVVAISRAVKRSRVGLNDPDRPIATLLFCGPTGVGKTELTKALAASYFGSESAMLRLDMSEYMERHTVSKLIGSPPGYIGYGETGTLTEAVRRKPFTVVLLDEIEKAHPDIFNILLQIFEDGHLTDSQGRRVSFKNTLIVMTSNVGSTSISKGRQSIGFLKEDTESGSYFAMKSLVMEELKAFFRPELLNRIDEMVVFRPLEKTQMLAILDIILKEVKGRLLALGIGLEVSDAMKDLICQEGYDKSYGARPLRRAVTHIIEDVISEAILFGEFKPGDTILMDIDAEGKPCMGHLDQQIVQVSDPTRAI

SEQ ID NO: 34024 - DNA, 2739 bp, Zea mays
  CDS (1)..(2739)
atgaatccggacaacttcacccacaagacgaacgaggcgatcgtgggggcgcacgagattgcggtggaggccggccacgcgcagctcacgccgctgcacctggccgcagtgctggctgcggacaagggcggcatcctgcggcaggccatcacgggggcgtcggggggcgacggagcggccggggactcgttcgagcgcgtgctgaacaactcgctcaagaagctgccgtcgcagtccccgccgccggactccgtcccggcgtccacggcactgatcaaggtcatccgccgggcgcagtccgcgcagaaaaaacgcggggactcgcacctcgccgtcgaccagctgctgctcggcctgctcgaggactcgcagatctccgactgcctcaaggaggccggcgtgtccgcggcgcgggtgcgcgccgagcttgagaagctccgcggcggggaggggcgccgcgtggagtccgcgtcgggggacaccaacttccaggcgctcaagacatacggccgggacctcgtcgagcaggccgggaagcttgaccccgtcatcggccgcgacgaggagatccgccgcgtggtgcgcatcctctcgcgccgcactaagaacaaccccgtcctcatcggcgagcccggcgttggcaagacggccgtcgtggagggcctcgcgcagcgcatcgttcgcggcgacgtgcccagtaacctcctcgacgtccgcctcatcgcgctcgacatgggcgcgctcgtcgcgggcgccaagtaccgcggcgagttcgaggagcggctcaaggccgtgctcaaggaggtggaagaggccgaggggaaggtcattctcttcatcgacgagatacacctcgtcctgggcgcgggcaggacggagggttccatggacgcggccaacctgttcaagccaatgctggcgaggggacagctcaggtgcatcggcgccaccacgctggaggagtaccgcaagtacgtggagaaggacgcagcgttcgagcggcggttccagcaggtgttcgtcgcggagccgagcgtgcccgataccgtcagcattctgaggggactcaaggagaagtacgaggggcaccatggcgtgaggatccaggaccgcgccctcgtggtcgcggcacagctctccgcgaggtacatcatgggtcggcacctgcctgacaaagccatagacctggtggacgaggcctgcgccaatgtgagggtgcagctcgacagccagccggaagagattgataacctggagaggaagagaatccagcttgaggttgagctccacgcgctcgagaaggagaaggacaaggccagcaaagcccggctgattgaggtcaggaaggaattggacgatctgagggacaagctgcagcccctgaccatgaagtacaggaaggagaaggagagaatcgatgagatcaggaagctgaagcagcgccgcgaggagctccagttcaccctgcaggaggccgagcgccggatggacctggcccgtgtggccgacctcaagtacggcgccctccaggaaatcgacgccgcgatctccaagctggagagcgaaacaggggagaacctgatgctcaccgaaaccgtcggccctgaacaaattgcagaggtggtgagccgttggacgggtattccagtgacccggcttggccagaacgacaaggagaggctggtcggcctggctgacaggcttcaccagagggtggtcggccagacagaggctgtgagcgccgtcgcagaggcggtgctgaggtcgagggccggtcttggcaggccacaacagcccactggctcgttcctcttcctgggtccgactggcgtggggaaaactgagctagccaaggccctagccgaacagctgttcgacgacgagaaccttcttgtccgcatcgacatgtcggagtacatggagcagcactcggttgcccgcctcatcggagcaccacctggctacgtcggccatgaagagggtgggcagctgactgaacaagtgaggaggaggccgtacagcgtgatcctgttcgacgaggtcgagaaggcccatgtcgccgtgttcaacaccctgctccaggtcctcgacgacggcaggctgacggatgggcaaggcaggacggtgaacttcaggaacaccgtgatcatcatgacatcgaaccccggcgccgagcacctcctcgctgggatggtgggcaagaactccatgaaggtcgctcgcgatctggtcatgcaggaggtgaggaggcacttccgccctgagctgctgaaccgtctcgacgagatcgtgatcttcgatcctctgtcccacgagcagctgaggaaggtcgctcgccttcagatgaaggatgtggccgtccgtcttgccgaaaggggcatcgctctggctgtgaccgacgccgcattggacatcatcttgtctctctcttacgatccggtgtacggcgcgcggccaatcaggaggtggatcgagaagagggtggtgacgcagctgtcgaagatgctgatccaggaggagatcgacgagaactgcacggtctacatcgacgccgcgcccggcaaggacgagctggtctacagggtggaccggagcggcggtctggtgaacgctgagacggggatgaagtcggacatcctgatccaggtccccaacagctccaccaggagcgacgctgcgcaggccgtcaagaagatgaggatcatggaggaggacgaggacggcatggacgaggagtaa

SEQ ID NO: 34025 - protein, 912 aa, Zea mays
MNPDNFTHKTNEAIVGAHEIAVEAGHAQLTPLHLAAVLAADKGGILRQAITGASGGDGAAGDSFERVLNNSLKKLPSQSPPPDSVPASTALIKVIRRAQSAQKKRGDSHLAVDQLLLGLLEDSQISDCLKEAGVSAARVRAELEKLRGGEGRRVESASGDTNFQALKTYGRDLVEQAGKLDPVIGRDEEIRRVVRILSRRTKNNPVLIGEPGVGKTAVVEGLAQRIVRGDVPSNLLDVRLIALDMGALVAGAKYRGEFEERLKAVLKEVEEAEGKVILFIDEIHLVLGAGRTEGSMDAANLFKPMLARGQLRCIGATTLEEYRKYVEKDAAFERRFQQVFVAEPSVPDTVSILRGLKEKYEGHHGVRIQDRALVVAAQLSARYIMGRHLPDKAIDLVDEACANVRVQLDSQPEEIDNLERKRIQLEVELHALEKEKDKASKARLIEVRKELDDLRDKLQPLTMKYRKEKERIDEIRKLKQRREELQFTLQEAERRMDLARVADLKYGALQEIDAAISKLESETGENLMLTETVGPEQIAEVVSRWTGIPVTRLGQNDKERLVGLADRLHQRVVGQTEAVSAVAEAVLRSRAGLGRPQQPTGSFLFLGPTGVGKTELAKALAEQLFDDENLLVRIDMSEYMEQHSVARLIGAPPGYVGHEEGGQLTEQVRRRPYSVILFDEVEKAHVAVFNTLLQVLDDGRLTDGQGRTVNFRNTVIIMTSNPGAEHLLAGMVGKNSMKVARDLVMQEVRRHFRPELLNRLDEIVIFDPLSHEQLRKVARLQMKDVAVRLAERGIALAVTDAALDIILSLSYDPVYGARPIRRWIEKRVVTQLSKMLIQEEIDENCTVYIDAAPGKDELVYRVDRSGGLVNAETGMKSDILIQVPNSSTRSDAAQAVKKMRIMEEDEDGMDEE

SEQ ID NO: 34026 - DNA, 2766 bp, Zea mays
  CDS (1)..(2766)
atggagggcgctcttgttcagtctgctattgttccagccgtttacagaagcagctcaggtcggttccgtgtgcgtgcaagggccagaacaaatgctacaatggtgcggaatacgccaacaaggactcttactcttggtggcttccaagggctgcgtcagacaaactttttggatacgaggtctgtaattaagcgtgactttggatcaatcgtggcaagccagattgcaaggccacgcgggtcagcctcaagaggggtggtccgtgccatgtttgagcgcttcactgagaaagcaatcaaggtgattatgcttgcacaggaagaggcaaggcgcctgggacacaacttcgttgggacagaacagattttgctggggcttattggtgagggcacaggaattgcagcgaaggttatgaagtctatgggaatcaatcttaaggatgcccgagtggaagtcgaaaagataattggacgtggcagtgggtttgtggctgttgaaatcccattcacacctcgagcaaaacgtgtattggaattgtcccttgaagaagctcgtcagcttgggcataattatataggatctgaacacttactccttgggctacttcgtgagggtgaaggtgttgctgctcgtgtgcttgaaagccttggtgctgatccaaacaacatccgtacccaggtcataagaatggttggggaaagcacagaagctgttggggctggagttggtggaggaagcagtggccagaagatgcccacacttgaagaatacggtactaatttgacgaaattagcggaagagggcaaattggacccagttgttggtagacaggatcagattgagcgcgttacccagattttaggcaggaggacaaagaacaacccctgcttaattggagagcctggtgttggaaagactgctattgctgaggggcttgctcaacgtatttccaatggtgatgttcccgaaacaattgaaggaaagaaggttattactcttgacatgggcctccttgttgctggaaccaaataccgtggagagtttgaagagagattaaagaaacttatggaggaaattaagcaaaatgaagatattattctctttattgatgaagtgcacacactgattggagcaggtgcagcagaaggtgcgattgatgctgctaatattttgaagccagctcttgcaagaggtgaactgcagtgcattggtgccacaacactggatgagtataggaagcatatagagaaagatcctgccttggaaagaaggtttcaaccagttaaggttcctgagcctactgttgatgaaacaatacagatcttaagagggctccgtgagagatatgaactccatcacaaactgcgatacacagatgatgctttaattgctgctgcacagctgtcttatcagtatatcagtgatcgtttcctgcctgacaaggccattgacttgattgatgaagctggatcccgtgttaggctgaggcatgcccagctccctgatgaagccaaagagctggacaaagagctgcgacagataaccaagcagaaaaacgaggctgtacgcggccaggattttgagaaggctggtgaattaagggaccgagaaatggaactgaaggctcaaattacggccattattgacaagagcaaggaaatgattaaagcagagactgaatctggtgatgtcggtcctcttgttactgaggcagatattcaacatattgtctcctcttggactggaattcctgtggagaaagtgtcgtctgatgagtctgaccgtctcctaaagatggaagagacactgcatacacgtatcattggccaggacgaggctgtcaaagctattagccgtgctatccgccgtgctcgtgttggcctgaagaatccaaataggccaattgccagcttcatattctctggaccaactggagttggcaaatcagagctagcaaaggctctggcagcctactactttggctcagaggaggctatgattaggcttgacatgagtgagttcatggagagacatactgtctccaagcttattggatcacctccaggttatgttgggtacactgagggaggccaactaactgaagcagtccgtcgccgcccatacacagttgttctctttgatgagattgagaaggcacatcctgatgttttcaacatgatgcttcagatattagaagatgggcgattaactgatagcaaggggcgcacagttgacttcaagaacacactattgatcatgacatctaatgtgggaagcagtgtcattgagaaaggaggccgcaagatcgggtttgaccttgactatgatgagaaagacaccagctataacaggatcaagagcctggtgaccgaggagttgaagcagtatttccggccagagttcttgaacagattggatgagatgattgtattccggcagctgactaaattggaggtgaaggagattgctgacattatgctgaaagaagtgtttgacaggctgaaggccaaggagattaatctccaggtcacggagaagttccgagatagagttgttgacgaaggttataacccgagctatggtgccagacctttgcggcgtgctatcatgaggcttctggaggatagtctggcagagaagatgctggctggtgaggtgaaagaaggtgactctgccatcgttgatgtggattcagatggcaaggtgatagtcctgaatggtggtagcggtgttgctgagccactggaacctgctctcagtacctaa

SEQ ID NO: 34027 - protein, 921 aa, Zea mays
MEGALVQSAIVPAVYRSSSGRFRVRARARTNATMVRNTPTRTLTLGGFQGLRQTNFLDTRSVIKRDFGSIVASQIARPRGSASRGVVRAMFERFTEKAIKVIMLAQEEARRLGHNFVGTEQILLGLIGEGTGIAAKVMKSMGINLKDARVEVEKIIGRGSGFVAVEIPFTPRAKRVLELSLEEARQLGHNYIGSEHLLLGLLREGEGVAARVLESLGADPNNIRTQVIRMVGESTEAVGAGVGGGSSGQKMPTLEEYGTNLTKLAEEGKLDPVVGRQDQIERVTQILGRRTKNNPCLIGEPGVGKTAIAEGLAQRISNGDVPETIEGKKVITLDMGLLVAGTKYRGEFEERLKKLMEEIKQNEDIILFIDEVHTLIGAGAAEGAIDAANILKPALARGELQCIGATTLDEYRKHIEKDPALERRFQPVKVPEPTVDETIQILRGLRERYELHHKLRYTDDALIAAAQLSYQYISDRFLPDKAIDLIDEAGSRVRLRHAQLPDEAKELDKELRQITKQKNEAVRGQDFEKAGELRDREMELKAQITAIIDKSKEMIKAETESGDVGPLVTEADIQHIVSSWTGIPVEKVSSDESDRLLKMEETLHTRIIGQDEAVKAISRAIRRARVGLKNPNRPIASFIFSGPTGVGKSELAKALAAYYFGSEEAMIRLDMSEFMERHTVSKLIGSPPGYVGYTEGGQLTEAVRRRPYTVVLFDEIEKAHPDVFNMMLQILEDGRLTDSKGRTVDFKNTLLIMTSNVGSSVIEKGGRKIGFDLDYDEKDTSYNRIKSLVTEELKQYFRPEFLNRLDEMIVFRQLTKLEVKEIADIMLKEVFDRLKAKEINLQVTEKFRDRVVDEGYNPSYGARPLRRAIMRLLEDSLAEKMLAGEVKEGDSAIVDVDSDGKVIVLNGGSGVAEPLEPALST

SEQ ID NO: 34028 - DNA, 20 bp, Artificial sequence
  primer
atggcggtggcttctgcacc

SEQ ID NO: 34029 - DNA, 21 bp, Artificial sequence
  primer
tcagccaaagacgatctcgtc

SEQ ID NO: 34030 - protein, 993 aa, Artificial sequence
  consensus sequence
  Variant (2)..(8): Xaa in position 2 to 8 is any amino acid
  Variant (9)..(14): Xaa in position 9 to 14 is any or no amino acid
  Variant (16)..(23): Xaa in position 16 to 23 is any amino acid
  Variant (24)..(26): Xaa in position 24 to 26 is any or no amino acid
  Variant (28)..(61): Xaa in position 28 to 61 is any amino acid
  Variant (62)..(214): Xaa in position 62 to 214 is any or no amino acid
  Variant (216)..(220): Xaa in position 216 to 220 is any amino acid
  Variant (224)..(225): Xaa in position 224 to 225 is any amino acid
  Variant (227)..(227): Xaa in position 227 is any amino acid
  Variant (228)..(228): Xaa in position 228 is any or no amino acid
  Variant (231)..(231): Xaa in position 231 is any amino acid
  Variant (238)..(239): Xaa in position 238 to 239 is any amino acid
  Variant (242)..(242): Xaa in position 242 is any amino acid
  Variant (244)..(247): Xaa in position 244 to 247 is any amino acid
  Variant (249)..(249): Xaa in position 249 is any amino acid
  Variant (257)..(257): Xaa in position 257 is any amino acid
  Variant (269)..(270): Xaa in position 269 to 270 is any amino acid
  Variant (275)..(275): Xaa in position 275 is any amino acid
  Variant (278)..(279): Xaa in position 278 to 279 is any amino acid
  Variant (281)..(281): Xaa in position 281 is any amino acid
  Variant (284)..(284): Xaa in position 284 is any amino acid
  Variant (285)..(285): Xaa in position 285 is any or no amino acid
  Variant (287)..(292): Xaa in position 287 to 292 is any amino acid
  Variant (293)..(320): Xaa in position 293 to 320 is any or no amino acid
  Variant (323)..(323): Xaa in position 323 is any amino acid
  Variant (325)..(325): Xaa in position 325 is any amino acid
  Variant (327)..(327): Xaa in position 327 is any amino acid
  Variant (330)..(330): Xaa in position 330 is any amino acid
  Variant (332)..(332): Xaa in position 332 is any amino acid
  Variant (342)..(345): Xaa in position 342 to 345 is any amino acid
  Variant (347)..(353): Xaa in position 347 to 353 is any amino acid
  Variant (354)..(358): Xaa in position 354 to 358 is any or no amino acid
  Variant (365)..(365): Xaa in position 365 is any amino acid
  Variant (367)..(369): Xaa in position 367 to 369 is any amino acid
  Variant (373)..(375): Xaa in position 373 to 375 is any amino acid
  Variant (376)..(383): Xaa in position 376 to 383 is any or no amino acid
  Variant (386)..(386): Xaa in position 386 is any amino acid
  Variant (388)..(388): Xaa in position 388 is any amino acid
  Variant (392)..(392): Xaa in position 392 is any amino acid
  Variant (397)..(397): Xaa in position 397 is any amino acid
  Variant (399)..(401): Xaa in position 399 to 401 is any amino acid
  Variant (407)..(407): Xaa in position 407 is any amino acid
  Variant (411)..(412): Xaa in position 411 to 412 is any amino acid
  Variant (413)..(413): Xaa in position 413 is any or no amino acid
  Variant (417)..(417): Xaa in position 417 is any amino acid
  Variant (420)..(420): Xaa in position 420 is any amino acid
  Variant (425)..(425): Xaa in position 425 is any amino acid
  Variant (427)..(427): Xaa in position 427 is any amino acid
  Variant (429)..(429): Xaa in position 429 is any amino acid
  Variant (432)..(435): Xaa in position 432 to 435 is any amino acid
  Variant (437)..(438): Xaa in position 437 to 438 is any amino acid
  Variant (444)..(446): Xaa in position 444 to 446 is any amino acid
  Variant (449)..(449): Xaa in position 449 is any amino acid
  Variant (452)..(452): Xaa in position 452 is any amino acid
  Variant (453)..(453): Xaa in position 453 is any or no amino acid
  Variant (455)..(457): Xaa in position 455 to 457 is any amino acid
  Variant (459)..(459): Xaa in position 459 is any amino acid
  Variant (461)..(463): Xaa in position 461 to 463 is any amino acid
  Variant (466)..(466): Xaa in position 466 is any amino acid
  Variant (469)..(469): Xaa in position 469 is any amino acid
  Variant (473)..(473): Xaa in position 473 is any amino acid
  Variant (474)..(474): Xaa in position 474 is any or no amino acid
  Variant (476)..(476): Xaa in position 476 is any amino acid
  Variant (485)..(485): Xaa in position 485 is any amino acid
  Variant (489)..(499): Xaa in position 489 to 499 is any amino acid
  Variant (501)..(501): Xaa in position 501 is any amino acid
  Variant (502)..(512): Xaa in position 502 to 512 is any or no amino acid
  Variant (514)..(514): Xaa in position 514 is any amino acid
  Variant (515)..(515): Xaa in position 515 is any or no amino acid
  Variant (517)..(517): Xaa in position 517 is any amino acid
  Variant (518)..(652): Xaa in position 518 to 652 is any or no amino acid
  Variant (654)..(657): Xaa in position 654 to 657 is any amino acid
  Variant (659)..(665): Xaa in position 659 to 665 is any amino acid
  Variant (671)..(676): Xaa in position 671 to 676 is any amino acid
  Variant (678)..(680): Xaa in position 678 to 680 is any amino acid
  Variant (682)..(687): Xaa in position 682 to 687 is any amino acid
  Variant (689)..(691): Xaa in position 689 to 691 is any amino acid
  Variant (693)..(693): Xaa in position 693 is any amino acid
  Variant (696)..(697): Xaa in position 696 to 697 is any amino acid
  Variant (699)..(704): Xaa in position 699 to 704 is any amino acid
  Variant (706)..(708): Xaa in position 706 to 708 is any amino acid
  Variant (709)..(709): Xaa in position 709 is any or no amino acid
  Variant (711)..(711): Xaa in position 711 is any amino acid
  Variant (714)..(715): Xaa in position 714 to 715 is any amino acid
  Variant (717)..(718): Xaa in position 717 to 718 is any amino acid
  Variant (720)..(720): Xaa in position 720 is any amino acid
  Variant (721)..(721): Xaa in position 721 is any or no amino acid
  Variant (724)..(724): Xaa in position 724 is any amino acid
  Variant (726)..(726): Xaa in position 726 is any amino acid
  Variant (737)..(737): Xaa in position 737 is any amino acid
  Variant (739)..(739): Xaa in position 739 is any amino acid
  Variant (742)..(744): Xaa in position 742 to 744 is any amino acid
  Variant (746)..(749): Xaa in position 746 to 749 is any amino acid
  Variant (750)..(756): Xaa in position 750 to 756 is any or no amino acid
  Variant (758)..(758): Xaa in position 758 is any amino acid
  Variant (763)..(764): Xaa in position 763 to 764 is any amino acid
  Variant (766)..(766): Xaa in position 766 is any amino acid
  Variant (768)..(768): Xaa in position 768 is any amino acid
  Variant (770)..(771): Xaa in position 770 to 771 is any amino acid
  Variant (773)..(773): Xaa in position 773 is any amino acid
  Variant (775)..(775): Xaa in position 775 is any amino acid
  Variant (782)..(783): Xaa in position 782 to 783 is any amino acid
  Variant (787)..(787): Xaa in position 787 is any amino acid
  Variant (791)..(791): Xaa in position 791 is any amino acid
  Variant (795)..(795): Xaa in position 795 is any amino acid
  Variant (798)..(798): Xaa in position 798 is any amino acid
  Variant (800)..(800): Xaa in position 800 is any amino acid
  Variant (802)..(802): Xaa in position 802 is any amino acid
  Variant (805)..(805): Xaa in position 805 is any amino acid
  Variant (810)..(811): Xaa in position 810 to 811 is any amino acid
  Variant (813)..(813): Xaa in position 813 is any amino acid
  Variant (815)..(816): Xaa in position 815 to 816 is any amino acid
  Variant (819)..(819): Xaa in position 819 is any amino acid
  Variant (821)..(821): Xaa in position 821 is any amino acid
  Variant (824)..(824): Xaa in position 824 is any amino acid
  Variant (828)..(829): Xaa in position 828 to 829 is any amino acid
  Variant (832)..(832): Xaa in position 832 is any amino acid
  Variant (836)..(836): Xaa in position 836 is any amino acid
  Variant (839)..(841): Xaa in position 839 to 841 is any amino acid
  Variant (846)..(846): Xaa in position 846 is any amino acid
  Variant (848)..(854): Xaa in position 848 to 854 is any amino acid
  Variant (855)..(897): Xaa in position 855 to 897 is any or no amino acid
  Variant (899)..(905): Xaa in position 899 to 905 is any amino acid
  Variant (907)..(907): Xaa in position 907 is any amino acid
  Variant (911)..(911): Xaa in position 911 is any amino acid
  Variant (914)..(914): Xaa in position 914 is any amino acid
  Variant (916)..(919): Xaa in position 916 to 919 is any amino acid
  Variant (921)..(922): Xaa in position 921 to 922 is any amino acid
  Variant (924)..(930): Xaa in position 924 to 930 is any amino acid
  Variant (932)..(941): Xaa in position 932 to 941 is any amino acid
  Variant (944)..(962): Xaa in position 944 to 962 is any amino acid
  Variant (963)..(965): Xaa in position 963 to 965 is any or no amino acid
  Variant (967)..(968): Xaa in position 967 to 968 is any amino acid
  Variant (970)..(971): Xaa in position 970 to 971 is any amino acid
  Variant (976)..(977): Xaa in position 976 to 977 is any amino acid
  Variant (979)..(979): Xaa in position 979 is any amino acid
  Variant (981)..(987): Xaa in position 981 to 987 is any amino acid
  Variant (989)..(992): Xaa in position 989 to 992 is any amino acid
TXXXXXXXXXXXXXAXXXXXXXXXXXHXXXXXXXXXXXXXXXXXXXXXXXXXXXXXXXXXXXXXXXXXXXXXXXXXXXXXXXXXXXXXXXXXXXXXXXXXXXXXXXXXXXXXXXXXXXXXXXXXXXXXXXXXXXXXXXXXXXXXXXXXXXXXXXXXXXXXXXXXXXXXXXXXXXXXXXXXXXXXXXXXXXXXXXXXXXXXXXXXXXXXXXXXXXLXXXXXDLTXXAXXGKXDPVIGRXXEIXRXXXXLXRRTKNNPXLIGEPGVGKTAXXEGLAXRIXXGXVPXXLXXXXXXXXXXXXXXXXXXXXXXXXXXXXXXXXXXLDXGXLXAGXKXRGEFEERLKXXXXEXXXXXXXXXXXXILFIDEXHXXXGAGXXXXXXXXXXXDAXNXLKPXLARGXLXXXGATTLXEYRXXXEKDXALXRRFQXVXVXEPXXXXTXXILRGLXXXYEXHHXXVXXXDXAXXXAAXLSXRYIXXRXLPDKAIDLXDEAXXXXXXXXXXXPXXXXXXXXXXXXLXXEXXXXXXXXXXXXXXXXXXXXXXXXXXXXXXXXXXXXXXXXXXXXXXXXXXXXXXXXXXXXXXXXXXXXXXXXXXXXXXXXXXXXXXXXXXXXXXXXXXXXXXXXXXXXXXXXXXXXXXXXXXXXXXXXXXXXXXXXVXXXXIXXXXXXXTGIPVXXXXXXEXXXLXXXXXXLXXXVXGQXXAXXXXXXAXXXXRXGLXXPXXPXXSFXFXGPTGVGKTELXKXLAXXXFXXXXXXXXXXXRXDMSEXXEXHXVXXLXGXPPGYVGXXEGGXLTEXVRRXPYXVXLXDEXEKAHXXVXNXXLQXLXDGXLTDXXGRXVDFXNTXXXMTSNXGXXXXXXXXXXXXXXXXXXXXXXXXXXXXXXXXXXXXXXXXXXXXXXXXXXVXXXXXXXFXPEFXNRXDXXXXFXXLXXXXXXXIXXXXXXXXXXRLXXXXXXXXXXXXXXXXXXXXXXGXXPXXGARPXXRXIXXXXXXXLXXXXL

SEQ ID NO: 34031 - protein, 30 aa, Artificial sequence
  protein pattern
  Variant (2)..(2): Xaa in position 2 is Phe, Ile, Leu or Val
  Variant (7)..(8): Xaa in position 7 to 8 is any amino acid
  Variant (10)..(10): Xaa in position 10 is any amino acid
  Variant (12)..(12): Xaa in position 12 is Ala, Asn, Ser or Thr
  Variant (13)..(13): Xaa in position 13 is any amino acid
  Variant (14)..(14): Xaa in position 14 is Ala or Ser
  Variant (15)..(15): Xaa in position 15 is Lys or Arg
  Variant (16)..(16): Xaa in position 16 is Leu or Met
  Variant (17)..(17): Xaa in position 17 is Ile, Leu, Met or Val
  Variant (19)..(19): Xaa in position 19 is Ala or Ser
  Variant (24)..(24): Xaa in position 24 is Ile, Met or Val
  Variant (26)..(28): Xaa in position 26 to 28 is any amino acid
  Variant (29)..(29): Xaa in position 29 is any or no amino acid
RXDMSEXXEXHXXXXXXGXPPGYXGXXXXG

SEQ ID NO: 34032 - protein, 60 aa, Artificial sequence
  protein pattern
  Variant (4)..(4): Xaa in position 4 is any amino acid
  Variant (5)..(5): Xaa in position 5 is Ile or Val
  Variant (8)..(8): Xaa in position 8 is any amino acid
  Variant (10)..(10): Xaa in position 10 is Phe, His or Tyr
  Variant (11)..(11): Xaa in position 11 is any amino acid
  Variant (12)..(13): Xaa in position 12 to 13 is Ile, Leu or Val
  Variant (15)..(15): Xaa in position 15 is Phe, Leu or Met
  Variant (18)..(18): Xaa in position 18 is any amino acid
  Variant (23)..(23): Xaa in position 23 is any amino acid
  Variant (24)..(24): Xaa in position 24 is Ala, Asp, Glu, Gly or Ser
  Variant (25)..(28): Xaa in position 25 to 28 is any amino acid
  Variant (29)..(29): Xaa in position 29 is Phe, Leu or Met
  Variant (32)..(32): Xaa in position 32 is Ile, Leu, Met or Val
  Variant (33)..(33): Xaa in position 33 is Phe, Leu or Met
  Variant (34)..(35): Xaa in position 34 to 35 is Asp or Glu
  Variant (37)..(37): Xaa in position 37 is any amino acid
  Variant (38)..(38): Xaa in position 38 is Ile, Leu, Met or Val
  Variant (39)..(39): Xaa in position 39 is Ser or Thr
  Variant (41)..(41): Xaa in position 41 is Ala, Gly, Asn or Ser
  Variant (42)..(42): Xaa in position 42 is any amino acid
  Variant (44)..(45): Xaa in position 44 to 45 is any amino acid
  Variant (46)..(46): Xaa in position 46 is Ala, Ile or Val
  Variant (47)..(47): Xaa in position 47 is any amino acid
  Variant (49)..(50): Xaa in position 49 to 50 is any amino acid
  Variant (51)..(51): Xaa in position 51 is Ala, Cys, Ser, Thr or Val
  Variant (52)..(52): Xaa in position 52 is Ile, Leu, Met or Val
  Variant (53)..(53): Xaa in position 53 is Ala, Ile, Leu or Val
  Variant (54)..(54): Xaa in position 54 is Ile or Val
  Variant (55)..(55): Xaa in position 55 is any amino acid
  Variant (57)..(57): Xaa in position 57 is Ser or Thr
  Variant (59)..(59): Xaa in position 59 is any amino acid
  Variant (60)..(60): Xaa in position 60 is Ala or Gly
LTEXXRRXPXXXXLXDEXEKAHXXXXXXXLQXXXXGXXXDXXGXXXXFXXXXXXXTXNXX

SEQ ID NO: 34033 - protein, 57 aa, Artificial sequence
  protein pattern
  Variant (2)..(2): Xaa in position 2 is any amino acid
  Variant (5)..(5): Xaa in position 5 is any amino acid
  Variant (6)..(6): Xaa in position 6 is Ile or Val
  Variant (9)..(11): Xaa in position 9 to 11 is any amino acid
  Variant (12)..(12): Xaa in position 12 is Ile or Val
  Variant (13)..(17): Xaa in position 13 to 17 is any amino acid
  Variant (18)..(18): Xaa in position 18 is Ile or Val
  Variant (20)..(20): Xaa in position 20 is any amino acid
  Variant (22)..(22): Xaa in position 22 is Lys or Arg
  Variant (23)..(23): Xaa in position 23 is any amino acid
  Variant (25)..(25): Xaa in position 25 is Gly, Asn or Ser
  Variant (27)..(27): Xaa in position 27 is Pro or Ser
  Variant (28)..(29): Xaa in position 28 to 29 is any amino acid
  Variant (30)..(30): Xaa in position 30 is Ile, Leu or Val
  Variant (32)..(32): Xaa in position 32 is any amino acid
  Variant (33)..(33): Xaa in position 33 is Ala or Pro
  Variant (35)..(35): Xaa in position 35 is any amino acid
  Variant (39)..(39): Xaa in position 39 is Ala, Ser or Thr
  Variant (40)..(40): Xaa in position 40 is Ile, Leu or Val
  Variant (41)..(41): Xaa in position 41 is any amino acid
  Variant (42)..(42): Xaa in position 42 is Asp or Glu
  Variant (43)..(43): Xaa in position 43 is Ala or Gly
  Variant (44)..(44): Xaa in position 44 is Leu, Met or Val
  Variant (46)..(47): Xaa in position 46 to 47 is any amino acid
  Variant (48)..(48): Xaa in position 48 is Ile, Met or Val
  Variant (49)..(52): Xaa in position 49 to 52 is any amino acid
  Variant (53)..(53): Xaa in position 53 is Ala, Ile or Val
  Variant (55)..(56): Xaa in position 55 to 56 is any amino acid
  Variant (57)..(57): Xaa in position 57 is Ile, Leu, Met or Val
KXDPXXGRXXXXXXXXXXLXRXXKXNXXXXGXXGXGKTXXXXXXAXXXXXXXXPXXX

SEQ ID NO: 34034 - protein, 39 aa, Artificial sequence
  protein pattern
  Variant (3)..(3): Xaa in position 3 is any amino acid
  Variant (5)..(5): Xaa in position 5 is Phe or Leu
  Variant (6)..(6): Xaa in position 6 is Ala or Glu
  Variant (11)..(11): Xaa in position 11 is any amino acid
  Variant (12)..(13): Xaa in position 12 to 13 is any or no amino acid
  Variant (15)..(16): Xaa in position 15 to 16 is any amino acid
  Variant (17)..(18): Xaa in position 17 to 18 is any or no amino acid
  Variant (20)..(20): Xaa in position 20 is Ala, Asp, Gly, Asn, Ser or Thr
  Variant (21)..(23): Xaa in position 21 to 23 is any amino acid
  Variant (24)..(24): Xaa in position 24 is Ala, Ser or Thr
  Variant (25)..(25): Xaa in position 25 is Ile or Val
  Variant (26)..(26): Xaa in position 26 is any amino acid
  Variant (29)..(29): Xaa in position 29 is any amino acid
  Variant (31)..(31): Xaa in position 31 is Ile or Leu
  Variant (32)..(35): Xaa in position 32 to 35 is any amino acid
  Variant (37)..(37): Xaa in position 37 is any amino acid
  Variant (38)..(38): Xaa in position 38 is Phe, His or Tyr
KDXAXXRRFQXXXVXXXXPXXXXXXXILXGXXXXXEXXH

SEQ ID NO: 34035 - protein, 13 aa, Artificial sequence
  protein pattern
  Variant (2)..(2): Xaa in position 2 is Phe, Ile, Leu or Met
  Variant (3)..(3): Xaa in position 3 is Phe or Leu
  Variant (4)..(4): Xaa in position 4 is any amino acid
  Variant (6)..(6): Xaa in position 6 is Pro, Ser or Thr
  Variant (7)..(7): Xaa in position 7 is Ser or Thr
  Variant (12)..(12): Xaa in position 12 is Ser or Thr
FXXXGXXGVGKXE

SEQ ID NO: 34036 - protein, 17 aa, Artificial sequence
  protein pattern
  Variant (2)..(2): Xaa in position 2 is Ala, Gly, Gln, Ser or Thr
  Variant (3)..(3): Xaa in position 3 is any amino acid
  Variant (6)..(6): Xaa in position 6 is Ala, Gly or Ser
  Variant (8)..(8): Xaa in position 8 is any or no amino acid
  Variant (10)..(10): Xaa in position 10 is any or no amino acid
  Variant (13)..(13): Xaa in position 13 is any amino acid
  Variant (15)..(15): Xaa in position 15 is Ala, Gly or Ser
GXXDAXNXLXKPXLXRG

SEQ ID NO: 34037 - protein, 40 aa, Artificial sequence
  protein pattern
  Variant (4)..(6): Xaa in position 4 to 6 is any amino acid
  Variant (7)..(7): Xaa in position 7 is Ile, Leu, Met or Val
  Variant (8)..(9): Xaa in position 8 to 9 is any amino acid
  Variant (10)..(10): Xaa in position 10 is Ala, Asp, Glu, Gly, Asn, Ser or Thr
  Variant (11)..(11): Xaa in position 11 is Asp, Glu or Gln
  Variant (12)..(14): Xaa in position 12 to 14 is any amino acid
  Variant (16)..(16): Xaa in position 16 is Ile, Leu, Met or Val
  Variant (17)..(17): Xaa in position 17 is any amino acid
  Variant (18)..(18): Xaa in position 18 is Ile, Leu or Met
  Variant (19)..(21): Xaa in position 19 to 21 is any amino acid
  Variant (22)..(22): Xaa in position 22 is Ile, Leu or Met
  Variant (23)..(25): Xaa in position 23 to 25 is any amino acid
  Variant (26)..(26): Xaa in position 26 is Ile, Leu or Val
  Variant (27)..(27): Xaa in position 27 is any amino acid
  Variant (30)..(31): Xaa in position 30 to 31 is any amino acid
  Variant (33)..(33): Xaa in position 33 is Ile, Leu or Val
  Variant (34)..(35): Xaa in position 34 to 35 is any amino acid
  Variant (36)..(36): Xaa in position 36 is Ile, Leu or Val
  Variant (37)..(37): Xaa in position 37 is Ala, Cys, Gly, Ser or Thr
  Variant (38)..(38): Xaa in position 38 is any amino acid
  Variant (40)..(40): Xaa in position 40 is Ile or Val
GIPXXXXXXXXXXXLXXXXXXXXXXXXGQXXAXXXXXXAX

SEQ ID NO: 34038 - protein, 19 aa, Artificial sequence
  protein pattern
  Variant (2)..(2): Xaa in position 2 is any amino acid
  Variant (3)..(3): Xaa in position 3 is Asp, Glu, Gly, Asn or Ser
  Variant (5)..(5): Xaa in position 5 is any amino acid
  Variant (6)..(6): Xaa in position 6 is Phe, Leu or Met
  Variant (13)..(13): Xaa in position 13 is Leu or Val
  Variant (14)..(14): Xaa in position 14 is Ile, Met or Val
  Variant (17)..(17): Xaa in position 17 is any or no amino acid
  Variant (19)..(19): Xaa in position 19 is Ala, Cys, Gly or Ser
IXXRXXPDKAIDXXDEXAX

SEQ ID NO: 34039 - protein, 29 aa, Artificial sequence
  protein pattern
  Variant (2)..(4): Xaa in position 2 to 4 is any or no amino acid
  Variant (6)..(6): Xaa in position 6 is Ile, Leu, Met or Val
  Variant (8)..(8): Xaa in position 8 is any amino acid
  Variant (9)..(9): Xaa in position 9 is Leu or Met
  Variant (10)..(10): Xaa in position 10 is any amino acid
  Variant (13)..(13): Xaa in position 13 is Ala, Ser or Thr
  Variant (14)..(15): Xaa in position 14 to 15 is any amino acid
  Variant (16)..(16): Xaa in position 16 is Lys or Arg
  Variant (18)..(18): Xaa in position 18 is Asp or Glu
  Variant (19)..(19): Xaa in position 19 is any amino acid
  Variant (21)..(21): Xaa in position 21 is any amino acid
  Variant (23)..(23): Xaa in position 23 is Phe, Ile, Leu, Met or Val
  Variant (24)..(25): Xaa in position 24 to 25 is any amino acid
  Variant (26)..(27): Xaa in position 26 to 27 is Ile, Leu, Met or Val
  Variant (28)..(28): Xaa in position 28 is any amino acid
  Variant (29)..(29): Xaa in position 29 is Ala, Asp, Glu, Gly or Gln
LXXXDXGXXXAGXXXXGXXEXRXXXXXXX

SEQ ID NO: 34040 - protein, 16 aa, Artificial sequence
  protein pattern
  Variant (2)..(2): Xaa in position 2 is any amino acid
  Variant (3)..(3): Xaa in position 3 is Ala, Asp, Glu, Gly, Asn or Gln
  Variant (4)..(8): Xaa in position 4 to 8 is any amino acid
  Variant (9)..(9): Xaa in position 9 is Phe or Tyr
  Variant (10)..(10): Xaa in position 10 is any amino acid
  Variant (13)..(13): Xaa in position 13 is Phe, Leu, Met or Val
  Variant (14)..(14): Xaa in position 14 is Ile, Leu, Met or Val
VXXXXXXXXXPEXXNR

SEQ ID NO: 34041 - protein, 19 aa, Artificial sequence
  protein pattern
  Variant (2)..(2): Xaa in position 2 is Phe, Trp or Tyr
  Variant (3)..(3): Xaa in position 3 is Asp, Glu, Asn, Gln or Ser
  Variant (4)..(6): Xaa in position 4 to 6 is any amino acid
  Variant (11)..(11): Xaa in position 11 is Ile, Leu, Met or Val
  Variant (12)..(12): Xaa in position 12 is any amino acid
  Variant (14)..(14): Xaa in position 14 is any amino acid
  Variant (15)..(15): Xaa in position 15 is Ile, Leu, Met or Val
  Variant (16)..(18): Xaa in position 16 to 18 is any amino acid
  Variant (19)..(19): Xaa in position 19 is Ile, Leu, Met or Val
GXXXXXGARPXXRXXXXXX

SEQ ID NO: 34042 - protein, 15 aa, Artificial sequence
  protein pattern
  Variant (2)..(2): Xaa in position 2 is any or no amino acid
  Variant (5)..(5): Xaa in position 5 is Ile or Val
  Variant (8)..(8): Xaa in position 8 is any amino acid
  Variant (10)..(10): Xaa in position 10 is any amino acid
  Variant (11)..(12): Xaa in position 11 to 12 is Ile, Leu, Met or Val
  Variant (14)..(14): Xaa in position 14 is any amino acid
IXLFXDEXHXXXGXG

SEQ ID NO: 34043 - protein, 9 aa, Artificial sequence
  protein pattern
  Variant (5)..(5): Xaa in position 5 is any amino acid
  Variant (6)..(6): Xaa in position 6 is Ala, Asp, Glu, Gly, Asn, Ser or Thr
GATTXXEYR

SEQ ID NO: 34044 - DNA, 738 bp, Azotobacter vinelandii
  CDS (1)..(738): transl_table=11
atgacggtccatgcgatcatcggcggtaccggtctgacccaactggaaggactgcgcatccatcagtccctgtcgctggagacgcccttcggcgctccttcggcggacatcctgcgcggcgactacgccggccgcgaggtgctgttcctggctcgccacggccacccgcaccgcattccgccgcatcgggtcaattaccgggccaacctctgggcgctgcgccaggccggcgccacggcgatcctcgcggtcaatgcggtcggcggcattcatgcggcgatgggcaccgggcatttctgcgtgccgcaccagatcgtcgattacaccttcggccgggcgcacacctacttcgaggacgatctcgacaccgtcacccatgtggatttcagccacccctatgacgagaccctgcgccggcggctgatcgcggccctggccgccgagggctgcgccttcagcgggcacggggtctatggctgcacccaggggccgcgcctggagaccgccgccgaggtggtccgcctggagcgggacggctgcgacatcgtcggcatgaccggcatgcccgaggcggtgctggcccgggagctggagctgccctacgcctgcctggcgctggtggtgaatccggcggcgggcaagagcacggcgctgatcaccatggacgacatcgagcgcgccataggcgcgggaatgggcaaggccagggctgtgctggggcgggtcctgacggcctga

SEQ ID NO: 34045 - protein, 245 aa, Azotobacter vinelandii
MTVHAIIGGTGLTQLEGLRIHQSLSLETPFGAPSADILRGDYAGREVLFLARHGHPHRIPPHRVNYRANLWALRQAGATAILAVNAVGGIHAAMGTGHFCVPHQIVDYTFGRAHTYFEDDLDTVTHVDFSHPYDETLRRRLIAALAAEGCAFSGHGVYGCTQGPRLETAAEVVRLERDGCDIVGMTGMPEAVLARELELPYACLALVVNPAAGKSTALITMDDIERAIGAGMGKARAVLGRVLTA

SEQ ID NO: 34046 - DNA, 840 bp, Bombyx mori
  CDS (1)..(840)
atgggcgatgtaagaaaaataaagatcggaattatcggaggttcgggcttcgatgatccgacgcttttcgagaatcaaatcgaaaaggaggtggtcacaccgtttgggagaccctcggacgtactgatagagggtcaaatcaaacgggtccaatgcgttctgctggcacgacacggcagaaaacatcaacttcaacctagcgatgtgaactatcgagctaatatttgggcactgaagcaagtcggctgcactcacatcctcgccacgaccgccactgggtctctagttgaagaatacaggcctggggatctggtcatattggacgatttcattgataggacttggggtcggaagtgcacgttttacgacaacacggaggggggtccgcgcggcgtgtgccacctgcccatgcggccggcgtattgtgggagagcgcgcgccgcactgtacagcgcggccaagtctagggggtactcgtgccatgaaaccggcactgcggttgtcatacagggacccagattctcaagtcgcgccgaaagcttggtccatagacaatggggtggccatcttgtaaacatgacaactgtccctgaggttgtgttagctaaagaagccggcttgagttacgctgccgtggcactagtcacagactacgattgttggagggaaaatgaaaaatccgtctcggtgagcgaagttctggcaacattctcgaagaacgtcaagaaggctgcggatgttatcgtagacgcagttcagatattaggagccgataccgacctccaatacctggacgaccaccaggaactcgtcaaatccgccataatgctcaaggactga

SEQ ID NO: 34047 - protein, 279 aa, Bombyx mori
MGDVRKIKIGIIGGSGFDDPTLFENQIEKEVVTPFGRPSDVLIEGQIKRVQCVLLARHGRKHQLQPSDVNYRANIWALKQVGCTHILATTATGSLVEEYRPGDLVILDDFIDRTWGRKCTFYDNTEGGPRGVCHLPMRPAYCGRARAALYSAAKSRGYSCHETGTAVVIQGPRFSSRAESLVHRQWGGHLVNMTTVPEVVLAKEAGLSYAAVALVTDYDCWRENEKSVSVSEVLATFSKNVKKAADVIVDAVQILGADTDLQYLDDHQELVKSAIMLKD

SEQ ID NO: 34048 - DNA, 798 bp, Pyrococcus abyssi GE5
  CDS (1)..(798): transl_table=11
atggttagggttgcagttataggtggttctggagtctacgactttccggcagagaacaaaagaagcgtgacagttgagactccctatgggaaagtggaagttacgataggtttagttaatggtgaagaggttgcatttctagctagacacggcaaaggacactcaattccgccccataagataaactacagggcaaacatctgggccctatacgagctcggtgttgagaggataatagcaacttccgcagtaggttctatgaacccaaacatgagaccgggagacttcgtgatcttggatcaaataattgacttcaccgtctcgaggcccagaaccttctatgatggtgaggaaagtccccacgataggaaattcgtcgctcacgttgatttcactgagccctactgtccagagataagaagagctcttatagctgctgcaaaagagctttctctcccttaccaccccaggggaacttacgtttgcacggaggggcccagatttgagacggccgctgaaataaaggcctatcgtatcctgggtggggacgtagttggaatgactcaatgtccagaggccatattggctagggaacttgagatttgctacgctaccgttgcgattgttacgaactatgcggctggcataagcgggaagaagttaactcacagtgaagtcgttgaactaatgaacaagaaatccaaggagatagttgccctaataacgaaggccattcctctaattccgaaagagaggaactgtccgtgtaaggatgccctgaagggagctactggataa

SEQ ID NO: 34049 - protein, 265 aa, Pyrococcus abyssi GE5
MVRVAVIGGSGVYDFPAENKRSVTVETPYGKVEVTIGLVNGEEVAFLARHGKGHSIPPHKINYRANIWALYELGVERIIATSAVGSMNPNMRPGDFVILDQIIDFTVSRPRTFYDGEESPHDRKFVAHVDFTEPYCPEIRRALIAAAKELSLPYHPRGTYVCTEGPRFETAAEIKAYRILGGDVVGMTQCPEAILARELEICYATVAIVTNYAAGISGKKLTHSEVVELMNKKSKEIVALITKAIPLIPKERNCPCKDALKGATG

SEQ ID NO: 34050 - DNA, 828 bp, Aeropyrum pernix K1
  CDS (1)..(828): transl_table=11
gtgttcgagattacgcgccccccaggagtaagggctcatgttggtgttataggtggcagcggcctctacgatcctggcattgtagagaaccccgttgaggttaaggtttccacgccttacggtaacccgagcgactttatagtagtgggggatgtagccggggtcaaggtcgccttcctccccaggcacggtagggggcacaggatcccgcctcacgccataaactatagggccaacatatgggcgctcaaggcgcttggggtgaagtgggttatcagcgtcagcgcggtaggaagtttgagggaggactataggccgggcgatttcgtcgttcccgaccagtttatagatatgaccaagaacaggcggcactacacattctacgacggccccgtgactgttcacgtcagcatggccgaccccttctgcgaggacctgaggcagaggctaatagactccggcaggaggctcggctacacagtgcacgagagggggacctacgtctgcatagaaggcccccgcttctcgaccagggcggagagtagggtgtggaaggacgtgttcaaggctgacataataggtatgacgctggtcccggagataaacctcgcctgcgaagcccagctatgctacgccacactagctatggtgacggactatgacgtgtgggcagacaggcccgttactgctgaggaggtggagagagtcatgataagcaatgtcgagagggccaggaggatgctctacgacgtcataccaaagctggcgggagagccggagctggagaggtgcagctgctgccgtgcactcgacaccgcagcaatctag

SEQ ID NO: 34051 - protein, 275 aa, Aeropyrum pernix K1
MFEITRPPGVRAHVGVIGGSGLYDPGIVENPVEVKVSTPYGNPSDFIVVGDVAGVKVAFLPRHGRGHRIPPHAINYRANIWALKALGVKWVISVSAVGSLREDYRPGDFVVPDQFIDMTKNRRHYTFYDGPVTVHVSMADPFCEDLRQRLIDSGRRLGYTVHERGTYVCIEGPRFSTRAESRVWKDVFKADIIGMTLVPEINLACEAQLCYATLAMVTDYDVWADRPVTAEEVERVMISNVERARRMLYDVIPKLAGEPELERCSCCRALDTAAI

SEQ ID NO: 34052 - DNA, 834 bp, Aquifex aeolicus VF5
  CDS (1)..(834): transl_table=11
atgctcggaataataggcggaagcggactctacaacctccccggcataaaggtaaaagaagaggttcaggtaaaaactcccttcggagagccttcctctcccgtggtaatagcggaggtagaaggaaaaaaagtagcctttttagcgagacacggaagggggcatgaatacccccctcacctagtcccttacagggcgaatttatgggctttgagggaagtaggtgttaagagagttctcggaatcagtgcggtcggcggtataaacgaactcttgatgcccggagattttgtggtaatccacgactaccttgactttacgaagaccagaaggtctacctattacgaagggaagttttccgttaaggtggagggagaagacaaggtggctaagctcttgcgggaagggaaggtggttcacgtggacatgagtgaggcttactgtcctgaaatgagaaaagttcttatacaaatcctgaaggagaaaaatttcagatttcacccgaaaggtgtttacgcctgcacggagggaccgcggtttgaaactccatctgagataaagatgttaaaactcctcggtgcggacgttgttggaatgacaggatacccggaggtggcacttgcgagagaactcacgatgtgctacgcgagcctttgcgtggttgcaaaccctgctgcgggaatagcgggatacagactgaccagcaacgaggtcattcaattgatgaagaggaaagaagaagaaataaaggaagtagtgcttaaattcataaaagaacttcccgaaattagaagttgtgattgtgaaaaatctctggagggagctgaggtatga

SEQ ID NO: 34053 - protein, 277 aa, Aquifex aeolicus VF5
MLGIIGGSGLYNLPGIKVKEEVQVKTPFGEPSSPVVIAEVEGKKVAFLARHGRGHEYPPHLVPYRANLWALREVGVKRVLGISAVGGINELLMPGDFVVIHDYLDFTKTRRSTYYEGKFSVKVEGEDKVAKLLREGKVVHVDMSEAYCPEMRKVLIQILKEKNFRFHPKGVYACTEGPRFETPSEIKMLKLLGADVVGMTGYPEVALARELTMCYASLCVVANPAAGIAGYRLTSNEVIQLMKRKEEEIKEVVLKFIKELPEIRSCDCEKSLEGAEV

SEQ ID NO: 34054 - DNA, 795 bp, Mycobacterium tuberculosis H37Rv
  CDS (1)..(795): transl_table=11
atgcacaacaatgggcgcatgctcggagtgatcggcggcagcggcttctacaccttctttgggtcggacacccgcacagtcaattcggacaccccctacggtcaacccagcgccccgatcacgatcggcaccatcggggtgcacgacgtcgcgttcttgccccgccacggcgcccatcaccagtactcggcgcacgccgtgccgtatcgggccaacatgtgggcgctgcgcgcgcttggtgtgcggcgggtcttcgggccgtgtgcggtcggcagcctggaccctgaactcgagcccggcgcggtcgtggtgcccgatcagctggtcgaccgcaccagcggccgcgccgacacctatttcgacttcggcggtgtccatgccgccttcgccgatccgtactgccccacgctgcgggccgcggtgaccggcctgcccggtgttgtcgacggcggcaccatggtggtgatccagggtccgcggttttccacccgcgcggaaagccagtggttcgccgctgccgggtgcaatctggtcaacatgaccggctatcccgaggcggtgctggctcgcgaactcgaattatgctacgcagcaatcgctttggtgacagatgtggatgccggcgtcgctgctggcgatggcgtgaaagccgccgacgtgttcgccgcattcggggagaacatcgaactgctcaaaaggctggtgcgggccgccatcgatcgggtcgccgacgagcgcacgtgcacgcactgtcaacaccacgccggtgttccgttgccgttcgagctgccatga

SEQ ID NO: 34055 - protein, 264 aa, Mycobacterium tuberculosis H37Rv
MHNNGRMLGVIGGSGFYTFFGSDTRTVNSDTPYGQPSAPITIGTIGVHDVAFLPRHGAHHQYSAHAVPYRANMWALRALGVRRVFGPCAVGSLDPELEPGAVVVPDQLVDRTSGRADTYFDFGGVHAAFADPYCPTLRAAVTGLPGVVDGGTMVVIQGPRFSTRAESQWFAAAGCNLVNMTGYPEAVLARELELCYAAIALVTDVDAGVAAGDGVKAADVFAAFGENIELLKRLVRAAIDRVADERTCTHCQHHAGVPLPFELP

SEQ ID NO: 34056 - DNA, 843 bp, Methanothermobacter thermautotrophicus str. Delta H
  CDS (1)..(843): transl_table=11
atgatagggatcattggaggtaccggcatatatgagatggctgaatacgggaggctggagagaagggggtccctcatcaccccctacggcaaaacccctgaaatatccgtattcaaactccacgggcggagggtcgccttcataccaaggcactcaccgggccatgacaaacccccgcacatggtaaactaccgggcgaacatatgggccctcaaagagctgggggtcagacagataatagcaacaaatgctgttgggtctcttaaaaggtccatagggcccggggactttgttgtgcctcatgacttcctcgacttcacgaggtcccgtccatcaaccttctatgatgagaaaacagtgcatgtagacatgacagagccctactgcaggaatatacgttccgccctcagcggatcatcaggtgtggttgatgggggggtgtacgtgtgcaccgagggccccaggtttgaaacacctgcagagataaggatgttccagacccttgggggcaccgtggttggcatgacaggactgccagaggccgtccttgcaagggagcttgagatgtgctatgcaagcatatgcctcgtatccaactatgcggcgtccatttcacccagcaagctcaccatagatgaggtcttcgagattatggatgagaagaagaatgatctcatagacatcattgatgctgcaatcagggacctcaaaacagagcaatcatgtccatgtcagcatgcactcagaggtgccgacgttaataatcatgaggaggagttatatgaaggttttaatgatatctgcaagcccgagaaagaagagcaacaccatgatggtccttga

SEQ ID NO: 34057 - protein, 280 aa, Methanothermobacter thermautotrophicus str. Delta H
MIGIIGGTGIYEMAEYGRLERRGSLITPYGKTPEISVFKLHGRRVAFIPRHSPGHDKPPHMVNYRANIWALKELGVRQIIATNAVGSLKRSIGPGDFVVPHDFLDFTRSRPSTFYDEKTVHVDMTEPYCRNIRSALSGSSGVVDGGVYVCTEGPRFETPAEIRMFQTLGGTVVGMTGLPEAVLARELEMCYASICLVSNYAASISPSKLTIDEVFEIMDEKKNDLIDIIDAAIRDLKTEQSCPCQHALRGADVNNHEEELYEGFNDICKPEKEEQHHDGP

SEQ ID NO: 34058 - DNA, 840 bp, Pyrobaculum aerophilum str. IM2
  CDS (1)..(840): transl_table=11
atggtaaagctgacgaaccccccgaagagtcccaaggagttgggatttgacgaattcccgtctattggcataattggcggtagcggtttgtatgatccgggcatttttgaaaacgcggtggaggtacagatccacacgccatacggcttgccttctgataacgtaatagttggccgcgtcgcggggcgcgtagtggccttcctcccaagacacggacgggggcataaatacccgccgcataaaatcccctaccgtgccaacatttactcgctttatatgctaggcgttaggtctattgtggcggtaagcgccgtgggctccctaaggccggactacgccccgggagacttcgtcgtgcccgatcaatttgtagatatgacgaaagggagggagtatacattttacgacgggcctaggacttgtcacatacaaattggactggagccgtttacccaggagattaggcagatattaattgaaactgcgaaaaagtataacagaactcacgacggcggatgctatgtctgtatagaagggccgaggtttagcacaaaggccgaatctagaatctggcgcgaggtgttcggctgcgatataataggcatgactttagtgcccgaaataaatttagccagagagctcgggatgtgttacggcttaatcgccctcgtaacagattacgatatctgggtcccgcaccagcctgtcaccgccgaggctgttgagaaaatgatgacggagaaattaggaattattaaaaaggtcatcgcagaggccgtgcccaagctacccgccgagttgcctaagtgtagcgagacgttaaaatatgcgtgtgtctaa

SEQ ID NO: 34059 - protein, 279 aa, Pyrobaculum aerophilum str. IM2
MVKLTNPPKSPKELGFDEFPSIGIIGGSGLYDPGIFENAVEVQIHTPYGLPSDNVIVGRVAGRVVAFLPRHGRGHKYPPHKIPYRANIYSLYMLGVRSIVAVSAVGSLRPDYAPGDFVVPDQFVDMTKGREYTFYDGPRTCHIQIGLEPFTQEIRQILIETAKKYNRTHDGGCYVCIEGPRFSTKAESRIWREVFGCDIIGMTLVPEINLARELGMCYGLIALVTDYDIWVPHQPVTAEAVEKMMTEKLGIIKKVIAEAVPKLPAELPKCSETLKYACV

SEQ ID NO: 34060 - DNA, 771 bp, Methanopyrus kandleri AV19
  CDS (1)..(771): transl_table=11
atgaccgaggtaggagtgataggcggcacgggtttccaacccggtctgcccgaacgcaggcggacggtgttcacaccctacggcactgtacgcgtggacatcacccgggtcggagatcatcgagtgtacttcataaaccggcacggtaagggccacgatctgcccccacaccgtatcaactatcgagccatcgtgtgggcgatgcgggagctcggcgtgaaacggatattggcgacgaactccgtcggcgtgatcaactccgacgaatacgagcctggagacatcgtccttccggtggatttcctcgacttcactaagcgcaggccgacgacgttctacgacgagaaggtcgttcacgtcgatgtcaccgaaccctattgtccggagctacgtgaagcgctactgaaggccgcggacgacctagggtacacggtcaaagaaggcgctgtatacgtggccaccgaaggacccaggttcgagacgccggccgagatccgtgccttccggaagctcggcggtgatatcgttggaatgacaggattcccggaggtcgtgctcgccagggagctcgagatctgctacgcctccgtgtgcttgtgcaccaactatgccgctggcatcgacgatcgccgccgcacgatcgatgaggtgttcgagctggtcgaggagctcagaccgaaggcggtggaactaattgagcgttgcatcgagtacattccaccgaaacgatcgtgcccctgctcccaagctttggagggcgccgaggtatga

SEQ ID NO: 34061 - protein, 256 aa, Methanopyrus kandleri AV19
MTEVGVIGGTGFQPGLPERRRTVFTPYGTVRVDITRVGDHRVYFINRHGKGHDLPPHRINYRAIVWAMRELGVKRILATNSVGVINSDEYEPGDIVLPVDFLDFTKRRPTTFYDEKVVHVDVTEPYCPELREALLKAADDLGYTVKEGAVYVATEGPRFETPAEIRAFRKLGGDIVGMTGFPEVVLARELEICYASVCLCTNYAAGIDDRRRTIDEVFELVEELRPKAVELIERCIEYIPPKRSCPCSQALEGAEV

SEQ ID NO: 34062 - DNA, 777 bp, Methanosarcina acetivorans C2A
  CDS (1)..(777): transl_table=11
atggatgaggaagctgaagttgcggaaattgcagtactcggtggggtaggttttaactcccataaggactgcgaaagccatccggtaactactccctatggaagaattactgcatacctgaccagcataaaagggagaagcgttgtaataatccccagacatgctgaagaaatccatatcccgccgcatagagttaattacaggggaaatatctgggctgcccattcccttggtgcaaagcgcgtaatttccacaaattcggtagggtcaatgcgcgggcatcctgttggcagttttgttgtgcttgacgatttcatagattttacccgcagcaggccttcgacctttcatgacgataaaactgtgcatgttgacgtctccgagccttactgtccggaaataagggcctctctcaggtactctctggaaaaaaggggaatttcctataccgaaggagtttacgcctgtacggaaggtccccgttttgagactcgggctgaaatccgcatgatgagccagtttgcagatgttgttggcatgacaggtgtgccggaagtagttcttgcaaaggaactcagcctctgttacgcctctctttccatcgtcacaaaccaggcatgcgggatgaccacgcagaaattaactgctgacgaagtcaccgaagttgtcggaaaggctcaggcctcaatcttcaaaattctctcggatgcgataggaaaaattcctgagacccggaattgcatgtgcagatttgcaaaggaaggagcctgcctttaa

SEQ ID NO: 34063 - protein, 258 aa, Methanosarcina acetivorans C2A
MDEEAEVAEIAVLGGVGFNSHKDCESHPVTTPYGRITAYLTSIKGRSVVIIPRHAEEIHIPPHRVNYRGNIWAAHSLGAKRVISTNSVGSMRGHPVGSFVVLDDFIDFTRSRPSTFHDDKTVHVDVSEPYCPEIRASLRYSLEKRGISYTEGVYACTEGPRFETRAEIRMMSQFADVVGMTGVPEVVLAKELSLCYASLSIVTNQACGMTTQKLTADEVTEVVGKAQASIFKILSDAIGKIPETRNCMCRFAKEGACL

SEQ ID NO: 34064 - DNA, 783 bp, Thermoanaerobacter tengcongensis MB4
  CDS (1)..(783): transl_table=11
atggagaaagctattataggtggtaccggagtgtatgacgtagccgataaagtagttcaaaaaaaggttgaaacgaaatacggaacagtagaggtggacgtggttacagtagaaggagaagatatagtttttttagcacgccatgggaaagagcatggtgttcccccgcatttggtgaactatagagcgaatataatggctttaaagcagcttggagtgaagtacatatatgctacggctgctgtcggttctttaaacgaaaattaccctcctggaagcgtagttattctaaaagattttatagatttcacaaaatccaggcctttgactttttttgagggagaagatgggatagtaaggcatgtagacatgagtgatccttattgtgtaaatttgagaggaaaatttatagaagcggcaaaaaaggaggggcttactgtaaaaggagaagctgtatatgtatgtacggaagggcccagatttgagacagcttctgagataaaggcttataagatgctgggagctgatgtagtaggtatgacaaatgttcctgagatagtcttagctaaagaattgggaatgtgctatgcagccgtcggtataatcacaaactgggctacaggccttatagcggcaagttcaggtcccgtgagtcttagagagattacaagtgcaatagagataaacaaggaaaaggtgataagaacctttataagggtatttactgaagagaccttagaccaggagcactgcaactgtgccaattcagtaattgaattataa

SEQ ID NO: 34065 - protein, 260 aa, Thermoanaerobacter tengcongensis MB4
MEKAIIGGTGVYDVADKVVQKKVETKYGTVEVDVVTVEGEDIVFLARHGKEHGVPPHLVNYRANIMALKQLGVKYIYATAAVGSLNENYPPGSVVILKDFIDFTKSRPLTFFEGEDGIVRHVDMSDPYCVNLRGKFIEAAKKEGLTVKGEAVYVCTEGPRFETASEIKAYKMLGADVVGMTNVPEIVLAKELGMCYAAVGIITNWATGLIAASSGPVSLREITSAIEINKEKVIRTFIRVFTEETLDQEHCNCANSVIEL

SEQ ID NO: 34066 - DNA, 843 bp, Streptomyces coelicolor A3(2)
  CDS (1)..(843): transl_table=11
atggcgaacaaggtgaaggccgagatcggcgtgatcggcggctccgggttctactcgttcctcgacgacgtgaccgaggtccgggtggacaccccgtacgggccgcccagcgactccctcttcctcggcgaggtcgccggccggcgggtcgccttcctcccccggcacggtcgcggccaccatctgccgccgcaccggatcaactaccgggccaacctgtgggcgctgcgttcggtcggcgcacgccaggtcctcggcccgtgtgcggtcggcggcctgcgccccgagtacgggccgggcacgctgctggtgccggaccagttcgtcgaccgcaccaggtcccgcccgtcgacctacttcgacgggctgccgatgcccgacggcacggtgcccaacgtggtgcacgtgtcgctggccgacccgtactgccccaccggccgggccgccgcgctgaaggcggcccgggggcgggagtgggagccggtggacggcggcaccctggtcgtggtcgaggggccccgtttcgggactcgcgcggagtcgctgtggcaccgggcgcagggctggtcggtggtggggatgaccggccacccggaggcggcgctcgcccgcgagctggagctctgctacacctcgctgaccctggtgaccgatctcgacgccggcgcggagagcggcgagggcgtctcgcacgaggaggtgctgcgggtgttcgcggcgaacgtggaccggctgcggggcgtcctgttcgacgcggtggccgcactgccggcgtccggggagcgggactgcccgtgcggggcggcgctgggcgggatggatccggggatcgcgctgccgtag

SEQ ID NO: 34067 - protein, 280 aa, Streptomyces coelicolor A3(2)
MANKVKAEIGVIGGSGFYSFLDDVTEVRVDTPYGPPSDSLFLGEVAGRRVAFLPRHGRGHHLPPHRINYRANLWALRSVGARQVLGPCAVGGLRPEYGPGTLLVPDQFVDRTRSRPSTYFDGLPMPDGTVPNVVHVSLADPYCPTGRAAALKAARGREWEPVDGGTLVVVEGPRFGTRAESLWHRAQGWSVVGMTGHPEAALARELELCYTSLTLVTDLDAGAESGEGVSHEEVLRVFAANVDRLRGVLFDAVAALPASGERDCPCGAALGGMDPGIALP

SEQ ID NO: 34068 - DNA, 789 bp, Streptomyces coelicolor A3(2)
  CDS (1)..(789): transl_table=11
atgcgcataggtgtcatcaccggctccggcagctacgactggccccacctggagggtgcggccgagcggaccgtcgtcaccgaacacggcgcggtcaccgtcaccgaggggcgcctcgggggcgcggagatcgtgcagctgtcccggcacggcaccggccaccaccgcctgtccagccaggtcgaccacaaggcgaacctcgccgctctgctggccgtcgaggcggaggccgtggtgtccttcaccgtctgcggttccctcgaaccggacgtgcggccgggctcgctggtggtcttcgacgacctgtacttccccgccaaccggctgcccgacggcaccccctgcacctggtacgacacccccggcggggccggacgcggccactggatcttcgaccggcccttcagcgagcccctgcgccaggcgctgatcaccgccgccgaccagaccggggtacccgtcgccacacagggcgtgtacgggcacgtcgacggcccccgcttcaacacgcgccccgaggtagccgccctggccgcggccggggtcagtgccatcagccagaccgcaggcccggaggtcgtcctggccggtgaggccgaactgcccatggtcctggtcggtttcgtcaccgactacgccaatggcgtcgcccccgaaccggaaccggtacaggcactgctggaccgcatggcggccagcaaggacgtcttcgccaagctggccgagcacgccctgccttccctgagcgccgtgagcggggccggtttcgtctaccggttcgacacgtga

SEQ ID NO: 34069 - protein, 262 aa, Streptomyces coelicolor A3(2)
MRIGVITGSGSYDWPHLEGAAERTVVTEHGAVTVTEGRLGGAEIVQLSRHGTGHHRLSSQVDHKANLAALLAVEAEAVVSFTVCGSLEPDVRPGSLVVFDDLYFPANRLPDGTPCTWYDTPGGAGRGHWIFDRPFSEPLRQALITAADQTGVPVATQGVYGHVDGPRFNTRPEVAALAAAGVSAISQTAGPEVVLAGEAELPMVLVGFVTDYANGVAPEPEPVQALLDRMAASKDVFAKLAEHALPSLSAVSGAGFVYRFDT

SEQ ID NO: 34070 - DNA, 753 bp, Xanthomonas campestris pv. campestris str. ATCC 33913
  CDS (1)..(753): transl_table=11
gtgtcttccaattccatcgcattggccgtcatcggcggcaccggcgtgtacaagctggcccagctcgaccaggtgcagacgcacgaggtcgacaccccatacggcgcgccgtccggcccgatccgcgtgggcatgctgctcggccatcgcgtggcatttctggccaggcatggcgaaggtcattcgctgccgccgcacaaggtcaactaccgcgcaaacatcgctgcgctgcagcaaattggtgccacccgcgtgctggcgctcaacactgtcggcggtatcaccgattccttcggcccgcgtgtgctggcctgcccggaccagttgatcgactacacctggggccgcatctccaccttttgcgaggaggccggcagcgaggtgcagcatgtggactttggccacccgtattcgccgatgttccgcagcaaggtgatcgccgcggccaaggtgaccggcgtcacgctggtagcgggtggatgctatggcgccacccaggggccgcgattggaaacgattgcagagatcgcgcggatgcgtcgcgacggctgcgatctggtcggcatgaccggcatgcccgaagcagcgctggcacgcgaaaaaggcctggaatatgcgtgtttggcgatcgtggccaactgggcggcgggctgtggcgacgcgcaggaaatcaccatggccgaggtgctgtcgaacgtggatgcggcctcgtccggactgccggagctgattggcgaacttgcacgcgggtga

SEQ ID NO: 34071 - protein, 250 aa, Xanthomonas campestris pv. campestris str. ATCC 33913
MSSNSIALAVIGGTGVYKLAQLDQVQTHEVDTPYGAPSGPIRVGMLLGHRVAFLARHGEGHSLPPHKVNYRANIAALQQIGATRVLALNTVGGITDSFGPRVLACPDQLIDYTWGRISTFCEEAGSEVQHVDFGHPYSPMFRSKVIAAAKVTGVTLVAGGCYGATQGPRLETIAEIARMRRDGCDLVGMTGMPEAALAREKGLEYACLAIVANWAAGCGDAQEITMAEVLSNVDAASSGLPELIGELARG

SEQ ID NO: 34072 - DNA, 753 bp, Xanthomonas axonopodis pv. citri str. 306
  CDS (1)..(753): transl_table=11
gtgtccgcaaattccatcgcattggccgtcatcggcggcacgggtgtctacaagctcgcgcagctggacgatgtgcagtcgcacgacatacaaacgccctacggcgcgccgtccgggccgatccgcgtcggcatgctgctcggccaccgcgtcgccttcctggcacgccatggcgaagggcattcgctgcagccgcacaaggtcaattaccgcgcaaacatcggtgcactgcagcaaatcggcgcatcgcgggtgctggcgctcaacaccgtgggggggatcaccgaacagtttggcccgcgcgtgttggcgtgtccggatcagctgatcgattacacctggggccgcgtgtccacgttctgcgaagagcccggcagcgaggtgcagcatgtggatttcggccacccgtattcgccgatgtttcgcagcaaggtcattgcggctgccaaagtgaccggcgtcacgctggtggccggcggttgctacggcgcaacgcaggggccacgactggaaacggttgcagagatcgcacgcatgcgtcgcgacggctgcgatctggtgggcatgactggcatgcccgaagctgggttggcacgcgaaaaaggcctggaatatgcgtgtttggcgatcgtggccaactgggcggccggttgcggtgacgcgcaggaaatcaccatggccgaggtgttggccaacgtcgatgccgcttcgtccgggttgcccgagctgattggcgaacttgcacgcgggtga

SEQ ID NO: 34073 - protein, 250 aa, Xanthomonas axonopodis pv. citri str. 306
MSANSIALAVIGGTGVYKLAQLDDVQSHDIQTPYGAPSGPIRVGMLLGHRVAFLARHGEGHSLQPHKVNYRANIGALQQIGASRVLALNTVGGITEQFGPRVLACPDQLIDYTWGRVSTFCEEPGSEVQHVDFGHPYSPMFRSKVIAAAKVTGVTLVAGGCYGATQGPRLETVAEIARMRRDGCDLVGMTGMPEAGLAREKGLEYACLAIVANWAAGCGDAQEITMAEVLANVDAASSGLPELIGELARG

SEQ ID NO: 34074 - DNA, 870 bp, Thermosynechococcus elongatus BP-1
  CDS (1)..(870): transl_table=11
atgactgcaaaaattggcattattggcggtagtggtctctacaagatggaggctcttaccgatgttgaagaggtgcgcctgacgacgccctttggtgatccttccgatgcctttatttgcggcaagattggcggggttcccgttgtctttttggcacgccatggccgccaccaccatctactgccgacggagattccctttcgtgccaacatctatggcttcaaatcccttggcgtcgagtacctcctctctgcctcggcagtgggttcgctgcaggaagccgtcaagcccctcgatatcgtggttcccgatcagttcattgaccgcacgcgcaaccgcatttctaccttctttggggacggtattgtggcccacattggctttgctgaccccgtttgccctgccctcgctggggttctggcggatgccattgctgacctgaacctgccggatgtcacccttcaccgccaaggtacctacgtatgtatggaaggccctgccttctcaaccctggcggagtccaatctgtatcgctcttgggggggaacggttattggtatgaccaatctcccggaagcgaagttggctcgtgaagcggagattgcctatgcaaccctagccctcgttaccgactacgactgctggcacccagagcatgactcagtaacggtggagatgattatgggtaacttgcagcgtaacgtcaaaaatgcccaagcgattatctgtgaaaccgtcaaacgtgtccatgcccatccaccggtctctaaggcccatcgtgccttgaagaatgctatcctcactccccttgaccaagtacccgcagctaccaaggagaaactccacttgctcctagccaaatatctctag

SEQ ID NO: 34075 - protein, 289 aa, Thermosynechococcus elongatus BP-1
MTAKIGIIGGSGLYKMEALTDVEEVRLTTPFGDPSDAFICGKIGGVPVVFLARHGRHHHLLPTEIPFRANIYGFKSLGVEYLLSASAVGSLQEAVKPLDIVVPDQFIDRTRNRISTFFGDGIVAHIGFADPVCPALAGVLADAIADLNLPDVTLHRQGTYVCMEGPAFSTLAESNLYRSWGGTVIGMTNLPEAKLAREAEIAYATLALVTDYDCWHPEHDSVTVEMIMGNLQRNVKNAQAIICETVKRVHAHPPVSKAHRALKNAILTPLDQVPAATKEKLHLLLAKYL

SEQ ID NO: 34076 - DNA, 858 bp, Drosophila melanogaster
  CDS (1)..(858)
atggaggcggatttagaagtgcagagcgaacttgagaaggacaccatccccatcaaaattggcataattggagaggccaatttggacaagcccatctacttggcagagcgcatggagtatgcagtatgcacgccgtttggaaaaccatccgatgtgatcatcgatggccagatagaaggcgtcaatgtgtgcctgctatcacgaaatggacgcaaccacgacatcatgcccagcaacattaactatagggcgaatgtgtgggccatgcgcaagatgggctgcacccacatcctggtgaccaacacgttcagttcgctgagggacaccttccagccgggacacttggtggtgccaaatgatgtgatagattatacatccagacgtgctcagaccttttacgacggtgccgtgggtagtccattgggcgtctgtcacgtgcccatgaatccgaccttttgcgaacgcaccaggcagcaccttctgagtgccgccgaagagctgggattccccacgggatccagcggcacggtgctcacactggaaggaccgcgttactccaccgttgccgaaaacaatatgttccgcaagtggggcgccgatctgctgagcatgaccctgtgtcccgaggccattttggccaaggaggcgggcattccgtacgcctcgctgggtctggtcaccaacatggagtgctggtgcgccaagcagccgaacgcaaccactcacgaaatcatctacatctttaagaagcaatccgaaaacctccagaaggtcctgataacggctattcggaatatggctgccgaggattgggccgaggatattctaaaggcaaaggtaatgttgattgcaatgtaa

SEQ ID NO: 34077 - protein, 285 aa, Drosophila melanogaster
MEADLEVQSELEKDTIPIKIGIIGEANLDKPIYLAERMEYAVCTPFGKPSDVIIDGQIEGVNVCLLSRNGRNHDIMPSNINYRANVWAMRKMGCTHILVTNTFSSLRDTFQPGHLVVPNDVIDYTSRRAQTFYDGAVGSPLGVCHVPMNPTFCERTRQHLLSAAEELGFPTGSSGTVLTLEGPRYSTVAENNMFRKWGADLLSMTLCPEAILAKEAGIPYASLGLVTNMECWCAKQPNATTHEIIYIFKKQSENLQKVLITAIRNMAAEDWAEDILKAKVMLIAM

SEQ ID NO: 34078 - DNA, 876 bp, Bradyrhizobium japonicum USDA 110
  CDS (1)..(876): transl_table=11
atgacgcaggcggtattgggcatcatcggtggctccggcatctatgacctgccgggcctcgagggcgcgcacgaagaggtgatcaagagcccgtggggcgagccgtcggcgcccctgcggcgcgggaccatcgcaggcctgccgatcgtgttcctgccgcggcacgacaagggccacaggctgtcgccctccgacatcaactaccgcgccaatatcgacgtgctgaagcgcgccggcgtcaccgacctgatctcgctgtcggcctgcggctcgttcaaggaagagatgccgcccggcaccttcgtgctcgtcgatcaattcgtcgaccgcacccacaagcgcgagagctcgttcttcggccgcggctgcgtcgcgcatgtgtcgatggcccatccggtctcgccgcggctgcgcatccatcttgccgcggcggccgaggccgagggtatcgcaatcgcgcgcggcggcacctatgtctgcatggaggggccgcagttctcgacctatgcggagagcatgacctacaagacatcaggctattccgtgatcggcatgaccaacatgcccgaggcgaagctcgcgcgcgaagcggagatctgctacgccacggtcgcgatggtgacggatttcgactgttggcatcccgaccatgacgccgttaccgtgcaggacatcatccgcgtgctgacctcgaacgccgacaaggcgaaggcgctggtggcgcggctggcaaaggatttcccgcgcgagcatgagccgtgcccgatcggttcggaccgcgcgctcgacaccgcgctgatcactgcgcccgaggcgcgtgatcccgagcttctgaagaagctcgatgccgtagcagggcgcgtgctacgtggctga

SEQ ID NO: 34079 - protein, 291 aa, Bradyrhizobium japonicum USDA 110
MTQAVLGIIGGSGIYDLPGLEGAHEEVIKSPWGEPSAPLRRGTIAGLPIVFLPRHDKGHRLSPSDINYRANIDVLKRAGVTDLISLSACGSFKEEMPPGTFVLVDQFVDRTHKRESSFFGRGCVAHVSMAHPVSPRLRIHLAAAAEAEGIAIARGGTYVCMEGPQFSTYAESMTYKTSGYSVIGMTNMPEAKLAREAEICYATVAMVTDFDCWHPDHDAVTVQDIIRVLTSNADKAKALVARLAKDFPREHEPCPIGSDRALDTALITAPEARDPELLKKLDAVAGRVLRG

SEQ ID NO: 34080 - DNA, 834 bp, Streptomyces avermitilis MA-4680
  CDS (1)..(834): transl_table=11
atggcgaacgcagagatcggtgtcatcggcggctcgggcttctactccttcctcgacgatgtgaccgaggtccagatcgacaccccgtacgggccgcccagcgactccctcttcctcggcgagatcgccggccggcgggtcgccttcctcccccgccacggccgcggccaccatctgccgccgcaccgcatcaactaccgcgccaacctgtgggcgctgcgctccgtcggcgcgcgccaggtgctcggaccgtgcgcggtgggcggcctgcgcgcccagtacgggcccggcacactcctcgtgccggaccagatggtggaccgtacgaaggcccgtgcccagacgtacttcgacgggctgccgctgcccgacgggagcgtgccgaacgtcgtgcacgtctcgctcgccgacccgtactgccccgtcggccgcaaggccgcgctggcggcggcgcgcggccgcgactgggaaccggtggacggcggcacgctggtcgtggtcgagggaccgcggttctccacccgcgccgaatcactgtggcatcaggcgcagggctggtccgtggtgggcatgaccgggcatcccgaggccgcgctcgcccgtgaactggagctgtgctacacgtcgctgacgctggtcaccgacctcgacgcgggtgccgagaccggtcagggcgtctcgcacgaggacgtcctgaaggtgttcgcctcgaacgtggaccggctgcgggatgtgctgttcgacgcggtggcggccctgccggcgaacgacgcgcgggactgcctgtgcacgacggcgctcggcggcatggatccggggttcgagctgccgtag

SEQ ID NO: 34081 - protein, 277 aa, Streptomyces avermitilis MA-4680
MANAEIGVIGGSGFYSFLDDVTEVQIDTPYGPPSDSLFLGEIAGRRVAFLPRHGRGHHLPPHRINYRANLWALRSVGARQVLGPCAVGGLRAQYGPGTLLVPDQMVDRTKARAQTYFDGLPLPDGSVPNVVHVSLADPYCPVGRKAALAAARGRDWEPVDGGTLVVVEGPRFSTRAESLWHQAQGWSVVGMTGHPEAALARELELCYTSLTLVTDLDAGAETGQGVSHEDVLKVFASNVDRLRDVLFDAVAALPANDARDCLCTTALGGMDPGFELP

SEQ ID NO: 34082 - DNA, 747 bp, Nitrosomonas europaea ATCC 19718
  CDS (1)..(747): transl_table=11
atgcttgcaatcatcggtggcagaagtatgaataaacttgccggtctggaagtcacacatcgccaggtcatgagaacaccttacggcgaaccttccggtgcattgatttttggcacgatcggtacacgggaaatcgttttcctgtccagacatggccacggtcttaccattccccctcatgcagtcaactatcgagccaacatctgggtcttgagcacactgaaaatcaaaacgatcattgctgttgcttcagttggcggtattcgcaaagacatggggcccggaaaaattgtcgttcctgatcagatcatcgattacacccacagccgggaagccactttccatggccgttccaatggcacgatcatccatactgatttcacgcagccctactgttcgcagacgcggacaagcctgctgcaggcagcccgggatgcgggtgaatcagtcatcgatggcggtgtctacgctgccacccaaggcccccgattcgagactgctgccgaaatcaatcgcctggagcgagatggtgcagatttagtagggatgacaggtatgccggaagctatccttgccagagagctgggcatttcctatgcgaccattgctgctgttgccaatcatgcagccgggcgcggagaaagcatacaagccattccgctgcaggctgcccatctcgcgctggagaatgcgatgggaagcgtccggaatatactggaacacctggtgaggaactacgatgattaa

SEQ ID NO: 34083 - protein, 248 aa, Nitrosomonas europaea ATCC 19718
MLAIIGGRSMNKLAGLEVTHRQVMRTPYGEPSGALIFGTIGTREIVFLSRHGHGLTIPPHAVNYRANIWVLSTLKIKTIIAVASVGGIRKDMGPGKIVVPDQIIDYTHSREATFHGRSNGTIIHTDFTQPYCSQTRTSLLQAARDAGESVIDGGVYAATQGPRFETAAEINRLERDGADLVGMTGMPEAILARELGISYATIAAVANHAAGRGESIQAIPLQAAHLALENAMGSVRNILEHLVRNYDD

SEQ ID NO: 34084 - DNA, 900 bp, Synechococcus sp. WH 8102
  CDS (1)..(900): transl_table=11
atgcccgacctcagcaacgcccgtgttggtgtcattggcggtagcggtctttacgccattcctgggctcgaccaggcggaggaactgagtctcgacacgccgttcgggcgtccctccgatgttctcaggctagggacactgcaggacatggagacggtgtttcttgcccgtcacggtcgccatcaccagttgttgcctcgcgaggttccttaccaggcgaacatctgggccatgcgtcagctgaacgttcgctggctgatctcagtgtcggcagtggggtcgctgcaggagcacctgcgtccgcgggacatggtggtgccggatcagttcattgatcggacccaacaacgacctcagtcgttctttggtgatggctgcgtcgcccacgtgagcctggcggatccgttctgcccccgattgagcgaactcttggcggaggctgcagcgtcggcgatgccggccggccaccatcttcatcgcggtggcacatacctctgcatggagggccctgcgttctcaacgcgagccgaaagcctgctgtaccgaagctggggatgctccgtgatcggcatgaccaatcacaccgaagcgcgactggcccgggaagctgagctcgcctacgcctctctctcgatggtcaccgacttcgattgctggcacaacgaccatgacgccgtcagcgttgagatggtggtcggcaacctcaaggccaacgccgtggccacggaaccgatcctcaatcgactgatgttgagcctcaatgagcaacgacccagttcagccgcgcacacggcgcttgccgatgctttgatcactgctcctgaacacgtaccccctaagacgcgcgagcgtctaaatctgttcacccgttcctactggggctcattccctcaggattga

SEQ ID NO: 34085 - protein, 299 aa, Synechococcus sp. WH 8102
MPDLSNARVGVIGGSGLYAIPGLDQAEELSLDTPFGRPSDVLRLGTLQDMETVFLARHGRHHQLLPREVPYQANIWAMRQLNVRWLISVSAVGSLQEHLRPRDMVVPDQFIDRTQQRPQSFFGDGCVAHVSLADPFCPRLSELLAEAAASAMPAGHHLHRGGTYLCMEGPAFSTRAESLLYRSWGCSVIGMTNHTEARLAREAELAYASLSMVTDFDCWHNDHDAVSVEMVVGNLKANAVATEPILNRLMLSLNEQRPSSAAHTALADALITAPEHVPPKTRERLNLFTRSYWGSFPQD

SEQ ID NO: 34086 - DNA, 726 bp, Chromobacterium violaceum ATCC 12472
  CDS (1)..(726): transl_table=11
atggcaatcatcggcggcagcggcctggcacagctgcctgtactggacgtcacgcatcgccaggtggtgcgcacgccttacggcgatccttcctgcgcgctgaccttcggcaagctgtccggccagaacgtggtgttcatcgcccgccacggttacggccattcgctggcgccgcacgagatcaattaccgcgccaacctgtgggcgctgcacaaccagggcgtgaagggcgtgatcgccatcggcacggtgggcggcatccgccccgacatggcgccgggacgcctggtcgtgcctcacgacatcatcgactacagctggggacgcaagcatacctatttcgaagggccggagcggccggtggtgcacgccgagttcaccaccccgtatgacgcggacctgcgccggcggctgcgcgaggcgatcaagtccaccggcatcagcggggtgcacgatggcgtgtacgcctgcacccagggaccgaggctggagagcgcggcggagattctcaagctggagcgcgacggcgcggacatcgtcggcatgaccggcatgccggaggccgcgctggcccgtgagctggagctgccttacgcccacttgtgcctggtcagcaactgggcagccggcaagggaaagcaaggcaaggtcgagttcgacccggcggtggccgccaagagcgtgcaggacctgatggatactctgcaggcctgcttcggaagctga

SEQ ID NO: 34087 - protein, 241 aa, Chromobacterium violaceum ATCC 12472
MAIIGGSGLAQLPVLDVTHRQVVRTPYGDPSCALTFGKLSGQNVVFIARHGYGHSLAPHEINYRANLWALHNQGVKGVIAIGTVGGIRPDMAPGRLVVPHDIIDYSWGRKHTYFEGPERPVVHAEFTTPYDADLRRRLREAIKSTGISGVHDGVYACTQGPRLESAAEILKLERDGADIVGMTGMPEAALARELELPYAHLCLVSNWAAGKGKQGKVEFDPAVAAKSVQDLMDTLQACFGS

SEQ ID NO: 34088 - DNA, 900 bp, Gloeobacter violaceus PCC 7421
  CDS (1)..(900): transl_table=11
atgagctatccccaggcccgcatcggggtgatcggcggcagcggtctctaccagatggccgaccttgccgacaccgtcgaagtgcagttcaacaccccctttggtccaccctccgacgccctggtcatcggcaccctcgcaggcgaacgcgtcgcctttctgccccgccacggccgcggccaccggcttttgccggccgagttgccctttcaggcgaacatctacgcgatgaagatgctgggggtggaatatctcctctccgcctcagcggtaggttcgctgcgcgaggagtaccggccgcgcgacatcgtctttccggatcagttttttgaccgcaccaaggaccggccctcgactttttttggtggcggcctggtggcccacatcggcttcgaccagcccatctgcacggaacttgcccacctggcggccgaggcggcgcgcggcgtcgagttgattggcgagacgcgcatccacaccggcggcacctacgtgtgcatggaaggaccggccttctcgactttggctgaatcgcggctctaccgcagctggggcatggacatcatcggcatgactaatctgcaagaggcgaaactcgcccgcgaagcggaaatttgctacgcgacgatggcgctggtcaccgactacgactgctggcaccccgaccacggcgcggtgacggtggagctgattatcgacaacctccacaagaacgccgagaatgcccagcgcatcgtgcgcgctgtggtggaacgcctgcacgcagcagctccgccctgcgccagccactccgccctcaagtacgccctgctcacccaacccgaggacgtaccgcaagccaccaagcaaaagctggctgcgatcctggccaaataccccgcctaccggcccgaggtttag

SEQ ID NO: 34089 - protein, 299 aa, Gloeobacter violaceus PCC 7421
MSYPQARIGVIGGSGLYQMADLADTVEVQFNTPFGPPSDALVIGTLAGERVAFLPRHGRGHRLLPAELPFQANIYAMKMLGVEYLLSASAVGSLREEYRPRDIVFPDQFFDRTKDRPSTFFGGGLVAHIGFDQPICTELAHLAAEAARGVELIGETRIHTGGTYVCMEGPAFSTLAESRLYRSWGMDIIGMTNLQEAKLAREAEICYATMALVTDYDCWHPDHGAVTVELIIDNLHKNAENAQRIVRAVVERLHAAAPPCASHSALKYALLTQPEDVPQATKQKLAAILAKYPAYRPEV

SEQ ID NO: 34090 - DNA, 876 bp, Rhodopseudomonas palustris CGA009
  CDS (1)..(876): transl_table=11
atgactaaggccgtgctcggcattatcggcggctccgggatctatgatttgcccgggctggaagacgtccgagaggaagcgattgagagcccgtggggccagccgtcttccgcggtgcggcgcggcaatatcgccggcctgccgatcgtgttcatgccgcgccacgacaagggccaccggctgtcgccctccgacatcaactatcgcgccaatatcgacgtgctcaagcgcgccggggtcaccgatctgatctcgctgtcggcctgcggctctttcaaggaagagctgccgcccggcaccttcgtgctggtcgatcagttcgtcgaccgtacctacaagcgcgaaagctcgttcttcggtaaaggctgcgtcgcccacgtttcgatggcgcacccggtgagcccgcggctgcgcattcaccttgcggctgcggcggaggcggagggcattccggtggcgcgcggtggcacctatctgtgcatggaagggccccagttctccagctatgcggagagcatgacctacaagcagctcggctattcggtgatcggcatgaccaacatgccggaggccaagctcgcccgcgaggcggaaatctgctacgcgacggtggcgatggtcaccgatttcgactgctggcacccggaccacgacgcggtgacggtgcaggacatcgtccgggttctgacctccaatgccgagaaggccaagagcttggtggcgcgtctggcgcaggacttcccgcgcgagcacgaggagtgcccgatcggctccgaccgcgccctcgacgccgccttcatcaccgcgcccgaagcgcgcgatccggaactgctgaagaaactcgacgcggtggcggcgcgggttctgaaggcgtaa

SEQ ID NO: 34091 - protein, 291 aa, Rhodopseudomonas palustris CGA009
MTKAVLGIIGGSGIYDLPGLEDVREEAIESPWGQPSSAVRRGNIAGLPIVFMPRHDKGHRLSPSDINYRANIDVLKRAGVTDLISLSACGSFKEELPPGTFVLVDQFVDRTYKRESSFFGKGCVAHVSMAHPVSPRLRIHLAAAAEAEGIPVARGGTYLCMEGPQFSSYAESMTYKQLGYSVIGMTNMPEAKLAREAEICYATVAMVTDFDCWHPDHDAVTVQDIVRVLTSNAEKAKSLVARLAQDFPREHEECPIGSDRALDAAFITAPEARDPELLKKLDAVAARVLKA

SEQ ID NO: 34092 - DNA, 783 bp, Mycobacterium avium subsp. paratuberculosis K-10
  CDS (1)..(783): transl_table=11
atgcaccacaatggtcggatgctcggagtcatcggcggcagcggcttctacaccttcttcggatccgacgccgacgacgtcaccgtggataccccgtacgggccgcccagcgccccggtcaccgtcggcgccgtcggcgggcaccgggtggccttcctgccccggcacgaattctccgcgcacaccgtgccgtaccgggccaacctgtgggcgctgcgcaaactcggtgtgcgccgggtgctggcgccgtgcgcggtcggcagcctggtgcccgagctcggcccgggcgccgtcgtggtgcccgaccagctggtcgaccgcacccgcgggcgcgccgacacctatttcgactccggggccgtgcacgtcgacttcgccgacccgtactgcccggcgctgcgcgaggcggtgaccgggctgccgggggtggtcgatggcggcaccatggtggtgatccaggggccgcggttttccacccgcgccgagagccggtggttcgcctcggccgggttctcgctggtgaacatgaccggctacccggaggcggtgctcgcccgggagcttgaaatatgttatgcggcaatcgctttggtcacagatctggatgccggtgtgagcgccggtgagggagtgaaggcggttgaggtgttcgccgagttcgagaagaacatcgagccgttcaagaagctggtgcgcgacgccatcggccgggtcgccgccgagcgcagctgtacgcagtgctcaccgcacaccggggtgagcctgccgatcgagctgccatga

SEQ ID NO: 34093 - protein, 260 aa, Mycobacterium avium subsp. paratuberculosis K-10
MHHNGRMLGVIGGSGFYTFFGSDADDVTVDTPYGPPSAPVTVGAVGGHRVAFLPRHEFSAHTVPYRANLWALRKLGVRRVLAPCAVGSLVPELGPGAVVVPDQLVDRTRGRADTYFDSGAVHVDFADPYCPALREAVTGLPGVVDGGTMVVIQGPRFSTRAESRWFASAGFSLVNMTGYPEAVLARELEICYAAIALVTDLDAGVSAGEGVKAVEVFAEFEKNIEPFKKLVRDAIGRVAAERSCTQCSPHTGVSLPIELP

SEQ ID NO: 34094 - DNA, 852 bp, Nasonia vitripennis
  CDS (1)..(852)
atggccaaacacaagattaaggtcggaatcatcggaggatctggtctcagcgatcccgccaacctcatcttcaagtacaaatcggaaatcccgcaggaggatgccaggaacgagttcggacggccctccagtgcccttcaggagggaaccatcgccggggtcgacgttgtgctgctctctagacatgggcctggccataagataacacccacttccgtcaactatcgggcaaacatcgaatccctccggctggccggctgcacgcacattttagcctctacggcctgcggttccctgtccgagtcgatatcgaggggacaattggtcattccagacagcttcatcgacaggactatacacaggaagggtactttttacgacggcacttctcagaactatcctggcgtctgccatgtgccaatggaaccagccttcgacccgcgcacctctcaagtgctggaggacgcggcagcgaagattggcgctcccgtccggagaggcggcaccattgtatccatagaaggccctcgtttctcatccaaagccgagagcaacatgttccgccaatggggaggacacttgatcaacatgaccacatgtccggaagtcattctggcaaaagaagctggaatgctatacgccgctgttgccattgccaccgactacgattgttggcgagatgccacggataccgtatgcgccgctgacgttttaacagtattcaagaagaatgttggcaaagttactcagttactcgttcaagctgtcgaattgcttggtcaagaaaagtgggacgatcacattgatagtttgaagaatgtgctgaaaaccaacaatgtgtcttcccactga

SEQ ID NO: 34095 - protein, 283 aa, Nasonia vitripennis
MAKHKIKVGIIGGSGLSDPANLIFKYKSEIPQEDARNEFGRPSSALQEGTIAGVDVVLLSRHGPGHKITPTSVNYRANIESLRLAGCTHILASTACGSLSESISRGQLVIPDSFIDRTIHRKGTFYDGTSQNYPGVCHVPMEPAFDPRTSQVLEDAAAKIGAPVRRGGTIVSIEGPRFSSKAESNMFRQWGGHLINMTTCPEVILAKEAGMLYAAVAIATDYDCWRDATDTVCAADVLTVFKKNVGKVTQLLVQAVELLGQEKWDDHIDSLKNVLKTNNVSSH

SEQ ID NO: 34096 - DNA, 960 bp, Magnaporthe grisea 70-15
  CDS (1)..(960)
atgtctgaatctattgagcaagtgctcgccaagctcccaagcgagtacaccaaaaagcccgtccgcattggcgtcatcggcggcacgggcctcagcaagctcgagggtttcaccccggtggctgcgctccacgtgagcacgccgtggggcgagccatcatcgccgatccagatcctcgagcatggcgacatcgccgtggcgttcctgtcgcgccacggcctgcaccaccagctggcgccccacgaggtgcccagccgcgccaacatggccgcccttcgccgcgtcggcgtccgctgcgtcgtcgccttcactgccgtcggcagcctgcaggagcacatcaagcccatggactttgtgctgcccgaccaggccatcgaccgcacaaagggcgtgcgcccttttacatttttcgacggcggcctcgtcggccacgtcggcttcgccgatccctttgatgcaaaggtcgccgccgtcatcaagacctgcgccgacgccatgtcgggtgacggagtcgtgctccacgacaagggcaccgttgtggtcatggagggacctcaattctcgacccgcgccgagtcgcacatgtaccgctcgtggggcggctccgtcatcaacatgtcgaccctgcccgaggccaagctcgcccgcgaggccgagctcgcctaccagcccatctgcatggccaccgactacgactgctggcactcgagcgacgacgtcgacgtcgccatggtcatgggcttcatggctgccaacggcgccaacgccaggcgcctcgtggccgccgtcctagatcgcctggccgaggagcaaaacgccgacatcgtcaacgccaagcacctcgagggcgcatcggtcggcgccgtcaagttcatgaccaagcccgagggccgcagcaaacaggcccttgagaactttgagtttctctttcccggctccgtctctgtcctgaacagctag

SEQ ID NO: 34097 - protein, 319 aa, Magnaporthe grisea 70-15
MSESIEQVLAKLPSEYTKKPVRIGVIGGTGLSKLEGFTPVAALHVSTPWGEPSSPIQILEHGDIAVAFLSRHGLHHQLAPHEVPSRANMAALRRVGVRCVVAFTAVGSLQEHIKPMDFVLPDQAIDRTKGVRPFTFFDGGLVGHVGFADPFDAKVAAVIKTCADAMSGDGVVLHDKGTVVVMEGPQFSTRAESHMYRSWGGSVINMSTLPEAKLAREAELAYQPICMATDYDCWHSSDDVDVAMVMGFMAANGANARRLVAAVLDRLAEEQNADIVNAKHLEGASVGAVKFMTKPEGRSKQALENFEFLFPGSVSVLNS

SEQ ID NO: 34098 - DNA, 924 bp, Gibberella zeae PH-1
  CDS (1)..(924)
atggctgacctcccgactacctttgacaagcctgtccatatcgccgttattggcggtactggtctcggccaactcgaaggcttcgagcctgttgctgccctgaaccctatcacaccatggggtgctcccgcgtcgccgatccagatcctctcacacaagggaggctacgtcgctttccttgcccgccacggtgttcaccaccagtttgctcctcacgaggttcctaaccgtgccaacattgctgctctacgacacattggcgttcgatccattattgctttctccgccgtcggttcgctgcaggaggagatcaagcctatggactttgtgcttcctgaccaggccatcgatcgcacaaagggtgtccgacctttcaccttcttcgagggcggtgtagttggacacgttgggttcgctgatccctttgatgcaggtcttgccaacgttgtcaaggcttgcgcagctcatatggagggcgatggcgtcgtattgcacgataagggcactgtcgttgttatggagggaccacagttttcgactcgtgctgagtcgcacatgtaccgatcctggggcggttcggtcatcaacatgtcgacgcttcccgaagccaagcttgcccgcgaggctgagctagcttaccaggtaatcgccatggccactgactacgactgctggcactcgtttgaggatgtcaacgtcgagttggttttgaagtacatgaaggcaaacaacgagaacgccaagcgcctcgtcgctggcgtgctggatcggctcgccgagctcgaaaacagcgatttggttctagccaagcatttggccggctcttctcaaggagccgtcaagtttatgaccaagcctgcgggccgcaaccccgaggccatgaagaaggttgagtaccttttcccaggtttctgggaagagtaa

SEQ ID NO: 34099 - protein, 307 aa, Gibberella zeae PH-1
MADLPTTFDKPVHIAVIGGTGLGQLEGFEPVAALNPITPWGAPASPIQILSHKGGYVAFLARHGVHHQFAPHEVPNRANIAALRHIGVRSIIAFSAVGSLQEEIKPMDFVLPDQAIDRTKGVRPFTFFEGGVVGHVGFADPFDAGLANVVKACAAHMEGDGVVLHDKGTVVVMEGPQFSTRAESHMYRSWGGSVINMSTLPEAKLAREAELAYQVIAMATDYDCWHSFEDVNVELVLKYMKANNENAKRLVAGVLDRLAELENSDLVLAKHLAGSSQGAVKFMTKPAGRNPEAMKKVEYLFPGFWEE

SEQ ID NO: 34100 - DNA, 966 bp, Yarrowia lipolytica CLIB122
  CDS (1)..(966)
atggctttccttcccaatcttgttgccactccaatgtctcttgccagctcctactccaagcccgtcactctcggtatcatcggtggcaccggtctctataagctcggagctttgacacccgttgctcagatcgacatcgacactccctggggcaagccttcttctcctatcaccatctccgagaccaagtctggtttccctgtggcctttcttgcccgacacggtgtcaatcacgatctgacccccactgacgttccctctcgagccaacattgctgctctcaagaaggtcggagtcaaggccattgttgccttttctgccgttggatctcttcaggaagagattgccccccgagactttgttgtccccactcagatcatcgatcgaaccaagggtattcgaccctcgtctttcttcgagaagggtttcgttggccacgttggattcggagagccatttgacgttgctctgggaaaacttgtggccgagcacgccgacaaggcctttgataactccaagtataagatccacaccaaggccaaggccggaaaggacctgactctcgtctgcatggagggcccggccttttcgacccgagccgagtcacagctctaccgatcgtggaacggagccgttatcaacatgtctgccattcccgaatccaagctcgccaaggaggccgagatcgcctaccagatgatctgcatgagcaccgactacgacgcatggaaggaggacgaggagcctgtcactgttgagcaggttgtctccaacctcactgccaacgccgagtctgctaccggtgttgtcgaggctcttcttgagcccctcgagaaggcccttgctgacaagtccattggctacgatctggacggatccatgaagtttgccgtttccactgctcccgctgctcgagacgcaactgttgccaagaacctcgacttcctgcaccctggctactggtag

SEQ ID NO: 34101 - protein, 321 aa, Yarrowia lipolytica CLIB122
MAFLPNLVATPMSLASSYSKPVTLGIIGGTGLYKLGALTPVAQIDIDTPWGKPSSPITISETKSGFPVAFLARHGVNHDLTPTDVPSRANIAALKKVGVKAIVAFSAVGSLQEEIAPRDFVVPTQIIDRTKGIRPSSFFEKGFVGHVGFGEPFDVALGKLVAEHADKAFDNSKYKIHTKAKAGKDLTLVCMEGPAFSTRAESQLYRSWNGAVINMSAIPESKLAKEAEIAYQMICMSTDYDAWKEDEEPVTVEQVVSNLTANAESATGVVEALLEPLEKALADKSIGYDLDGSMKFAVSTAPAARDATVAKNLDFLHPGYW

SEQ ID NO: 34102 - DNA, 858 bp, Apis mellifera
  CDS (1)..(858)
atgaataagtataaaattaaggtcggaataattggtggttcaggtttaaataatcctcaaaatcagatattaaattgtcaatctataactacacgagaaaaagctaaaaatgaatttggatttccatctagtgatctttatcacggaaatattaatgatgtagatgtgatattattatcaagacacggaccagatcataaaataagtcctactgcagtaaattatcgtgccaatattgaagctttacgcttagctggatgtactcatataattgcatcaacagcatgtggctccttacaagattttatttgtaaaggactattagttgttccagatagctttttagataggacaataaaaagaagtacaactttttatgatggtacttcacctaaatattctggagtatgccatatgccaatggaaccagcttttgatccaactacatctcagatattatttgaagttggtaaagaattaggatatatgataagaaaaggaggaacaattgtgacaatagaaggaccaagattttcttcaaaagctgaaagtaatgcatttcatatgtggggtgggcatttagttaatatgacaacatgtccagaggtatatttagcaaaagaagcaggactcttatatgcagttgtggcagtagctactgattatgattgttggaaagattgtgaagataatgttcatgcagctgatgtaatggaagtatttaaacaaaatattaataaaataagaaatatatttataaaaacagttaaacttattggtgaaagaaattgggacaaagaaattgatactctacaaatattatctcaaagcagtaatgtttcttctcattctttgtga

SEQ ID NO: 34103 - protein, 285 aa, Apis mellifera
MNKYKIKVGIIGGSGLNNPQNQILNCQSITTREKAKNEFGFPSSDLYHGNINDVDVILLSRHGPDHKISPTAVNYRANIEALRLAGCTHIIASTACGSLQDFICKGLLVVPDSFLDRTIKRSTTFYDGTSPKYSGVCHMPMEPAFDPTTSQILFEVGKELGYMIRKGGTIVTIEGPRFSSKAESNAFHMWGGHLVNMTTCPEVYLAKEAGLLYAVVAVATDYDCWKDCEDNVHAADVMEVFKQNINKIRNIFIKTVKLIGERNWDKEIDTLQILSQSSNVSSHSL

SEQ ID NO: 34104 - DNA, 1119 bp, Ustilago maydis 521
  CDS (1)..(1119)
atggcgtgcgcggctggctgctggctgctggctttcacaagtcacgagtgtgagtctggttgcagggcttgtcatactcaccacatgctacctcgagtgtcgttcgtgaccacgtctctccagcaacccaacgtctcgcgctgcatctctgttagaactctacatcgcaggatgtcggtccctactgtcacatcctggaccggtgcgccgattctactcggcgtcattggtgggtcgggactgtacaagctcgactcgatcacgccggttgccgagatatcgatctctacaccttggggttcggcttcgtctccgatcactattgccaagacatctgctggaaaccacgtcgcttttcttgcacgacatggacgcgatcacgctattctgccgtccaacgttccgaacctggccaacattgcggcgctgaagcatctgggtgtgaaagcgattgttgcattttccgcggtgggatcgttgcgagaggagattgcgccgaaagactttgtgatcccgtcacaaatcatcgatcgtaccaaaggtgttcggagggcgagctttttcggatttggcgacgaagagtcggttgtggcgcatgctggattcggcgatccgttctgcgagactctacgaccgatcgtgtactcgactgtgcaagctacgcttgcttcgcacccgatcaaggtgcatacggataagacagtggtgtgtatggaaggaccgcagttctcgacgcgcgcagaatcgctcatgtaccgtacgtggggcggtgacattatcaacatgtcggtcctccccgaagccaagttggcgcgcgaagccgaaattgcctatgtgctcatcgccaccgccaccgactacgatgcctggcgcccctccaccgccgccgtcaacgtcgcagaggtcatggaaagcctcaaagccaatgtggaagccagtaacctcgtcaccaccaaggtcctcgatcgcgtctggctcgaaatcgacaccgacgaaaaacccgccgtcaagaacatcaaagactcgaccaagttcagcatcatgacaaagtcccaagtcatccccgacaaggccaagcagaacttgaggttcttgcacccttggttcgccagagactaa

SEQ ID NO: 34105 - protein, 372 aa, Ustilago maydis 521
MACAAGCWLLAFTSHECESGCRACHTHHMLPRVSFVTTSLQQPNVSRCISVRTLHRRMSVPTVTSWTGAPILLGVIGGSGLYKLDSITPVAEISISTPWGSASSPITIAKTSAGNHVAFLARHGRDHAILPSNVPNLANIAALKHLGVKAIVAFSAVGSLREEIAPKDFVIPSQIIDRTKGVRRASFFGFGDEESVVAHAGFGDPFCETLRPIVYSTVQATLASHPIKVHTDKTVVCMEGPQFSTRAESLMYRTWGGDIINMSVLPEAKLAREAEIAYVLIATATDYDAWRPSTAAVNVAEVMESLKANVEASNLVTTKVLDRVWLEIDTDEKPAVKNIKDSTKFSIMTKSQVIPDKAKQNLRFLHPWFARD

SEQ ID NO: 34106 - DNA, 912 bp, Cryptococcus neoformans var. neoformans B-3501A
  CDS (1)..(912)
atggaaaataacgagaaagtccttgtcggatgtatcggtggcagtggtctttaccaccttgacaacctcacctttgtcaaaaccgttcatattgagactccctggggcaagccttcctctcctataaatatctcctctctcccctccggcgccctcgttgctttcatttcccgtcacggttcccatcacagcatcacccccagcgaggttccttgccgagcaaatatcgccgccctgaagcacatcggatgtgaggctatcattgccttctctgcggtcggttctctgcgagaggaaattgcccctggtcatttcatcatccccgatcagatcatcgacagaaccaagggtatcagagaggacaccttctttaggggagaaggactggtcgtccactccatgttcggtgaaccattcagtcagaaactcaatgctttcgtggctcccagagtggaaaaaatcctgaaggagacaggggacgtcgtcttgcacactggaaaaactgtggtttgcatggagggtcctgccttctctactcgagcggagtctcttatgtatcgacagtggggtggtgacattatcaacatgtccgtcattcctgaagccaagctcgcccgcgaggctgaacttgattacaccctcatctgcacttccacggactttgacgcttggcgaaccggctacgatcccgtgactgtcgaggaagtcgtcaaggtcctccacaccaacgccggcaactcccgtgccgttgctgctggtatcctgcaagatgttcacgatgttgttgtcgaaggcaagaccttgaccgacatcaagggctctatgaagtttgcctgtgtcaccaggaaggatatccaaccagaggcttccaggaagaagctttcttacattctgccttacttctccgattag

SEQ ID NO: 34107 - protein, 303 aa, Cryptococcus neoformans var. neoformans B-3501A
MENNEKVLVGCIGGSGLYHLDNLTFVKTVHIETPWGKPSSPINISSLPSGALVAFISRHGSHHSITPSEVPCRANIAALKHIGCEAIIAFSAVGSLREEIAPGHFIIPDQIIDRTKGIREDTFFRGEGLVVHSMFGEPFSQKLNAFVAPRVEKILKETGDVVLHTGKTVVCMEGPAFSTRAESLMYRQWGGDIINMSVIPEAKLAREAELDYTLICTSTDFDAWRTGYDPVTVEEVVKVLHTNAGNSRAVAAGILQDVHDVVVEGKTLTDIKGSMKFACVTRKDIQPEASRKKLSYILPYFSD

SEQ ID NO: 34108 - DNA, 849 bp, Tribolium castaneum
  CDS (1)..(849)
atgccacgcaaaatcaagatcggcataatcggcggttctggcctcgacaaccccgacattttaaaaaacgctaaaacgaagtcggtcaatacgcccttcggcaagccttccgacgtgttaactttgggccaaatcgagggggttgaatgcgtgctcttggcccggcatggccgcacccacggcataatgcccggcaatataaactacagggccaacatctgggcccttaaagaggaagggtgcacccatgtcatcgccgccactgccaccggctcgctgcaggagcacatcaaaccgggggatttggtgatcttgaacagtttcatcgacaggacacaagggcggaaacaaactttctatgacggggagaaaaaccaccctgtggggatttgccatttgccgatggagccggcgttttgcgaaagaacaagacagttgcttatacagacagcccaaaagctgaattttcctgtccataaaaccgggactgtagtcactattgagggctcccggttttccagcaaggctgaaagtaaaatgttcaggcagtggggtggggatatcatcaatatgacctcagtgccagaggttattttagccaaagaggccggtttgtgttatgccttaattgccttagtcactgattatgattgttggaaagaaaatagagacgaacatgtgactgttgctgatgttcttgccacatttaagaaaaatgtgactaaagttactaaagtgattatggatgtggttcctgcaattgctaaagaagactggaattggactattgacgagcttcaggttgtctcgctttttttcgacttggttcataatagtgttatgaaatag

SEQ ID NO: 34109 - protein, 282 aa, Tribolium castaneum
MPRKIKIGIIGGSGLDNPDILKNAKTKSVNTPFGKPSDVLTLGQIEGVECVLLARHGRTHGIMPGNINYRANIWALKEEGCTHVIAATATGSLQEHIKPGDLVILNSFIDRTQGRKQTFYDGEKNHPVGICHLPMEPAFCERTRQLLIQTAQKLNFPVHKTGTVVTIEGSRFSSKAESKMFRQWGGDIINMTSVPEVILAKEAGLCYALIALVTDYDCWKENRDEHVTVADVLATFKKNVTKVTKVIMDVVPAIAKEDWNWTIDELQVVSLFFDLVHNSVMK

SEQ ID NO: 34110 - DNA, 777 bp, Mycobacterium sp. JLS
  CDS (1)..(777): transl_table=11
atgctgggagtcatcggcggcagcggtttctactcgttcttcggacccgacgcgcgcagcgtcaggctcgacacccccttcggcgccccgagcgcggcgatcacggtcggcaccgtcggtgaccacgaggtcgcgttcctgccccggcacggcgtcgaccacgagttctccccgcacaccgtgccgtaccgggccaacatgtgggcgctgcgcgcgctcggcgtgcggcggatcttcgggccgtgcgcggtcggcagcctcacccccgacctgggcccgggctcgatggtggtgcccgaccaactcgtcgaccgcaccagcggacgcgacgacacctatttcgactccggcggcatccacgtcgacttcgccgatccgtactgcccgacgctgcgcgcggcggccgccggcctgcccggggtcgtcgacgggggcaccatggtggtgatccagggaccgcggttctccacccgcgcggagagcaaatggttcgcgagccagggtttctcgctggtcaacatgaccgggtatcccgaggcggtgctggcgagggaactcgagatgtgttatgccgcaatagctttggtgaccgacctggacgcgggcatcgacagcgaaacggcggtccgggctgtcgacgtgttcgccgagttccagcgaaacctcgtaccgttcaagaaggtggtgcacgaggcgatcgatcaggtcgccgtcgagcggacgtgtgaccactgcctaccgcacgacggtgtgacgctgccgatcgagttgccgtga

SEQ ID NO: 34111 - protein, 258 aa, Mycobacterium sp. JLS
MLGVIGGSGFYSFFGPDARSVRLDTPFGAPSAAITVGTVGDHEVAFLPRHGVDHEFSPHTVPYRANMWALRALGVRRIFGPCAVGSLTPDLGPGSMVVPDQLVDRTSGRDDTYFDSGGIHVDFADPYCPTLRAAAAGLPGVVDGGTMVVIQGPRFSTRAESKWFASQGFSLVNMTGYPEAVLARELEMCYAAIALVTDLDAGIDSETAVRAVDVFAEFQRNLVPFKKVVHEAIDQVAVERTCDHCLPHDGVTLPIELP

SEQ ID NO: 34112 - DNA, 795 bp, Symbiobacterium thermophilum IAM 14863
  CDS (1)..(795): transl_table=11
atgacgcaaaagaaggttcgcctggcgatcatcggcggcaccggggtctacgacccccgcatcctcgagaacatccgggaggaggtcatcaccaccccctacgggcaggccaaggtgcgcatcggcacctacgcgggggaggaggtggccttcatggcccggcacggggtcgatcattccgtgccgccgcacctcatcaactaccgcgccaacatctacgccctgaagatgctgggcgtcgagcgggtcatcgccaccaccgccgtgggctcctgcaaccggaacatgaagcccggcgatttcgtcgtggtcgaccagttcctggacttcaccaagggccgggtctccacgttctttgagggcggggaggccggcgtcgtccacaccgacgtcaccgagccttactgccccgagctccgcaaggtcctgatcgctgcggcgcaggaagtgggggtccacgcgcacccgacgggcacctatgtctgcacggagggcccgcgctttgaaaccgcggccgagatccgcatgtacggccagctcggcggcgacctggtcgggatgaccaacgtgcccgagtgcgtgctggcccgggaggccggcatctgctacgcgaccgtttcgatggtgaccaacttcggcgccggcatctcgcccaatcccctcacccacgaggaggtgctcgaggtgatggccgccaacggcgaaaacctgaagaagctgctgttcgcggcgctgcggcagattcccgccgggcgggggtgcgcctgcggcagcaacacggccctcaaggtctag

SEQ ID NO: 34113 - protein, 264 aa, Symbiobacterium thermophilum IAM 14863
MTQKKVRLAIIGGTGVYDPRILENIREEVITTPYGQAKVRIGTYAGEEVAFMARHGVDHSVPPHLINYRANIYALKMLGVERVIATTAVGSCNRNMKPGDFVVVDQFLDFTKGRVSTFFEGGEAGVVHTDVTEPYCPELRKVLIAAAQEVGVHAHPTGTYVCTEGPRFETAAEIRMYGQLGGDLVGMTNVPECVLAREAGICYATVSMVTNFGAGISPNPLTHEEVLEVMAANGENLKKLLFAALRQIPAGRGCACGSNTALKV

SEQ ID NO: 34114 - DNA, 741 bp, Methylococcus capsulatus str. Bath
  CDS (1)..(741): transl_table=11
atgagcctcaccgcaatcatcggcggcaccggcctgactcggttgacgcacctccaagtccaccgccgtgaatccccggccacaccctatggcgcaccgtcctccgagctgactttcggccggctggccggtcgcgatttcgtattcctggcacgccatggcgacccgcacaccatcccgccccaccggatcaattaccgcgccaacctctgggccctgaaacaggccggcgccgaggccgtcgtcgccgccgccgcggttggcggcatcaggcccgacctttcccccggccgactggccatcccgcaccagatcatcgattacacctgggggcgggccgccaccttcttcgaggaggggctggaccatgtcacccacattgacttcaccaccccttacagcgaaagcctgcgccagaagctcatcgcctcggcccgtgccgccggcctttccgtcgtcgacggcggcgtctatggctgcacccagggaccacggctggagacggcggctgaaatcgcacgaatggaacacgacggctgtgacctcgtcggcatgaccgggatgccggaagccgcgctggcgcgtgaactcgaactaccctacgcggcctgcgcgatcgtggccaactgggctgccggcaagagtgaaggtgaaatcaccttggccgaaatcgagcggcatctggcgcgggggatggccgatttcgtcgcgctgctgacccgcttcgccgagtcctcgtga

SEQ ID NO: 34115 - protein, 246 aa, Methylococcus capsulatus str. Bath
MSLTAIIGGTGLTRLTHLQVHRRESPATPYGAPSSELTFGRLAGRDFVFLARHGDPHTIPPHRINYRANLWALKQAGAEAVVAAAAVGGIRPDLSPGRLAIPHQIIDYTWGRAATFFEEGLDHVTHIDFTTPYSESLRQKLIASARAAGLSVVDGGVYGCTQGPRLETAAEIARMEHDGCDLVGMTGMPEAALARELELPYAACAIVANWAAGKSEGEITLAEIERHLARGMADFVALLTRFAESS

SEQ ID NO: 34116 - DNA, 738 bp, Azoarcus sp. EbN1
  CDS (1)..(738): transl_table=11
atgctcgcaatcattggcggtagcggactcacgcagctttcgacgctcgagatcgcccgccgcgaagtggtacgcaccccttacggagaaccgtccggagcactgttgttcggccgcttgcgcgaacgggcggtggtctttctcgcacgccatggctacggacatacgatcccgccgcatctggtcaattaccgcgcaaacctgtgggcgctgaagcatgtcaaggccacggccctcatctcggtggcctcggtcggcggcatccgcgacgatttcggccccggcgcactggtcgtgcctcaccagatcatcgattacacgtgggggcgcaagagtacgttcttcgaaggtggcgacgagggcgtgcatcacatcgatttcacccatccgtacgacgagccgttgcgccagcggattctcgcggcgggcatggcgacgggggaacacatcgtcaatggcgctgtgtacgctgcgacgcaggggccgcgcctcgagacggccgcggaggtcgaccggctcgagcgcgatggcgcggaactcgtcggcatgaccgggatgcccgaagccgcactcgcccgcgaaatcggtctgccctatgccgcgatcaatgtcatcgcgaactacgccgccgggcgcggcgcgagcgaaaaaggcattctcttcgacagcatcgaagtagtgctgcaggatgcgatggtgcgcgtgcgacgcgtcctcgaggaagtctgcaagtcctga

SEQ ID NO: 34117 - protein, 245 aa, Azoarcus sp. EbN1
MLAIIGGSGLTQLSTLEIARREVVRTPYGEPSGALLFGRLRERAVVFLARHGYGHTIPPHLVNYRANLWALKHVKATALISVASVGGIRDDFGPGALVVPHQIIDYTWGRKSTFFEGGDEGVHHIDFTHPYDEPLRQRILAAGMATGEHIVNGAVYAATQGPRLETAAEVDRLERDGAELVGMTGMPEAALAREIGLPYAAINVIANYAAGRGASEKGILFDSIEVVLQDAMVRVRRVLEEVCKS

SEQ ID NO: 34118 - DNA, 873 bp, Silicibacter pomeroyi DSS-3
  CDS (1)..(873): transl_table=11
atgcgcaacaccaagatcgccgtgatcggcggctccggcatctatgacatcgacgggctggacgcggcggaatgggtcaccgttgaaaccccatggggcgcgccctcggaccagatcctgaccgggcggctcggcggcgtcgacatggcctttctgccccgccacgggcgcggccacgtgcattccccgaccgaggtcccctatcgcgccaatatcgacgcgctgaaacggctgggcgtcaccgacgtgatctcggtctcggcctgcgggtccttccgcgaggcgatggcgccggggcatttcgtaatcgtcgaccagttcatcgaccgcacctttgcgcgcgaaaagagcttctttggcaccggctgcgtcgcccatgtcagcgttgcccatcccacctgcccgcgcctgtcggatgcctgcgagacctctgcccgcgccgccggcgtcaccgtgcatcgcggtggcacctatctggcgatggaggggccgcaattctcgacgctcgcggaatcgaagatgtaccgcgagcactggggctccgatgtgatcggcatgaccaacatgcccgaggcgaaactcgcccgcgaggccgagctttgttatgcctccgtcgcgatggtcaccgattacgacagctggcaccccgatcatggcgaggtggacgtgacccggatcatcgccaccctgatgggcaatgccgacaagggccgcgccatggtcaagggcctgcccgccctcctgggcgccgagcgcgcaccctgcccgcacggctgcgaccgggcgctggagcatgccatcctgaccgcgcccgaggcgcgcgacccggcgctgctttcccggcttgatgcggttgctggccgggtgttgtga

SEQ ID NO: 34119 - protein, 290 aa, Silicibacter pomeroyi DSS-3
MRNTKIAVIGGSGIYDIDGLDAAEWVTVETPWGAPSDQILTGRLGGVDMAFLPRHGRGHVHSPTEVPYRANIDALKRLGVTDVISVSACGSFREAMAPGHFVIVDQFIDRTFAREKSFFGTGCVAHVSVAHPTCPRLSDACETSARAAGVTVHRGGTYLAMEGPQFSTLAESKMYREHWGSDVIGMTNMPEAKLAREAELCYASVAMVTDYDSWHPDHGEVDVTRIIATLMGNADKGRAMVKGLPALLGAERAPCPHGCDRALEHAILTAPEARDPALLSRLDAVAGRVL

SEQ ID NO: 34120 - DNA, 804 bp, Thermococcus kodakarensis KOD1
  CDS (1)..(804): transl_table=11
atgccaaggatagcgataataggcggttctggagtttacgaccccgcacttctaaccaacatcagggaagagaccgttgaaacaccctacggaacggtcaaagtcaagatcggcgagtacaacggcgaggaaatagtatttctcgccaggcacggtgagggacacagcgttccaccgcacaagataaactaccgtgcgaacatctgggccctctacgagctcggcgtcgagaggattctttcgacttcggctgttggttctctcaacctagacatgaagcccggtgacttcgtaatcctcgaccagctcatggactttaccaagaccagacactacaccttctacgacggtgaagaaagcccgcacgatagaaagttcgtggcccatgtggactttactgaaccctactgtcccgagctgaggaaagccctgatgaacgccgccagggagctgggctttacatatcaccccatgggaacttatgcctgcatggaagggccccgctttgagacgagggctgagataagggcgctaaagatcctcggggccgacgtcgttggaatgacccagtgtccggaggcagcactcgcgagggagcttgagatgtgctacgcgagcgttgccatagtcaccaactacgccgctggcataagccccaacaagctcactcacacggaagtggtcgagcttatggcccagaagtccaacgagataaagctcctgctcatgaaggccatcgagtacattccaaaggaaagaaggtgcccctgcaaggatgcactgaagggcgcgaccggtgagtag

SEQ ID NO: 34121 - protein, 267 aa, Thermococcus kodakarensis KOD1
MPRIAIIGGSGVYDPALLTNIREETVETPYGTVKVKIGEYNGEEIVFLARHGEGHSVPPHKINYRANIWALYELGVERILSTSAVGSLNLDMKPGDFVILDQLMDFTKTRHYTFYDGEESPHDRKFVAHVDFTEPYCPELRKALMNAARELGFTYHPMGTYACMEGPRFETRAEIRALKILGADVVGMTQCPEAALARELEMCYASVAIVTNYAAGISPNKLTHTEVVELMAQKSNEIKLLLMKAIEYIPKERRCPCKDALKGATGE

SEQ ID NO: 34122 - DNA, 741 bp, Pseudomonas syringae pv. syringae B728a
  CDS (1)..(741): transl_table=11
atgactgtttacgcgattattggcggtactggcctgacccagctcgaaggcctgaacattcggcaatccctgccgatgaacacgccttatggcgcaccttccggcgaaatccagatcggcgactatgccggtcgcgaagtgatgtttctggcgcgccacggccacccgcaccgcttgccgccgcatcaggtcaactaccgggccaatatctgggccctgaagcaggcaggtgccgaagcgattcttgcggtcaacgcagtcggcggcattcatccggccatgggcaccggtcatttctgtgtgccgcatgatctggtcgactacaccagcggtcgccagcacacattttttgccgatgacctggaagaggtcacgcacatcgacttcagttatccgtacagcgagccactgcgtgcccggctgattgcggcgctggctactgaaggatgcgcgttctctgatcggggcgtttatgcctgtacccagggaccgcgtctggagaccgttgccgaaatcattcgcctggagcgtgatggttgcgacatcgtcggcatgactggcatgcccgaagccgcgctggcgcgtgagctggagcttgaatacgcctgcctggcgctggtggtcaatccggcagcgggcaagtcgaccaccgtcattaccatggcggaaatcgaacaggccttgcgcgacggaatgggcaaggtgaaagccacgcttgcccgggttctgtcagcgtcctga

SEQ ID NO: 34123 - protein, 246 aa, Pseudomonas syringae pv. syringae B728a
MTVYAIIGGTGLTQLEGLNIRQSLPMNTPYGAPSGEIQIGDYAGREVMFLARHGHPHRLPPHQVNYRANIWALKQAGAEAILAVNAVGGIHPAMGTGHFCVPHDLVDYTSGRQHTFFADDLEEVTHIDFSYPYSEPLRARLIAALATEGCAFSDRGVYACTQGPRLETVAEIIRLERDGCDIVGMTGMPEAALARELELEYACLALVVNPAAGKSTTVITMAEIEQALRDGMGKVKATLARVLSAS

SEQ ID NO: 34124 - DNA, 741 bp, Pseudomonas syringae pv. phaseolicola 1448A
  CDS (1)..(741): transl_table=11
atgactgtttacgcgattattggtgggactggcctgacccagctggaaggcctgaacattcggcagtccttgtcgatgaacacgccttatggcgcaccttccggcgaaatccagatcggcgattatgctggtcgcgaagtgatgtttttggcgcggcatggtcatccgcaccgtttgccaccgcatcaggtcaactaccgggccaacatctgggccttgaagcaggctggtgccgaagcgattctggcggtcaatgcggtaggtggcatacatccagcgatgggcaccgggcacttttgcgtgccgcatgatctggtcgactacaccagcggtcgccagcatacgttctttgccgatgatctggaagatgtcacgcacatcgacttcagctatccctacagcgaagcgttacgggcgcggctggttgcagcactggccgctgaagggtgcgagttctctgatcggggtgtctatgcctgtactcaggggccgcgcctggagacggtcgccgaaatcatccgccttgagcgtgatggctgcgacatcatcggcatgactggtatgcccgaggccgctctggcccgtgagctggagctggaatacgcctgcctggcgctggtggtcaatccggcagcgggcaagtcgaccactgtcataaccatggcagaaatcgaacaggccctgcgcgatggtatgggcaaggtaaaagccacgctcgcccgggttctgtcagcctcctga

SEQ ID NO: 34125 - protein, 246 aa, Pseudomonas syringae pv. phaseolicola 1448A
MTVYAIIGGTGLTQLEGLNIRQSLSMNTPYGAPSGEIQIGDYAGREVMFLARHGHPHRLPPHQVNYRANIWALKQAGAEAILAVNAVGGIHPAMGTGHFCVPHDLVDYTSGRQHTFFADDLEDVTHIDFSYPYSEALRARLVAALAAEGCEFSDRGVYACTQGPRLETVAEIIRLERDGCDIIGMTGMPEAALARELELEYACLALVVNPAAGKSTTVITMAEIEQALRDGMGKVKATLARVLSAS

SEQ ID NO: 34126 - DNA, 771 bp, Dechloromonas aromatica RCB
  CDS (1)..(771): transl_table=11
atgctggcaatcattggcggcagcggcctgactacgctgtccaatctcgacgtttcacaccgggaagtcgtccgcaccccttacggcgaagcgtccggcgccctggttttcgggcagatctgtggccagccggcagtcttcctgccgcgccatggctatggccataccatcccgccgcacatggtcaattaccgggccaacatgtgggcgctgcatcaccacaaagtcagcggcgtcatttccgtcgcgtcggtcggtagtattcgtggcgacctgcaaccgggtgacattgtcctgccacaccagatcatcgactatacctggggccgtaaatcgacctttttcgatggcaacggcacgccggtcaatcatatcgatttcaccgatccgtatgacccggaattgcgccgtcgcatccttgaggccggtgagcaactgagcattgacgtcaaggttggcgcagtctacgcagccacccaggggccacgcctcgaaacggcagccgaaatcaaccggctggagcgtgacggagcagatgtggtcggcatgaccggcatgccggaagcagtgctggcgcgcgaactgggtacgccttatgcggcgatcaacgtcgtggccaatcatgcggcgggccgcggcaacagtgccaacggcatccatttcgaaagcctggaacccgtgttgcaggaggcgatgggtcgagtcaaggcgattatcgaaaaactggtgggttgtcagaacaacagccagccgctcggtctgtcggtttaa

SEQ ID NO: 34127 - protein, 256 aa, Dechloromonas aromatica RCB
MLAIIGGSGLTTLSNLDVSHREVVRTPYGEASGALVFGQICGQPAVFLPRHGYGHTIPPHMVNYRANMWALHHHKVSGVISVASVGSIRGDLQPGDIVLPHQIIDYTWGRKSTFFDGNGTPVNHIDFTDPYDPELRRRILEAGEQLSIDVKVGAVYAATQGPRLETAAEINRLERDGADVVGMTGMPEAVLARELGTPYAAINVVANHAAGRGNSANGIHFESLEPVLQEAMGRVKAIIEKLVGCQNNSQPLGLSV

SEQ ID NO: 34128 - DNA, 885 bp, Dehalococcoides sp. CBDB1
  CDS (1)..(885): transl_table=11
atgacacactacgctaaaataggggttatcgggggaacagggctgtatgatattgaggggctgaccgatattcgtgaacataccctggatactccattcggcaagccctcagatattatcgttaccggaaacttaaacggggttggggtggctttcctgcccagacacgggcggggacaccgcatactcccgtctgaaatcccctcccgcgccaatatatatgccctgaaaagcttgggggtggaacacattatagctgtaaactcggttggcagtttcaaaaaagaggttaagccgggacaccttctgatacctgaccagctgatagaccgcaccagccagcgtaccaataccttcttcggcaagggtattgtagcccacatagctttctcccagcccttttgccccaatctgcgtaaactgctgtttgagtgtgccaaggaggcgggtgcaaatgtgcataacggcggcacttatgtggttatggaagggcctgccttttctactcaagctgaaagccgtctccacaaaagctggggggcagatgttatcggcatgactgctctgcctgaagctaaactggcaagagaggccgaaatctgttacgctattatcgcctgtgccacagattacgatgcatggcacgaggaagaagaagccgtaacggtagataaagtaatagccaccctgcgcggcaatataaacctttcaaaagagataataaaactggccatagggcgaatttcttcaaccagaaactgcgaatgcagtaccgccctctcccatgctatcatgacttccccggaggcagtgccaaatacccgtaaacacgagttagctttaataattgataaatacatgcctgcagtgagtgagaatgactaa

SEQ ID NO: 34129 - protein, 294 aa, Dehalococcoides sp. CBDB1
MTHYAKIGVIGGTGLYDIEGLTDIREHTLDTPFGKPSDIIVTGNLNGVGVAFLPRHGRGHRILPSEIPSRANIYALKSLGVEHIIAVNSVGSFKKEVKPGHLLIPDQLIDRTSQRTNTFFGKGIVAHIAFSQPFCPNLRKLLFECAKEAGANVHNGGTYVVMEGPAFSTQAESRLHKSWGADVIGMTALPEAKLAREAEICYAIIACATDYDAWHEEEEAVTVDKVIATLRGNINLSKEIIKLAIGRISSTRNCECSTALSHAIMTSPEAVPNTRKHELALIIDKYMPAVSEND

SEQ ID NO: 34130 - DNA, 762 bp, Thiobacillus denitrificans ATCC 25259
  CDS (1)..(762): transl_table=11
atgttgggaatcatcggcggcactgggttgacccagctcgccaacctcaagatcacgcatcgccgcgtcgcgcgcacgccctacggcgagccttccggcgcgctcacgttcggtcgcctgtgcgaccaggacgtgatctttctcgcgcgccacggctacggccatacgatcccgccgcacgaggtcaattaccgggcgaatctgtgggcgctcaaggagcacggcgtcaaccgcatcgtgtcggtcgccaccgtcggcggcatccatcccgagctcattcccgggacactggtcatccccgaccagatcatcgactacacccacggccgcgacggcacgtttttcgtcgaaggcgaccggcccgtcacccatcgcgacttcacgcagccctactgcgcggcgatgcgcgccgcgctgctgcaggccgcgacgagtgccgacatcagcctgcgcgacggcggcgtctacgcggcggtgcaggggccgcgcctcgaaaccgccgccgagatcaatcgcctggagcgggacggcgccgacatggtcggcatgaccggcatgcccgaagcctatctcgcgtgcgagctcgacctttgctatgccaccgtcggcacggtcgtgaaccatgcggcgggccgcggactttccgccgacggcattcagatggtcgaaatccaggtggtgcttggcgaggtcatgctgcaggtgcgtcatctcctggaacagctcgtgaccaacgactcggccggactctgcaccttctga

SEQ ID NO: 34131 - protein, 253 aa, Thiobacillus denitrificans ATCC 25259
MLGIIGGTGLTQLANLKITHRRVARTPYGEPSGALTFGRLCDQDVIFLARHGYGHTIPPHEVNYRANLWALKEHGVNRIVSVATVGGIHPELIPGTLVIPDQIIDYTHGRDGTFFVEGDRPVTHRDFTQPYCAAMRAALLQAATSADISLRDGGVYAAVQGPRLETAAEINRLERDGADMVGMTGMPEAYLACELDLCYATVGTVVNHAAGRGLSADGIQMVEIQVVLGEVMLQVRHLLEQLVTNDSAGLCTF
